United States Patent Application Publication US 2020/0377945 A1 - sequence listing, part 43

SEQ ID NO: 8514 - DNA, 124080 bp, Unknown
  gut microbiota DNA sequence
tattatcatgtccctctctatggatgtaatacattctgaagaatgctcagtatcttcgataagagattcttcattataaacgaaaactactgcgtactcagatgaaagaggttttgtatggatgattgtattatatagtttgtgtatactctgatcattttcaatagaagccattcttatcctccgtgtgtttttgataatatgtgatttctgttagtgaaagtaactgataactatttattatctgtcacttgtttatgagggctatattttaaaattctgtcgaggatgcttggtggtaagtatatctttttgttttgaaagagcaacatgcgtataaatttctgttacagtaattgaactatgtccgagcatctcttggatgtatctaatatctacatccgcttcaagcagacttgtggcaaatgtatggcgaaacatatgaggcgttatatgtaaatcaatagatgcaagggagcagtactttttaatcatgcgtctgatagcctgatcggaaagctgggtcgcattaggattaacaaagaaatatccactcttgtttatttcggacgaatattcagcttcgtatttttcgagtattaataagacatctttattaccaatctgaatcattctttcttttgcaccttttccatatatgcggattgtagcatcgtacaattcaacatcagaaattttcaagttacacaattcagaaattctcataccggtagaaaataaagtttcacatatagtaatgtcaagaagaatacgcttttttcgaaaggtggtatgggcaagagaaaattccttgtacatggttgtaagtagtctttcaactatgtatagaggaattgtttttggtaatatcacgggttcccgaaactttattttaattttgttgaatgggtttaggtctatgaaatctttatattcgaggaagtgataaaaagattttatcgacgcaagctttcttttggctgttttgggtttgaaattttggtgcagatatcctatatatttttcaatatcaggtatggatatagtatttatgtaagtattgctgaaaaaagaaataaattgatctaaatcagtgcgatatgcctttagtgttttcttatcaagccttttttgtgtttcgcagtattttagatagctttctgtgatagtaaataatgtattcatatgtaagaatctccttttctaaatcttgtgttcaaattaatatatcggagggaatatagatgttaaagcatcgggacataagatacaacgatttaaaaaatgtaacgcagagcttacaattttgtctgcaataggtggtggtttaggaaaatttattttgatataataacagcaaaattaaaaagaggtattttcatggaattaaaggataaattacaacttttaagaaaacagaatggctattcacaggaacaacttgcggataaactgggaattgctcgtcagactcttagcaaatgggaaaacggacaggccgtgccagaattgggtaacttaatttctttgagtaatttgtatggcataactatagaccgaatagtaaaagaagatgatgaatgcaatatttctttgtgtaaaaatgcaagcatggatatcaataagactattgagtttcttcttgtggcaaaaaagaatacctatgcagcagcaaacaacaaagtagattcatgtagaatgaactctcatgattatcgttatcaggataagaatggatttacctatcttgattcctattttgggggagaatgttttgccggtgaggaagtggtatggttatgcgaaaatccagtgtggagcatgaattatgtagggcgtgtgataggagagaactttagtggtgatttcttgaaagaggtgcttatgcaagttccggcagagttgccatttcgtggtccagagatttatacaaaaggagattaccattatcactgcaaagtagatggcgagtttgtatggtttcagggatatgaagaaatattttatatggatgaaaaaatatatgagtgctattttcatggaggagctattcgataatgaatataattgtcaaggaaattgaggtaaaggattatctgacaaaatcaaatctccctgccagtgattatgttattaatccatatgtgggctgtccccatggatgtaaatactgttatgctagcttcatgaaaagatttacagggcacaaggaagaatggggaacattcatagatgtcaaaagatgtacaaaaccgataagcaaaaagaaattaaaaggaaagacggtctttctggcatctgttacagattgttataatttttatgaggaaaaatattgtataacgcaaagtatattaaagcagcttttgaatgtagaatgtacagttagcatttcaacaaagtcatcgctgattttgagagatgtggagttgctaaagcaatttaaggatatatcggtagctatgtctgttaatacactggatgaaagttttaagaatgatatggataaagcaagcagtattgaggcacgaatgaatacgcttaaagtattgcatgaaaacggaattcatacggttttatttatgtcgccgatatttccggcaataacagaatataaggaaattatagaaaagagtaggctgtttgttgatgagtattggtttgaaaatatcaatcttagagggcagtataagacttggatactcagatatataaataaaaatcctcaatatgctgatttgtacaaacagatatatgtggatggaaataaaggatattggaatgaattggcggaagagatagaagcgtattgtgctgaatattctattttacatacaaatttcttttatcatgaaaaacttgtggcacagaaaaagagaaatgaataatacagttagcctgatagagagtatatcatttaggtggtatgctcttttaattttgagcagaattctgatgaaaagcatgatttattatagtataatagaatgtgtaaaaaagcatttgtcatcagggatattttataattgaaaacggagaataattattatggaagaacgaattactttgtgtggagacaactgcatagaatgtccaagatataatgctcacaccgaagcggaattaagaaaagtcgcggaattgtggtatagagtaggttggtgagatacagtggtatctggtaaagaaattgcatgtgcgggatgttcttcacataaggtttgtacatatggattggttgcttgtacagaaaaggatggtgttgaaaaatgcaatcaatgtaaagaatttctgtgttataagattacggatatgttggaacgttcaaagaagtatcaggaaaagtgtaaaatagtgtgttctgaagatgaatatatggcgttagagaaggctttttttgataaagaaaacaatcttatgaagtgaagaagctatagattgcaaattagaaaaagtattggagagccaattatgtttaattatgaaaatttgagtgattatgaatttgaaaatttgtgctgtgatataatatcaaaaaagttaggtgtacaacttcgaatatttgctacaggaagagatggtggaattgatgctacagatgatacaaaaacacataatattgttgtacaggcgaagcattatataagaagtggatatgcagcattattacgcacattacgaggagaggttgagaaggtaaaacagcttgatccaaataaatattatgtttgttgtgcacaaaagttaacaccaggaaatgtaagtgaaatatatgatttattctcggattatatgtgtgatacgaacaatgtgattgatttgaatgttattgatactttcttaagtaagccagaaaatgccgatgttttaagaaagcactataagttgtggttagaatcaacagagattttaaatcaaatatataatagaaatatatttatagattgcgaggttttgttagctgatattgaagaacagagtaagttttttgtagaaacacattattatcaagaaagtataaaagtattggataaaaatcgaatattaatgcttttgggtcttccgggagtgggaaaaacgataacaacgaaaatggttgccctttattatgcttctcaaggatatcaagtaagatttactaccgatggaagtattatggatttaaagaagtcaatttctgaatctgaagaggaaaaagaactcattatattagatgactgtctgggacaagcatattttaaaatgaaagagaatcaggaaaatgaattgatttctttaattaaatatgtctctcgtcatattaataagaaaattattatgaattctcgaatcacaatttataacgaagcaaaagaacattctggtttgtttgcagatttttttgatgacaaagaaagtctcataaaatgcattgatatgaataatctttcgatagagaataaagggaagattttctttaatcatttatattttaaagatgtttctacagaatattataataatattataatgaataaaacatatcagagaattgtaaggcacgttaattattgtccgcgaataatagaatttgtaacaaaaaggaaacattacgaaagtgtaccaccagagaattatgcaaattatttacttggctgtctagataggcctgatgaagtgtggaaggaagaatttagatttcgtatacaacaagaagataggcttcttttaacaacgatgttttcccttacagatactatagttaagagcgatattttaaatcgcgcttataatgaaagaataaaaaatatacccaatctagatgttactcaaaattattacgagaattcactaaggcgaatgaatgggtctatgattaaacttgtagataaagaaaaccaagtctgggttggagctgctaatccatctgtaaatgattttttgagggaaatacttataagaaattctctcgaatatgaagatataaaagagcattgtacagaatatgttcaaatattgaagctttttccccaatatattggagatctgattctcaatggtagagcagaaaaattgcattatgtgtctaaacaggagaaatatgcggttattctttctcatatttgtacaaataggatatatagtgaaggatgcaaaagtatcatatgtgattatttgcgggaattagttccatttcgtattgatggaaaggtttcgtacatagaagtgatttgtacattgttgtcaggtgaaatgaatcaatattattctacaaaacaggcattggatgatgtggcattaataaaactatttgcagatatggatatgaatgagtttgcagaaatgcttaagtttttcaaggtctataatattgattttgaggatgataatatagacaatattatggtggaagaagtaaatagatccatactggattattgcaaaaatgttccgggagaggactattacgaagaatatgatatgaaggtcataatagaggaatgttcaaagacgatagatgtggttcatcattgtagtaatggagatttgtacgttgatcaagaatatgaacttgattatgatgttgctcatcaaatggtttacgcatatgttgttgatgacataaaagaagaaatattaactaaatttgaagtaatcccatctagatttgaatcaagaatattacttgttcctcaagaaaaagagtttgaaattgatttgagttcattggaaggatatatagaaggacaattagaaccaatggaaccggattatgatgattatgagccagactatagcgggcgagcttatgcggaagatgcgttggattgtatctttagggatggtgccatataaaagtctacaatggtatgggatggatggcaggattttacaagaaaggagttgcaggatttgagaaatttaattatttatcgcccattgacggcaactccattcaaaagaaatagcttttatacggaaaatccatcttcaaaagaattacaatcctatatcagatgctattggggaacagaaaaaccacttatacaaattgaaaatgatgatgctcctgaattagtaattccggatacttgtgtggatattatttatcatatagattataccgataataccgtaaccggaggattctgtgggataaatgattgcagtttccatgcacataatagcggaactatagggcatatggtatcaacatttgcaattcgtttttatgcgtggaaagcatatgcatttgctgatgtttctatgcaatgtaccgtgaatggatatttcgatgtgggttcgaggtttgaatggttggataagattattcgtcccaaacagttggagctgaagactttacaggaaaagatttcttttaccgaacaagtattgcttaaaagattatctgctgtgagagaaaatacagttgttaatgatacaatacaaaatattttgataaataaaggttctttggatatagcaaaattagcaaaggaatcctttgtgagtaccagacagttggagcgattgtttcatgagtatgttggcattacgcctaaaaagttaagtaacttggtaaggtatcagtttttgtggagagatattttgtgtgagccggattttgatgtgttaagtgcggtttacaaatttggatatacagaccaatcacacttattgcgggaattcaagagataccattctatggatatacataatgcaaaaataatggcttttaaggatgtcggaaatatacaagatgtttttgtttgaatttagtataatagtttcaaattttgacaggcaggagaggatgaaaaactatgaaatactgtaccaccgtaatagcagtacgagatatggaaaaatctttgcagttttataaggatttatttcagcaggaagtacttgtggatttaggtaagaataaaactttgacttgtggattagcattgcaacagggattggagcatatagccggatttgatgccagtacaatgaaatttcgttccaataccatggagttgtattttgagacagaagattttgatgcgtttatgcagttgttaaattcttatccgcaggtggaaagacttcatgagccgaaaactttttcctggcttcaaagaggaattcatatttttgacccggatggacatttgatagaggtttcggagagtatgtattctgttgcctgtaagcagtttaaagaaggtaaaaccatagaggaaacagcccaattagttcaacatccgattgaggtggtcagaggttggtatgagcagtataaaaaggaactgataagcgtctgtggcacggaatgtagagcgtgttattgttttggtaagatgtgcaatggctgtaattcctgtgagggaaaagtttttcatgcactggaagggaaagcttgtccgatttatgactgtgttagaaataataagtgtatgcaaaattgtggtgaatgtggcgaagtgccttgtaagatatggtttgataccagagacccaaagttttcggatgaagaatttaatgaaaatgtagctataagagttcagacattgaaaaaggaataggtgtttatgtcaaagaataaagaacttgcagattacataatggaccaactatctgctttgggagatatacgaaatattcctatgatgggtggatatattttttattataaagaacggatatttggcgggatttatggcaagggttttcttgtaaagattactgaggccagtaagaaatatatgccggacagtgagccggaaccaccatatgaaggagcaaaaccaatgttaccagtaaccattttggatgatagggttgcgttgcaggcaatggtggaagagatgtatcaagagttgccggagagaaaacctaaaaagaaaaaagaataaattgtggaaggtcactcagtttactatggtgtaaactaggggattatgcgttctatgaataccctgctaactgtgatagttagtggggtgtttttgttttatagcaataatatgctgagatttttgtatatgatagaaaaaatctatgataaaatagatattaacagtggacataaattttctgggaggtagaagatgctgtacgacattagaacaagtgagaaggcagcgaccacacttgaaacattaacaggtgtaaataggacaatttggttggcagaacaatataagaattatggcagaatagattatacatatgctgatgatgatgtgagaaatattattactaaacatggaggtcattatccagatttaaatgatttagagatggttgtaacccatattaccacaagtagtgaaaaatgtaggcagatacgtcaacatggaattgttgacttggtaaaggcatatgaatttgcaaatagtgaattgagacaatttttggaaaattatgaaataaatatagatattgaagcctgtcgcctaacatacaaaaaaagagtttatgacatatcttatgggaaatgtccaccgcattgtgacattgaagcacgtgctgcatggtctgtagggagaaaattctactatgattttacagtatgtggttttttatcaataagtgaaaaagatgtatatggtggatgggttcattgtagaccagagatattaagtgatatcgatacactgcttagtacaagattatcagatgagtgggaagcatctaaagaatcatatgccatagtttttaaggttcctgtaagtgatactatttataatggttggaattctgatacagaatcagagatggtaaagagttatttgtatgatgcgtatatgtgtatctgtataggaccggatacaaaggaaattttgtgtaaaaatggtgttgagattctgccaaatcagattcttgagtgtcataggtttcaagagtgggataggtgattgcagatgtataaaatgaattaaatgtaaggaaaggtgattgtgaatggatgaagatgtttttataaaatctgatataggagcgcaggcagcatggaaaggattttcgtcacagacgctctatatagcatatagacttgttacagatattcaaggttacgagtattatccagaagatattgaagatttagtagttaagtataacggggaagttatagaagctgttcaagttaaaaatattacagctactcttacaatttctcatttatcttcaacaaaaacatcaaaaggcggtgaaggttttttcaagcgaatgtgtagtctgcattctaaatattccaatttcaaaactataaaagttgtatattttggagacttaggagttgaattacgggacttagaaaagggtgtcgaaaaaacaaaagagaacataagagaaaaacttgttgataatcatggtttattgtatgacgatgcagaatggttattaaattcattaaaatttgaaaaagtagaagaaaaacaattaactgatggaattcatcagcagataaagagttatatgcctattatgtcggctccttatctggcacagtcgttgctagttcaatatatttccaaactttcaaaggaaaaaggatatacttgtttaaagagttgggaagaagaaatacataaaataggtacaagcatagcaggtattgatggttattttaaagagtatgataagtctttaattcgtttaagtgagttaacaatggacaaggattatatcgaattaaaagatgagtttttgcaaggtgtttcagcgcatcctatgcatatcaggtctaatcttgattttttaagaactacgtggatcgaagagattaaaaattcggtgcttaactatgaagcaacaattgttaaaggtgtttcgggacaaggaaaatcagcattatgttatagatatctattagagatgtatccggaagaatttgtgttttgtattcgttccattatatctgaggggcaagctcaaaatcttgcctcagcattaatagcactttcaaagtacttggatgattttattatttatattgatgttcaaccgggggaaaatagatgggcatatttacttcaagaattacaaatgaggggaattaaaattcctattttgatttcgattcgagatgaagattataatattacatcgtttaacggaaaagcagttcagtataatgtgatcgaattagaattaacagaagctgaagcacattggatatatgatttttacacagagaatcaaccacatgcaacatttagaacatttgaagatgcgtggaatgtgtatggcggaaagggccccattgattgaatttgtatatttgcttacaaacaaccagacattaactcaacgtattgaacagcaaatagatgcaatgatgttggaaagaatttcggattcatggttagaacttttacatctggtatgttttacaggtagcttggggtgttcggtagactttaatgctgtcaagggtgttttgaagtgcgatagtatgaatgccgcagttaaaaggttttcagatgagtatttacttagaattactattgatggaaatagattggaggctttacatccagtacgagcaaacataatctacaatgttttacggacaaagactgttataaacataaaggaagcgcttatgaaagctcttaattgtgttgaatcaaaatatgtgagcattatcttaatggaatactttacaaattacgagtattcattggatgacattcaaatgattgcaaaaaatgactataaagattggattgcatttggaaaagtaattaaagcaattttgtggttagaagtaaaacaatatgttgaaagtaatattcattgtttttggaaacttaatgaagaaaaaggaaaggggtggttgtgctttataccattggatcctacaggaatagatagatcaaatgaaataattgcagaaagaatgctagagcatatgcctgggaacaaagaaagcattagagctacaattcatgaagtaagagaaacattatcctcgttatcttttgaatacaaattgctggattgcttttttagaggaagtaaacatccaatagttatgcctaagtcagatgatgaaaaaacaatgtttgggtattcgttattttggatggcaaaacgtaattatagtgttgagttacagatgaataaagaggatatatctaacattatatgctttggtgatatacaggcatgcgctgatacaataagaggtttgaatgaacaatcaacattatttgaagtttgtaatattgctatagagcaattcgtacaacgcttaataagagagcatcaaatagtttcttatattgagacggatgaggaagtgcgttgtaaatttatacctccaatattaaatgagaaggctacaccgaaagatgaaaagaacataaatcaatattggagaataaaaatgctgaatattttgcagcaactatatccgaataaagaatatattgatatcgagttgctgggagttaatcttcttgcagatgtcgggatacaagctatggattataaattacatatgcataaaagtaacaggcacagtcgatggacttcagaagtaaatggatgggtaaaaatcaggatagaatatggactaagaccagcttcgtggatggaatatgtgaaagaaatagatttggtacgaagtagtgtaaatacattgcttataaatacaatgaaattagttgatgatatatacaagaagggacgttatacaaaggatcgatggactcatgttgaatcgcagatgatgatttttcgtgagcatatcttttatgaaaatatgttaccaaaaacaataatggatccctattgtttatactcggaaggaactgctcagcatatagcggatgatgactatcctgtgcagcaactgctttcagtagaaaaatataagaaattcagaaaagtttttgggaatgtatatacatcgcttgataatttctataatcagtttgcagaatggttgttggttagattaaacaaaaagagtatggatgatataaaaaatccacgattagcaatgtataatttgttttgtgcagcaagagatatttctaagttacaacaagaatacaatacactttttttgccatatagtacacttgataagaatttttgtcagcaagagacggaaaatttgttgactatggttaatgtctggcgaattgtattggatagtgttccaagggggcaagcaatagcatacaatgcaaaacaaacttttcgaaagggagtattgtatccggatgatattaaagaaaaaattgcaactttcattgatggtacagtatatgaaacaaaggaaaaaatatatgttttatccaaatgcgaaatgacagaagaggattctctagaagaagcatatgctcaatttgttctgagactaagagagatatataaagaagctattgaattttcaagtaatagatggcacatggaaatgaaagaaaaacccatagtatatattcctgttttattcaatgcagttaatatgataggatttgaagtccctttatataaaattttggatactgaaaaatctttaatttccaaacctatgattccatgtgagcttgaagaagaattcaaggatacaatatttaagaatagtatggcaaatgaaaattggtgcagtactattgcaaaagtcagtacattaaaaacatatttacaacgatataagcaagtgatttcagttgatatatgtgaaaaatgtgtagatggcatagagtcttttaaagattcattttatcgagaccttttaattctacttcatgaaattgtagagagtgaggatttgatagaatatgttgtaggaagggtttcgggagatttacaagaggcggctaatgcattaaaagacttttgggaatatgttaaagagtttagtgagaaaattttcaatgaagaagcggtatatgaaattttaagtgtaattgatatggttgtcggtgtaatgatgatgatacataaatatgtattagactcgaatgaatagtgtaatcgggagttgctataaccctaattgggatgaaagaatcaaatgaggtttgccccacaatcttgggcaaacctcattttttgcttaatttctatgataaagtggagttcacgcatgaagctcaaccggccatgcgcctcgcaagcaacacagcacaaccacatatactataaattgtaaatgacaagaaatcaactactttttataacgcacaattttctcccagttcgcagggaaccccattttcgaaaatagcaattcctgactgatatgagggcagtttttgagaacagaattaatcaatcgcttgaggtctgttttaaacagcttaaattcttgattatctatgagataacgtagagctattactactgcaaacaagtctttcttgccgatagtatattgaccatttttctgtggtaactgcaatttactatgtaaaaccatatcaggaattgcttcatttacctggaaggaataaagcctttcattatgggcacatacatttctacagcttgcaagaatacgaatgagctgatgtaactgaacctctgacatgttggcgaaattaagactgaccttagtgcggatatcagaagttgaatattgatacatttttgaaatctgtccaaatgtaagcgcattggttgctacccacaaaggtacattaccatatacccttgcatggtgcgtgatataactatagttgctaggcaaggctatagttttgcttaaggttgtaatcaggcgatttattttgctggaatttttgcgtgtatagttataatttccagcggttaaatatgctgtttgctgttcaccatattttttacagaagtaatatgacaacatggattttagctgtctttccacatgtaatatgtatttaagaaagagcgttctcaattcttcatcaaagtaataaaaggcggtaatttcttcaaaggtgacaccatgtaggtaattccctgatggcttatgcttaaataaatctttatatccgccaattaatgaaaaatagctaagtttttgtaatgttattttggcaaattcaggatcagaaataacaagctgtttttctttttccagtttttcaatttgctcatcatatgtgagaaatgttttgttagccatctctgaatcctcctttgttttggggcataaaaaaagtggagcccacgcatggaactccaccggctgcgggcatcgcaagtttccgcagcgcaaccactaaagataatataccattgaaagcaaaaactgtcaaatggatttttagtggtggtagtagtttatgcgtcacaaactaatattattctaattgttttaaaaccgattgtttcactccaagaaacttatccctatattcaatcgccttttccggcttcttccaccgtgcatacagattattcaaatatctataagtagttttcatatagtcattatccgtaccaacagcattaccaataatgctttctgccgcaagtaggttaacctcagccgattccggcgttccttccatcatattaatgatgcctttgctcagcttgcagattccataatcaagagaggtatctaacagatgctcctgcactaatgattcatactgttccaatacaatcttggcattgtccatatcctttgccagcaatagtatattgataaggttcatcatctgctgcaaggtatcatgggattcggttagtcccaagtgtgcatattccatacggatatcaaaggctgtacggagtgcattggctgcttcatttccacgcttcattagcagataaatgttggaaaggttgttgtacagattggatagcaggtttgcagttcgcatatctgcatctttagtatgaagcttttccatgatgttgattgccttttcacgcttcttaactgcatttccataatcctttttcaacataaaacactctgccttataatccagtagcaacgccctgtcacatggagactccagcttgtatttttccataaggtagctgattttatcagttagtttcgtcaggtaatccgatacaaggtatttgtccagatatgggaacatatcctgtaaaaacagtaagaaatatgcaccatcatctactataatgcgctctgatacactgataagggaagtaatgatattttctggtctgcgaagttccaagccatgtgccaggcagataaggtggaggctattaagcagagtccggcaggcagtcacggttggtatggtttcaatggcaatcacttcctgtaacagtggatgcaggctgattttcttgttatctgtatcttcgttgataaatccgtatttgattatgtaatggtaaactaaatttgtaacaccttgttcgaataatatattataatattattcaaataaggaggacattgttatgtcaatacgttacagtgaagattaaaaaaaagaagtagtcaaagcatatatggctggcgataaatccaccatcctaatagctgctgattataatattgccaagagtactgttagccagtgggttaatcagtacaaggaagaatgcctttataccaccagcacatcacctgaatctaatgaagcaaaggaaatcagaagattaaaacagcttcttaacgaaaaggataaggaaattgcattcctgaaaaaagcagcggcattcttcgcgaaggaaatcgattagtggtatatcggttcattgacgataataaaaatacatttggtataagatggctgtgaaaaaaatttgcaatcagccctaattgttactacaactacaaaaaagatgcaaagcaaaaatatcatgaacgcctgaaccatatcttcgagcttataaaatacatttattataacaataatcgtgttataggctatagggctatgcatattttcatcaagcgctatggatatgatataagcagtacaactatgcataaatacatgaataaggaactcaatttatgtgctgtaattatgcattccaagcctggatacaaggcaggtaaaaagaacaaaatatttgataatctcttaaaccagaactttacagtctgctgcaaaaataaaatatggtgtacaaattttacatacatgcgccagccaaatggaaaattcagatacaactgttcaataattgatttatatgacaggtcagctgttgcctcattaaacagtgattatatcaatacagctctagcaataaacacgcttaaaatggcgctaaaaaaggaaaactatcccaaagtgattttacactcagatcagggagtacagtttacttcgtgggagtttgtaaaattctgcaaagagaataatgtaattcagagcatgagcaggtctggctgtccgtatgataatgctccaatggaaagattttataacactttcaaaagcaatttttataacgtaactgcattttcaagtgtggagatgatggacgaacttactatgaaatatatcaactggtataactatgtccgccctcattcatacaatgattatttaacaccaatggaagctcgttacagataggtatttatcgaacaaagtgttacaaaaatgcttgaccagtacagggtatttacatggaagtttcaaaaaacgattggaaattatttagagcacgtattggtgattggcaggaagcatatatggggcgtttgaccaaagattatatagatttgttaagtggagatgaaaatgcttcagataaattctggaagctggaagattacgataataaatacaatgagcttagcaggaagctggacaaatgcgaggaagagaaagcaatattcgttgaatgtgaattatcacagaaaaacattgcagataagatgagggctatcagaaccaagttaaaggatgcagatgttcttgatgaatttgacagggtagtatttgaaagtctggtcgaggaagttattgtaggagagcaggcagaagatggcatagttgatccatataagttgacttttgtgttaaagaggacggatgaaagatgcataccggatgcgagagacagatgaatcattcgtaaatttaaaacagatatgccagcaaaagaagatctggagcagattattgaagccggattatatgttgcaaacggcatgggaaaacaggcaaccattacggttgcagtaacaaacaaagaacttcgagacagattatcagcaatcaatgcaaagataggcggttggaaagaaggatttgatccattttatggagccccggctattttaattctaagagttcgaacttccagaatatcaggaattattgtaagaggtttaattccataaaattggtctaaagtaattaatgattgtcgaagatacatattttgcaagtgtcactttattggtacatatatgaatgtatcatttagatacaagataagtaaaaacaatcttgtaaggaagaaacggtttaattgtttagatagcaacagaacagttaagcagatggaggtggcagatatgcatatattaacattgattataatatttgttatagcttcaattggagcggcctgtaagggagacttttctggagtggtagcaataggtaaatttgtaggggtaattgcattattaatatgtgtggggttactattttgttatccgcttttagcgattattgtaggagcagtagtggctacagttgtcatatgtagcagttcaaagtgacataaaaggtcacccatatagggagaatggagagaagattatgaataatgattttaaagctgggattatagggggcttagtattcttaggaatactattatgtttggggttggtagaaaacacacttgaaagcagcagcgataaaaaagcatctccatatagcagatattcatatacaccaaattatggaacatcaaagagcagttcttattcaagtagaagtagtacatcaggaaaatcatcaagtacaacaagttctactaagtattcaggaaccaaatcgacttctacaggtagcaaatcaacaagttcatcatcaaaaaaatcaaattcttcaagctcatcaaagagcagttcaaaaaagaagaattattataatttatatgatgatggctatgattcaatctatgatgatggcgattatgatgattacagatatgatagggattcagactatgctgatggtgtagatgatgcaatggatgaactggaatggtaaatttctcttaaatattagtttgtttatctaaaataatagtgtataataatacatagttaattgttcggaagtgagaggataaatatggctacggagagaaaagaaaaacttataagggttttgcagataatgcagacaacagatgaaaaaacgcccttgaatgcaactcagatagtaaaaagacttgatacagaatatgaacttgagggagtagagagaagaagcatatacagagatattgctctgcttcaggattgtggatatgacattgtgcagacagaagataaaagaagtgggtggtatatgaatactcatgcatttgcagactggcagataaagataatgatggatgcagttcagcaggcgagatgtgtttcattaaatgaggcaacaaagattagagaaaaccttcttaatcttacaagtaagagaggacgaagcaggcttacacatatgatgcagcagcatcctggcaatgtaaatgtaaatgagaatatcggcatatatatagaaactatgcttgaagccatataccagaacagaaagattgaatttcagtatacagagataaatgattcaatgaagaaggtgctgcgtcgggaaggcaaaaagtaccttcttaatttatatgcaatttattggtctgataataattattatctcattggtgcacatgataatcatgacaatctggttaattacagacttgatagaattgtcaatttaaccatgtctgatgaaaaggcgattgatgcaaaggaaaaggttggagttaatccggagatgataattcaggattatatagaaaagagcgtggatcattttcagggagaactaataagagtagaagttgagtatgaaccaggtcaggcagcaaatgcaattctttatgatttcgctggtggaaatataagagtaaggaaactcgagaatggacactgcgttgccagttttcagaagatggacagcgtgacacttgtgggattgtttatgcagcatgcggggatgtataaggttgttggaccggagaagttgaggaatgaggtacaggaaagaattcaaagtgcatggaaagtatatagtagataaaatgcagcatgtttgataagtcaaattaatcaaggtagattattaagatgcagtgtgaattttataataacttatttttaaagcagcctttagtgtaactggtatttgtgttatagtaatgataacaaaacatcaggaagtaagaagtttatgagtgataataatacattagattactacaacctgcatacagcagattttgttaatacaactcaaaatgttgatttccatgaaatacaggaacttttcctatcgtttttacctgcaaaagcaaaattactggattttggatgtggttcaggaagagacactaagtattttatagataatggatatgaagttgatgcaatggatggttcaaaagaattatgtaaagttgcaacaaagtacacaggtattaaagtacagcatatgctttttgaggattttaatgccagtaatgtctatgatgggatatgggcgtgcgcatcaattcttcacataaagaaatgcgaactgtcggacatgataacgaggctgtatcaggctcttaaaaaaaacggtgtgatatatatgtcttttaagtatggtgattttgagggtgtaagaaatggaaggtatttcacatatcttacagaggaaagttttgatatgttgatgaagcctatacatggatttatgaaagaaaaaatctgggtaacaggtgatgtaagacaagacaggggtacggaacaatggctgaatattatacttcgcaaggtgacaaccatttaatagttgaacaaaaatattataacatgctggatatagaaggattttcacagatgatgaaagatccgtcatattgttataagttctactggcttgaggcgattgttcatctgatttcagaaaatgtttatcagacaacatttgatgatataatagacgaaatgatatcaaatgcatggtattcagtaagagagttccatatacatcttagtggaatacaagctgatggaatggtaagggacgggcttgaaagggcagtgaatttgttatctgaatacagcagtttacctgcgaatgcatcaaaagttgaaataaaaaatgcaatcaaagaatataacaaagagcttagggcagtaaaggaacagcttaccaatatggttccttatagggctttgtcaggattcttttcaaaaagtgatgagcctgctgactggggaagtgtaaaaagactgacagcatatattaagaaggtcaatcagatgattgtgtcattaccttatatttttggagacagcagcaaattaaaaaaagaagtatattttaatcatgactgggttttaatgatacaggataatacagtaaatatacttggttggattcagtatgaaaaggttaaatggctgcaaaataataatccggaagtgccgggattagtatataaactggcacctatggatgaaaggataaggaagttacctcatgtaaggaaactgtgggaaggaatatttgatgtatgtgaggtaaaagatgtatttacagggaagccggtaaataccaaacaatatgacatagatcatttcattccatggtcatttgtaatgaatgatgagttatggaatctgatgccaatggattcatctcttaattcctcaaagaataataggcttcctaagtggaaacctttctttgaaatatttgcgggcaatcagtttattttgtatgaaaagatatatgaaatgcctgagttacataaactttttgaagcctgttacagagataaccttcattctatatgggccgtaagggaactgtatacttttggaaaaaacagacaggagttttgccacatattagaaaagaatatgcagccggtatatgattctgcaagacgtcagggatatgaaatttggaacagagataaagtacagtaatataaaaagctacgagagataagttggcaaaagcaacgcaaatatagaaaattaaccgccgccttgcaggaaaagcaaagcggcgaaaaatattttataaatctctcaacatattcagccttttcatagctggtcttaatgcaagatatataattgaagcaactataacagcgataactgcattaacggatgtggttatcgcacctattttagcaagtgttttggcaaggtcctgaggcacaccaagaaggtatgtcttatagaaatatccgactacagggtcagcaacaatattgaatgccataccgcatatgcttgatacaacagtagcaacagtaacatattttgcagaatgttccttagaaaggtggaagagcttatgtgctacaaaaccaacgataagaccgatacataacttaagaataaatgtcttaggagcgcttgttacataggctgttgacaaatcacttattgtcatgccgattgctccggcaagaccaccccattcgccaccgataagtaaagctgcaagaacgcagaatacattaccaaagtggaacatagttctttctgttccaacaggaatgtctatctttataaatgttgcaccaacatagcagagtgcggcacacaaagcagcctgtgcaataacctttgcgtctacaggctttctctctttctttgaaaatgttctgtataatccggcaataagaataacaatgccaaggattgttacaagaagtgaaaatgcgtatgctttattaccttttactatgtatgtgttgacacataacacaataccgataacaagaataatagcaccaattaatgtctggattaaacctgtttttttgtctttcataattatctttttctcctttgattcatattttcagcaaagaatagtacaattaagggcttattaaaagtgccagtttgataatgttttatatggtcaggttatgtaagggatatgtttacatttgcaaaaaatgtgttacaatgaggagtactatgcaggaggtaatgcagtatatgaagattatgtttgcatctttaggttgtgataaaaaccttgtagatacagagaatatgcttggaatccttaacgataagggctttgagtttacagatgatgaaacacaggcagatgttattgttgtcaatacatgctgttttattggtgatgccaagcaggagagtatcaacacgatacttgagatggcacagcacaaggaagatgctgtgtgtaaggcacttattgttacaggatgccttgctcacagatataaggatgagattatcaaagagattccggaggttgatgcatttttaggaacaacttcttatgacaagattgcggaggttgttacttcagtgcttgaaggtaagggctttaatgtcgttgatgatgccaacagacttcctattgttaaagaaaagagaattattactacgccgggatattttgagtaccttaagatagcggaaggatgcgataagcattgtacatactgcataattcctaaggttcgtggtaatttcagaagttatcctgttgagtatcttgtggagcaggcaaagcaccttgtacacaatggagcaaaagagcttatacttgtagcacaggagacaactctttatggaacagacctttacggaaagaaatcacttccaatgcttatacatgagcttgccaagattgaagacctcaaatggataagaattcagtactgttatccggaagagattaatgatgagcttatcgaggctattaagaatgagcctaaagtctgtcattatcttgatatgccaatccagcatgcaagtgataatgtattaaagcgcatgggaagaaagacagataagcaggagcttcttgatattgtggcgaagctgagaaaagagattccggacattgcattaagaacaactcttattgccggcttcccgggagagacacaggctgaccatgaagaggttatggaatttattgatgaagttgagttcgacagacttggagtattcacttattcaagggaagaggataccccggctgcaacaatgccggaccagattgaccaggatataatggatacgtggagagacgagcttatggctctgcagcaggaaatatctattgacaagtcagcacagatggttggaaagactattgatgttatggttgaaggctatattgcagaggacaatacttatgtcggacgttcgtacaaggatgcacctaatgttgatggaatggtgttctttgaatgtgacagggaacttatgtcaggagatttcgtatctgtaaagattactggttcaactgaatatgatttaatgggaataatggaggaaaatgtttaaatgaatttacctaacaaacttacaattgcaagagttattatgattcctttgtttctgatatgtctgtatcttaacattggatgtggcaaatatattgcagtaggaatatttattcttgcaagcttaacagaccttttagatggtaagattgcaagaaagtataatcttgttactaacttcgggaaatttatggatccacttgcagataagcttttagtatgctctgcacttattgcacttgttgaccttaacagaattgcagcatggattgttattattataattgcaagagaatttattattagcggattcagacttgttgcatcagataatggcgttgttattgctgcaagctactggggcaagttcaagacagcatttcagatgattacaattattatgcttgttcttaatcttaatgtgccatttatgaatattattaatactgttctcatatatatatcattaggattgacagtgatttctcttattgattatattgcaaagaattataaagtttttctggaaggttcaggtaaataataatggttgattatctcagctgtcttgataaggctcttgttgagacattaaagaacaaatccctgactataactacagctgagtcatgcacaggcggcatggttgcttcgtctatagttaatataagcggtgcttcagacatttttaaagagggctatattacatatagtaatgaggcgaaggaacgtattcttggagttaagcatgagactcttgagaagtataaagctgtaagtgctgaaactgctgcccagatggcagaaggagcagtaagaatatctaaggcagatatcagtgtttccgtaacaggtgttgcaggaccttcaagagaagatgacaagcctgttggacttgtgtatatcggatgctgctataagggtgagacacatgttaaagaatgtgatttgtcaggcgacaggcacacgataaggtgtcagtctacgaaggaagcacttaagtttgttcttgatataattaagactaacaggtagagattattgtaattattaggtttattatattatttactatattatttgctatggcgttgaagacctactattaagcttgaaagatggcttgagtaggtcttttttgctgggattagagtgagctggaatgtgaagacctactaagtgagtgagatgtgagtgttgagtaggtttttagagccgtattggaggcgtgaatgggtgagaagacctactaagtgagtgaaatgtgagcgttgagtaggtcttttgagccggattggaggcgtgaatgggcgagaagacctactaagtgagtgagaagtgagtggtgagtgggtctttagagccggattggaagcgtgaatgggcgagaagacctactaagagagaaaaaagtgagcgttgagtaggtcttttgagccggattggaggtgtgagttggcgagaagacctactaagtgataaagaagtgagtgttgagtaggtcttttgagccggattggaagtgtgagtgagttggtgagaagacctactaaatgagaaagatgtattacttgagtaggtctttatccttcagaatcatcttttgtcaagcagaaatgtagaaaaagacctacaaatcaagggaaatattgcttttagtgggttttataacgatatcggattaaatattacgatgaattgatgcaactatcattcgacaggtactgcaagttaaaaaaatattgctgaacttatgcataaaatattatatcaacatataataatataaaataggtgtttacaaaatatatataatatgatatatttttactattccagtatacaaacaaacataacgaataaatgttcgaaaggttcttgacaatgcagacataataagatattatttaggaaacgaacacatgttcaaaaggagagtttaaggtatggttaatgaagataagatgaaagcccttgatgcggcaatttctaatattgagaaacagtttggtaagggctctgtaatgaagcttggggaatcaacagctaatcttaatgttgaatgtattcctacaggttctttaagtctagatatcgctttgggaatcggtggagttcctaaaggaagagttgtagagatatatggacctgaatcaagtggtaagacaacagttgcacttcatatggttgctgaagtacagaagagaggcggtattgcaggttttattgatgcagagcatgctctggatcctgtatatgctaagaatattggggttgatattgataatttatatatttcgcagcctgacagcggcgagcaggcacttgagattacagagactatggtaagatccggtgcagtcgatattgtaattgtcgattcagttgcagctcttgttcctaaagcagagattgatggtgatatgggcgattcacatgtaggtcttcaggcaagacttatgtcacaggcattaagaaagcttacacctgttgtaagcaagaataactgcgttgttatatttatcaaccagcttcgtgaaaaggttggtgttatgtttggaaatccggagacaactacaggtggtcgtgcacttaagttctattcttctgtaagacttgatgtaagaaagattgagacacttaagcagaatggtgaggttattggtaacagaaccagagtcaagattgttaagaataaggttgcccctccattcagagaagcagagtttgatattctttttggaaaaggtatatctacagaaggagatcttgttgatcttgcttctaatgcaggtattatccagaagagtggagcatggttctcatatgagggcaataagattggacagggacgagagaacgctaagcagttccttcttgataatccagagataagagaagaagttgacagaagagtaagagaacactacggaattgtggacggtgttaaggaagcagaagcatctgatgatgctaagcaggctaaggctaagaagaaagcagatacagaagagtaatattaaggtgggttatggaagataatattgaacttattgtcacatccattaaagaacttactaagaaacgcaggcttgtatatattaattatgagcctgcatttgctttatatgcagcagaattaagaaagtttggaattaaggatggagagtctgtcaggaaagaagcgtatgattctctgatagatgatgtgttatctaagcgtgcaacggtaagagcgatggcattgcttaagaataaggattatacaagaaaaggtttggaggacaagcttagagatggatattatcctgatacgtgtatagattatgcattagagtatgtaaccaggtttggatatattaatgatgagcgttttgcagagaattatgttaattttaaggcaggtaataagccaagaagacagattgaacttaagttaaagcagaaaggcgttgatgcagacattatcagcaggatttgtgacgaattttatgcggataactgtgatatagaattagaacaggcaaagttgtttgttgaaagaaagcatattgattttgcgaatactgattataaagagattcagaaggtcaaagctgcattatatcgtaaaggattcagtatggatattattaataaagcattggattctaaggggcttttccttgacataatcgacaattgagtataatattagattgttgtatttttggtacaatgaaaactaaataaggaggtgctcctgcgttgattccaatagtaatcgcaattattgctactttagtgatagtcgctcctattacttggtttatctcgtctaatgcaatcaacaagcgtaacgatgcaacaatcggtaatgccaatgagaaagcaagagagataatagatgaagctcttaagacagctgaaaccaagaaaaaggaagctcttttggaagtcaaggaagagtctttaaagactaagaacgaacttgagaaggaaactaaggaaagacgagctgagataagcaagtatgaaaagagagttctttcaaaagaagagacacttgacagaaagattgaggctgtagagaaacgcgactctaacattaccaggaaagaagaagaacttggtaaacagaagcaaaaggttgaagaacttgagaagaagagacagcaggaacttgaacgaatctcaggattgacctccgaacaggcaaaagaatatctattaaagactgttgaagacgaagttaaacatgatactgctgtaatgattaagacattagaaagcagagcgaaagaggaggcagacaagaaggctaaggagattgttgttaatgcaattcagagatgcgccgcagaccatgtggctgagacaacaatatcagtagttcagcttcctaatgacgaaatgaaaggccgtattattggtagagagggtagaaatatcagaactcttgaaacacttacaggtgttgaacttatcattgatgatacacctgaggctgtagttttgtcgggctttgatccggtaagaagagaggttgcaagaatcgctcttgagaagctcatacttgatggaagaattcatccggcaagaattgaggagatggttgagaaagcccagaaagaagtcgagacattaattaaagaagaaggtgaagctgcaacccttgaggttggtgtacatggtatccatccagagcttgtaagactcttaggtaagttaagattcagaacaagttatggacagaatgttttaaagcattctattgaagtagcacagcttacaggtctcttggctggagagttaggacttgatgttaagatggctaagcgtgctggtttattacatgatattggtaaagctgttgaccacgagatggaaggctcacatattcagttaggtgttgatctttgtagaagatataaagaatcagctcttgttattaatgcagtagaagcacatcatggagacgttgagccagaaagcttaattgcttgtcttgtacaggctgctgatacaatttcagctgcaagacctggtgcaagaagagaaacgttagaaacttatacaaacagactgaaacaattagaagatattaccaactcgttcaagggagttgagaaatcctttgccattcaagcaggtagagaggttcgtgttatggtagttcctgaagtcgttagtgattcagatatggtaatcatggctcgtgacatttctaagcagattgaggatcagatggaatatcctggtcagatcaaggttagtattgtcagagagtcaagagctgtagattacgcaaagtaaactaacataaaccaaggctgttacataatgttaattcgttatgtgacagccttttttgattttaacacacttaatataattaagcattttagagagatgttttaaaatattaagttatttttaaaaatatttgcaattatgaattatacattgtagaatagagcatgttgattatatgctgattaggaggaagattatgcagtacaatgatatgagtaaagaagagcttttagctttaaaggaaagcttgaacaaagagtatgcagaagctaaggcaaagggacttgcgttagatatgtcaagaggtaagccatcagctaagcagcttgatgtttcattaggacttcttgatacaatcaatagttcatcagaccttaaggctttagatggaacagattgcagaaattatggtgttttagatggtattccagaagcaaagaagcttatggcagatatgatgggaacaacaccagatcatgttattgtgtatggaaacgcaagtcttaatattatgtatgaccagatttcgagagcatacacacacggtattcttggtaatactccatggtgcaagcttgataaggttaagttcttatgtccagttcctggatatgacagacattttgcaattacagaaagatttggaattgagatgattaacattccaatgtcagagtctggtccagatatgggcatggtagaagaatatgtaagcaaggatgcttctgtaaagggtatctggtgcgttccaaagtattctaatcctcagggatatacatattctgaagaaacagttaagagaatggctgcacttaagccagctgctgaagatttcagaattttctgggataacgcttatgttatccatgatttatatgatgacaataaggatgagatagctgatatcatcagtgaatgtgagaaagctggtaacccagatatggtatttgagtttgcttcaacttctaaggtgagcttcccaggttcaggtattgcagcacttgctacatctgctaataatattgcagatatcaagaagcagcttacaatccagacaatcggacatgataagcttaatcagttaagacatgtgagattctttaaggatataaatggacttaaggaacatatgagaaagcatgctgagttcatgagacctaagtttgaggctgttgaaagtgttcttgaagaagaacttggcggacttggaattggttcatggacagagcctaagggtggatattttatatcatttgaagctatggatggatgtgccaaggcaatagttgcaaaatgtaaagaagcaggtgttaagcttacaggtgcaggcgcaacattcccatatggaaaggaccctaaggattccaatataagaattgccccatcattcccaactccagaagagatgaagcaggctgctgatctttttgtactctgtgtaaagcttgtaagtgtagaaaagttacttgaaaacaaataattaaatgaatataattaatataagcttgctttttataagcaagcttatttaataaccgggtatataataatcagatgttatatattatgatatagttgggaggatatacatatggctaagattggttttattggaatgggtaacatgggatatgcaatgcttaaaggtgctttagcggcattttcaccatcagatattatattttcatcaccagacagggaaaaatgcgaaagaatatcatctgagacaggtgtaagatttgcagaaagtaatgctgaatgtggcaacaatgccaagtatattgtgcttgcagtaaaaccacagatgtatccaacagtacttaagaatattgtcaatgtggtaacagaagaaagtgttattatatcaattgcaccgggaattactattgcgtctataaagaatgctcttggaagcaacataagagttgtaagagcaatgcctaatacacctgcacttattggagaggggatgacaggagtatcatataatatgacagatttttcatttgaagaaagagatgttattgatacattctttaattcatttggaaaggttgtttatgttgatgaaaagcttatggatggaatagtgtgtgcaagtggcagctcgcctgcatatgtatatatgttcatcgaggcaatggcggatagcgttgtaaagtatggaataaagagagatgacgcatataagctggttgcccagactgtccttggttcggcaaagatggtacttgagtcaggagaacacccggcagtacttaaagataaagtgtgttctcctggtggaacaacaattcaggctgtttctgcacttgaagagaatggtttcagaaatgcacttatcaaagcaactgacgcctgctatgacaaatgtacaagcattaagtaacattttttatatagaaaggctgaatatgaaagaacatattaaaagagtggatagaattcttaaatataagggttcaatacttgatatatatacagatgttatagagactcccgacggacatagggcagaatgggattatattgaccacagaggagcggcagctgttgttccggtgttagatgatggacgtcttctcatggtaagacagtacagagacgcacttgacagagagacgattgagattcctgcaggtggtcttaatggctgggatgagccgacaattaatgcggcggcaagagaacttgaagaagagaccggatacaggtcagataatcttacaaagcttgtatcagttgttactgcggttgcgttctgcaatgaagtggtagatgtatatcttgcaacagatcttgtaaaaacaaatcagcatcttgatgaagatgaattcatagatgtagaaaaatacacactggatgaacttaaagacatgatatttgcaggaacgatacaggattccaagacaatttcagcagttcttgcttacgatgccttacttaaccgtaaaaagaataattaagacaaagtcttcatatattgattcaaagtacattttgatggatatatatgaaggcttttttattgtgggtaattaagaatgtaagatttgctgcattaattattgcgggaattatacttggtacatgctttataaaaatgtggcgttatggtgatgtgttttcaactgaatatctgattgtatacattaattctaatgtcgcatatgcagatgtatggcaggaggtgctatcttacagattaaggagattcataacattggcagtattgatgattactccattcagaaaattgtatgtatactggctgtgtctgtataacgggttctgtcttggaatatgtatgacaaaggctgttatgttccatggagcagggggagtagttatggttttggtctggttgtttccacattatctgttatatataatgaccgttctgcttatgtgtcattattttcttaacagaattgacactttaagaagaacggtcatcattgtgagtatgtcattgttacttacattaatcggaacatttacagaaagctacattaatcccgacataatgaaaatgtttttaaacaaggtctgcaatatcgtataaaagcttttcagattcagcccatccgaggcatgcatctgtgattgattttccataaacaccgtcgccaaccttctggttacccggctcaatataactttcaatcataacacccttaacaagtttcttaacatcagcagagtgatggcagctatgaagaacttccttgacaatacggatctgctcaagatactgcttacctgaattgctgtggttagcatctacaataacagcagggttctcaagatctcttgcagcatacatgttataaagtcttatcaaatcttcatagtgatagttaggaatggtctggccgtgtttatttacggcacctcttaatattgtgtgtgtaagagggttgcctggtgtattaacttcccagtttctgtatataaatgtctgcttagactgggcagcaactacagaatttaacataactgaaaaatctccacttgtaggattcttcattccggctggaacatcaattcctgaacatacaagtctgtgctgctggttttcaactgatcttgcaccaacggcaacatatgaaagaacatctgaaagataccagtaattttcagggtaaagcatttcatcagcaggactaagatgtgtctctttcattacatcaatatgcatttttctgattgcaacaagaccagcaagaaggtcaggcttcttttcaggatctggctggtgaagcattcctttgtaacctactcctgtagttcttggtttgttagtgtaaactcttggaataataataactttgtctttaatcttctcctgaaccttaacaagtcttgatgtgtaatcaagaacagcagtttcattatctgctgagcaaggtccgataatagcaagaagtttgtctgatttgccagtgataacatcagcaatttcagcatctctttcagcttttaatgcttttatttcttccggtacagggtactgttctttgatttcagtaggtgtaggaagctttgtgacgaactcaaaactcatataattttctccttaaaaatgtatattcaattaattacatttgcataaaaaacataatgtctatgtgattataacatttgttttcaaaaatgcaaaataataatacagaaagtactctttgtggtacaatatattaaagattgtcgggaggcgtggctatgaatgttaacagaattatatggatagttttggatagtgttggaattggtgaggccagggatgcagctaagttcggtgatgaaggtgcagatacattgggacatactgcaggggctaatggaggtcttaatattcctaatatggtaaagcttggaataggcaatatagacggtgcacataaccttgagcgttgtgataatcccatcgggtgttttggaaaactggcagaagtgtctgcaggaaaagacacgacaattggacactgggagatggcaggaatatattctcctgatccgtttcctgtgtatcctgatggatttccagattgtattattgatgaatttattaaaaagacaggaattccaggaatactttgcaataagccggcttcaggaacacagataattgctgaacttggtgatgaacatgttgcgacaggaaaaccaattgtatatacatcaggagattcagtttttcagattgcatgtcatgaagatgttgtgccggtagaaagactttatgaaatgtgtgagacggcaagacatatccttacaggaaagaatgctgtagcaagagttattgcacgaccttttgtcggggagaatggcaattataagagaacacctaacagaagggatttctcactaaagccaagtgaggataatatattgtgcagagtccgtgataaagggtttgatgtaatcggagtcggtaagattcatgatatatttgctggtgtgggccttacagagtctaagcacactaatgacaatcaggatggaatggatgtaacacttgattacatgaagcaggataataaaggaattatatatactaatctggttgagtttgattcaacatggggacatagaagagattataaaggatatgccagaggtcttgaagaatttgatgaaaggctttcacaggtgttagacactttgaaagacacagatatgcttgttattacggctgaccatggttgtgacccaacctataagggaactgaccatacaagggaatatgttccactgcttgtatatggaaaatgcttaaaacatggcgttaatcttggaacaggtgacacttatgctgatatagcacagacactggctgagatttttggcacagaaccggttaagataggaaagagttttcttaataagattatgtaggaggtctgcattatgagaatggttgatattatagagaagaaaagagatggtggaaagcttactaaagaagagatagagttctttgttaatggctatgtcaggggggatatacctgattatcaggcttctgcacttcttatggcaatatatttcagaaatatggattatgatgagactcttaacctgacgcttgcaatggaaaacagcggagacaagctggatttgtcggatattaatggaattaaagtagacaagcacagtacaggtggcgttggagataagacttcgcttgttcttgcacctatggttgcagcacttggcggcaaagttgcaaagatgagtggaagaggacttggacatacaggaggcacgattgataaactggaaagtattccgggatttaacacttctctgtctgagaaagcatttgttaagcaggttaacgatataggaattgcaataacagggcagacaggtaatcttgcacctgcagataagaagatatatgcactaagggatgttacagcaacggtcgagaatatttcgcttattgcaagcagtattatgagcaagaagctggcttctggtgctgatgcgattgttcttgatgtcaagaccggaagcggcgcatttatgaaaaatgaggctgatgccgtaagtcttgctaaggagatggttcgtattggaaaaggcgcaggcagaaatgtaacagcacttattactgatatggaccagccgttaggatatgcagtcggtaatgcacttgaagttatcgaggctatcaatactttaaaaggtgaaggaccagaggatttaactaagcttgtccttaatcttggaacatatatggtgcttgctgcaagagatgaccttgataaagaaactgtaagaaaagaattggagagagtaataagtgacggaagtgcgttggacaagatggcagagttcgttaaagcccagggtggagatcctgacgcagtatataacacagataagttaaagatatctgatacaataacagaggtgtgtgcagatagcgatggatacatccagtcaatccagtccgagctgataggaaaatcttcaatgattcttggaggcggaagggcagccaaggacgatgtgattgatttatcagttggagttgtgctttctaagaaaataggcgacaaagttagcaaaggtgatgtgattgcaagaatttactgtgataatgcagaaaagactaaagaagcagaaacaatgattaaggatgcgtatacattttcacaggaatttgtcgaaaaaaatgtacttataaagggaatagttggttaatagttgtaaataattggattttgtgatattatattgaccaaacggggctttgccctaggtttgtgaattgaaaaggagagttacgatggaagtaagacagggtgctaacgcaagagatgtaaagggttatgatacagaaagactgagaaatgattttcttatccagaatcttttcccagctgatgatttcaagcttgtttacagccagattgatcgtattatcgtaggcggatgtatgccggttaataaggaacttacacttgaggcaggttctgagcttaaggcagcatatttccttgagagacgtgagatgggtatctttaatgtaggtggcaacggttcagttatcgttgatggtactgaatataagtttaaatatagagatggtctttatattggtatgggttctaaggagattaagttcaagagcgaggattcttctaagccagctaagttctactttaactcaacaccagcacataagacatatcctacagtattcattgatccagaaaaggatattaaggatgagttcaagcttcagcttggttctgttgaaggatgtaataagcgtcttaacagaaagtatattttaccaggtcaggttgagacatgccagttagagatgggtatcacaactcttgagccagggagcgtatggaatacaatgccatgtcatacacatgacagaagaatggaagtttacttctacttcgagattccagaagaagatattgttgttcactatatgggtgagccaacagagactcgtcatatcatcatgagaagcgaagaagcagttatttcaccaagctggtcaattcattcagcatcagctacacatgcatatgcatttatctggggaatggctggagaaaaccaggatttcgatgatatggactgggtagacatgaaggatttaaagtaatccgtcagtacatattttactaaggaatgtaacctatagagggtttcatttataaattattaattggaaaaggagaattaaaatgtcagttaatttttcacttgaaggtaagattgcatttgtaactggtgcatcatatggtatcggcttcgctatcgctagtggtatggctaaggctggtgcaaaaatcgttttcaacgatattaagcaggaattagtagataagggattagcagcttataaggaagctggtatcgacgctcacggatatgtttgcgacgttactaacgaagaagctgttaacgctactgtagagaagatcacaaaggaagttggaccaatcgatatcctcgtaaacaacgctggtatcattaagagaattcctatgtgcgagatgacagctgctgagttcagacaggttatcgatgtagatcttaacgcaccattcatcgtatcaaaggcagtaattccttcaatgatcgaaagaggacatggtaagattatcaacatctgctcaatgatgtcagaattaggccgtgagacagtatcagcttacgctgctgctaagggtggtcttaagatgcttacaagaaatatttgttctgagtatggtaagtacaatatccagtgtaatggtattggacctggttacatcgagacacctcagacagctccattaagagagagacagccagatggatcaagacatccattcgactcattcatcgttgcaaagacaccagcagagagatggttaaagccagaagaattagctggtccagctgtattccttgcttcagaagcatcagatgcagttaacggacacatcctctatgtagatggtggtatccttgcatacatcggcaagcagccacagtaatcgcggacatagattagcggtgcagataacaataaagggcttgagacaagtttacttgtcatcaagtcctttttgttatctatagcgcatggaatgcgcgtacaacttggttaaaaaccaagttgtacatacaccgcgaactacaagcgcagtgcgcgaatgaataaagaacacaggaatcaagcttgcttgaattcctgtgttttttatgaatgagcatagagcgcgacagcgcgtgtggactgacctgcggtcaggacacggcactgcgcgaaagtagtgggacgcacctgtcccgtccaccaattcccagccgcaagagcgaagcgagttgcggcgtccgttccggcacagaggaattccattgtatatgtggtgttataatcagcctgataggttgtccaatatcctgtcttttaacatgatacctataggtagtcgtataaaatgtaaccttataggtagaaaacacaagcgtctatatttataactatataataaacctataaaactattttaaaattgtatcttataggtatatacccatctaatctgatattaatcaccaaaaatcaccctaaatccatcaaaaaatacctataaagtacattaaaaaatataatttataggaaaaggttcatttatatgtgtagaacatgcttaaattatttataaacaacatatttagtaatcagcctgataaacaacctgaaacacttataaaacaatacttgtaattatgccaatcaatgataaaatcaagtgaaagggggatatgcacatgtcaatatttaaaaagaacacaaccaagaaagagatagaaacatcactcaatgaaatccagattaatcttgagaataattacaaggatttagcaattaaggctttcaaagactcatcagagcttgttgaacggtatcataatgagtctttgattgatgagaaagcgtatggtaaatataaaggacagcttgatgtatttgcaaagagaatggaaggctacagtcacagactgaatgtgaaatattaaaaagtattgaaaaaaataataatatattgtcaagatatagatacgtatgttatattaaatatgtagatacaaccataacctgacttgtgaatggaggggtactatgaaaaaagtatttttaattgggtttacattgatgtgttttgcttctatggcaggttgtaagacaaagccgccaaaggttgcacatccatatgtgcaggagtatgtggctggcagagagcatggcaatgtaaaagtacaggattttcttgatcatggagaagaatttgcaattggggcagatgaaaatggaaaagcggtatttaaagaccctcagaaagcatttgaggcgttagtaagggattattcagatggtattaatctgattagggatgagtacaagcttggaccaatcactccaagaaacttttatgattacatgacgtatgggtatcaggttaatactggtacagaagaaagtaaggagcaggcggcttttgtgactcaggttttagatatatatgagaatagttatgattttgataaatagaatatgttttaatataataaccgcaccgtcataagacggtgcggttattcgttaatccacaacccttatagtactaatcacaggctgtttactcttatctgtaatcacaccattctgattagtgtcggtgcagtctttacatatcttatcgacaatgtccatgccgctcgtgacagttccgaaagctgcgtattgtccgtcaaggcttagagtgtccttttgcataatgaaaaactgagaacttgcagaattattagcagaagagcgtgccatagaaatagtacctcttacatggcttatattattttggacgccatttgacttgaattctcctttgattttctcagaagagccaccggttccgtcaccattagggtcgccgccctgaatcataaatccatcaattacacgatgaaaagtcagaccattatagaatcctgaattagcaagattaataaaattagtaacagtaaccggcgctgtgtctgcgtcaagttctgcctcaattgttccatagctgttgacttcaatggcaacatggtgttttccggataacagattctgggtatcatccgatgatgaattactggaagccttttgtccacaggaagtcatgctgaataaaatacataacagggttatgcttaataataaatgctttttcttcattttaacaagttcctttctgaatttatagaatatagtataccattatcagccgatatgtaaaatattaatataaatttgactatcaaaatttatatacatgtgatacaattatcaaagatttcacaatatatgaggggagattaatttaatgaaacttgaagtaaaaaatcttaccaagtcatttggcgagaaagaagtccttcacggtatttcatttgatgtggaaggcggcaaggcactaggccttcttggacgtaatggtgcaggaaagactacaactataagaattattatggatgtatttcatgctaattcaggagaaatatttcttgatggtaaaaagtttaatccaaatgagcatttgatagggtatctgccggaagagagaggattatatcctaagaaaaaagtatcagaacagcttgtgtatcttggcaggttaagaggtctgtctaaggcagaggctaagaagaatactgataaatggcttaaaagactgcaggtatcacagtatacagatgtgaagttagagacactcagcaaaggcaaccagcagaaggtgcagcttgcatcaacacttgtctgtgagcctgagattgttatattagatgagccattcagtggacttgacccggttaattccaagatattacaggatgttgtaacagaattgatagaagaaggaagaatagttatattctcaagtcatcagatgagctatgtggaggagttctgtgaggatatagcaataattaataacggtgagattgcattatcaggtgatattgcagatattaaggctgaatatggaaagaatcagcttataatatcggctgttggaatgggagcagaagaactggcagaaaagttaaagacaagctgtgcggatacattatctgtaaccggaatacataaagatggtgttatagtaaagaatattcatgagctttctggaaatgcacttattaaagaaattatgaatgctgatatagagatagcatcatttgacagctacagaccatcgcttaatgatatatttgtaaaagctgtagggggtgacagataatgaagaagttcggagtaatattccagtatgagattatgaattatatcaagaataaaagctttatgatttctacaattgttatagctgttcttgctgcagtgatactgtttcttccaagtgtatttgatatgtcaggtattcttggaattaataaagatgatactgatgataccgctgataatacggagattactgatgttatcataatttgtgatgaaaaagacatatttgctggaacaggaattgtagaaggtgtattaaatgatatgaagattgaaaatgtttcttcaagagatgcacttgtagataagattgaaaatgatgaaaatgtcattgctggttttgttgtaaagaatgcaacagattttgaatatgtcgttaataatagtgatatgtttgatgatatgacgcagagatttacatatgcaatgcagctgcttagccagtataactattgtaaggagaataatctggatatggcagagattgaaaatgcttttaatccggttatcaattccgagactactgtgcttggaaaagacatgatgagtaattactggtattgttatgcacttataattattgtgttcatggttattattctgtatggagtaatggtagcaacttctgtaacacaggagaaatcaaacagaacaattgaacttcttgtaaccagtgctgatactaacagtcttttctttggaaaggtactggcgggtacatctgctgcacttttacaagttggaatcatatttgcagtaatacttggaagctataagattaacagagactcatggggtggattatttgataaaatatttaatattccttcagatgtgcttataacatttgcattcttcggacttggagggctgctgttctatgtattcatatatggtgcaatgggagcgcttgtgtctaagacagaggatattaacaaaagtgccggaagtgtacagtttgttattatgattgtatattttataggattatcccagcttaataatgtagatggaattcttatgaaggttctttcattcctgccgataagctcatacagtgcgatgtttgcaagagtggcacttggaaatgtaagttttgctgagataactgtatcgtttgttattcttattgtaagcacaatagcagttggtatattaggctctaagatatacagaatgggaacgttaagatatggcaatccaattacattaagaaatgcatttaagaatcttaagcatgaataaaaagagggcggcaaacctgtaatggtaagccgcctttaataatgcgttattataatttaactgtttcgccgccttttacttcaacaatagtactattatttactgaaagccatactgacttaacagaagggttatgaacatattcgttatcagcaaagaactcaagtctgtcaaacaattcgttgtattcaacgatatcagaattggttgcataccagatatcatcacggttggcaatcatttcacagaattcctcaatgatttcccaattattgtttctttcaaattcaaagctgtgtccccagacatacatcatgtaaagatactgctttttagtaagtgccatgaacttcttgccaaaatcaacaaggttatgattgtgatgacaggttggaacccagcgcatatagtcttcaggcatagagaatccgttctcatcccctaaaagcataggaccctcggcattagcagcataggcttctgcagctttagtggcagcgtatttatcattagtaactcttgcatatttgatgccgactgatttagcaatatcaacgatacggttatcgtaagaaccattaggatatgcaagaccatatattggacgtttgaatattttttcaagattatctttatcatcgagaatttctctaagggcattataattgttaagtctgatcattgtaggatgtgtaaatgtatggacagcaatatcatgtcctttataaagctcaggccattcctcctgaggaattcttatggcagggtcaataatacctgtattaagattaaaggttgctttaagattaaatttgttaaaaagctttacaagacgtctgtcctcaattttaccatcatcataactgaaagtaagaactttgaatttgccacctgggaatactttatatactttattcatagttgttgtctccatattatataactagtttaaaatcaatgttcatattatataccacaattatttttatgtcattcttttttttataattaattagaataattaggataaatcagaatgattaaaatgtttattgaaatattttattgattatgtcgagtacatgaacttttttgggaatactctgctttgctttaagactgatgctgcggattggttcattgtttacatatatattaattgatccatatatttgtgacgaattgacaggtgcagaaagcacttcaggaatatctgcctgtatagttacagaatcatcttcacagacaagaaattctattgaacagtcaggtataagctcacagaaactattttttcctttggatacaggaacgtaaaatgtgtattcattattaaaatatttatgtcggctgtattgctttccaagggctataagataacgggcatcactccatttgtaattcttatttggtggccagccacatgcaagcagggcaatacacagtgtccggtctttgtctttgtatgcacatacatagcagtatccggctttgttagtgaaacctgtttttccagagataataccttcatcaggatttaaaagattgtttttgttgttaagctggtaatggtatctgcctgttgtgtctgaaattgttttagaaacagtctgtgttatatataaaaaatcctcattattaatacaatatgccatggtttttgcaaggtcatatgctgttgtatgatgaaaactataattatcctcggcatcaagaccattaggtgttatgtaatatgtgtctgataaaagaatatcatccgctttttcattcataaggccggtaaatatatgtacaagtatttcactttgttcatggttaatctcagaaagaaatgaggaatcgtaattataattattgataaatggagtttcagaccttaaagaaggatttttacatagtaagtaataagcagtattttcagcaattattacagctgaatcattatgtgattcaagcataagagagtagtataggtcgttaattatgaattgctcaccagttacggcgttaagctgtacatcaggcatggaagctgcgtaggaggaagttgttacgacaaaattcttgtcacagttttccaaagcaataataagagtcatgattttagttgtgcttgccatgcttacagccgttgtttcattgcttccagaaagtattctgcctgaatcagcatcaataagaacagagtattttgaataaaggcctgctgcctgagttgttatgggacagaatatgcaacaaaccaacaacgataatactggtataattaataaaaagtttttaaatgatttcatagaaatttaataaaatatctttctatgattatattaaaatgctttgaaattatgagtgctataaggtattattatatatatattaatacgtgatttaataccgtctggaataaaaaaggagataactatggcatatatagaatttaaaaatgtaaagaaaatatacaaaatgggtgatgtaaagataagagcactgaatggagtggattttaagattgataaaggtgaatttgctgttgtattaggacccagtggtgcaggaaaaagtactattcttaacattcttggaggaatggatacatgtactaccggggaaataactgtagatggaaaaagaattgataagtataattcaagacagcttacagcatacagaagatatgatatcggattcgtattccagttctataatcttgtacagaatcttactgtcaaagaaaatgttgagctggcaacgcagatatgcaaagagcctcttgatattgttaagacaatagaagctgtgggattatctgacagaatgggaaattttccgtctcagttatcaggtggtgaacagcagagagttgctattgcaagagcacttgcaaagaatcctaagatgcttttatgcgatgaacctacaggagcacttgatattaatacaggaaaaaatattcttaagcttttaagtgatatgtgtaagaagaatggaattactgttgttgttataacacataatcaggcaatttcagcaatgggagataaagttattaagataaagaatggtatcgttgacagtgttgttattaatgataatcctgtttcagtagacgagatagactggtaatactatggaggattgttcaatatgggaaaatcagtatggaaagatctctttcgtgagattaagaggacatttggaagatttatagctatatttgcaattgttgctattggagtagcattttttgcaggagtaacagcatcttctaatgatatgaagaattcaacggatcactattatgatgagtataatatgagtgatttaagacttttatcatcaataggttttaatgaagatgatattaaagctataagagcagttgatggtgttaatggagtgtatcctgcatattcacaggatgcagttatcaggaaagacagcatagagaccgctgtacatataatgtcagtacctgataatacagacaggaataatgagaattacattaaccagttacgaatcaaggaaggacggcttcctgaaaagagcggtgaatgtgttgtaagatatgaagataccaaggacaatttttctataggagatacaattaagctttcatccggaacacaggatgatattaatgacagtcttaaagattcagagtatacggttgtaggaacagtatacacaccttattatgtgtcgtatgaccttggaactactaatgtgggcagcggcaggattaattatcttatgtatattacagaagatgaatttatgtccgattatttcaatgaagtatttgcgacagttgatggagcaaaggaattggatacatatggaactgaatataaagatctcgttaaagaaacagctgacagaatagataatatttcacagagcagaattaatgtaagaaaagatgacatacaggatgtatatgaagattcagtaaatgaggcaaaagaggctgccaaagcggctatatacgaccatgttgtagaatcacttacagaacagtacagtaattattttgtaggaatggatgtttcagctattattgagccatatatccagccggcatatgagaaagcacttgctgattatgattttaatagcattgagacgcaggctaaggaagattttgaatctaaatatggtgacagtgacgactggaaatggtatgagcttacaagacaggaacagtattcttttaaagattatgaatccagtgcagacaggatgaaagccattgccacggtatttccaatattctttatagttgtagctgctcttgtctgtcttacaacaatgacaagaatggtagcagaggataggggacttataggaacatataaagcactaggatacagtaaaaaggtaatagcgttcaaatacatagcatatgcattaattgcttcggttactggaggaatagcaggctgtatcataggtcttaagctgtttccgcttgtaatatatgattcttggaatataatataccagcttccgtcaatagtgtacgacagccatatacttctttcaattatagccattacaagcatgattttagtaacggttatagcagctcttttttcatgctacagtgagttagaagaggttccatcagagcttatgcgaccgaaagcacctaagagcggtaagaaaatccttcttgagcatattacatttatatggaaacatatgtcattcacaatgaaggttactatgcgcaatctgttcctgtataagaagagatttcttatgactgttgtaggaatagcaggctgtacggcacttatgacagcaggctttggaattaagaacagtattgaaagccttatacataaccagtacggtgagcttatacattatgacagttttgccacatttacagatggggttacacaagaggatgtggatactcttgaaggcgacctgtcagcagacggacacattgatgattttctattaaactgtggttattctgatgatgttaagagcagtgaagatacagagacagcagaatatgtcatagttgacgataagaatgcatttaaagattatgtgacattaagaacaagaagaaagcataatgatgtggttcttggagattcaggcgttgttatcactgaaaagctctctaaagatttaggagtaaagaaaggcgataagattacagtaacatcatctgccggaaagcatgcagaagctgttgtatcaggcattacagaaatgtatgttaatcattatgtatatataagtacagaatattataatgaactttttggaaatgttcctgataacaacagggtgcttataaagattaacggagatgtaagcgaaactgaaagttatatgggagatgaataccttacaagagattatattaagggggtgagtttccttaatgctaatgtcacacgatttgaaaatatgatacagtcacttgacctggtaacctgggtacttataatatcagcggggctgcttgcattcgttgtgttatataatcttacaaatgttaatatatcggagagaagaagagaaattgcaactattaaggtacttggtttctttgacccggaggtaggcatgtatgtgtaccgtgagaatatattccttacactaatcggtggtgtgtttggactattattaggaagacttcttcatatatacataatgcttactgtagagatggatgcaataatgtttggatatgctattaaaccgacaacatatatatattcatatcttataacactgattttctcagttgtagttaatctggccatgtatggaaagttaaagaagcttcctatggtcgaatctttaaagtcagtagaataaaacggacagccctttcatatattgtgaaaaacaatagtgaaggggcttgtttttgtatgacgaatcactctataaaatccttccggatgaattaattaaagatattggaatatatgcaggattacagcatgtcagggaaatacgcctgcgtataggaagactgcctgctgccatatgtgataatggagaacatatgggaacaagacctgtagatgaacatatgataacaagaatactgtcaatagcaactaaatattcatcttatgcatatgaatcctgcatggcaaatggatttctgacaatcaaaggcggacacagaataggacttggcggacaggttatatgggagaatggcagggtaaagaatttctcacatgtgacattcctgtgtataagaattgctaaacagatgaagggctgtgctgataatataatggatgagcttttaaaagacgggttaaagcacactattataatatcaccgccgggttttggaaaaacaacactgcttagagacattataagacagttagctgataaatatagaaaaaatgtagctttaattgacgaacgatgtgaaatagcggcctgtgtgaacggagttccatgtaatgatattggctgcaggacggatgttttagatggctgtaataaacttacaggagtatatatggctgttcgctcgcttagtcctcaggttgtagcaatggatgagattggtggggaagatgatattaaagctgtaaaatactgcattaaaagtggctgtgctgtaattggaactgcacatggaagcggtatatatgatacagatgaaagacttgcaggtcttttcggagaaaatggatttaagagagctgtaatattggaaaaatgtggggaggcaggaaaatgtctggatatataggcgggatattaatactttcaggctgttttatgtatggtctttcatacagtcagagattaaaaaacagaataacaatattgaaagacatggtaagaatgctttctgtaatgaacaatcatataggatattcacttatagatatgacacagatatttgaacgtcttggagattttgatatgtgttcatatgtcagggattttaccggatacatatacgaagcattgaataaatcggacattgatacatttgcattgatatggaatgaggctgctgataaagcatttgcaggaatacttggcaaaagacaactagagattataaaagaggcaggctctataagcacatttattgacaaggacagtcagttaaaacacatacaatctgttgtgtgtgaacttaatgaggaacttgatgtggttaagaataatgcagcaggaaagatgaaggcttatatcgttacaggaatatcagcaggacttatacttgtgattgtacttatatgaatcggaggtgaagtatggaggtaagcataatattcaagattgcagcggtgggcatagttgtttctatacttaaccagatactaaagcataatggaagagatgaccaggcagcgctcacagcactggcgggactgcttattgttatatactggatattaccttatatacttgaattgtttactaccatgaagaagctttttgaattgtgatagggggtggtacatattaatgtgttgtcgctttcagtgtgtgcagttacaggtgtgattcttgctctggttttgaaaagtacaggctcctcaatgggaacttttgtgtcagttgttctgtgtgtaggaacagcaatgcttgtatttaacgggcttatatccgtgtacacaagaatcaatatgtttactgccggtattaatcaggaatatataaaactgatagtcaaagtcataggtatatcgtatgtaacagaaatatcatcaaatatatgtaaagaaaatggatttgcagcacttgcgtcagctatggaaatatacgccagaatttctgttgcaggcttatgcataccggttatagtaactctttttgaaatggtttcagaggggattgtctgactaagaaaataattgcctttatgattgcgtttctggcggcgctcatcatacagaaaacatatatatatgcacaggatgaggatacagttaattatgattcactgacagatgaagctgattatagtgaaatagacagtacgcttgatgattatggctggaagggggcatcttttaaagaacttgtcaggtcggttgccagttcggatacggatataggctttaactttaccggaacagttaccgaggcaattatttctaacagaacagttctgatacagatattacttttatctatatgcgcaatgtttcttactgtgcttgataaaaatgcatctgattcagcgatgctttttatatcattcattcttatgacgctgatagttgcggtgtttattaatgcagcaaggacaggctatgaatgtgttcagatgtcggttgatatatacaaggcactctgcccggtgttttttccggcagttgcatattcgtgtggggcatcaagtgctgcagcatattatgagataattctttttcttatgtacatagttaatgtccttgtgaaaaatgttcttatgagatgcaattatgtatatatgatattaggcatgtttgatacattcagtgaaaaagataagttcaacaaaatgtgccagcttataacaaagattataaaattgtcagtaaaaggaatgcttatgttttttctgggacttaacggaataaaaagtctgatacttccattaagcgattcacttaaaatgtccgttttattcaaagctgtttctatgattcctggcattggaaacagtgcacagactgtatctaagacaattgcagggtctgctgtgcttgtcaagaattctattggtgtggctgcggttattgttatggctgtaataataggaattcctcttcttaagcttgttgtcatggcattgttatatcagattcttggagcagtattagaacctgtggcagacagccgtatagtcaaagctgttcttgttctgtcaggaagtcttgaaaatatgatatatatgattgctgtcacagttgttcttatgtgcctaacaatggcaattatatgctttgcaactaatattaatctatatgtttaaatgtggtaatgtgcaatgacaggtcttattaactggtttaaaacaatatttattcttgaaattacaggagagattgcattaaagcttgtgccaccaaagtataaggaattcatagcatttgtaatgaaactgatacttgtaatggcgataataattccgctgcttaatattaagaatgcagatataagtgagattacggatggtataagtaatggatttaaaacatattctaaggagaacgataatgtctcacaggctttatataatacttcagacaagaaaatggctgaaaaaattataagtgaagatatcaatagcactgcagcttcttacggtctgaaaactgtttctgtaaaatgcagcttcacatcagacatgacggcggtcagtatgataaatgtatatgttaaagaaaacaatattgcaggcaatgataatattgacagattaagaacagatatagctggcaggtatgaaatatctgtagaacagatagatatcagggaggcaggcgtaagtggataatggtggtaaaaatgaagcattttttacaggattactgaataaaacaaggaaagacaaaatatttatagtaatactggcagggatacttatgatggtgattgcaatgccaactaaaagttcatctgcaaaaagttatacaacaggtccggttatatccacagggtcagaagattatgaaaaaaatcttggcgaagaactacagcagatgcttgaaaatacggatggagtaggtaaagtaaaggtcctggtaaaaacaactgataccaaagaggttaccggtgtattagtagtgtgtgagggaggtgatgataaaaatctggttgcttatatcacggatgcgataaatggccttttaggtgttcctgtacataaaattaaagtgatgaaaatgtcggaataattattttggaggcagttttgaaaagagtaaaaaagaatcatattataattacggcacttgctataatgatagcagcagccgggtatattaattatgcaggtgaccttgatagtataattaaagttaaagataaagaaaagacggctgcggttgcagctgacaatgtgtcaacagacaataatgaagctgaggctgctgacacagattttacagatgagccgggaactgttatacttacatcagcaggagttaagtcagaggctgttgcagctgcaaagttaaacagggaacaggtaagagcttcaagcatagagaatctgaaaagcatagctgatgatgcaggtattgcagaggatgctaagaaagctgcggttgaacagcttgcaaagcttgaggacaatgctgataaagaaacggcaatagaactattgttatcagctaaaggctttgattcatcggtagttacagtatctgataccaatgtggatgctgttattaatgtatcagagctttcagatacagataaagcacagattgaagatataattaaaagaaaaactggctttgctgcggataagataacaataaatatttgcaataattagtgtttatgttataatctttttaactttgagttaaatatgaatatatggaggacggttatgacaaaagagtttgaagatagaggtacaacttattctatacatgagaatgttaatattggcgaagttaaggtggctgatgaagttgtagctattattgctggtcttgctgctacagaggttgaaggtgttgacagccttggcggtaatatcactaatgaaatcgtaagcaagcttggaatgaagaatctttctaagggtgttaaggtaacagttgaagagtcaagtgtccttgtagatataacacttaatcttaagtatggaacacagataccagctgtttcagctaaggttcaggataaggttaagtctgcaatagagacaatgacaggactttcagttacagaggtcaacattaaggttgccagtgttaatgtagaaaattaaattcaggagttaaaagatgacaagatctacaatgagggagcatatttttaagttattattcagagctccttttatcgataacaaagatgagtatgaagagcagattaatctgtattttgcagatgcagatatggtagatgcttcacatcttaaggaagaagaatataattacatcaaggataagacattagcaatagcagagcttatacctgagcttgatgagaaaattgattctgtatctgagggatggccaacaagccgtctaggaaagacagagctttctattatgagacttgctgtgtatgagatgctttatgatgaggatattcctactaatgtagcactcaatgaagctgttgagcttgccaagaagtatggctcggctgacagcacagcagcttttgttaatggtgtattaggcaagttaattaaagagtaatgcagttttttgcatgtaaagtgaggatatatggctggagtatatactgtaaagcaggtgaattcctatattaagaatatgtttaagcaggattttctgcttaactcggtttctgttaagggggagatatctaattgcaagtatcatacctccggtcatatttattttactttaaaggacgctgatgcggcactttctgtcattatgtttgcaagtcaggcagcaaagcttgcatttaagttaaaggatggaatgtcagttgttgtatcaggaagagttgatgtgtttgatgcagcgggtaaataccagttatatgctaatactgtgcagcaggaaggtattggagaactgtaccagaagtttgaacagctaaaacaatattatgaggatatgggatattttgctaaagaatataaaagaccacttcctgcatttacgaaaaaattaggtgttgttacatctaagacaggtgcagcagttcaggatattatgaacatttccaaaaggcgtaacccttatatccagattgtactttatcctgcatatgttcagggagaacatgcaaagcagtcaattgtaagcggaattaccagacttgataagatggggcttgactgtattatagtaggacgaggcggcggttcaatagaagatttatgggcttttaatgaacctgaggttgtagaggccgtgtttaacgcttcaacaccagtaatatcagcagtaggacatgagacagattttacactcactgattttgtagctgatatgagagcacccacaccttctgctgcggcagagcttgctgttacagaggtagcggttgttgagaacaggatatatgaatatgaaagacgattaaagcagcagatgatgtattcgttgtctgcaaaaagagactatctggaaagattaaagctacagatggaatatcttaaccctgtcaatcagatatatgataaaaggcagcggcttatgaatatggaagataagctgaacatgttaataaaaagatgtgcggcagataatagaaacagacttcgtctgtatgcttcgaaacttgagggcttaagtcctttaagaaagcttgatatgggctatggttacattgagaattctgaaggtaatagaattgtaacagccaggcaggtgttggaagatgacgagattacagtttatcttaaagatggaagcatcagatctaaggttattgaggtaggggaagcatggcaaaaacattagaacagtcatttgaaagacttgaagaaataattgcacagatggaaaaatcagacacaacacttgatgcatcatttaaaatgtatcaggaggggatgaagcttgtcgaaagctgtaataaccagcttgacaaggttgagaaacaaatcatagttttgaatgatgatggagaacaggacgatgagtgattttaagaatgaattggaacaggaagtagaatttattaatgatttaatatcaagatatcttcctgatgagacagggcttgataaaaaaattagagaagccatgaactacagcgtaaatgctggtggcaaaagagtaagaccaatgcttatgcttgaggtgtataagctgtgtggaggtgatgactgtcaggttgtctatccatttatggtggctttagaatgtattcattcatattctcttgtacatgatgatcttcctgcaatggataacgatgattacagaagaggaagacttacaacacataaagtgtttggtgaagatttcggaatacttgcaggagacggacttcttaatcttgcatatgagattatggctgaagcacttatatcaggtgaaggagacatggcggctaaagctaaggcaatggaagttattgcaagaaaagccggaataaaaggaatggtcggtggacaggctgttgatgttgaacttactggaaagacattatctgaagaacagcttgattttatattcagattaaagacgggggcattaattgaagctgcatttcttgcaggagcatatcttgccggctgtgatgagaaatcggctgaccggttatgcagggcagcatcacttataggattttcgttccagattagagatgatatacttgatgtgacaagttcacttcaggaacttggtaaacctgtattttctgatgaaaagaataacaaaacaacatatgttactttatatggaatggaaaaagccaaggcagatgtacaatctatgtctgatgaagctttagatataattaagagtgttggaaagaatgaatttttagaggaaattgttcttaaccttatacacagaaacaaataaagcaggtgtgttatgattcttgaaaagataaataaaccaaatgatataaaacaattatctccaattgaatataatcagcttgcagatgaaatccggagatttcttatagaaaagattagtaagacaggtggacatcttgcatctaatcttggtgttgtagagcttacgatggcacttcatctggcttttaatcttccgcaggataagctgatatgggatgtaggacatcagtcttatacgcataagattcttaccggaagaaagaatcagtttgaccagttaagaaagtttggcggaatgagtggcttccctaaaagaaatgaaagccattttgatgcatttgatacaggacacagctcaacatcgatatctgcaggattaggacttgttaaagcaagagatttaaagaatgaacattacagtgtcgtatctgttataggtgatggtgcacttacaggtggaatggcctatgaggcacttaataatgcttcttcacttaagactaattttattattgtgttaaatgataatactatgtcaatagccaagaatgttggcggtgtaccacatatgcttagtaatatcaggtcatcagattcatattatgaccttaaggagaatgtggctaatactctgtataagcttccgggtggagatcatattgtagacaaaatcaagaaaaccaagagcaatcttaagcagatgatacttccgggacagatgtttgaatgtatgggaatatcttatcttggtccggttaatggacatgatattgagaagcttattaaggtgtttcatgttgctaaacgaattaacggtgcagttatcatccatgttgtaacacataaaggacatggatataagcctgcagagcgtaatccggctaagtttcatggaataggaccatttgatattataacaggaaaagaattgaaatcgtctgataagccgacttattctgatgtgttttcagaaaaaatatgccagcttgccaaaaaggataagtcaatagttgcagttactgcagcaatgcctgatggaacaggacttaataaattctccaagtggtttcctgaaagattctttgatgttggaattgcagaagagcatgctgtcacgttttcggcaggaatggcagcaggtggattaaaacctgtgtttgcggtgtattcttcatttttacaaagagcttatgaccagatacttcatgatgtgtgcatacagcatctgcatgtggtttttgcgattgacagagcaggtcttgttggaagtgatggagagacacatcaggggatatttgacctttcattcctgacttctatacctaatatgacggtcttagctcctaagaatagcagggaacttgaagcaatgcttgaatttgcactgtttaattttaattccccggttgcaataagatatccgagaggtcaggcttatgacgggcttgaagagtataatgcaccaatcaggtacggaaaagctgagatgataattgaagagtctgatattgcacttgttgcagcaggcaatatgcttattacggcacaggcagtcagagataagcttaaagaaaaaggatataatataactattgtcaatgagcgttttattaagccggttgataccgacatgctagagagactgtcattatcacacagacttatagttactatggaagaaaatgttttgtcaggtggctttggtgaagcggtctgtcaatattatgatgatacatgcaacgacatagatgtacttaatattgcactgccggatgattatgttgaacatggcaatgttgatattctgcgacgggaatcaggtgttgacagagacagtattattgcgaaggtgcttaacagatgggcaaatgtattgaataaggataagagtaatgagtaaagaaagattagatgttttattagttaataaagggcttgcaacttcaagagagaaggcaaaagctattattatgtccggtaatgtatatgttgacggacagaaggaagacaaggcaggtcagtcatttcctgatactgcagtgatagaggtacgcggaacaactcttaagtatgtcagccgtggtggtcttaagcttgagaaagctatgcagaattttgatgtgacgcttgaaggcaggatatgtatggatgtaggttcatcaacgggtggatttactgactgcatgcttcagaatggtgcaattaaagtctatgctgtcgatgtaggacatggacagcttgactggaagttacgaaatgatgagagagttgtatgcatggagaaaactaatatccgttatgtagcacctgatgatgttgcagacagaatacagttttcaagtatagatgtatcatttatctcacttactaaggtacttactccagtaagaaatcttcttacagatgatggccagatagtatgtcttatcaagccacagtttgaggcaggacgtgagaaggtaggaaagcatggcgttgtaagagataaagatgtgcatatagaagtaatcaataaggttattgattatgcaatgtcaataggatttgaaattcttaatcttgagttcagtcctgttaagggtcctgagggaaatattgagtatctgctgcatttgcagaaaattgcagaaccacacataaaagaaattccatttgttgtagaaaatgtagttgaaaaagctcacgaagtattgtaatatatatttaattcttttcgtatactaaacgaggttcagcatgaaatatttttatattgttactaacaggtttaaagatccggatggtgttaatacaagaaagatagcacattttttacgctcaaaaggtgctgaatgtgtatgccagatagaacaggaagaggcatttaataaaacaggttcgtacagtgatgtaagacttgttcctgataatactgattgcgttattgttcttggaggtgatggtacacttattcaggcatcaagggagttgtctgagaaggatattccttttataggcgttaacatcgggactcttggttatcttacagacacagatatgtcaagctttgaggagacattagagagtcttcttagagacgattatgagattgacagacgcatgatgcttgatggatgtatatatcgcggtgaagaacgcattttttctgatatggcacttaatgatgttgtaattaacagaaatggtgctttaagaattattgattttgatatatatgtcaatggcgagtatcttaatacatattcggctgacggggtaattgtttcgaccgcaacaggatcgacagcgtacagtctgtcggcaggaggacctataatacagccgacagcaagacttataatggtgacacctatatgtccgcattcacttaatcagagaagtattatatttgctgccgatgatgagattatgattgagatgaaggataataaaagttcatcaggaagaatgacgggttctcttaagaatgacagcgcaagagttgccacatttgatggagaaagcttctgtgaagttgtaacgggagacagaattgttattacgcagtcagagcgtatatcaagatttgtcaagacaagcagaatttcattcttagagagaataaggaacaaaatgtagttggggataattatgaaaacagacagacataaaaagatattagaagtaattgacagatacgaagttggaacacaggaggagctggcaaagattctgaacgatgaaggctataatgttacgcaggctactgtttcaagagatataagagaacttaatctgtcaaaagtttctgtggatggtaagagaacaaggtatgcaacacttacaaaggacaaacctgttgcaagtgataaatttttaacggttcttaaagaaggctttgtatcaatggatatggcacagaatattcttgtaattaagactgcacctggaatggcaatggctgtatgtgcagcaatagatgcactggaatggaatgagattgtaggttctattgcaggagatgatactatcatgtgtgcagtaaggacagttaatgatactttgcttgttatgaacaagattaagaaacttattaagaataattaatagacagaattgaaaggcaggatatgttagttaatttacatgttaagaatcttgcacttatagaagaagagaatattgattttgatgaaggacttaatatactttctggtgaaaccggtgcaggtaaatctattattctcggttctattaatgctgcattaggaagcaagacatcacctgattttataaggtcaggatgtgaatatggactttcagagataacatttgcaataccagaagataagattgaacgaatcaaagaactgggggttatatcatgtgatgacggtgaacttgttatttcgaggaaaattatggcaaatcgttcgcagattaaggttaacggacagtcttttacatcagcccagacaagagttcttgcacatgaactgattgatattcacggacagcatgataaccagcttcttatggatgagagtaatcatttgtctgttattgatgcttatgataacagcatcattccacttcttgactcgtataaagactgctataaagaatatgctatatgtagaaaagtatatgaaagtctttctggtgatgatgaatcaaggattaaagagatggcttttcttcaatatgaaatcaatgagcttgaatcagctgctttaaaacctggagaagatgaacagattgaagctgattaccggagaatgagtaactttcagaagattgcaggaaatctttctgaggtgtcgatgctgctttcagaaggtgacaataatcttagtgatatggcaggagctgcattaaagaatatgatagctgcaagcgaatatgatgaatctttgaaaaatgactgtgatattctagctgatattgagaatcttatatcagatgtggctcataacctttcatcttatatggatgattttacatttgaccagtctgaattcaatacacttgaagaaagacttgatatgattaattctcttaagatgaaatatggcaagtcgattgaagatatattatctgttcttgatgataagaaacagaagttatctgaatatgagaattatgatgaagttgttgctgcaagaaaagctgaatatgatagagcttataaaaaacttatgaatgcggcttctcttttaagcagccagaggaagaaaacagcactaaatttttcgcaggatataataaatgccttaaaacagcttaattttcttgatgtaagatttgaagctgaatttgaagagaaaaatcctgatttaatcggaactgacaatgtcaggtttatgatatcaactaatccgggtgaagatatgaagcctcttgcaaagattgcatcaggtggagaattgtcaagaatcatgcttgctattaaaagtgtaatggcagagacagatgtatccaaaacactgatatttgatgagattgatgcaggaatcagcggaaagacggcacagcttgttgcagagaagttaaatacactctcaaaaactcatcagataatatgcattacccatctgcctcagattgcggcaatggctgataatcactatgttattgagaagtctactaaagataatcggacaataagtaacataacaaagctttcatatgatgaaagtataggtgagttagcaagaatgcttggcggttcaagtattacagatgcagttgtgtctaatgcaaaagaacttaagaatatggcacagacggcaaaaaaaaattaaatacattttaactgaatttacagtaatacccttttttaaaagtatttcattggtcaatactaatcttagaaggatggtggattgatatgaaggattttaaaaaagggttaatttatgccggggttctggcattttgcataggttttggagcttatatatactgtaattcaattaagaaaaagattccagataagctatatatatataagcaggataaggctgttttttctatggacatacctgttgttggtactgtatatgacagtagtaataatatatgtgccgataatattgattttggaaagcaggttacaatccagtcgggaaataccggtcagtattatgtggattataagctttttggactgctttctgtcgcaaggacacatatggaggtagtcgatgaaaaatacatttattctggtggttttcaggtcggtatatatcttaaatgtaatggagtatatgttgttaatacagaaacaatatgcacatatgatgggcagaatgttgttcctgccaaaggaaagattaataaaggtgattatataattaaagttaatggttctcagatagatacgaaagaacagcttttacaggcggtgtcagaatcggcgggaaatagtatggacataactgtcaggcgggatggtcaggaaattgaagagcagattatacctgtgaaaaatgttgcaggagaatacaaaattggaatctgggttaaagatgatacacagggtgttggaactgttacttatgtgtgtgaagatggcacatttgccgcattaggacatggaatatcagataacgaaacagggaaggtacttgatataaaagatggcatgatatacagaacaaggattctgtctattgtacctgggaaaaatggagagccgggagagcttcttggtactattgattatagagaggacaacataggaagtataaggcgtaatactgataaaggcatatacggtgaaaatgcgtactctttatataaggagtattcgcctgaattgatgaaagcagccgggtcatatgaagcttcaaaaggaacagcatatgtaaggttttataacaatggcagttttcatgattatgaaattgatataacagatttaaagtatggcgattctaagaatataacatttaaagtgacatcaggagagcttctcaagctgactaatggaattgttcaggggatgagtgggagtccgattattcagaatggaaagataattggggctgtcacacatgtatttgttgatgattccacttgcggatatggtatatttattgatagaatgctggataaagacgaaaaagaaactaattaagaaaaggattatgatacgatggaaagagagaaatttggcagcagacttggattcatacttataagtgcaggctgcgcaatcggaattggaaatgtatggcgttttccatatgttgcaggcaataatggaggtggaatatttgttttattatatatgttgttccttcttatgtttggaattcctgtactatcaatggaacttgcaatgggaagagcttctaaaagcagtataataagggcatatcatgaactggagcgacctggacagaagtggcatattcatggatatcttggaatgataggtaattatatacttttgttcttctatactactgtttcaggatggatgttaggatattttattaagtatgtaactggtgatattactaaaaatactgacagttcacagatgtttgctgatgtaattgctaatccatggataatgtttgtatggatggcagtgatagttcttattgcggttattgtctgcagtatgggactccagaatggtgttgagaagattacaaaatatatgatgcttattcttcttggacttattgttgttcttgctatccacagtcttacgcttgatggtgccgcaaagggaatgcaatattttcttattcctgatatgaataagattgaagaggctggtcttggaaatattattattgaggcaatgaggcaggctttttttactttaagtgtgggaatgggctcaatgatgatatttggaagctatattgggaaagaacgagcacttgtaggagagggaatacagattacattacttgacacatttgttgcaattatgtcaggagttatcatatttccagcatgtatgtcatataatataccaacagacagtggtccaagccttatatttgtcacacttccaaaggtgttcgaacatatgtcaggtggaagattctggggcgcaatgtttttcctttttatgacatttgcggcattatccacagttattgctgttctggagaatattattgcatgcaatatggaagcttttggatggaaccgtaagaaagcaggtgtaattaacctgtttattataattatcatgagtatcccatgcattcttgggttcaatgtattaagcggatttacaccgcttggcgctggaactaatgtgcttgatctggaagattttcttgtaagcagtcttattcttcctataggaagccttgttatacttctattctgtacgactaagcttggctggggatatgataattatatgaatgaagttaatacaggaaagggtatcggcatgcctaagatttttaagttttatcttaaatatatcctgcctctgattattttattcattattattgatggtttgatttaataaataaaaaactgtgtcgaattttgtcgaatgctgcgatatcttgcgataaaaagtgcttgcagactgctgctgtaaaaactatactaactattgtgaagttgaaaaatgtcggattatttaattttcacattatgaaagggcttgaatgtatggagaggactaaaatagctatcgcagatgataatcagagtattctggaggcattaaggagtgtaattgatgaggaagatgacatgagaattgttggaacggctgataatggtgcagataccgtgaaaatgattcatgagagccagccggatgttgttttacttgatcttataatgcctgggatagatggaattactgttatggaaaaagtaagggcagacaaaacgttagattcaaagccagactttattgtaataagcgctataggcagagacagtgtaactgaggatgcatttaatatgggagcagcatattacataatgaaaccatttgacaatgaggtgctggttaacagaatacgatacataagaaatcagcatgacaaagtaagtgtaaaaacagtgccaagagaaccggtttctattacagacagaaatcttgagacagatataacaaatataattcatgatatcgggattccggcacatattaaaggctatcagtatcttagggattcaattactttatcagtaaaggatgcagaaattataaacagtgttacaaaagtactttatccaactattgcaagaaaatacgaaactacacccagcagggtagaaagagctataagacatgcaattgaagttgcatggaatcgtggtaatacagatacactgaatgatctgtttgggtatactattaactgtggaaaaggaaagccaactaattcagaattcatcgcattgatttcagataaaatccgtctgcagtacaatattagataatatttaatataaaaatgttcacatatttttcatgtatatttaattgtaaagccttgataaatagcagcgtttatattataattacaaaatcgtaaacgatttttaacaattttgtaataattattttagttgaggttatatatgcgtaagagaatatttaaaggttttgcagccgtgttattatcatctacattaactgtatccacagtatttgctgtatttgcagatgacgttgataagttaaagcagcagaagcaacagacacaacaggaattggataatcttcaggatcagtgggcttatctgttacaacagatggatgatctggaacttaagatggctaataaatctgatgaaatagatgcagctaatgtaaaacttgaagaggcagagaagattcagtcagcgcaatatgaggatatgaagcttcgtatcaagtatatgtatgaagaccagtctgtatcattagctgaagttttccttacttcatcagacatgagtacaatgcttaataaagcagtgtatatgcaggaagtttataattatgacagaaacaagcttgatgaaatggctcagacagctagtgaaattaaggaactcaaggaaaaacttgaaagtgataagcaggaacttgatgaagcacagacacagcttactgagaaacaggcattgctttatagtactattcaggaaacacaggctaaggctgatgatgtaaacagccagcttgaatcagctgttaagaaagcggcagaagttgcggctaagagagaacaggaacgtcaggcagcagcggcaaaacagaaccagcagattaacacaacagttacaccggcaaagggtgattcatctgtagcaagtggtgttgtttcacttgcgtattcacttcttggagttccatatgtaagcggtggaagttcaccatcaggttttgactgctcaggatttacttcttatctgttcagacagtatggaattagtatttcaagatcatcaagtgcccaggcatatggtggtacagcggttaacggacttgccaatgcacagcctggcgatgttatatgttatccgggacatgttggattatatgtaggtgggggacagatgattcatgctaatgttccaggcggttcagtaagacttgttggtgttaattcaataggtatgagtgtaattgctataagacgttactggtaatattataatatatgtgatataatgagtgcagttttacaaggactgcacttatttttttataaatgcatgaagagtatgggattataattaagaagaaatgaggactaatgtatgaaaaatgtattgttgattgcatcagaagctgtaccatttattaagacaggcggacttgctgacgttgcaggttcacttcctaagtattttgacaagactaagtttgatgtaagggtaatgatacctaagtatacatgtataccttgggagtatcgtgaaaagatggtttataagacacatttttacatagatcttgcatggagaacacagtatgtaggtgtttttgaattagagtggaatggtgtgacattttactttatcgataatgaattctattttggtggtaataagccatacagctggattcatgaggatattgagaagtttgcattctttagcaaggctgcactttcagctcttcctgtgcttggcttcagaccagacataattcattgtaatgactggcagacaggtcttattcctgtatatcttaaggaaagattctctcagggagagttttatcagggtatcaagtctattatgactatacataatcttaagttccagggtatatgggatcttaagaaagttaaggatattacaggacttccagatgaatattttacatcagataagcttgaagcctatgatgatgctaattacttaaaaggtggtattgtatatgctgacagggttacaactgtaagtgaaacttatgcagaagagataaagacaccgttttatggtgagaatcttgatggccttatgagagcaagatctaatgttttatctggtattgttaatggtattgattatgatgaatataacccagagacagataagagaatttacaacaactataatcaggtaacctttagaaaagaaaagtggaagaacaaggttgcacttcagaaggaacttggactcacagaggataagggtaagtttatgattgggcttgtatcgagacttacagatcagaagggacttgatcttgtagcatatgttatggatcagctttgtgcagaagatgtacagtttgttgttcttggtaccggtgaagagagatatgagaatatgttcagacattatgactggaaatataatgacagagtatcagctaatatatattattcagaagatatgtcacataaggtatatgcagcctgtgatgcatttcttatgccgtcattattcgaaccttgcggtctttcacagctaatgagccttagatatggaacagttcctatagtaagagaaacaggtggccttaaggatactgtagagccatataacgaatatgaaggtaagggaacaggattttcttttgctaattataatgcacacgagatgcttggtattgttaattatgctaaggatgtatattacaatcataagagagagtggaataagattgttgacaggggaatgaagacagacttctcatggaacagttcagctagaaagtatgaagaactttataattcactttaattaagtgacagttttgtatttaacggtgattttctataaaagaaaaaggaagctgcgataaaagcaacttccttttttaatgcaggtggcgggacttgaacccgcacgatgttaccaccggcagattttgagtctgctgcgtctgccattccgccacacctgcgcgactttgatagtttatcataataaatcttaaaaatcaagtaaagaatacttgcgtacataataaatttcgaatattattttattattgtattataatccttttatggaggcgtttatggataactgtaaggaaatccagagcaggatagaaagctttgaacatggcaatctgtcacttaaagatgaagaagcatttaccaatcatattcttaactgtgcagactgtcgtgaagagatggagatatattatataattttatatggattagaagatgataatgagaaaagaacagagaacagcagatatagtgcatatttagatgcatttgattttacagggctggttgagcagaaacttaaggacagtgaggctaaatgtttgtttttaagacaatggactcattttaccagggtaagatatatttttgtttctacagttatggttcttacagcattgcttcttatcattattaaattcttttaaagatgggagattgttatgggtgaaaaacttatattaatagatggacacagcatattaaatagggcattttacggagttcctgaccttactaatgcagaaggcatacataccaatgccatgtatggctttcttaatattttatttaaatttcttgatgaagaaaagcctgactatattacggttgcatttgatttatctgcaccgacattcagacataaggcatttgatggatataaaggaacaagaaagcctatgcagccagaactaaagcagcaggttcctcttatgaaggagctgcttaaagcaatgaatattacagttgtcgagcaggagggatacgaagctgatgatattctaggaacaattgcgaaggaaagtgctgctaaaggaatagatgtatcaattgtttcaggtgacagagatttacttcagctggcagatgagcatattaagataagaataccaaagacaaagaaaggtgtaacagaggttgaagattattatccatcagatgtatttgaactgtatggagttactcctcatgaatttatagatgttaaagcccttatgggggatacatctgataatataccgggagcacctggagttggacctaagacagcgtcggctattattcagaaatatcatagtcttgataatgtttttgaacatctagaggagttgaagccgcctaaagctaaaacatcaataactgagaatgttgagcagattaagatgagcagattcttgtcagagattaaaattgatgttccgattgattataaagttgaagattctaaagcaggtgatttctttaatgagaattcatatgaactttttaagaaatataattttaaaaatatgttaaagaagtttgaaaatacagatataattgctaaagaccctgaatgttatgaatatttcaagaaaatatctgattttgctgaggttgaaaatgtatttaacaaagcggtggatatagcaggcggaattgaaaaaatcggactttctattgtaagagaaagtgaactcactgcagttggaataacactatcagatacagaaatatattatattccggtatcaggctttgttacagagagctatcttgcagaccgtctgtcagatgttgtaagagcggcttccaacagaaatatagcatctgccaatattaaagattaccttgatatatttgaaaaagacaagataaatggctatccgcttgtttcagaaaaagcatttattgatactgcaattgcggcatatctgcttcatccaagtaatgaaagttatgattatgaaagtcttggaagagagtttttatcattaacatttccttcgaaaacagaactcctgggtaaattgtcatttaagaaggcagtaaatgaatcagaagataatcttattaagtatgcatgtctttcatcatatgcttattacaaatgtgctgataaaattacagaacagttaaagagtgagaatatgtatgagctttttgaaactatagaaatgcctcttatatttgttctttttgaaatgcagcagcagggtataagtgttgataaacaggcacttgttgattattcaaaggtacttggtactaagattttggttcttgagaaagagatatatgaagcagcaggcgaagagttcaatatcaattcaccgaagcagcttggtgtaatactttttgaaaagcttggaatgcctaatggaaagaagacaaagagtggctattcaacagctgcagacgtacttgaaaagcttgcacctgattatccggttgtaagtaagattcttgaatacagacagttagcaaagcttaaatcaacttatgctgacggacttacacagtatatagcagaagatggaagaattcatggtacatttaaccagacaataactgctactggaagaataagcagtacagagcctaatcttcagaatattcctataagaatggagatgggtaaggctataagaaaggtatttgttccaaagaatggctttgtattcttggatgccgactactctcagatagagttaagaattcttgctcatatgtcaggggatgagaagctcattgaggcgtataattcatcagcagatatccacagagcaacggcggcacaggtctttggcgtaccgctcgatgaggttactgatgaacagagaagaaatgccaaggcagttaatttcggcattatctatggaatgagttcatttggattaagtcaggatcttagtatttcaagaagagaagctaaagagtatattgaaagatattttgcaagctatccgactatcaagacatttattgacggactcgtaagtgatgccaaagaaaaaggatattcacttacaatgtacaatagaagaagagaaattccagagattaaatcttctaatttcatgcagcgttcttttggagagagagttgccatgaatgcaccgattcagggaactgcagctgatattataaagctggcaatgattaatgtatataatgcacttaaggagcataatctcaggtcaagacttatattgcaggttcatgatgagcttcttgttgagacggcagaggatgaggttgaaactgtaaagcagattatgcttgatggaatgaagaatgcagtaagccttaaagttcctcttgaggtagatttaaaggaaggaaaagactggctggaggcacactaatgaaagttattggaatcacaggtggtgtaggagcaggaaaatcttctgttcttgcactccttaaagaaatgtgttcctgcgacattatacaggcagaccttgttgcaagaaatatataccactcaggtaatattggatttaaaaaggtcattgatatattcggggagcagattgtaggagaagatggagagataaacagacctcttctcgcagatattatatttaagaaccctaataagagaatcgttcttaacagcataattcatcctcttgtaaaacaagagattattaatcagattaataatcataagatagcaggtgatgttgattactgttttgttgaggcagcactgcttattgaagatcactatgatatattcatggatgagatatggtatatatatgtttcggaagatgagagaagaaaaagacttgctgcttcaagaggctattctgatgaaaagatatcagacatatttaaaagtcagctatctgatgctgagttcagaaagcatgcagataaagtgattaataatggcgcagatattgaaaaaacacgcgtccagcttgagattatacttggaatatgatacattatacataatttgtttattctagaggtagggtatggataatacacagtcaagaaatgagacccttgtttttggtcttgatataggaacaagaagtattgtcggtgttgtgggatacatggaaaggaaccgttttaaggttattgcaatggctgagcagaagcatgaaaccagagcaatgcttgatggtcagattcatgatatctataaagttggcgatacaatcagaaaagttaagaattctcttgagaatcagctagaaagggagctttcagatgtatgcattgctgctgccggacgagttcttaaaactgttaattcgtctgctgagtatgaatttgaagaagaaacacgggttacacaggaacatatctattcacttaatcttctggcagttgagaatgcacataataagattaacgaaaaagaagataaagcaagattttattgcgtcggaaacacccctataagatatcagcttaacggttatgatattaataatcttgaggggcataaggcttctaaaatttcagttgaacttattgctacatttttgccggaagaggtagttgatggactttatgaagctgttgaatatgccggacttaatgttgcaagtcttacattagagcctatagcagccatgaatatagcaattcctgagcagtacaggctccttaacatagggcttgttgatgtaggtgcaggaacatcagatatctgtcttacaaaggatggctgtataattgcttatggcatgataccttgcgcaggtgatgagataacagagtgtatcgcaaaaacttaccttgttgattttaatactgctgaaaagattaaaatgtctgcaagtactaagaaaaaaggacttgtaacatttaaagatatcatgggtattacgcagaaggtagatgcacttgaaataagaaatgcagcagctgatgttgtgaatgcgatggcaaaggatgttgcggaaaagattattgagcttaatggcggtaagcctgtaaatgctgtgtttgttgttggcggtggtggcaagataccaggttatacagaaagagttgccgattgtcttggaataccgcaccaaagagttgcggtaagaggtgaagaggttctaactgcagttgattttcaggttgacaatttcaagaaggattcattatatgtaacgcctgtcggtatatgcactaattattatacgcaaaagaacaattttgtatttgttactgttaataaagaacgaataaagctctatgatacaagtaatcttacagttgtagatgctgtcatgcagattggcttccctaatgaaaagcttttcccaagaagaggggcagagattaactttactgttaatggaaagtcaagacttgtaaggggaagtgccggggaaggcgcagttgttacgcttaatggaagaccagctaatcttcatactccgattgaacagaatgatataatagttgtaacggaatctacagtaggagaaccggcaagcataacaataggacagcttgaagagtttaattcccagataacatttatagtaaatgataaaactatagtctgcccaagatttgcatatgttaatggagaattaaagtcagagttctatgatattaatgacggcgacaaaatccgtatggagaacttctatacagttgcacagctttttgagtttcttgacttggattataagacactcaatgtaactgttaataatgaaccagcagataagaatactaaagtatatgagaactttacggtaagaacttcttcattagaggaatataatgagaatattatggcatcagaaaagctgcaggaatcagaaaaaactgatgataaggtagcagaagaaccagttatacaaccgctggatataactattacggttaatggtcagagcgttgttttatcaggcaagcctgattatatagttgtagacctgttccagttctatccatttgatcttacaatggtaaggggaaatcttgtattcttacataacggaaatgatgctgattattcatcgccacttaatgatggtgatgttatagagcttcgctgggaggataaataattatgagaatgatgccgattgccagcggaagcagtgggaactgcatctaccttggtacggaggacacacatgttctttttgatgccggaataagcaggaaaagaattgaagaaggacttaatacggcgggtttaagtcttaaagatattgatgcaatatttgtaacacatgaacatattgaccatacaaaagggcttggtgttatatcgagaaaagatgggattccaatctattcaacgcctggtacaatagaggggatagaacagatttcatcacttgggaatattccggatggcatatttaataagataaatgcggatgaagatatttcaattggagatgtaacagtccacccatttcgtatatcacatgatgctaacgaaccggttgcgtatacatttactcaaaaatgtgcagatggcataaaaaaagcatcggttgtaactgatttagggtattttgatgattatgtggttgataatctgacagaatctgatattatgcttgttgaggctaatcatgatatcaatatgttacaggttggtccttatcctttttatcttaagaaaagaatattaggtaataaaggacatctctctaatgagacatccggacagcttgtcaattccctgcttcatgataagcttaagaaaatatatcttggtcatttaagcaaagagaataactatgataaacttgcttatgagacagtgaaattagaaattgatatgtcagataactcattcaaatcttcggattttgatatagaggttgcaaagcgtgatgttttatcaggtatttgcgaaatataacaggcgcttacaaggtgcagaaagaggaaagctatgaaaaaatgtgtaattactgttgtaggaaaagatactgttggtattattgccagagtatgtacttatcttgctgatacaaaggttaatatccttgatatctcacagactattgtttcaggatattttaatatgatgatgattgttgatatgtctggttctacaaagaattttgacaatgttaatgaagatcttaataagcttggcgaagatattggtgttgtaattaaatgccagcgtgaagaaatatttgacatgatgcaccgtatctaagaaagtgaggagacttaaatactatgattaatattatggaagttacagagactaacaaaatggtcgagaaagagaaccttgatgtaagaactattactatgggtattaatcttcttgactgtgctggtcctgatttagctgaggtaaatgagaaaatatataacaaaatcacaactcttgctaaggatttagtttcaacaggagaagagattgcaaaggaattcggtgttcctattgttaataagagaatatcaattacacctatttctcttgttggttcttctgcatgtaagacacctgaggattatgttactattgcgaaaactcttgacaaagcggctcatactgttggtgttaatttcattggtggttattcagcagttgtatcaaaaggaatgactaagagtgatgaacttttaataagatcaattccacaggcacttgcacagacagagcttatatgcagttctgttaatgtcggttcaacaaagactggtattaacatggatgcagtaagacttatgggcgagataattaaagagacagcagaacttactaaggataaagattctttaggatgtgccaagcttgttgtgttatgtaatgcccctgatgataatcctttcatggctggtgcattccacggtgtgacagaagatgatgcaattataaatgttggtgtcagtggtcctggtgttgttaaatacgcacttgagagtgtaagaggaaagagctttgaggttctctgcgaaactatcaagaagacagcatttaagattacaagagttggacagcttgttgcacaggaggcttctaagagactcggtgtaccttttggcattattgacctttcacttgcaccaactcctgctgttggagattcagtagcagagattcttgaagaaatcggacttgagagagcaggagcacctggtactacagctgcacttgcaatgcttaatgatcaggttaagaagggcggtgttatggcatcttcttatgtaggcggacttagtggagcgttcattcctgtatcagaagatcagggaatgattgacgctgttaatgaaggttcacttacaatcgaaaagcttgaagctatgacatgtgtatgctcagttggtcttgatatgatagctattccaggtgacacacctgcaacaacaatttcaggaattattgctgatgaagcagctattggcatggtaaaccagaagacaacagctgtaagagttattcctgttgtaggaaagggcgttggagagacagtagaatttggcggactcttaggttatgcacctattatgcctgttaataaatttgactgttctgcattcgtgaacagagtaggaagaattcctgcaccaatccacagctttaagaactaattaagaattaagataaaaaacaccggctgaatcatatgattggttcagccggtgttttttatattcttattatattttgttgtaattcattcttcattacatacccatacttttcatatacagcctgtgcatatatatcagaacatgcaaggtcaaatataagttcatttttataatcagcagccttggtaatgaaaggtacatcaagttctttcttgatgcttccaagatactgttgtccggttttattaaaacctaataatcttatatatggtatattattgtatgaatcggacatagattttcttatttcaagaattatatgcatgatacagcggcatattcttgaatatactatattctttgatttaactttcattgcgaattctgtgatagtgtctcttcctgtaaatgcagctacaaacctgtttgcaatgtccggactgatatcttcatattcagcaagtttttcagcaaagtctgtatgattaatattgcattgctgtttaagaaaaagcattttgtaattaaatatattgctgaaatcatcaggaaataaaggacagttcttagaattgctgatttcttcatacataccggcagtaaggtatgtttttaatctgtcatgttcatctgacataagcatttttcttattccaaatgcacttgcaaactcagcattatctgtgtcgtcattgtagccagcgccttcacgaagcaccggataatatgtcatgttaaggttgttgtaaagaattgcttttatatattcaattgcaagaatgttattagaacctgtaattatgtctttgcattctggcagatattccaaaagagcagtctgtcttgcagcaggataagagagtccctctgcaagagctttgttaagaattgccttatattcaggcgattctgatattatagtacggcttatctttgccagacaatctgcattatcagtttcagcaccaaaacagattgaagcggctttcattgcattaagtgtaagaactgcaccttttgcaaaattctctgcacttgataatgcgtagtatacaggtagttcaacaacgatatcagcaccagcttttaatgcagcacttgttcttgcatacttatcaattactgccggttcaccacgctgcacaaaattgccgctcataacaacgataatacagtcagcctgcgaaatctgttttgctttattcatctgatatacatgtcctgtgtgtaatgggttatattctgcaacaattccgcatgctttcatgtagtgtctcctttatgtttttattatattttactgaaatcgtacatttatgtcaaaaatattgctgaatttagtcaatgtatcgtttttaaaacatttttaagtgccagacgaccttgttttcgactaaaaattggtatataatttttgtcagagttcagtatgtttactgaaaatttacttttttataaggaggagtcattaatcatggcatttattgacacaattaaagaaagagcaaaggcagacaagaagactatcgttttaccagagtctatggataagagaacttatgaagctgctgagaagattttaaaggaaggcattgctaatttagttatcattggtactcctgaagagatcgagaagtatggtaagggctatgacatttctggcgccacaatcgtagatccatttaacgatcctaataagcagaagtatattgataaattcgttgagttaagaagcaagaagggtgttacacctgagatggctaaggaacagatggagaaggattacatgtactatgcatgccttatgtgtaaatgtggagatgctgatggagcagtatctggtgcatgccactcaacaggtaacacaatccgtccagctcttcagttattaaagactaagccaggtatcagctcagtttcaggcttcttccttatggaagttccagactgcgaattcggtgagaacggtctttttgtattcgctgactgtgctgtaagcccagattatgattcagagaagcttgctgaggttgctaagctttcttcagattcattcaagagctttgtaggaaaggacgctaaggttgctatgcttagcttctcttcatacggaagtgctaagcatgacagagtaactatggttgctgatgctgttaagattgcaaaagagaagtacccagatatcactgttgatggtgagcttcagttagatgctgctttagttccagaagttgctgcacttaaggcacctgagagcccggtagctggtaaggctaatacacttgtattccctaaccttgaagctggtaacatcggttataagcttgttcagagacttgctaaggctggagcttatggtcctgttcttcagggactttctatgccagttaacgatctttcaagaggatgcttcgctgacgatatcgttggtgtagtagctatgacagctgttcaggctcagaatgcataattaacatttttaaggagaatttttgtaatgaatattttagtattaaactgtggaagctcatctcttaagtatcagcttattaacatggatgatgagagcgtaatcgcaaaaggtcttgtagaaagaatcggtattgaaggttctgttcttacacacaagccaacaggaaaggataagtatgttgttgaaacacctatgaaggatcacaacattgcagttaagcttgttcttgatgctcttcaggatgctgagcacggcgtaatcaagtctacagatgagattgcagcagtaggacacagagtacttcacgcaggtgagaagtatatcgagtcttgtcttgtaacagaagatgttaagaaggttgtaagagagtgcttcgaccttggtcctttacataacccagctaaccttatcggtattgaagccgttgaggcagctatgccaggcaagccaaatgtagctgtatgggatacagcatttggtggaacaatggagccaaaggcttacctatatgctattcctcgtgaatactatgagaagtacggcgtaagaagatatggtttccacggaacaagccacagctttgtttctaaagagacaatcaagtttgctaaccttgatcctaagacagctaaggttatcgtatgccaccttggtaacggtgcttcaatctcagcttctgttggtggtaagtgtgtagatacttctatgggtcttactccacttgaaggacttatcatgggaacacgttctggtgaccttgatccggctatcttagagttcttatgcaaccatgagaaccttacaataagcgagatgctcaatatccttaacaagaagtctggtgtacttggtatgtcaggcggaatctcaagtgatttcagagatcttaatgctgcagctaacgacggtaacgaaattgctaaggttacacttgaagcttatgcttacagagtagctaagtatattggtgcttacacagcagctatgaacggtgttgatgccattacatttacagctggtgttggtgagaatgctgcatggcttcgtccaatggtagctaaatatcttggataccttggtgttgaacttgatgaagctgcaagcgagaaggcttgtggagtagaaggaattatctctacaccagaatctaaggttaagctttgcgtaattcctactaatgaagagcttgcaatcgcaagagaaacattagcattagtaaaataattgacatattcgcgaaaaatattgaatttaagtgaatttgttgttgacaaagacagggagcatgcgtataattgacaaggtgtggattagcgcatgcttttcctgtgcataatagtatgaattggagacaattatgctaattgatttaagagagcttttatccggttcacaggatgaaagaatagaaaaggtttcaattgaatcagaaagctttgacactggaatcgctaagtatagtatacttgagaagccagagtttgaattaagcattaccagaattggtaagaataagcttgagattaaagctgagagctttgttgttcttgatattccatgtgacagatgtttagagtctgttcctacgaaagtagagtacagtgttgatgaaatcgttgatttctcagacaatgctgccggggaagaagcaaaggaagaaaaagactatattggtggatacgaactcgacgtggacagattagttttcggcgaaatactgatatccatgccgggtaagacattatgtacccctgattgcaagggtctatgttctatatgcggacacaacctgaatgtctcagagtgtggctgtgaccgagagtccctggatccaagaatgtctgttttcaaagatattttaaagaattttaaggaggtgtaacatatgtcaatttgtccaaagaataaatcttcaaaggcaagaagagataagagaagagcaaactggaagatggctgctccaaatcttgtaaagtgctcaaagtgtggcgctttaatgatgcctcatagagtatgcaagtcttgtggttcttacaacaagaaagaaatcatctctgttgactaattactaacatgaattttgataggctgtcccgtctggggcagcttgttttgttttataaagaaatgtgttatactatgtgggattttgataaagggaaggcttttaattatgaaagtgaataaaatactcgcatttatgtttatattagaattatgtattatcccattacagggatgcggtgcaaaaagtattactgcagattcaaccgaaacccaggagactcaggcacagatagatgatgcttatggcaaaggtcttagttttacatacaatgattatgctgataatgtgttatctttaagttataatcttaagcagaatgcggatggaagctggcagctgtctgtcagcggacagaatgcccatgtaaatggaacaaaagtgatatctgataataatgccaatggatttttctattatcttttgcatgaaattaatatagccacttataaagattataataaaacagatgattcaataacttctgatgttgcgtggtggtttaatcttaatatatattatgacaaggattctatcgttgcatatggttatatgatgcatccgtctgattatgatgatatcagagttcagattactgaatatcttaatgatttatttaaaaatgcttaaggttgcgttaatttgatattcgtagtatattttacaatagtattttaatgattaatatgaaatggagtttaatttatggtaaaaatcgcacttgacgctatgggtggagataatgcaccagcagagattgtcaaaggagcagtacaggctattgctgctgataaggactgctttgtatatcttgtaggtaaggaagataagattaaagaatgtcttaatggacagcagtatgattcatcaagaatagagattgttaatgcagatgatgtaattgaaacaggtgaacctcctgttatggctataagaagaaagaaagagtcatctcttgttaaagcaatgtatatggttaagaataaagaagctgatgcattcgtatctgccggaagctcaggagcaatccttgttggtggtcagactatcgttggaagacttcgtggagttgacagaccaccaatggcagcacttatccctactaaggatggtgtttcactgcttgttgacagtggtgctaatgtagatgcaagagcaactatgcttgtacagtgggctgttatgggttctatatacatggagaatgttgttggaattaagaatccaagagttgcaattgtcaatgtcggacttgaggaagaaaagggaaattcacttgtcaaagaaacatatccaatgcttaaagagtgtcctaacattaactttataggaagtattgaagcaagagagattcctaacagctatgcagacatcattgtatgcgatgcatttgttgggaactgtatcttaaagctttacgaaggtgaagccaagatgatacttggcaagattaagggtgttatgatgtcatctttaaagactaagattggagcacttcttattaagaaagcattaaagacacagctcaagtcaatggatgcttcagaacatggaggagctcctcttatcggtcttaacggtcttgttgtaaagactcatggcaatgccaaagctaaagaggttaagaattcattaattcagtgtgtaacatttacaaaaatgaatataaatgataaaattattgaggcgctcggtcagattccagagcagcataattaaagattgaaaggatagatattatggaattcgagaagttacagaatattattgcagatgtacttaacattgataaatcaaagattactccagagacaacatttgttgatgatcttggagcagattcattagatgtatttcagattatcatgggaattgaagatgaattcgatatccagattcctgatgatgcagctgaatcaattgtaacagttaatgatgcggttgttcagattcagaacgcaactaataaataaaccatacagattgtgatgaaaactaagagcataaggagcaaatattcttgcataatttgttccttatgctcttgttttcaaaagttcgcagaaaggtgtattatgcataataaaaatttatctgtgtttatgcagactattggttatgatttcaaagatgtaagtctgctggaagttgctcttactcacagttcttatgccaatgagcagaaaaaaggaaattgctgtgataatgaaagaatggaatttttaggtgatgctgttcttgaactttcatcaagtgattatatatataagaatcactctgagatggctgaaggaaagatgacaagacttcgtgccagcattgtttgtgagcctacacttgctttatgtgcaagagctataaagcttgatacatttataagactcggtaaaggagaagagctcaccggaggaagaagcagggattctatcgtatcagatgcctgtgaggctgttataggagccatctatcttgatggtggttttgctaatgcaaaagaatttgttaataagttcattcttaatgaccttgacaataagaaactcttttttgatagcaagactatattacaggaagttattcagggacttggaaaagaagttgattatgaattcatcggtgaagaaggtcctgaacataacaaacaattcgttgtagctgctgtagttgacgggctttttaatattaaaggaacaggccacactaagaaatcagcatctcagaatgcagcatatgctgcacttatcgagcttaagaataaaggctacgatatcaactctgataagaaataataagtgaggggttatgtatttaaaaagtatagaagtacagggatttaagtcatttgctaataagatagtatttgattttcataatggtattacaggtattgtagggcctaatggttcaggtaaaagtaatgtcgccgatgctgtgcgctgggttttaggcgaacagagtgccaagcagcttcgtggttctaagatggaagacgttatatttgcaggaactgagaacagaaagccggttggtttcgcatttgtatctataacacttgataacagcgaccatgcacttccggttgattacgatgaagttacagtatcaagaagagtataccgttcaggtgagagtgaatatcttatcaatggtaactcatgccgattaaaagatgtaacagaaatgttttatgataccggtattggtaaggaaggatattctattatcggacagggacagattgataagattctttctggaaagcctgatgaaaggcgagagctttttgatgaagccgctggaattgttaagttcaagagaagaaaagctactgcaatcaagaaacttgaaaatgagcgggctaatcttgtccgtgttaatgatattttatcagagcttgaaaaacaggtcggaccattacaggtccagtctgaaaaggccaaggaatatcttgactataaagctgatttaaagaaatatgatgttaatgcatttcttttggaatcagacaggataagcaaagatcttgaagaactgacaggaaagattggcattgctgataacgaccttgctaattcaagagctgagtatgagagtaccaaggctgaatatgaagaggcagaggaacagttatctaaggttaattctgacattgagaatgttaattcacttttatcaaacactgagcttgaaagccagagacttaacggtgacattaatgttatcacagagcagattaacagattcactgataatgaaaagcattacagtgacagaattgcagctattgataaagataaagctgcaaagcagaccaatgtagctgattttaagaaacagctcaatgagctttcaacatctgtagaagagttcgagaataatcttaaagttaaacaggatactgctgatgttataaagcaggatattgacggagtgtcagatcagattgagagccgtcagaacgatatatacgacagacttaatgccaagtcatctattaatgctgaaaatcagaagttcacaactatgcttgaacagctcaacataagaaaagctgagcttaacagccgtcttattaaagacaagagtgatgaagctgaacagaatgttaagattaatgatatcagtgtaagattagaagctgcacagaaaaatgctttggaaatagcagaaagaattgcagccaataatgatgaagttacggctattaagaatgaaaatgctgaccttaatgcacagcatgataagattgtacagaattatcacagagaaaaatcaagacttgaatctctcgttaacattactgaaagatatgacggttatggcaacagtatccgtaagattatggaattaaaggacagcaatcctggaattcttggtgttattgcagatattgtaaaggttgaaagaaagtatgaaacagctattgagacagcattaggcggaacaatacagaatattgttactgataaggaatctactgctaaggagctgattgcatatcttaagcagaataagcttggacgagctacatttttaccacttaatgcaatatcaggaagaaatactcttgagaaagagccatgtattaaagaaaatggtgttataggaattgcaagcaatcttgtaagagtttcttttgaatatgagaacttagctaagtatcttcttgggagaattcttgttgttgataatattgataatgcgctccttattgccaagaaatacaagtatagcttaagaattgtaactcttgagggtgaacagcttaatccgggcggttcaatgaccggtggtgcatttaagaattcaagtaatcttcttggtagaagaagagagattgaagaacttaagaaatctgtgtcagaactcagtaaatcatcaactgagcttaaaactaagattgctgataacagagctaagatagcgtctataagagagtttattgacgcagataacaaagctaacagagaggtgtctttagctgttaacacagagcagatgaatcttaatcaggcaaagcagaagttatctgaaatcagaattatatatgataaagataaggctgaaactactgagattgatagacagattaaggagattgatgagaataagaatcaggtaagcggcagtcttagtgcgcttgatatacagaatgaaagctcaagaaaagaaattgagaatcttaacaaacagcttgaagcaaagaaggctgaacttgataaggctaatgatgatattgagaatcttaagataagattcagttctgtagaacagaagacagcatttattcaggagaacattacaagaatcaattctgaaattgctgctcttgaatcagaagaagctgatataagacagcgaaaagcatctttatcatcagaagttgaagataaaaacgcacagattgaaaaattaagaagtgatattcataaagcaaagaatcagatagcggactgcaacactaagattgatactctccgcaaggatagagatattattaatgcaagtcataagacattctttgataaacgtgagaagattaatgaacagattgttcttcttgaaaaagagagcatgcgtctgcataaccagcaggaaaagttggaagaagagaatgactctatagtagattacatgtggaatgaatatgagcttacatacagctatgctgctgaattaagaagtgaagagcttactgatatatctgatattaagaagcagattaacattctgaaagccaatattaaaaagcttggtgttgttaatgtcaatgctattgaagaatataaggaagtaagcgaacgatacaacttcttaaagacacagcatgatgatatgattaaggctgaagaggctcttgtccaggttattgatgagcttgataatggtatgagaattcagtttaaagagaagtttgaggaaattaaggttgaattcgataaggtattcaaggaattgttcggtggtggacgaggaacaatagagctagttgaaggtgaagatattcttgaggcaggaattgttattatttcacagccgccaggaaagaagcttcagaacatgatgcagttatccggtggtgaaaaggcacttactgcaatcgcacttctttttgcaatccagaaccttaaaccttcaccattctgtctgcttgatgaaattgaggccgcacttgatgattctaatgtaggaagatatgctaattatcttcacaagcttacaaagcatacacagtttattgttatcactcacagacgaggaacaatggctgcagctgacagactgtatggtataactatgcaggaaaagggtgtatctgcacttgtttcagtagatcttatagctaatgaccttgacaagaagaaggagtaaatatgggattttttagtaaattaaaagaaggtttaaccaagaccagagataatattgtttccggaattgattctgttttctcaggattttcgtcaattgatgacgatttctatgatgagcttgaagaaacccttattatgggtgatataggtgttgttgcaactgaagagattcttgacgaccttaagaataaggttaaagagaataagattaagaatcctgctgactgcaagcagcttcttattgacagtattaaggaaaagatgaatctcggcgagaatgcatatgaatttgaaaaccgccaatccattgttatgcttatcggcgttaatggtgtaggaaaaactacatctgtaggcaagcttgccggtcttcttaaagcacagaacaagaaggttattatggctgcagccgatactttcagagctgcggctatagagcagcttacagaatggtctaacagaactggtgctgatattattgcacagagtgagggttctgatccagctgccgttatatatgattcaatcgctgcatgtaaagcaagaaaggcagatgttcttttatgtgatacagctggacgtcttcagaataagaagaatcttatggaagagcttcgtaagattgacagagttatagaaagagagtattctgatgcatacagggaaaatcttatcgttcttgacgcaacaactggtcagaacgccctttctcagcttagagagtttaatgatgtaactaatatcacaggtattattcttactaagatggatggaactgccaaagggggaattgccgttgctatacaggcagaatttggtattcctgttaaatatattggagttggtgagaaagtcgaagatttacagaagtttgattcagacacatttgttaatgcattattcgatgtagataacggctctgatgaagattgataagttaatgaattaagatgggagattaagtgcaatggaagaattatcattgaaaagtttcgaggaagctgccgagaaggttaaggaagcaacacttcctactaatctggtatatagtgagtatttcagcagccagactggtaacagagtataccttaagccagagaatatgcagtacacaggtgcttataaggtaagaggtgcatattacaagattagtacgatgtcagaggaagcaagacagaagggacttattacagcttctgccggaaatcatgcacagggtgttgcatttgcagctaagaaatatggggttaaggcaacagtagttatgcctacaacaacaccacttatcaaggtaaacagaactaagggatacggtgcagaggttattctttacggtaatgtttatgatgaagcatgcgaatatgcaatgaagcttgccaaggagaaaggacttacatttgttcacccatttgatgatttagatgttgcaacaggtcagggttctatcgcaatggagattattaaagagcttccaactgttgattatattcttgttcctattggtggtggcggacttgcaacaggtgtatctacacttgcaaaactccttaatcctaatatcaaggttattggtgttgagcctgccggtgctaactgtcttcaggaatctattaaggctggaaaggttgttactcttcctactgtaagtacaattgcagacggtacagctgttaagactccaggaagcaagttattcccataccttcagaagaatcttgatgatattattacagttcctgatgaagatttaatagttgcattccttgatatggtagagaatcataagatgattgttgagaattcaggtcttcttacagttgcagcattaaagcagcttgatgttaaggataagaagattgtttcaattctttcaggtggtaatatggatgttattacaatgtcatctgttgttcagcagggacttgtacagagaagcagaatcttcactgtttctgtacttcttccagataagccgggtgaacttgtaagagttgcttctattattgcagaagctaacggtaatgtaatcaagcttgaacataaccagttcgtaagcattaacagaaaagcaactgttgagcttagaattacaattgaagctttcggacatgaacacaaggatgagattgttgacaagcttgaagcagcaggtttaagacctagaattgttaaggtaaacatttaatcactatctgcagcagagggaaatccatgaagaaatattctttcaaaagatatgcaggagttacaatggcattatttggggcagctgcgctgtccctattgcttttttttgcattattcagaattgatgccatccacaaagcattttcacatatatgcagaactcttatgccttttataattggcggggtattagcatatgtaatatgtccaatatgtaatttcttcgataatatatataataaggtatttaagtttattaagaatgagaagaaaaagaaaagcttgtccaataatcttagtgtgtttacagggcttcttatagcaattctgttcatatattttatgattattgttattattcctaatcttgtaaatagtgttgtacgtcttattcagattattcctgataatgtcaataaagttattgattttgtacagaagtttcttaacgaaaatgaaactcttatgaaatattcagagaatattatcgataaaacatatacatttattaacgactggcttggtaacgagtttcttggatatgcacagggaattgcttccggtgtttcaaccggtgtagttaatatcattgttgtactttttaatgttcttatcggattcattgttgcagcgtatcttcttacagcaagaaaaaagcttgcaaagcagggagagatggttgtctatagtatattcaagaaagaacgtgctgccagcgttatggaagagattaagtatactgataaggtgttcagcggctttgttaatggcaaaatccttgatgctcttgtaatagcacttatatgttttatatcacttaagatatttacaatatgtaatcctggcaaagagatgatgagtgagattcttattgcattcattgttggaatatttaatgttattcctttctttggctggtacatagcatggtttattggagctttattatgtcttattgtaaatcctgcacagtgcctgttctttgtaatatttaattttatattacagcagattgacggtaatattatcggacctaaaattcttggtaatactacaggaatctcaagtttctgggtattgtttgcaatactcctctttggtgatatatggggatttgcaggaatgcttttaggagttcctatatttgcagttatatatcatcttattaagaaatgggtatttaagaggctgaagattaatggaatggagaatctgagcgaagaatatgaggctgaatatccgcctaatgagcgtgaaaagaagcttgaaagctgatttaataaattttttaaaagtgtcaagtaaaaatgcttgacactttttttgatatctgatattatactcaaggtttatgagtcaatcatggcttatgtaatatttaagtttgtggcaggtattatggaaagaattgttgaacagaatcttttatatgatttttatggagagttacttaacgaccaccagaagaagatatatgaagatgctatctacaatgatttatctctcagcgagattgccgatgaatacggtatatcaaggcagggagtacatgatctgattaagagagttacgaagacacttgatggatatgaggctaagcttcatcttatacagaagttccttgaaaccaaggacaaggtatctaagattgattctttagttgatgattacatggaaagtcaggatatatctgatattcatgaaatcaagaagttatccaatgagattcttgaagaattttaaggagagatattatggcattcgatagtttatcagagaaattgcagaatatttttaaaaatcttcgtggtaagggtcgtttatcagaagctgatgttaaggctgctcttaaggaagttaagcttgccctgcttgaagctgatgttaactttaaggttgttaagcagtttatcaagtctgtagaagaaagagcaattggtcaggatgttatgtcaagtcttacacctggtcagatggttatcaagattgttaatgaagagatggtatctcttatgggatctgagacaactgagattgccttgaaacctggctctgagattactgttatcatgatggcaggtcttcagggtgctggtaagacaactactacagcaaagcttgctggtaagttcaaggcgaagggaagaaaacctcttttagttgcctgtgatgtatacagaccagcagccattgaacagcttactattaatggtaataaacagggcgttgaagtattctctatgggaactaaccagaagcctgttgatattgccaaagctgctatagcccatgctaagaataatgattttaatacagttattcttgatacagcaggacgacttcatgttgatgaagacatgatgaatgagcttatagagattaaagctaatgtatcagttgaccagacaattctagtagttgactccatgacaggtcaggatgctgttaatgttgcttcatcatttaacgagaaggttggcattgacggagttattcttactaagttagatggtgatacaagaggtggtgcagcactttcaattaaggctgttaccggaaagccaattctttatgttggtatgggtgaaaagctttcagaccttgagcagttttatccagaccgtatggcatcaagaatacttggtatgggggatgtccttacccttattgagaaggctgaagcacagcttgacgctgataaggcaaaagctatggaagaaaagcttaagaaagcagaatttgattttaatgactttcttgagtatatgggacagattaagaatatgggtggtatcagttcaattatgagcatgatgccaggactgtcaggtcagatgaagaatgtttcaatcgatgatgatgaagcagagaagaatatgagaagaaccgaatctatcatatattcaatgactaaggcagaaagaagtaatccggacatacttaatccttcaaggaagaacagaattgcaagaggtgcaggtgttgatattgctgatgttaacagacttgtaaagcagttcgaacagatgaagaagatgatgaagcagatgccgggaatgatgaaaggtgctaaaaagggacgtttcaagttacctttttaacatagattaattttaagaataatacaggaggtgaatgtaatggcagtaaagattagattaaagagattaggtgagaagaaaaatcctttctatagaattatcgtagcagactcaagatctccaagaaatggtagattcatcgatgaaatcggtacttatgatcctaattacgatccttgcaagctcaatattgatgctgaggctgctaagaagtggttatcaaacggagctcagcctacagaggttgttggaaagcttttcaagatggctggtatcgaaaaataagactagtggaggtgtaattgactatgaaagaattagtggaaattatcgctaaggcactagttgataatccggatgaggttgtagtaacagaaactgaaaaagataaggctcttgtagtcaatcttaaggttgctccttcggatatgggcaaggttatcggcaagtctggtagaattgccaagtcaataagagcagttgtttcagctgcagcttctaagagcgacaagaaagtgattgttgaaatagataattaagcaaacactactgtctaaggcagcctttcggggctgtctgttttgttatttatatatacatttatgtcagaatggagaatttaagtggaagatatgttaagggtaggggtcataacatcgacccacggaatcagaggtgaagttaaggtttttcctacaacagatgatcctcttcgttttaagaaacttaagaaatgtgttatcgatggaaaaagagaacaggtagctgtcactgtatcttcagttaaattctttaagcagttcgtaatacttaagtttaaagaatttgatgacatcaatgatatagagaaatacacaaaatgcgacttgctcgtttcaagagaagatgctgttaaacttgagccgggagagtattttatatgcgatcttatcggacttgatgtaataacagatgaaggaaaacatttgggcgtactaaaagatgtattagagacaggcgccaacaatgtatatgaagtagaggcggacaatggcgaaagctatttaataccggttattgaccagtgtatattagatcataaccttgataagaagactataacagtccatatcttaccagggcttctggatattaataaataataaagaaaatgtatttttagtcttgcattattgacaggattatgataatctaaacaagttgtgagaaaaagggatggtcctctgttacagaacctgtattaagaacatcataatattaaggaggtcacacatgaatacaattattaagaacatcgaagatgctcagcttaaggctcaggctcctgagttcagagttggtgatactgtaagagtatcagctaagattaaggaaggaaaccgtgaaagaatccaggttttcgagggaacagtattaaagaagcagggaactggcgttagagctacatttacagtaagaaagatttctaacggcgttggcgttgagaagacatggccattacattcacctatcgttgagaaggttgaagttgtaagacgcggtaaggctagaagagctaagcttaactacttaagacagagaacaggtaaggctgctaaggttaaggaattggttagataattttgttattcacggtaagggacatttgaaaaaatgtccctttacttatatataagcgacaggaaaggtcggaatattatgagattttttcagagaagatatcaggaaaatactacattgcttaatatatgcaaatatgtagcagatgtatgtgttgtaatagtacttgcttatgttctggttacattcatatgctgccgttctacagttgttggtaattctatggaggaaacgctgtctaatgataacactgttcttataaacagaatatcatatgcatttaatggacctaagcgatttgactgtatagctttcgaacaggattctgttgattcctctaagatatacataaagagagtagttggtcttccaggggaaacagtccagataaaggatggcagggtatatattaatgatgtacagcttgatgattatgttgatacgacaatacttactccaggtgtagctgccaatccttataaacttgctgatgatgaatactttgtacttggagataatcgtaataatagtgaggatagccgttttgccagtgttggaatggttaaacgtaagaatgttgtaggaaaagtatggatggtaatagaaccgtttgattcatttggttttgttaaataatggagatatatatggaagagaagaaaagagccattaactggtatcctggtcatatgactaaggccagaagaatgatggaagaagatataaagcttgttgaccttgttattgagattgtggatgcaagaataccgttaagcagccgtaatccggatattgataagctggctaaaaataaggcacgtattgtattattgaataaatcggaccttgcagatgacacagtaacggatgaatggataacatattttaaagataaaggcttttactgcctcaagcttaactcaagactcaatgtaagcaaccgtgcagttaataatcttataactgttgcatgttctgctaagattgaaagagacagagcaagaggaattaagaaccgttccatcaaagctatgattgttggaatacctaatgttggtaaatcaacatttattaattcattcaccggaagaaagagtgccaagacaggtaataagccgggtgttacaaaaggaaagcaatggataagaattaatggaagtgttgagctgcttgacacaccgggtatactctggcctaagatagaagacaggaatgtcggtgaaagacttgcaatgattggttcaattaatgaccagattcttaatattgaggagcttgcattagaaactataaagtttcttaggaagaattatcagccgcagctttatagccgttatgatataacagaagatatatttgataatgttgatactgaaacaatgatgaatcctgaaaatgctgctgcactctgtattatggaacatattgccagaaaacgtggctgtattaagaaaggttcagatattgattatgaaaaatgtgctgcatgtattcttgatgatttcagagaaggaaagattggtacaatctcacttgaaagaccttaattaagataccggaaaggaaagctatgacacttaaagaagaacgtgaacttaaaaaagcagcaaagctggaggctgagaaacagcgtattgaagctatgcgtgaatacgaagaaatgtatgatacattttcttatatatgtggaatagatgaagctggaagaggaccgcttgcaggtcctgttgttgcaggcgcagtaattcttcctaaaggaaaaaggattctttatgtaaatgattccaagaaattaagtgagaaaaaaagagatgagctttttgatgttataaaagaagaagcactttcatatggaatcggaattgtatctcctgaaaggattgatgagattaatatattacaggcaacttatgaagcaatgcgcgaagcagttaataaattatctgtaaaacccgatatacttcttaatgatgcagttacaatcccgggaattgatgttaaacagattccgattattaaaggtgatgccaagagtctgtcaattgcatctgcaagtattcttgcgaaagtaacaagggacagacttatgaccgaatatgattctttgtatccggaatatggatttgccaggcacaaaggttatggaactaaagttcatattgaagcaataaaagagtacggtccatgtcctatacacagaagaacatttattaagaattttatataggtgaacgtatatgaatattaatatgtccgattttttcaaaaataatatatcatcaggcagccagaccacagatgttaatgtgtcggaaaatgtatcacatgaatcatctggaagcaataatgctgtacaggctgctggcatgaaaatattaaattctcttatgtcaggtgacacgtttacagggtatgtcagccagttaaatggtgataatgcatatattacaatgaacaatggagcacagattcaggctaagcttatgcagggtgctttaattaatatcggacagaatgtgacttttatggtggaggataactctgataataaaatttcaatcaaaccggttttagctaatgaacagcaggcagttcttattgataaagcattggaggctgcaggacttggagctacggatgataatattaatattgtcaaagaacttttagggctgggcatgccggttgatgcacagacattaggaaatatggttaaatattccatgaaatttcccgaagcctcacttaataccgttgccaatctaatgagacttgagattcctgtcaatgaacagaatatccgtgagttccagatgtatggtcagtttaacggacatattgagaatcttttgtcagatatggagaatggtatagttaatgatctgttaaagaacaatcaggatattatggatttcaaaaatgttattacaggcatgtatgaggggcttgatggggaaactgtaaactcatcatccgcctgcgatgtcctatcgcagcagacaattgatgaattaaataatatgctgtctgattcaggagtgaaacttaataatgatatctcagaaacttctgtgaaggaacttattaaccagcttgctgaaaataatagtcttaattctgatgattttcagaaaattatcaattcaggaagcttcagagagattcttcatgccgcaattaatgatacaatgaagctcactcctaaggatatacaggaaggggaggaagctgtaagctcatattataagcgtataagaaaaaatgtggagaatattgaaaattcactgaaatccgcaggcaattcaactcctgaactttcgaagagtctttctgacataaaaagtaatattgatttcatgaatgatcttaataagaatatgacatattttcagatgcctgttaaattctcggaaagtgaaggtaatggggaactgtatgtattcactaataaaaagaaccttgccggaaaaacagataatataagtgcaatgcttcatctggacatggataatcttaaatcaatggatatatatgtgaatctgtctggaggtaacaatgtatcaactaattttgttcttgagacagaagaactgcttgatttcgtatatcagcatatagacaggcttaatgccagactcgaaaaactaggatataatacacattttgaaatgaaggtagcagccgattcttctgaccgtcttgattttgttaaagattttatagaagcagagacaagaccggctgcaggtggacaatacatattcgatgcaaaagcatgacagctttatctaaagaaggagcagaatatggagaaaaagaataatgatgataagcctaaaatagcagttgcacttgaatacactccgggggaacaggcgccaaagatacttgcaacaggacgtgggtatattgctgaatcaattattgaaaaggctggagaagcggatgttcctgtatatgaagattccaagcttgctgatactttatcaaaacttgaaataggagaaatgattcctccggaactatataccgtagttgcagaaattcttgtatttgtagatgaatgcgacaagattaaagggaaagtgggtaaataatggctgttaataaaagagctgccggagcagataaagaacagcttgctgccagatatcttgttgataatgggtacgctgttcttgaacggaatttccgcaataaaacaggtgagatagatattattgcaaagaaagataattatatcgtatttgtagaggttaaatacagaagtaataacaaatacggatatgcagtcgaagctgtaaattacagaaagcagcagataataaggcgggttgcacaattctatatgacaactagatataaaagctgcgatataccatgccgttttgatgtcataggaatagatggagaaacagtaacgcatattaaaaatgcattttaataaggattataatcatgaatattaaatatattgatacaggaaaactttatgaaggattaaaaggagctgtggttaataattccacaagaatatcacggaagaatggaattccttatattgaatttacaccatttgataaatttgactgggtcactcttcatttttcaacaagagatggcggagtgagcaaagggatatattcaagcatgaatttttcttttgacaggggcgatgattacgataatgtatataagaattacgaactgttccttgatacaatgaatattaagtctgaaaactgtgtttgtacaaaacagacacatactgccaatgtgattgctgttgattataatatggcaggaatgggacttacaagagcaagaaattttgataatgttgacggtcttgtaactaatgaacctggtctgtgtcttattacatattttgcagactgtgtacctgtatattttattgatcctgtaaacagatgcataggtgcatcacattcaggatggcgtggaacggttgcagatataacacatgaaacggtacagcttatgaatagaacttatgggtcaaagccagagaatattcatgcattcataggaccatcaatatgtcaggactgttatgaggttgatgaagcagttgcagaaaagttcagaagtgcttacagccggaatgaaatcggtatgatactttatcatacgacaggagataaataccagcttaatcttcaggcagctaattattttaatatgattcatgccggaataaaacctgataacataggtatatctgatatatgcacaagctgtaacagtgactggctcttttcgcacagggcttcgcatggaaaacgtggcgttttgtgtggatttatgagtatatgcagataataaaaaaaagccagaacagatattttattgatgatctgttctggctttttttattttttattatgttcctgtctgtatctggctcttaattcagcttcctcagaagaaagctttgcccggctttttctgccaactctggttataagcagatatattgctgcaagtatagcaataggaatagctgctgtaagtattgtcgataaagtctctgtaaacacaccgttttcaaatatggatttcttcacatctgtatactgggctgaattgattatgtatctgatgtcattaatcatttcatcagtgatttcattatccttcgactgaagagaatacatatatatatatccgcgtgctacagtgtagtattttcttgtataaattgtctgcttttcgtctgatacagatgtaacctctgtcctgaaatatggacggtcgttaattatatctatagccttgcctgtcattgtctctgtcaggccatcttcctgtttggcattctctgagtcaatatactgcaggaacatgccgcttaactgattctcatccagttcatcaaggttggaaagtgatgagcctgctttcattccgacaacagcaatttcataagaaatgtcttttgaaaatgcttcgagatatatattagatgctttcattgagttctgtacttcattggaatcctgtgcgccaatatccttaagatatgcattattgcctgttgttgtctgcgtaaagcatatcagttcctcaggaacttttaattttaaatcaattgcagagaacttataagatgcatctgctgccagtgcagtaaaagatggaaaaataattgccgatataagaaccaataccggaataaatgttaattttttgcgggaaaatttcacaaaaacacctcctaaagtgcttaaaatcaatattttgtatgatatcacagtgctttacaaaaagcaattaaactgatattatattatagattgcgtgtattaattttttgtaaatttgctataagagcaaggaggaattatgagtaaaccaatagttgctgttgtcggaagacctaatgttggtaaatcaacattattcaacagtctgtgcggacaacagatttcaatagttaaagatacaccgggtgttacaagagacagaatctatgcagaggtaagctggctaaaccacaatttcacacttatagatacagggggtatagagccggatacaggtgatattattctttcacagatgcgtgaacaggcagaaattgccattgaaactgcggatgtaattatatttatgactgatgttaagcagggacttgtagattcagattctaaggttgctgatatgttaagacgttcacacaagcctgttattcttgttgtcaataaagtagacagctttgaaaagatgatgcctgatgtatatgaattctataatcttggaattggagaaccatttcctatatcagccgttaataagttaggttttggtgaagtgcttgatgaagtggtgagtcatttcccagaaggttcagatactgatgaagaagatgacagacctaaggtagctataataggtaagcctaatgttggtaagtcatcaatcatcaataagcttgtaggcaagaacagagttattgtatctgatattgccggtacaacaagagatgctattgacacagctatcaagtataatggcaaagaatatgtatttattgatacagcgggactacgccgtaagagcaagattaaagaagacctggagcgtttcagtatcataagaactgttgcagcagttgaaagagctgatattgcaattcttgttattgatgctacggaaggtgttacagagcaggatgccaagatagccggaatagcgcatgaaagaggcaagggtattattattgctgttaacaaatgggatgacatagagaagaatgacaagactatctatgagtttacgaataagattaaagatactcttgcatttatgtcatatgctgagattatatttgtttctgccaagacaggtcagagacttaataaaatatatgaattagttgatcacattgttgatgcacagactatgcgtattcctaccggtgtgcttaatgaaattcttacagaagcagttgcaatgaagcagccaccttcagataagggtaagagacttaaaatctattacatgactcaggtttcggtaaaaccaccgacatttgttatgtttgttaatgatgtagcactcacacatttttcttatacaagatatatagaaaacagaataagagaatcatttggattcagaggtacatctatcagattcatcaacagagaacgtaaggagaaagagtaatgttatttaaaataggtgttcttatatatggatattttgccggagcactcattcaggcaggatactggatgggaaagttcaataagattgacatcagggattatggcagtggcaatgcgggaactactaatgttatgagaactcttggcaagaaagctggaattgcaacttatctgttagatgcatttaaagcagttattgctgatatattgatacattttcttatagtaccacatactgcaattccggaaatgcttttatttctgtattgtggtcttggaatcgtgcttggacataattttccgttttaccttaagtttaaggggggaaagggaatagcagcatcttcaggtgttgttataagtcttatgctttttcctaagtactgttttatgtttacggtttttggtattgtcttttttgcacttgtagccaggataagccgttatgtttcacttgcctcacttataggtatggcaatgttttttgttgaatttcttatatggggattcttaggctggcttccattaaatggaacagaccttgttgaaggcactgttattgttttcgctcttgcagcacttgcatttatcagacaccgcagtaatattgtaagactggttcatggaacagaacggaaaatcggtgaaaaaaagaattaatttttgatgcgcttatgcgcagattggagtataattatggcaaatgtaagcgttttaggagcaggaagctggggcttaggtcttgctttacttcttaataacaacggacacaatgtaacagtatggtcagtattaaaggatgaagttgctatgcttcagactgaaagagaacataaaagatgccttcctggtgtaaagattcctgacagtattactgtttcaggagatacagagaatgtaattggcagtgcagatgtacttgtacttgcagttgcatctccttatacacgttctactgcaaagatgattgcacctttcgtaaaggaaggacagattattgtaaatgtggcaaaaggggttgaggaacatactttattaacactctgccagattgtagaagaggagattccttgtgccaaggttgcagttttatcaggaccaagccatgctgaagaggtaagccgtggcattcctacaacatgtgtcataggtgcacatgaaaaggcaacagctgaatatttacagaatatttttatgagtgatgtattcagggtgtatacaagtccggatatgctgggaatatgtataggtggtgcattaaagaatgttatcgcgcttgccgcaggtattgcagatgggcttggttatggtgataatactaaagctgctcttataacaagaggtaatgctgagataacaagacttggtgttgcgatgggagctaatcctcatacttttgctggcctttcaggtattggtgacttaatcgttacctgtgcaagtatgcacagccgtaacagacgtgcaggaattctcataggtaaaggatacaccaaagacgaggctatgaaagaagtgcagatggtagtagaaggtgtgttctctgcaaaggcagcgttagaactttctaagaaatataatattgagatgccgattgtagagcaggttaataaggtgctttttgaagacaaacctgctgctgaagctgttaaggaacttatgttaagagataaaaaaatagagattgataattctgaatggaagtaatcagtctgtattaacagagggggaaaactgatggctcatattaaaaatctatcgaacagagcctacatttcaggcagtcttaaagacaaactttcaagatttgagatgtatagatacagctttatttatgcgcctacaggatatggtaaatccaaagtaataagaactttttttaagaattacccagggtatactgttttatggatagatgcagaaagttccagagagattttttgggataatttctgcaatgctgtcaaaatgtttgataatacattggctgcagcttttaagaaaattggatttcctgattcggattatgctattaatgaagttattaatcttttatctattatgaattcagagaaattctctgctctgcttgtgattgataactttgataatatatttgatgacaatatgtgcagaatatttgctgcatcatatttatcaaccgcagtaggattgagatatgcatttatattaaaaaaattaactaatcagagtattattaatcttataactaaggatgatgcgttgggaatcacaaaaaaagattttgcattttcacaggaagatattgaagattatttcaggcttaatgaaattattcttgataaagaaacttctaaagatatatttaataaaactctgggatggccatatgtagtacatctatacatggaagcctataagaataaacataccgatgcagataagactgtgcttgataaagcgtatacatttattgaaaataatgtatggctggagttatctgatgatgaaagacaatttcttgctaccatgagcgtattttcaagctttaatcttaaccagtgcatgaagcagacttttttagaagaaaaaatgtgtcttaaacttcttaattcaattccgttaattaattatgatgagcatacaagaaggtacagctttaatcctatgtttgatggattcattcttcaggttcttgatgaaatgcctgttgatgaagttactaagattacactcagagctgctgatacgaatcttgatgatggtaattactttgaagcgatgaagctttacagccactcaaaggaatataggaaaatatatcagcataatattgattttatagatatatatccttatgtaattaagcagaataaagatgtatttacggacattgccaatcactactgggatatagaaaaagagggacattatgatttttctttgattatatgtttctcactgcttatgtttaatgagaagcatatggttgaaactcttcttacggatataacatcagatatctgtaaggattcagttttaagtgacaacaagaagaattcttacatggcggagatacagtttataaaggcttttacagaatataatgattttggaaagatgagagaaggttttaatattattctttctatttctaaatcacctgtaaatataattgccgatggctttccatttaattatgaatgcccttcaattatgatgctatatcacagaaagtctggagcacttgataaggaacttgaaacgcttgaacagtgtgctcctgattattacagaataacgaatggtcatggaaaaggttttgaagctctgatgcgtgctgatgttttatataacagaggtgaccttgacggagctgagattctctgtcagaaagcaatatatatggcagacagccgtaatcagtatgctatatacattgctgcatattatattcttgcaaatatagcactctacagaggatttaatgatcagtataaggaaaatatgcacaaaattgaagctgtggcaagaagggataccagaaaatccaaatcgcttgaaaagctttcggatatatgccatgcatgtatgtattctgatatagaacagcaggataaaattgctgcatggattaaagaccagaaaaagattgaagattccgttaatttcttctctcttagttttgttaacattgtgtttggaaaatatcttatacttaatcgtgagtatcatcattttcttggtataagcggtcagcttttaggacttaacgatcttttttcttatatccttccacagatatatacatatatatatcttgcaattgcaaataaagaaacaggtgagacaattaaagcccataagtttcttaaagaggccataaagcttgctgaaccagacagaatatatatgccttttgtacataattacagcagcatatctgagcttatggcagaaactgttgtaggtcatgataatcaaggctttatcagaaatgttataaagatttcaaagggttatgaaaaaggggttaaatcaataaaaaaagctggacatgccctagcagattatggacttactgtacgtgagtcagatgttgcaaagcttgcagcacagagattttctaataaagaaattgctgaacagctctttattgctgagagtactgtaaagtccaatatgaaagttatatttaataaactgcagattaattctcgtgcagaattaaagaatttttttgaataaaatataaaggaactgatatttatgagagtaatagctggaattgccagaagtatgcctttaaaggctgctgaaggtgacaacacaagaccaactactgacagaattaaagaaacattgttcaatatgttacaatcagatattgcaggatgcaggtttcttgatttatattcaggaagtggtgcgataggtattgaggcgttaagccgtggtgcaaaagaagctgttcttgtagaaaatgcaagacaggcaatagctgttattaaagataatcttacatttacaaaactttcccctaaggctgttgtaatggaacaggatgttttgtctgcaataaacagattatcaggcagcggagtatttgatattatatttatggatccaccttatggaaaagactatgaatatgatgtattacttgcattatcacattcggatattgtagacagatatacaattattgtaattgaggaggctcttaatgtgcctttggattatattgatgaatgtggatttgagactgtaaaggttaagaattataaaactaataagcatatttttatacgattaaaggagagtgaataactgtgaaaaaagcgatttatccagggagttttgacccggtgacattaggacatttggatataatcaggcgttcagcaagtcttgttgatcatctgatagttggcgttttaaataacagtaccaaaacaccattgttttcagtggaagagcgtgttaatatgttaagagaagtgacaaaggatctgcctaatgttgaagtattaagcttcagtggattactggtggattttgctgcagaacataatgtttctgtgataataaggggattaagagctgtcactgattttgaatatgagcttgcaatgtcgcagactaacagagttgcggctcctgggattgatacggtatttcttacaacaagcctgaagtatgcatatttaagttccagcatcgttaaagagatggctatgtatggcggagatattaaaaagttcgttccggaagagattatagacagagtctatgagaagtatggaatcacaaaataatcagaatactattaaaggagtaaaacgatgagcagaattgagcagttaataagtgatattgaaagttatattgatacctgtaaatattatccattatccaatgttaagattattgttaataaagagcagttagaggatatgcttacagaattaagattaaaaactcctgatgaagttaagaaatatcagaagattttaagcaataaagatgctattcttgcagatgccaaggaacaggctgatgctattattaatgcagcacaggttcagactgaagaacttattaatgagcatgaaattatgcagagagcttatgcacaggctaatgagcttattgaacaggctacagcacaggcacaggctatcctggataatgcaacagaggaagcaaacagcataaggtatggtgcaatgcagtacacagatgatatgcttgcaaaacttcagtatattattgaacattcaattaaggataataaagaaaaatatgattcgttattatcaggtctagaaaatgtattatctgttgtcaataataataggaatgagcttagtggtattgaagaaggagaaactgaagaaactgtgcaaaacaattcggaagatttagattccacagatacagacaataatgaataacaattaataatcttatagtatatttaatacatatatcagcagataagtcattgcaagtgttactatacacagtacaagtttctgatatatgtatttttttatgcttatataactgctgcatatgctttttgtctgcataataatgcatactccgccaaatgcatcaagtaatactgtcaataatactgttatattcataggaattccagcatttttaattatagcaagaccgtttgatatttcaaataaatatgatattaacaaaccagcggtattgctttgtgaaaaatgcattataatatttacaatgacagagaaaataataacgtaagctcccaacttcagagcagtattaattgaactgtctacagcttcttcaaagaaatggaatatcagttttttgtcattttttatatgtggagcattgtcttttttattatctttatccctaaaaagcagaattgtcatatatgaacataatattaccggtgtatatgtcagtgcaagaaacattggcagactgatacatttttcgaggatattaatatatacatagcttataagaaatgccggactgggaatattgattatgccggcaagcatgtccccgagtctgttttcaggattatttttattgtaccatgagcagatataggctccgtttggaaagcctgtcataagacctgttattacaagtatccatggattattaatatttttttgctgcagaattcttacaagaatattagtgagaataaaagatataaataatcccggaaatattttcatgccataaagatatagtccggaaatcactccgtgacacacaggaaccgataataccgaaaacacaaataaaagaataagtattatgcttatcatacagcctctttaataatagatatttaataatattctcaaaaatatgtttttatgtgttataatgaaatataattatgcaataaaagctgaaatggagactacaatggaaattcagatgtggaaggaaattcttacaccttatgatctggcggtggaagaacttcagataaaattcaaccatataattaaagaataccgtcaggcaggtgtctattcacccatagaacaggttttaggacgtgtaaaaagtatttctagtataatagaaaaagcgcagcgcagagggattgaaattgataaaattcaggaaaaactttttgatattgcaggcataagacttatatgtcagtttacggaagatatatatacagttgtgaaacttatcaagaaacggaaagacatgactgtaataagtgagaaagattatattaaaaatattaaagagagtggttatagaagttatcatcttatagttcattatgaagttgagacagtgaaaggaactactattatacccgtggagattcagataagaactcttggcatgaatttctgggcaattattgaacattcactgcaatacaaatataatggtgaaattcctgcacatgtgaaagaaagattaaatgcggcatcagatgcacttataacacttgataacgaaatgtcatctatccatgatgaaattattaattcccagacctactttatggttaaggcaaatattgtttcagatatattaagtacaatccagaatctgtacaaggttgccaataagcaggttgttataaaaatccaggatgaattctatgaaatatttgaaaaaggcgatgttaatgaactttcaagattttcacgccagttggatataattgctgaggattaccgggcacagtcagtgcagtaactcattacagaaactatacagaattgaggtatacaaagtgaatttaccagagaaatatacagaatcaatgaaaatgatgttaggtgatgaatatgacagctatatagaaagctttaatgataagagattatatggactgcgtgtcaataaccttaaaatttcaacagaggatttccttaagatatgtccgtttaagttagaacctgttccttggattgagaacggattctattattcagaagatgacaagcctgctaaacacccatattattttgcaggcttatattatattcaggagcctagtgccatgacacctgccaatgttcttccgattgaggaaggcgatgttgtatttgatatgtgtgcagctcccggtggcaaatcaacagagcttgcagccagattaaacaaaacaggactacttataaccaatgatataagcaattcgcgtgccaaagcacttcttaagaatgtagaggtatttggtgttcctaatctgtgcgtccttaatgaagaccctgtgggtatagcttcaagattctcaggattctttgacaaagtacttattgatgctccatgctcaggtgaaggaatgttcagaaaagacaataagcttatcaaagcatgggaaaagaacggtccggagttctattcgcagattcagaggaatatcattcttgccggtgctgacatgttaaaaccgggcggtaaattattatattctacatgcacattttcaaagctggaggatgaagattcagtaatacatcttcttaccaacagacctgatatgcaccttatagatatcaagccatatgaaggcttctcacacggctttgatactgatgaaggatatcatcttgagaaggctgtcagaatatttcctcataagatgcctggagaaggacattttgtggcattatttgagaaagacggcgaagattatacatcttctaaaagacctgtatcaggaaagacaaagcttcctgatgaattaaaggagttcatggacagcaccacatttgaatatgaccctgcttatatcaatataagagatacaagggtctttcttacatctccttatatggcagaggaacgtggtttaagaattataagaaatggtctgctgctaggtgaacttaagaagaaccgttttgaaccgagtcaggcatttgcaatggcacttactaaggatcagtttaataactgtcttgaccttcctgtttcagatgacagagtaatcagatatcttaaaggagagactatcgatattgatgattttaatgtcaaatctggctggacacttgtatgtgttgatggctatccacttggatggggcaagaacgctaacggacagttaaaaaataaatatcttgcaggctggagatggatgtaaatgcttataagacttgataaatatcttgcagacatgcaggttggtacacgcagtgaagttaaagaactgataagaaaaaagagagtcactgttaatgacaatattgtgacaaagcccgaatcaaagattaatacagacaatgattccgtaagtgtagatggtgaatctgtcggttatcatgaatatgagtattttatgcttaacaagcctgccggtgttgtttcggcaactgatgacaatacatgtacaacagtgattgaccttattaaaactaataacagaaaagacctttttccggtaggaagacttgataaggacaccgaagggcttcttataattacgaatgatggtgctatggcacatgatctgctatcccctaaaaaacatgttgataagacttattatgccaaagttaaaggtaagataagcgatatggaagttaagcagtttgccaacggactattcgttgatgaagagctgacagcacttcctgccatattaaaggtattaagctataattctgataaggattattctgagattcatgtaacaatacatgagggtaagtttcatcaggtaaagagaatgtttactgccataggttcagaggttctgttccttaagcgtataacatttggtgcattaccacttgatgaaagcctaaaaacaggtgaatacagagcacttaccaaagaagagatatcaatattacaacgaaaccagattaaaagataaggagaattccatggttaaggattttcttccaattagcagagaagatatgaaaaaaaggggctggcagcagtgcgacttcgtgtatatatgcggagatgcctatgttgaccattcttcttttggaatggctattataacaaggctattagaaagccgtggttataaggttggcattattgcacagcctgactggaaaaagaaagaatcaattacaatcctcggagaaccaagattaggatttcttgtttctgcaggtaatatggattcaatggttaatcattatacagtcaataaaaagcacagaaagaatgacgcatattcgcctgggggcaaaatgggcatgcgtcccgattatgcaactattgtatattgtaatcttataagacagacatataagaaaacacctataattataggtggcattgaggcttcattaagaaggatgtcgcactatgattactggtctgataagatgaaacattcaatccttattgattcgggtgcagatattatctcttacggaatgggcgaacattctattgtagagatagcagaggcgcttgaagccggaattgatgttaaagacatcacatatataagaggcactgtatataaagcaaaaagccttgatcatatatatgatgattatatagagcttccaagctatgatgagattgcagctgataagaagaaatatgctgagagcttctatacacagtacattaatactgatgctttcagcgccaggattcttgttgaaaaggttaaggaaaaaatgtatgtcgtacagaatcctccggcgatgccgcttacacagatggagatggacgatgtatattcactgccttatatgagagattatcaccctgtatataagaaaatgggtggtattcctgcattatcagagataaaattctctcttacaagcaacagaggatgcttcggcggatgttcattctgtgcgcttaccttccatcagggacgtatcatacagacaagaagccatgaaaacataatagaagaagccgaattgatgacacatgaccccgattttaagggatatattcatgatgttggcggccctacagctaatttcagaagaacagcctgtgacaagcagttaagtaagggagcatgtgtcaataaacagtgtctttttcctaagccatgtaagaatcttgtcgtggaacacaaggattatataagccttttaagaaagcttcgtaagattccttctgttaagaaagtatttataaggtcaggcatacgatttgattattgtatggaagattctgatgatacatttttaagagaattgtgtgagaatcatattagcggacagctccgtgttgcaccagagcatatatcagataaggttttatcaagaatgggtaaaccttcaagagcggtatatgacagctttattaaacgctataaaagaattaatgataagacaggaaaagagcagtttgtcgtgccatatcttatgtccagccatccgggttcaaccatgaaagaggctattgagcttgctgaatatgtgcgtgacttaggctatatgccagaacaggtacaggatttttatcccacaccgtcaacactttcaacatgtatgtattatacaggttatgacccaagaacaatggaaaaggtatatacacctgtatcccatcatgaaaaagagatgcagagagcacttatccagtacaggaagccagaaaattatgaccttgtaaaagaagcccttcttgccaataacagaagtgacctgattggatttggtccaaaatgtcttattccacctagaaaaataaggagcagaagtaatgaaaaaagtagaaaaaggtgagttcggttatcttgcctataaaaaaagccgcaatatgattaaaacaattattgcatttgctgttgtactcataatatttatcattggtttcataatatggaagtccaaaaataactaccttacaatgcttgcagttgtacttgttctgcctgctgccaaattcgcagtatcatactttgttcttattccgcataagaactgtgacaaagaattaaagaatgaaattgaagaacgcaaaggcaaattagacagcgtctatgaccttgttgtatccaataaacagaagcctgtcggcattatggcagcagttatcagtgacaaccagatacttgcctatacaagtgctgacaaagctgataagaaccttttcgagacaagtgttaaggagttcttgaagaatgagaagcttacatgtgctgtccttctctataaggataaggatacatatcttgaaaaagttaagaatgcagccttgaattttgatgtgagcaaggaaaacagccttgacagaaaacagtatataacagacgcattactaagaatgagcatgtaattaagcaggtattatatgaaagaaattaacattgatgaaaagctcgcaggtcagaagatgatgcgctgtcttgagcgttatttatccaacgcccctaagagctttctttacaaaatgctgagaaaaaagaatattacactcaataattccaaagcaacaggtgatgagaagttaaaatgtggtgatacaatcaagattttcttttctgatgaaacatttgaaaaattcgcagccgataataacagaacagctaatgacgattactacagcagaatatacaggccacttgatatcatctatgagaattctgatgttatatttattaataagccttcaggcatgctttcacagaaggcaaagcctgaagatgtgtcacttgttgaatatttaatagcacaccttatacataagggagaacttaacgccggtgacttagcctcgttcaagcctggcatatgcaacagattagaccgcaatacaagcggaattgtagcagcaggaaagactactaaaggattacagcagttatcggaagcatttaaacagagaatccttggaaagtactatctgtgcattgtaaagggaaacgttgataagcgtgctttaataaaaggatatctgtataaagataacaaaactaataaagtaactataagcaggactgaaactaaagattcacttccgattgagacagagtatattccggtatgttctaatggcaatgtgactctgctaaagattcatcttcttacaggacgaagccatcagataagagctcatcttgcaagtattggacatcctcttataggtgattataaatacggctcacaatctgttaatgacgcatttaacagacaatacaaagtaaaagaccagatgcttcattcatatgaattagatattccggatatggacattcatatatacgctgcaatacctgattcttttaaaaatgtcatgaaaggagaacagttatgccgacctggaattcaagaggacttagaggctctacattagaagaccttattaatatgtctaatgaaaaatacaggacttcacatcttgcacttgtccaaaagattccaactcctataaaaccaattaatatagaccaaagcacaagacatattacactggcatattttgaccagaaaagtacggttgactatattggtgttgttcagggaattcctgtatgttttgatgcaaaagaatgtgcaacggatacatttccaattcagaacatccatgaacatcagattgaattcatgcgtgaatttgagaagcaggacggaatctccttcataattatatatttttcttcaagagatgagttctattatgtaccattttctgatataattagtttttgggaaagaagtgaaaatggtggtcggaaaagcttcacatataaagaaataaatcagaatttccgtatatatgcaaatcagggaattcctgttcattatctggaaacaatccagaaggatatagaattacgatagaaaggcagggggttagatgattagtgataatcataatgcttataataactataataattatattgatgaatatgaacttactaatggatatgctgtagttgacagaaatttctcaatagtaactgcaaatgagcctatgtatctgttccttggaatgtcaaaacattattcaattatggatgctattcatcaggttgacattgacgattttattgatgttgccaacagtttaagacctgaaatcaagaaatccatgtgtatacggatgcgaagaatagataattcataccgatgggtaattgttgatatagaaaagaaagttatacctaatactgattcatctgaataccttgaattacatatatctgatgttttagttatccgtgagcttaataaaaaattacagcagcagattaaagcatttaaaaatgaaactgctgaaaatagaaatttactaattatgcagcctgaacctgctataaaagaattctgtataaaaaacatagaatccgataataactgccagctttcgcttatatatcttgaagttgacaatattgagcagtttaaggctacacatactgatgacgaatgccacagaataacatatgtaattgaagataccatattaaaagcaattgatgaccgtggtgtattaggtcgtctgaatgattttaagtacattatagctattaaaaacatcaataaagaagttaaattgcgtgcatttttggagcatataaggacccagatttcatggcattgtaaatttattgattcatcatataatatagaattttctattggcataggaagatatcctgataatggaaaggatttagaccttattaagaaaaaaatccaaaaagcaattaatatggcacgttctaaaggaggcaacagatatataatctataaggagttcctgcacggagaaatcgaagattctgataaatagtttgttgacaataactacatatttatgtataattcatacaaatttagtgtgttagcatagtatcacttcaacgcattaaagtattcgatataacgaaaggatatacatttatgaagaaagatttactacatacaccagagggtgtgcgcgatatatacagtacagaatgtgcagaaaagaaggtcattgagaatcgtcttcatgatgtctgtgcatcatatggatataatgatatacagacaccttctattgaattctttgatgtattcaataaagaacgtggaagtgtaccgtctaatgaaatgttcaagctttttgacagatacggaaacactttagtattaagaccggatatgacaccatctatagcaagagctacagcaaaatattttgaagacagagttcttccagtcaagctctgttatcttggcaatacatttatcaatgtaagcaagtattatcagggaagacttaaagaaaatacaatgcttggtgcagagcttatcaatgataactctctggcagcagattatgagattatctctatggttattgactgcatgttatcagcaggtcttacagagtttcaggttgagcttggtaacgttgctttctttaatggtcttttacataaagctggcattacaggagattctgcagaagaattattaagacttatcaaggataagaattacttcggtgttgaagaactcttagatagtcttaatattgatgatgcagttgccaaagcattgcttgaacttcctcagttatttggtggtacagaggtgcttgaaaaggctaaatctttaacagatgaagaagagtgcatacaggctgttaacagacttgaaaagttatatgagcttcttaagaataacaattacgataaatatatctcttttgatttaggagatttatctgagcatgcatactatactggaattatattccatgcatatacatttggaacaggggagcctgttgtgaatggcggacgttatgacaagctgctcggtcagtttggctgtgacaaggcatctattggtttctctatcacgattgacagacttatagctgcacttaacagacagaatatccatatcccacacgacgctaatggaacacttcttgtatacaatgctgacaggcttggtgatgctataaatgtatctaagaaattaagaagtactggtgttaatgtctgcatgattgaatataaagacagcaagtctgattctcaatatattgaatatgctaaagaatcttcattagtaaatgtagcatttattgatgatgaatacgtttctgattcaacaataagagttattgatgaatcaggaaaaaatgaaagagcagctgtaaaaagccttgtaggaggtacattttaatgagatatataactattgcattagcaaaaggccgtcttgcaaagaaggcaatggagatatttgaacagattggtattccttgtgaagagatgaaggatgaaaagacaagaaagcttatcttcactaatgaagaattaggattccgtttctttttatcaaagccatctgatgttcctacatatgtagaatatggtgcggccgatatcggtattgtaggtaaagatacaattcttgaagaaggaagaagtctttatgaagtatatgaccttcagatgggcaaatgcagaatgtgtgtatgtggtcctgaatcagcaagagaaaagttacagcatcatgagcttataagagttgcttctaagtatcctaacattgcaaaggattattttaataatataaagcatcagactgtagagattatcaagcttaacggttctgtcgagttagcacctattgtaggtcttgcagaggttatcgttgatatcgttgagacaggtgcaactttaagagaaaatggtcttgaagtgctcgaagaggtgtgtcctctttctgcacgaatggtcgtaaaccaggtaagcatgaagatggagcaggagcgaattaacaagcttattaatgatgtcaagaaatatatagaaacacagggaatataacaaggaggaaaattcctctcctcactatggagttcggattttgcttcgcaaaaaaaggaggaaatataatgcgtatcgttgaattaacagatgaaagtaagaataatattttagagaatcttttaaagagaagtcctaacagctatggaaagttcgaatcggcagttgctgagattcttcttaatatcaagacaaagggcgatgaggctttatttgaatatactaagaattttgataaggctgatatcaatgctgacaatattgtcgtaacagaggcagagattgaagaagcatactctttagttgaccctgaacttattgaggttataagaaaggctatcgttaatatccgttctttccatgagaagcagaaacagtacagctggtttgattctaagcctgacggaactatattaggccagaaggttactgcacttgcaagagtcggtgtgtatgtaccaggaggaaaggctgcctatccttcatcagttcttatgaatgttcttccagcaaaggttgcaggtgttgagcagattataatgtgtactccacctgataaagaaggaaaggtatatcctacaacacttgttgcagctaaagaggctggagttgatgttatatataaagctggcggagcacaggctgttgcagctatggcatatggtacaaaatcaattcctaaggttgataagatatgtggacctggtaacatatatgttgcccttgctaaaaaggccgtatttggttatgtaagcattgattctgttgctggtcctagtgagattcttgtaattgccgatgagactgctaatcctcgttatgttgcagcagatcttttatcacaggctgaacatgatgagatggcatctgcaattcttgtaactacaagtgaagaccttgcacataaggtatctgcagaggttgataagtttgtagctgaattatcaagaaaggaaattatccagaaatcacttgataattacggatatattcttgttgctaaggatattgatgaggctgtagatgttgctaacgagattgcatcagaacatatggaaatcgttacaaagaatccttttgatgttatgactaaggttaagaacgcaggtgctatcttccttggagaatacagttcagagcctcttggtgattactttgcaggtcctaaccacgttcttcctactaacggaacagctaagttcttctcacctttaagtgttgatgacttcattaagaaatcaagcattatttcatactctagaaatgctcttgaagctatccacacagatattgagaaatttgctacagcagagcatcttacagctcatgctaattcaattaaggtaagatttgaaaattaattagcgcactggcgcggaaacggggattatatggctgtatctgaaatcagacaggcaactgtaaaaagaaaaacaagtgaaactgatattgctttatttttaagaattgatggttcgggagaagcagaggtcgatacaggaatcggttttttcgaccatatgttaaaaagctttgcaaagcatggtctttttgaccttaagttaaaagtaactggtgacctgatagttgactgccaccatactatcgaagatgtcggaattgtacttggtgaagctatcaaagaagctataggagataagatgtctataagaagatatggcgacattattcttcctatggatgaaacacttatcatgtgtgccatagacctttcaggaagaccgtatcttggttttgagtctacatttacagcagacagcgtcggatactttgatacacagatggttaaagaattcttctatgcaatatcctacagtgcaggcatgaatcttcatataagaaagattgcaggtgagaacgatcatcacattattgaaggcatgttcaaagcatttgcaaaggcattggatgaggcaactgttaaagatacaagaatcaagacaattctctctactaagggaagtctctaaatatacttaaggagttacatatatgcgattatatccagcaattgatgttaaaaacgggcagtgtgtccgcttaaagaagggactttttaatgaagttactgtatattctgaaagaccttacgagatcgctaaaggctttgaagaggcaggagcacagtttatacatactgttgaccttgatggtgctttgaaaggacacggtgttaatgcagaaactattaaaaagatatgttcaagcgttaatgttcctgtacagatgggcggtggaatccgtactcttgaaaacattcaggaggttcttgatctcggcgtatacagagttattatcggtactaaggctgttgagaatcctgattttattaaggctgccattgacagattcggtgctgaacatattgttgtaggtgttgatgcaaaggatggtcttgtggccatcgagggctgggagaaggtcagtgataagactgctctttcactcgcacttgcaatgaaggatatcggtgtacagacaattgtgtacactgatatatcaaaggacggtatgcttgccggtcctaatgttgaacagactaagattctttctgataaaacaggcattgatattattgcatcaggcggcatgagctgcatggatgaccttacacatattaatgatgccggtatccatggtgcaattatcggtaaggcaatctatgaaaaacgtattgaccttaaggcggctgtaaatctttttgaatccggagcatcttacagcaaggcatcagcaatgcttaaggctgatatttcgtttaaggatttaaagcttgacgccaatggtcttattcctgttgttgtacaggattatgtcaatggtgaagtccttatgcttgcttacatgaatgaggaagccttcaataagactttagagacaggaatcatgacttattatagccgaagccgtcaggagctctgggttaaaggtcttacatcaggtcatttccagtatgttggttctcttgacatcgactgtgacaatgatactattcttgcaaaggttcgtcaggttggtgctgcatgccacaccggaaacagaacatgcttctatagaaatattaaaacatggaacagataatttatggaatataaatatataatcacagatattaacaataaaatcttctgctgcatatatacttctgataatacctgccactatcttaagcctttagatagtggcagtgttgttggtaacatatatgttggaagagttgaaaatgtagttaagaatattaacgctgcatttattgagatagaggataagcagaaatgttattactctataccagacaacaaagcaccaatattttttaatgagaaaaacaatcctgcaatatgtcagggcgacagaattctcgtaaaagttataactgagccgcttaaaaccaaacctgcaaaggtatcttcaaagatagagcttaccggcaattattcagttgtttccaacgatgtaaaaggtgttcacatttcaaaaaagataaaatctaatgaaacaatcacagagataaaaaaacgtgttgctgacattctcattcagaagcagcaggaagccatagaaaaaacaggctgtgattatctttcaaatttcggaataatattaagaagcggctgtgctgatgctgatactaatgacattattaaagatgtaaatgcattgtgtgacgaatacactgatatgctccgaaaagctgttttttcaaagttctatacacttgtacataaagacagacctgcatatattgaggaaattgttcatctgtctggaaaagacagtgttgagattatcacagatattccggctatatttaatgaattagaaacatatctgcctcgtagcagtaatataagtatccgtatgtataacgatgaattatggcctttatacaagctctattctatagaaaaagagatagataccgctctttccaagaaggtctggttaaaatcaggtggatatcttattatcgaacagactgaagcactttctgtcattgatgttaattctggtaagaatgtaactaaggcaaagagcatggaagcaatcgaggcttctgcattaaaaactaatcttgaagccgcagacaagctgtgccagcagattaaaataagaaatctctcgggaattattatcgttgattttattaatatgaatcagagaaattgcgatattttgatggaacatttgaaatctctggcaaaaaaggatatagtaagcactacaatcgttgacatcaccaagcttggtcttgttgagattacacgaaagaaaattggaaaaagtctgtctgaaagtcttaataaagcctgaaaatgcatggaggatttatggataatactgaagtaaatatttcacaggagattcctgcatacgaaagaagatatagaaagatatcagaatggtttcttaattgtaagccagcttatgcaattcttaaattcatatacaaatatatggcttattttatcgcatttgcatacatttttcttataataatgagtttacgagggactttcttttctgagataactccgattatgttaagaaacagcggtatagttgttgaaaccgataaatttttacttacatccaagcttattctgacaccttttacatcatttattcttgtatcagttataagaaaatgtattgatgcgaaaagaccctatgaaaaatacaatataaagcccttgttcgttaaagatactaaaggggaatcaatgccaagcagacatgttttttccattacaattattgcgatgtgctggctttatgtttctgttccagtagggattataatgcttatgcttgtagcaattatggcagcaagcagagtgcttgcaggagtacattttgtaagagatgttgttgccggattcgcagtaggaattatatgtggaattgccggcttatggattatctgaaaatttttaaaatatttttacaaaaaaaataggaataggcactttact

SEQ ID NO: 8515 - DNA, 443 bp, Unknown
  gut microbiota DNA sequence
taaagctataagccatgtgatgataatagtttctcgtatatacacttggattcttagcatcagcaacgaaatcagatacactccacagtaacatacattacatcccgcatgtgtatctgcatgatatccgcctgtatatgttcttataagaatcatcatcatattgtatataactgcataccatatattgcctgttatcaatccaatgataagcaccagtgctacgcttataatccctgatattatcaactccataccatatgcacatacttctttttcttcttctgtaatagcatccttagaaaacaaaaaatcagctataatcaatgcaactgaatgaatcatatacataattcctttcactttatacattgattatagctgatttaattttttaaaaaagtagtttggcatattcggtaatatatggcatattctgcaca

SEQ ID NO: 8516 - DNA, 2763 bp, Unknown
  gut microbiota DNA sequence
aggagaaaaactgttatgcaaaaaataaaaaaagtttttgcaaaagttgttgctggattattagtcgtaagtaatcttgcaatagcagcaccaagtatgacttatgcagcagctgcatcaagttttactacttatggtggatggaatgagatgatgtatgcaactatcaaaggtgttaaggatgccgatgttactgcagtatcatattcaggtccagttagtggttctcttacaggagaggactttgagtatcttgttagagatacagccgacggagcaagagttgatgtaatgggattaaagccaggtacatatactcttaaggttactactaagacaggtacatatacccagtcaggaattgaggttaatgcacaggatagatcgggatatgcgcattacaattatactgatggtgtaggtgcttataatgatgatggtacattaaaggataacgcaattgttctttatgtaacagatgaaaacaagaatacagttacactttcttatggtggagtaacagttgcaggcattggtaatattcttaactcagtcggtaaggcatgtggtgaagcaggtcatgagacagagtgtaagaaggtatcgaaaggaaagacatattacggcaagggtaatactaatcagggtattctccagttacttgctgagaataatataccattagtaattcgtatggtcggagcagtatcagagtctggtctttataagacaggaacatgggcagcagctaatgcaggacttattgatggccttacagattatgattctaatgattatggcggaagtgttggcgacaacggtcatatggcacgtatgaagtcagcaaaggatgtaacaattgaaggtgttggtacagatgcagctatggatggatggggaattcattttatgtctgagacatcaacaacagcagctggattaggaaagaactttgaggttcgtaatcttacatttatgaatcagccagaagatgctattggtatggaaggtgttcaggaaggctctgttataacagctccagttgaaagatgctggattcacaacaatgagttttacagcccttctataacaggacctgcagaatcagataaggctgaaggtgatggatcatgtgatttcaagcgtggtgaatatttaacagtttcatataactactttgaaggatgtcataagactaaccttgttggttcatcagatacatcgttacagtataatcttacatatcatcataatatctggaagggatgtaaagcaagacagcctcttggacgtcaggctaatatgcatttctacaataaccagtttataggaacaacagattatgcaatgaatacaagagccaatgcttacatatattcagagtacaatttgttttttatgacaaagaatcctatggatgtaagatcaggagcaattaaaagctataatgattcattttcatcttgtattggagcaatgacaggaacggttgttacagataagtcaactaaagttaaatctggcaacaagtatgagaattttgatacagatgcagcactttcatatattcctagtggaacttatcagttacagacaagtgttacagatgcagccaaggttcttaaagcatacaatggctgcatgccagagacagttaagaaactagagaatgttactgcttcagagtgttcattgttgtcatattgtgcacctggtgtaacaccaattaatatatctgattatccatatacagcagcaccaggaaagattagcaagacggtatatgcattcacagtaggtggaacagtagatgttactatatcatttgcatcggaagctttaactacaacaggttgtcttgttaatgagactggtgagtgcttccaggtaggaagtggtactgttacaggtcttccggctggaacgtatatggttatgccatataatgttcagtcaggtggtaatggagttaatccggcagcaggtacatttaaggatatgactattaattcaattacaattaatgcggctgatcctaatgcacattatcatcattatgtatcagaggtaactaagcaggctacatgtacagaagaaggcgttattacatatacatgtacagcaactaatggaacttgtgataagaagacatacacagaggtgattccaaagacagctcatacatatggcgaatggaaagtagttaaagaagcaacagagacagaagaagggcttaagagtcattcttgtacagtatgcggggctgaagaaacagcatctattccaaagaagggttcaacaggtggaacagagacaccagaagtaccaacaggagattctaaggtacataattttacaacatcaggtgcaaatagttcattctttgtgatttctggtaatcttgcatcaaacaagggaacagtaacgtataatggacttacacttacacagtgccttaagatggagtcatcaacaagcattaagtttacagcatcatcaaagggaacacttacacttgtatttggagaaagtggtaagaatgtaaagattaacggaaaaaagaacgcatcagattctaattgcatagtaacagttgatgttgcagctggaagtgtagagataacaaagggagatacaatgaatcttttctatatggtatatacaccatctggaacatcagagacaacacatacacataagtatgagtcaaagataacaaagcaggcaacatgtacagaggcaggagtgcttacatatacatgt

SEQ ID NO: 8517 - DNA, 102258 bp, Unknown
  gut microbiota DNA sequence
gaacaatacgaacagatagcatggaatgttgcaaagtacggaaacgcatccgggaaatatttttataaagtaattgtaagggaaaatgaatatgttgtattgcaatatcgcctgacacctcaatatcattcagcttttttgagggagcattttataggaccacagaatgtgatgattattatgtctgtgattggagcggtagcgattatcatcattccgtccatacgttttggaaaaagaatcaaaaagcagatgcagcctgtattagacgcaatcggacaaataaaggatcaaaatctggaatatgagacatcctgttccggtatcaaagagtttgatgactgtttatcggcaatcgatgatatgcgagatgcattgcgagaatctttagaaaagcagtggaaaacagagcaggaaaagaaacagcagatgtctgctttggcgcatgatattaaaacacctcttacgattgtacggggaaatgcagaactactttcagagactgaactgaccacagaacagaagaaaaatatcacttatgttttgaacggcacaacacagatacaaagttatgtaaaacagttgatagatgtcacaaaatcatggaattgcagtgatgttacctatacaacggtgaggttagaagattttttcgcagatataaaggaacaggcactcggactggtagaaatctatcaccagaagatagattggaaggcggaacaaagtgataaaaaggtaacgattgcttatgatccaatgctccgagccgtaatgaatgtgattcagaatgcagtggagcatacaaaagaaaatggaatcatttatattgacgcaaaggagcaggaaggccggctgacattcattgtggaggatagcggatcaggatttacaaaagaagcattattgcatggcacagagcagttttttatggatgacacaagtagaaatggcgaagcccattatggaatgggactattttttgcaaaaactgtggctgaaaaatatggtggaggtattaaactttcaaattctgaaaatacaggtggggcgagggtagaaatatttttcctgagtagtcaataaataagctaaatagaccgcaaaggtattagttacggaaatatagttctgtaattaataccttttattactgcaattatactgaataccatgacccttttaggctataatgttcaatgagaacttgaataaatgaagaaaaatatatataatattgaatatgaaagccttaatgggcagtgattttcaatgaaatggagtgatattaatggaaattagacgcgataattatctacaacagttaatttcatatcgttttgatgggttggtgaaagttattactggtatcagaagatgtggcaaatcctatcttttaaaaaatttatacagagattatttaattgagaatggtgtaaaagaggaacagattattacaattgagcttgaccttgcaaaagatattaaatatcgtaatccacttattctttcatcctatgtgagagaaaaagtggaaaaaagtaaagaggaatattatctttttgtcgatgaaatacaaatgtccgatgaagtagctaatccatataatcccgatggtaaaaaaatcactttttatgattctcttaatgatttaagaggtttatcaaatttagatgtttatgtaaccggaagtaactcaaaaatgctttccagtgatattcttactgaatttagaggacgaagtgatgaaataagagtgcatcctcttagttttgctgagtattattctgctgttgggggagataagaacgaagcgtttgacgaatatgcattttatggcggtatgccgcttattttatccagacctaatgatatggctaagatgaattatctaaaatcacttttttcagaagtatatattaaggatattgtagaacgaaagagaatcgagaggcaggatgtacttgagcaaattttagatttgctttgttcatcggttggctcgctgacaaatccaacaaaaattgcaaatgctttgaaatctaagcagagtggaggagtgtctgctaatacaattcgtgcatatattggacatttggaagatgcgttccttttttcagaaagtaaacgatatgatgtaaaaggaaaatcatattttgattcacctaataaatattacagtgaagatataggcttaagaaatgcaagaataggttttcgtcaacaggaaatgacacatataatggagaacattatatacaatgagttgattatcaggcagttatctgttgatgttggtgttgtttatgcgaggactattaataatagtggaagttccgttcgtacgccaagagaaattgattttgtggtcaattcaggaggaaaacgaacttatatccaatcagcatatgcaatgcctactgatgaaaaagcgcaggtagaactcagaccatttacgcttacaggagattctttccctaaaattgtggtaaggatggatgttggaaagcgttggtatgatgataatggaattttgaatatcaatgtaattgatttccttttggataaagaacttatttagcaattgaagaataagcataatattagctgttgttatttttaataaaggagatttggtgggttgaattttgaaggtatattacaattgattatggataattacagttcgtttattgcgacattagcgttattgttaagcgctctaacatttattatgtcacaaagacacacgaagaaaaataaaattatatctgatgaaaggtattatgaacaaagaaaacaatatgaggaaagattagaggtggaaagtgaacgaagagaagaagataggcatgatacagaagagaaattacgacttggtgaaaaaccccgctttgtgtttaaggggtcaaaatttattgttaattcagacacgaatcaagaacttttgcttttgaaatttacaaacaagggacgggatacagcgtatgatataattccagatttagagtgtgttgcaaaacaaatggatatgacggagtttaagatacgacgatacgagcctgttcaggatccggttgtaatggtaggggaggattttgaagtagtaatgaaatgtgataataatcaagcggatttttttatgatggaactaacaattacatatcaagatgcttctggaagaacatataaacaaactttttgtattaatattactgatagacttggaaatagtttaataacaaattatgctcagcctgtattatgcagtaattagctgagaaaataagaagagttactaatgattatagaggcagccagacagcagtgggttaaggatgttgaagagaagcagagggaacatgatgagtggctggctgtaaatggtgcagctattgaagaatggaatgccaagaagaaagaatataatgacaacaagcagaaactagaatatgagttaaagagacttcaggaagataaaggatttatagaaggttttatggctggggcaaaagtagccaagaaggataaggaaataatgaatgtaaggattgaattatcacgactggcattgcctaaagaaccaataatgcctaaagaaccggttattccaccggaaccggcattgggaggagagccggaaaagcctgattatgacataatgattggacgaaatgaggtgtttgatacatttagaagtcttatggcgtagtgagtatttataagaaaggggataagtatgaaatattcaaatgttgttgttgccggaggcggagtgcttggaagccagattgcttttcaggcagcatattgtggatttaatgtaactatctggttaagaagcgaggggtctattggaagaacacagcctaagattgaccatcttaagcagacttatattgaagctattgagaagatggcagaggataagaatgcgtggtgtgcaggacttgcggatgaagatacatttgacaaggaagagtgtcttaagaaagtagagaatgcatacgctaatctcaagcttgagcttgatatggctaaggctgttgctgatgcagaccttgtgattgagtctatggctgagaatgaaaaggataagattgctttctatgaaaagctttcaccacttcttccggacaagactgtgattgtaaccaattcatcgacacttcttccatcgatgtttgcaaaatatactggaagaccagacaaatatctgtcattacattttgctaattctatatggaagaataacactgctgaggttatgacacaggctcagactgatgagaagtattttaacgaagtaatgcagtttgctaacgatatacgaatgattggacttcctgtaagaaaggaaaagagcggatacctgcttaattctatgctggttccattccttcttagcggacttgatctgtatgctgcaggagtgtctgatcctgaaagcattgatattgcatggacaagaggaacaggtgcacctaaaggccctttccagatatttgatacagtagggcttaatactgcatataatattgttcaccagtatcagagtgttccgggaatattctcaccacttcttaagaagatgatgatgccatataatttcaagaagatggaagctattctcaagaagtatattgatgagggaaagcttggaatgtcttcaggtgaaggcttctacaaatataattaagcacggcaattaagaactatattaacaaatgttatgaaggactggtaatatgacgactagggaagaagcacttgcatatggactttcttttcctgatacttatcaggaagcgccttttcatgatgagaactggcagcttgtaagagttaaaggatgcaagaaagtatttttatggacatatgagcgcaatggatatattaatcttaatgtgaaggtttcacctgagtggcgcgacctgtggagaagtacatattcatcggtgattgcgggctggcatcagaataaggaacactggaatactattattcttgatggaactgttcctgatgaagatatcagacgcatgattgcggaaagttatgatcttgtatctgacagtccaaccaagagaatatatgaagctgtcaagaagattccgagaggacaggttgcaacttatggacagattgcacagcttgcaggcgataaaaagatggcgcgtgcagttggcaatgcacttcataagaatcctgacccatcaggaattccgtgttacagagtggttaattcaaagggagagcttgctggtgaattcgcatttggcggagccggaaaacaggcagaactgcttatggaggatggaattgaggttgttaatggcagggttgacctgaaaaaatatggaatgaaattctgaattactataatgatatatgaaataatgccgatatatattaggcatggaatgcgcatttattcaatggattgaagctgttggatgaatgcgttttttattatttgccacttggacctttctggaaagtggcgcggctgcgactgactgagcggctgcagaaaggagaatacatgaatattaacacacaaatgaggtatggtgcttattcagagtacagtttcagaacaaccaaaactggcaaaggtgacaccggttttgaagaatctatgaagccggacaataatatccagtacaaatcattaggaatgggcttcttaaatgtgggtgataccggctacggaatgagggcaacccagattattaatccggacagtgaggacacgattgtaagagtaagcattgcactgggtggaaatgaattcagagattatgatgttaatctttccgagatagatccatccaatgcaagtgctgtggaaatgtttgcatattgccagtatgcagattcaaccagtgaaggttcatacaaatggggaagctggaatgccttaaaacatttgacagatgatatggcatattcatacaattcactggatgaagctttaactgaaaagaaaaactggaatgctgcactggctggctcaggtattgaacttgaaaatgaggcaacgggtgaaagatattttgtagcggatatcattgaaatgctcaaacagcagtatgagcttacagcagacgatcttgaggaaaaggactggcgggatatgtcagacaaagaatgggaaaagcttttaaacagttttgaccagaatattgatgcaatcaaggataaaatcagaaagcttaaggaagttcaggatgaagcagcttctaaggcagcagctaatgcaccggcagggcagaaggcaaatgcagcttcgagcgcagcgcagagtgcagcagccaatggatttgcatcggatgtaaagactgaggatgaagaatggatagaagaaaacagttggacatatgacatgaaaacagagaatcagacaattcttcataaagcagctattgccaatgaaaaagcacaggatagccttagcaagtctcaggagcttatgcttacaggagacacaacagaaggtgtaagcaagacagaaggtgcaacagaaagtgcatcatgtgatgatgaatcaggagaaaaagtgtggacagttactgcatataccgagcagggaattatatgtaaggaatttaaggacggagtaggcacacttttgtggcagattgattttaaaaattcgacagattacaacaaggttatggattacctcgataacgaaaaagaagaggatatattaaagtatgccagggataaggaattctgggagaaacttatctgggggtaagataaactgaaataaaagcaaaatggactttctgcacggtaaatccgtgggaaagtccattttattattactttatcaacagcaccctgtcggtatcatcaccctcaactttagcgaatttcttagcagtgaatgaatcggaagagcatttgtcaatataactttttacgccagtgacagggcttatccaccacatatctctgcctgtataattatgagtatcaagcgtgaactcattgccaagataatcgtatgcaatcaggaatgatccgcctgcgaatacagcaatgcgttcatgcttttctttttgcccggataacagcagggagtcatcaggctttccattaataaagtctactgactgcattatgtcttttaagaaatgcatctgaccagagccctcgtggtgaatggcctcgtcccagttacacacaacaccatagcttacaccatcatgcccgcctgtgtagaactgcataacagaattatcaccataggtgtgtccgcatgcgccggctagaacagaccagtaagcatatcttcttacatgctttgcagtccagtatggttcgtcatgattgtggagtccctgaattatccattcgtaagaaggctcggcatcaagcacaggtttattactgagagcatggtcgtgtaatacatacttccagttgtcttcgccatagtaagaagggctgtctatatcgtcccatgcaccaagattacactggtcgtaacgtctgtgacctgactggaacatattaaaatcgagccattcatcatcagaaaaccacattgttgatgaacatcttccaaaaggatggaaggttatcagtttgttaggcgttgagaacttaaggtatgcgcctaatttgcggtaagctgccttataatcttcagctttaatatcaccgccgagtacccatattatattggaataattcttataacggtctgccaagaagctgccgtattcaagaatattatcttctgtgataacaccggtctttagcaggcttccccaggatgggagaagtgccatataaagtcccaagtcatccgccatcttaatgatacggtctacatgttcccaatattcttttgttttatagatgccggcagcaccccagtgcatgcggtttacagtttccataccttctgttgagtatatcagaaccgcctgaattacattgaagcccttttcggctctgtttctcagatatgtatacgcctcgtcgtcagtaagattgccaaatatgagccatccagtgtcgccaagccagaagaaaggtttgccatcctctaacaggtagtgtttgttgtcgctgatagtaagcatatgatattaacctccgaacattcaagatatgtatattatagcataatttaacaaaatgttttataataaaaataattatcagaaacggagattattatgtggaagataaaacagatatttgacggggattatgggtgtgaagagctggcagaaggtcagttacctaagttttgtgttacacttgttaatgagagtgggcagaagaagtatgtatatgtagaagataagtggcttgtagacagagggcttgatgaaggctctgtatggccggaggatatagatgagtaaagtgataagaatcatctcagcaagtgtgatgttaactgtattatcagctattatacttgcggggtgtggcaacagacattctgataaagcaggattgaataaatcggacattacagagactttaagccagacattggaatcagagaaagattcacagatgaattctcgaagtgaagaaaatactgatacagagataacagatacagaagcagaagattctggacaagtagacagtgaagacggcagtcaggaagaaacaagcaatccatatataatagtaagagagccatatacaggcgttccggtatatgaagatatggaacacatttatatgaatacgacttgggaatatgcggaccattcggcgataagcgatggttatgctgttctatataaagcagcaggtgaaagaaagaatattataattggtgtcaatgcagggcatggaacggcaggtggttcatcagtgagaacattgtgccatccggacggctcacctaagagcaccggtggaagtacggcggcgggggcaacaacagcaactgctgtatcaggaggcatgacattctatgatggaacaccagaaagtgaagttacatttagaatggcgcagattctaagagacaggcttctttcacagggatatgatgtgctgatggtaagggacgatgcagatgtacagcttgataatgtagcaaggactgtgatatgcaacaatgttgcggattgccatatatcgctgcattgggatggagacggacttagttatgacaaaggctgtttctatattgcggttccggatgcaattaaagatatggagccggttgccacacactggcagcagcacaatgcacttggagcatcacttgttaattggcttggtgatgtgggtatgaagatacatggttcaggaagtatggcaatagatcttacacagacgtcatatagcacaattccatctgtagatatggaacttggaaatgcaagctcagatcatagtgatgagacgcttgaaaatatagctgatggactgatggcgggaatcaatgcgtattacgggtattaaacaatataataaaaccacataaggagaacaataatggataagaaaacacagattatagcagtagcaggaaaaggtggagttggtaagacttctttagcgggagttattgtaaagcttcttgttgaggcacacccagataagaagatacttgcgattgacgctgaccctgcggtcggactttctacagtgcttaatgttgaggttgataagactatagatgatataagaaaagaagtaatcaagaatgttgaagacggagataccaagactgctgtggagttacttggagaagccaaatatgagataatggatgcagttgttgaacaggacggatatgcatttatcgcaataggaagacctgagacagcgggctgttactgcaagattaattcatatcttaaagaagttattacaatgctttcagataagttcgattatgttgtaattgatggagaagcaggaatagagcagattaacagaagagttatggagaaggttacacatctgctgcttgttactgacgcaagcaagaagggatgccaggttgtgcagacaatcaagaaagttgcagatgagcttgtgatgtatgacagaatcggagttatcgctaacagaataccggatatggaggttgcgaagcttatggatatcggcgaccttgagctgctttcagtaatacagagcgattcaaagcttgcgcaggcagatgttcttggtgaaaatgtgttcaatctccctgatgatgcgattattgttgagggcgcaaagaaagcccttgttaatatgggaatattgtaagaggaggcaaatgtgaaggatttagctaatctgtattattttgagaagctgttggaggatgtgaataacgaccttgtaaggcaggcacaggctaaaggtaatattgcaatcggtgcagtctgttttcagatacccgagccgcttattaatctgccgggcagcttttcggtgagactgcgagcaccccgtacaggttctatagagatgggtacatattacatgagcagtatgctgtgtgagggctgtcgtgcgatattagagagagcaattgagggtggatataactttcttgactgtataattgcgccggatgcatgtgcgcagatgaacaggtgcgtagagaatattgagagacagcaccttatagagaaggaaaaattctttgtggaatattcagatgttccgatgaagaatgatgagacggcgttaagacattttgttaagcagatgagacttcatgtgcttgaaccgcttaataatacatatggaatagacatatcagatgatgcacttagaaagtcagtagaattgcagaataagataagccggcttataagaagcatcggtgattacagaaaagaagataatccaagaataactgggtatgaattcgcggttctgtgtcttgcaacctactgttgcccgaaagaggcacttatagaaaagctcgaagaaacacttgaggagcttaagacacgtgaacctgataaaaaatgtaattacagggcaagggtcgtaatggttggttcagagattgataaccctgagcttataaagcttgctgaggaggcaggtgcactggttgtggctgacagattctgttttggttcacttccgggaagagatgagattattcttaacgatacagaggatgttcttacacagatatgcagacagtatatgaagtggggacagtgtccaagattcatgaatacagaaaagattatcgagagacaggagtatgttgacgcaatagctaaagagtataaggcggatggccttatatatcagcagattaaattctgtgattactggggctatgagagggcttcggcattccatgtcatgaaagaaaaatacggttatcctgttctttcaattgacaggccttatgctgtcggaacttctggacagttaagaacaagaatacaggcatttgttgagagccttgagattaagcgtatcaatgcaggaaggaaattataaatatgtctaagaatataggaagcgagccactcggcagattctatacaggcaaaaagccgaagagaagaagagaatggcgcggattgaaggatacatggtacgactatgtaaggtggcttggatactggaagactttaattacatttataataaaacctaataacatgaagggcttcttcagataccgctggatgattaattatcttgcactgcctgatttcatggacaggcataccgagggtatgagaggaactcagcttagaatggcacatcaggcactgggacttatcgttactgatatatgcgggatgcttggacagatatttaaggcagacccggctatcggcaatgacaagaagctaaacagcaagattgttctttttgatgaaaatatgatgagtaccctgatgggaggttttcctaaccttacatggttgtcagtggaagttcctgctgtgtatacaagctcgatgatgtcacaggacggagtaagctattatgttgacgttacacaccagtatggcgtgccatcagatgtctgtcctatgccggcggctgagcttggtgttgcactggctgatgatttcccgcttataggctgttgtgcggtgcagtgtaatacgacatgtgacggaagtcttatgggtaacgggattgaagcaaggtcatttaagattcctacatttcagcttgctgtgcctataagacacagacaggaaagtgtacaggagtatgcggcagaagaggttgtcaatgcaatccatttcatagaggagcagactggcgagaagttcgactgggatgcattctttaagagtatgaagcggtttaatgcagaaacagaggaattcttggagtggatggagatttccaagacagattatccgcaggttatgggcgtaacgcttgcactctacagatatggtgtatatcaggcggccggtggaagaaatcaggcattccttgatatggataaaaagcttacaaagatggcacttgatgcatataagaataaagagatggcggcgaaggagtaccgccacagagccatgacatggggcgttcaggctgcatattatacagcgcttccaatctggcttcttaactgctggggcgtggtaactattgcggatatgttaagcatggtgtctacagagatggtcaatacagaggataaacaccaggcaatgttagaccttgcgtatctgtatgagaacatgattatgagaaaccgttctaacggcggttatgagacaggtgtagaggcgctctggcgtttctgcgaaatgtttaatattgatattgtaatcatgtatgttcatatgggctgcaaatcaatgtcaggatatcacggcttatttgaagaagaagcaagaaaacatggaattcatttaatatgggtaacacacaatcttatgtgtcctgaggatggaacaagaagagacatgagaacggagattaacagatacatgagaactgttttcagggaagaaccgcttgacccgtcacttgaggattttgacgattctaagagctggtaagaagtgtggatgctgcatacgtggcaggaaaggatagcagaatgaaatatttcggtggttgtgacgcaggaagtacatatacaaaatgcgttattatagatgagaatgggaaaatcttagctgcagttactaagagaagcaggattaatccagtgcttagtgcgaaggacgcacttgatgaggctgtaagccaggttgacggtttaaacagcgcagaggaacttacatatctgattggtacgggttacggaagaaacaaagtaccatttgcagatgagaatatatcagagataagctgtcatgccatgggcgtacatgtaactgacccttcggttaaggcgattattgatatcggcggtcaggatgttaagggaattgcgattgacactgatggaaccgtgcttaattttgcgatgaatgacaaatgtgcagcaggaacgggaagattctttgaatctatggcaagagcatttgagatgtctttagatgaattctctaatctgtctcttacagcgaagaacgtgattccaataacagcacagtgcgcggtatttgcagagagtgaagttatctcattagtgggcgagggtaagcctatggaagagattgcagcaggaatacagttatcggttgccaagaggtgttttgttatggctaagaaagccggtgcggctgacagcgttacacttacaggcggatgtgccaagaatgaaggattgaagaaagcaatagaaaaagtgcttaagattaatgtagttgaccttccgacagacccacagcttatgggagcattaggtgctgcagaatatgcaagacagaagggaagtaacgtatgatagtattaaaagtgcttgctattatagcaatcgtgttagttgcattgtttcttctgactcttgttatatatttctttaatcttgatatgaaatttgcggcagctttaatcaagccgcttactgcatattataactggtcaaagaacaggcgagagaaaaaaaaagaacagaatacacagaaagaataacaggaagggcagaaacatccaatggatttatatgattgtgagataagaaaactgacatcaatgcttgaaagccatggagtaaagagacttccattacagaaagaatgggagatgactgagaaggagaatcttattcttaaaagcgagacggcttatgaacttggcggtggaagcagtcaggcagtgagtgctattgcatttacacaggataaggggcttgtgtcggaggatgcagtgtatctggtgggggatgacctgtgtgatatcaagaatgatatttcatatgcaagaattactgtaatcaggctgaacagtgaatatattaaaaatcatgatgataatgcactgtatgcttcaatgagggcgactgattatgtaagataccatgcatttcttaaaggatatatgatgagaatatcagctgtcagggaaagagaaccagtgagagtgagtaaagaagcggtttcacatgggattaactttgcagcggtaggacatggacttatcaatgcctacaggaagcgcccagaggttgaggctgtaagcatatattttgtcacggagcaggatattgattacatatttttaaaaagtgaagcacacagatgtgaacagataactgactccttaaacaacatatttaacggtcttacaatggattgttcaacttgctcaagcagggaattgtgtgatgaaatagacggactcagacaattacatatgagtattttgtgaaaataccttgaaaaaaattaaaattaggaataatatgttaattgaatgaaatagggaacaattaaatacattgtacaaatgatgcatatggaaaggcaggtagttataagatgttaaagaaaatgaataatatgaatataaaggggcgtttgaattatgtatttagactgataatcatagcgttctccgtagttgcagttgttataagtgcaatgatgatttatatgtctatggattaccgcagggtgctgaagcgttacgcattccctcagggagatattgctacagctatgtctgaggcagcagagataagaggagcttcaaggggagttgtaggatatgattcagtaagccttatcagctcaatgaaaaagcagcatgatgagcatgtcgaagcatttgaagccaagcttgaacagataagacctataatgtctagtaaggctggcaaggaatgtatggataagattgataaggcgtgggctgaatataaggaaattgatgagaaagttataaagctgggagctacgacagattctaatcagtcactgaaggctcagtcgatgatgctgaatgagacggcacctaagtatgaggcacttgataatgcacttaatgaacttatggacactaatgttgctaaaggtgatgcagaaaaattaaagcttgaaatatttcttataatagcgattgttgctgcaattggaattatagctgcggtagttgttgttgcttctaaagcagcacatgcgattgcaaagagtatagaagagccgttagatggaatgatggccagattcgagacatttgcacagggagatctggattcaccattccctgaagttgagactaaagatgagatatccgatctcatagatagtgcacatgctatggcagaaagattacataatattatcagtgatgccggaaaacttatgggagagatggcagatggtaatttcgctatcgcaaccgaacatgaagatcagtatacaggtgcattcaatgcattgttacttggaattcgtaacatgaaccgtcagatgaattcaacattaaagggtgttgaagatgcttctaaacaggtggcagaaggttctgctaatctttcagatgctgcacagtcgcttgcagaaggtgcaacagatcaggctgcaacagtcgaagagatgcaggcaaccattaatgatcttaatgaaggtatacagaagacagcagaacagctggaaaattcatataaagaagcagagagatatgctgatacagcagaaaacagcagagaaagcatggaagctcttatgggggcaatggctcgtatcagtgaggcttctgagaagattggcaatatcatttcagagattgaaagtattgcaagccagactaaccttctttcacttaatgcttccattgaggctgcaagagcaggtgatgcaggcagaggatttgcagtagttgctgaccagattcgtacacttgcagagcagagtgctaagtcagcggtagattcaagaaatcttatagaagcttctatctacgaggttggtgaaggaaataagattgctactaaggcatctgattcacttaaggaagttgttgatggcgttcagtctatcgcagagagtgccaagaagatgagagatgtatctacaagtcaggctgcaggtatggagcaggcggatgttgcaattgcaagaattgcagaagttgtacaggctaattcagcaacatcacaggagacatcggctacaagtgaagagcttacagcacaggctacaactcttagtgaaatggttgcacagtttaagttaagaaatgactgataattaaatatataaagattatttaaggagctgttatcgtagtgatatcagctccttattatatactgtatttgttatcagacttggataatttaattaaaagagttcatttaccatgtctgctgtgtatgaaacgcttgtggcatgctcaacctcaatcatataaagtgcatgtgctgctagatgttctgctgcctgttcaaggtctctgatacctgtagtatccttgcagtaatcaagaacagcgtcaagtccgtcatcaagcaccaggcactcatcctcgtgaagtccgattcttttaagaacctttgggagtgaatatttaaggaaaattgtctttttctcttctcttgtgtaatcaggaatatcaattactgcaaatcttgaaagaagcggagcacttatcttatccttatcattagctgtggcgataggatatacgcctgaagttgggatgagacactccatgtaattatcagtgaatccaagattatcaaggagtgtaaggagtacatccgcagggttggcattaccattgcttgaagtagccttatcaagctcgttgataatgaacacaaggttagattcaccagccatgttaaatgcttccatgataataccaggctttgcattggagtatattcttgaacttcctgtaagctgttctgcgtcattgatagaactcatatcaagcgttgtccaaggcattttaagaatcttggcaacaaggtaggcaatctgtgatttacctgttccggcaggacctacaagaaggataccgtatgcaggaagagtgtgtgttctgttaatctgaataaccgtctcaatgattctttgcttaacactttccatgccaaaaagctcttcgtcaagaattcttcttgcttctacagggtcaatagattcgaagtaattgctcttccatttaatattaagcatgatagaaagtgctctctgtgcatgcctcttctcttcaggagttacctcacttgaacgggcaacaacaagattgcgtcttgcccataaacggatattttcaggaagtgtacttcctgcacagttaaggaaatctgatatgcttgtaaggcttgtaagtttcatatcatcagcagattcatcaggttcttcactattgtcttctgcaagggcattgctctctaataatctttcaatcataaactgcaggaaaccgtcttcagcagataacttgttaccattgccaaatgcaacttcctgaatcttgtatacattgtatccctcggatgagttagcacctgtgagctttactttaactctgttctcaccaagccatttgataaggcttgtaaatcttgaatcaatctttaagatattgcttgtaaaagattcaccgttaatctggaaatcaaatgcagtctttttataagggttagtgaacaaaccataagatgtctcatcccactgcttttcagaattatccagaacaaggattgggttctctggggaagctgtagaattgtctgatttaaaagttgtataggtacactcaaaaccggcattgctgccagaattggcattagcgtcataaactaacatatattcctctttctgtgctttaaacacttgtaataatctatcatataataacatattctgggaagttggcaaggagaggattgaatatattaagttatgtgctataataattatagataaaatattagctataaatgtatatttatcagtaaaatagctaatatattatatagatgtttacacgtaaggagagattaatatatgaatgaatatgtctgggagacatgtgaagaactggataaaaaaatagctgacagggtaagactaataagaaaaagacgctccatttcgcaggagaagctttctaagattagcaatgtcagtcttggctcgataaaaagatttgaaacaacaggacagatttcactgttatcgttgactaagatagctgtagcacttaatattgctgatgatttaagaaacatttttacagagattccttataacagtattgaggaggtaattaatgagacaagatagaattataaatgttttttttcatgacaggcttgttggaactcttgctatgacgaacgaaagaaaagctgcatttgaatatgcagatgaatggcttgagaatggattttcaataagtccgttttcattgcctcttgaaaagaaagtatatgtcccggttaaagattattttaatggcttatggggagtatttgcagacagtctgcctgatgcatggggacagctgctgcttgacaggatgttaaaagaaaagggatataatatagacaatgtgagtatgcttgacaggcttgcaattgttggagaatcaggaatgggagcattaacatacagaccggaatgggatatgccaaagcaggaaaaactcagcagtcttgatgaattatctgagcaatgtcagaaaattcttaatactgaatattcggacaagcttgatgaattatacaggcttggtggaacaagcggtggagcaagacctaaaattatgactaagatagatgacgaggattggattatcaagtttcctgctcatgtagatggaaagaatgcggggctgatggaataccgatattcacagtgtgcaaagcagtgtggaattgatatggaagagaccagactttttccatctgatatatgtgatggatattttggaactaaaagatttgatcgtaagaatgattcgtttggagaacacagaatccatatgcttacagcagcagcgcttcttgaactggatttcaggcagcccaatatggattatcaccaacttatgaaattaacaaaaatattaacaagggacaataagcatgatatagaaaatatgtaccgacgaatgtgttttaatgtgtttgcacataacagagatgaccattcaaagaattttacatttatatatgatgaaaataatgatggctggagactaagcccggcatatgacctgacttatagtacgacatattatggagaacatactactacagtagacggcaatggaagaaatccagggattaaggagctggctgctgttggaacagcagcagggataggaaaagatatatgcactgagattgcgtacgacatagaaaaatgtgttaaaaacgagctgaatggtaattaaacgtccagctcgttttgtcaggtatatatattaattaacagcccttatctcgccatcagtaataagtggatagcgaatcagcttatcaccgtcaaggttctccttatgcatatcaacagcacatatctgatggttgtcatatgatgtgtaataatatatgcctttagttgtattgcagcagcaggtatatattgttatctcgtatttgtcatcgtctagctggcagcagccacgctgctggtctacgctgcctaatatatgaaagaactggcttacgcttgatttctcatcgtcacctgaaacagaattcatcttagtaaaagcaacttttacgaatcttgactgagatgacagatccccaggaagtccgagtgcacccataccacggctgtatctgttgaattcaagtctgtctgagaaattgctctcaggctgttttgcagacagacccatgtaattgttaagattaaacatctgtatgttaaatggcggattattagtaagcacccctacaggattatcatatatatgaagtccgtctgacatggattcaacagttacacagttttccttgtcagcaataatccagtggagattagcacatggaaacatttcattaaactgagtgttggtaagattaataaatttaagtctttctttagcttcatcaattgtcgcacactgcgataatatccacggaatgaattcgaaaacggcaacattttcaatattactctctccgttaagacctcttaggtccggttcgttgtaagccgcattgccaacgaagttaagaccggccatgccaagccctttttcgttaaatgcttcataatataaaggataatcatcagcgacatgtgccattccaatcatcgcaaagtggttattccttactcccatgaatctgaaattaataggataatttctaggtgtgacagtcacctcatcaccataagaaaattcataatccagtgttcttcccatatagaaatctttagttttataagtagctgctgtacacataagccctcctttatgtcttgtattatagtaatattctgattatttattaagaaataatacattacagttcttttttttacaatacaatttcatgaaaaaactgtagtatctatatcataaacttaataaatcaaagacaaaggcgtcgtacatctggtgtgcggcgcctttattgtttattttgttaataattaatcatgcaaaaaaggaagggagctggttttatgaagaaaaagttaggattaggaagtggcgtggcaatatgtgtaggacttattgttgctacaagctgtcttgtttctttgggaacaggaatgggttcgataggccgatggtttatcattccgctatttgcagtaatggtgctgaactggtttattggaatatcatttgcagaactgaatggacttatgccaagagttcagggcggtacaggacagtatcttctggctggtatgggaccacttccatcattaattggtaatctgtcagcctatgtaattacagaaatattaagcatgacagcagagattacactttgcggacttgttttaaaaggtctgtttctgccacatgtagataacaggataatatcaattataataatggcattgtttctcgtgattaatctttttggtgtagatatattttcaaaggtacagaacatagtagtattcctgcttatcggttcaatggttcttattggattaataggtgtatgtaaattaggaataagctcaaatgttgttgattatgcagcaaatgcaccaacatttgaacagataggcggatttaagggactttgctcatatgccgcacttgcattctggctgtttataggtgttgagtttattattccggtagcaaaggatttgaagaatccaagaagagatgtacttctttctatgacaataggtctggttttactattttttgtacagagcattcttggtataggaatgactaactatgtaagtcttgatattcttgccaatgacccggcaggtactcctcatatgacatacgctactaaccttttaggcaatgcaggacgtatatggatgggaattataaccatacttgcagcagcttcgacaattaatacagtatatgcctctgtttcaagaattgtacagggtatgggcgaggaaggcatgatgccatcagtatttgctaagacaaacaagagaggcgcagcatgggtcggacttgtagtgctgtttgtattcgttgcaggaataattgcttcaggacttggagcaacagagggtgtaagttttctgttattgtcaggttcatgcttctggttattaacatactgccttgtacatgtaacagtgcttatactcagaaagagaaatcctgaatatccaaggaaaaagtggcttacattaggcggaatacctcagataataggtattcttggaaatgtatacatgatatggaatatatcaacaggagataccagaattaagatatttgagttgtgtggagttttatttgccggacttgtaatttattcaataatctgggtatgtggagttatgaaagcaagcccattccagccggtaccggttgaagtgataaatgatgcttctgtcaagttcaatgaacttgtaaaggaggaaaatgaagaaaaggcacttgcaggtgcagaaggagaggtaaactaaatggcagagaagagagtaaattattcatcaggagctccattagaagaaaaagtaggatacagcagaatggtaaaggttggtgaccatatatatgttggtggaacaacgtcggtacagccggatggtacagtgtatggagaaaatgcctatgagcagaccagatatgtacttgagaagcaggtaaagcttattggacaggctggtgcaggtgttggagatgttattaaagtagatgtgtttgctgtagatatgaaaatgtgtgcagatatatcaagagcatattcagagatatttcatgatatcagaccattatgcacagtggttggaacacctgcacttaacagaccgacacagtttgtagagataatgatggaagcagtcataggctgcggattatagaggaggaattattatgtatccggaagttgattttttatatcttaatgaacaggaaatgataaaggctggcgtaaagaatatgcctaaatgcatagacacaatggaagacgttcttaaatgtcttacaaagggtgatttcgtaatgggaggtgaaaaccataattctcatggatgtatggtaacattccctaatgaatctccttttccgaatatgccaaagaatgtaggagaagatagaagatttatggcaatgccggcatatataggaggaccatttgatatggctggtatgaaatggtatggttctaatactgctaataaggaaattggtctgccaaggtcaatacttatggttatgcttaacgacaagacaaccggcgcaccggtatgccttatgagtggtaatcttcttagtgcctacaggacgggcgcaattcttggagtgggtttaagacatctcgcaccaaagggtgctaagacgggagcaatatatggccctggtgtaatgggaaaaacaagtcttgatgcatttatggcaacatgcccagagcttgatacacttaaggtaaaaggtagaggaaagaaatcattagacagtttccttgaatatgtcaaagctgcatatccacagcttacaactgtaacagtggtagatgatatagaaactctggtaagagacagtgatgttatatcatttgcagccacagcaggaacaaatccgtcaaaatatgcatatgtcaaaggtgaatggataaagccgggagcgcttattgttgctccaagtgcatttgatatggagacagattttctcaaagaaaaatgtaagatggtagttgataatataaagctttacgaggcatgggcagaggaatatccatatccgacatttggttcaattaacataataggtgcaaagtttacagatatgtgccatgatggaattataagtaaaagtgatattactgatatgggagatatattgcttggcaatgcatcaggaagagacagtgatgatcagataattgtatattctgttggaggaatgcctgtagaagatgttgcctggggtaaggtgtgttatgaaaatgctgtgaaaatgggactcggaacgaagctcaacctatggaacaagcctgatatgtgttaaaagaatatgaaatacatgtatatactgtaaatataaaaagacctgtatggctgcaaatagcgcattccatgcaggttttttattgatttctcctcctattcgacataattcgacatgcatacgttgtattatctatataaaacataagggtaaagtctttttggaggatagaatgaaacggataatatgtgttttactggtaacagtattgattgtaagtatgctgttgtcatgtagtataccattaagaaacagtggagaagaaaaacagagaatagttgtacagcttgaccaggattactggcttgcaagtgtaggaaaaatgttgaaagaacattttccggatgttgaatttgattttgtcataagcaggggaggagcacagtatcttaatgatgcagcgcttaatgatgatcttgcggatataataatagatgcatcatcatggacacagacgtcttcgtctgatgatgattatgatattaatcccagggattatctatatgatttttcatgtacagatattacaaacatgttttataaggtatatcttgatggatttaccaatgaagatggttctgtgaactggcttcctggtgctgcgagcgtggaggggatacttgccaatacagcagtttttgagaaatatggaatagagctgcctcatgattatgtaacatttgttgaagcatgtaataagttcagtgaatatgggataagagggtttgcaacagattataaatatgattatacagattcatatatgttacaggcgtggtctattccattgttacaaagtacagaagggcgcatctggcgttatgaagcaatggatggaaatatagatcacataccggatgagctgggtgtgaagttgttctcgagaattggacaggttttgaaagatactgatgcacaggcagatgacacaaaaagaggatattcaagtatattccaggattttgtgtccgggaagattgcaatgatacgacagagcactaatattgcagagtatcaggatgagggaatgaataatctcattcttttgccatattttggggagacagataatgataactggtatttcagtacacccggatattcaatagctatgaatggaaaacttaaaggagcagggaaaaaagaagagctggcactagacatagtaagatatatgtttggcagtgatgtaatgaatgcaatggcagacagaatacagtcggttgttgtgtataataaaaatgtaaatgtagatgtgcaggacatattttctaacctgattccttatattgaaagtaatcatatgtatacatatataaggaatgacagtgtgtgccgggcaagctgcgcagcagtacagaaaatgctggcaggagatgtggatgccacgcgggcggtggaagtgtttaacaataactacaatgcggtaaaagaaaaatctccggttatcaccacgtttgacagggaatatcagtggagaatatcagatacaggaagtgaggcattttcggtgagggttaatacactccgggaaatatgtaatgtggatatgctgattgcacctgctgccatgaatgccggagacatctataagggaagttatacagcagcacaattacaggcacttctaatgggcggaggtgtgaagttttatacgaaggatgcaacaggtgctgagattaaagatgttgtgcggtgccttgtggaaggctgtggacgggatgacgacccgatatcatgggatacgctgctggcatcaagcggatttacaatgaagatatcaagagatgataagggcgatatgcatctaaaggatattcttacagatggaaagtcagtagaagacgaaaaaatatattctttctgttatgttgacgtttctggtcatactttgttggaacgtgcatataattatgatatgtcaaagcatggcggagttcatatgtataaggctgaggcagacatcagggaaggcgaaaaatatgatggatatatagctcatacaacaaatgtagcacaacaatggatacagtattttgctgatggaggcagactggctgcaccagaagcgtatatacagaagagctgattatcttgagaaaggaaacaggtcaattgaagaagaatgagtatagaaaatatttctttgcagcagtaggcgtggcaataattgtatttgcgtgtgtaggcgtaataatgcttaattattccattacagtcagaagagaactgtatgagacaagttcgaagaatcttaatgaagtgtatacacaggtcagtgaaaaattcatgcagataaccgggcagcagtggaacctgcttggaatgacaggtgattatatagatgaggctggtgaaaatatagacagcatcagcaagtttcttacagaatggaagaatgaatggcattacacagaattttattttatagatgatgcctgtaattacttgtcatcgtcaggtaaaaaggggtatcttgaactcggaaatacatggaaaagtcttgtgatagacaggaaaaatgttgtggtggatggttcacttccgggaagtgatgaggtaatgttttttgcgattcctgtccagccggcatatattagtggttttaaatacagttccatagcggtttcatacaatacagaagctattaataaagaactgggtgtaaaagcgttttcaaaggacacaagcagttatgtaatatatgctaatggtaatatcgtattaaagtctgaaggcagcatggatataggtggtaatatattttatcatctgaaaaatgcggatatttccggtaagtcactggatggttttatgaaaagtgtaaagaattcagatgcagaagaaatggtattcaggcttgatgaaaaccagtattgtcttgtttatgttccaattggatttgataactgggggcttatatcaatggttcctataagcgtcgccaattcaagctctcttgcggttcagcatagaactgttataatggcagtacagataggtatactgcttcttatggttgcatgtgtagtactatatacatattacaaaagatatgtaagtgagaaggatcatgagattgcaagacgggatatattattttcgattatggctaaaaatctggatgatgtgtatattatgctttcgtggggagactggagaaaactgtatgtaagcagaaatatcgagagagttctgggaataaggagcagtgaatatgatggtatccttaaagattttggagaattggaaaagaggggagaagttcctgaatggaatgatattgtgaagctgggaaaaggagaatctgctgttaatgaatactggataaagccagcagattcaagtgaatacagactatttaaccagggatgttatcatatggataaagacggagatgatgtccttgtaataattctgtcagacagaacttacgagcagcagataagaaatcatatggaagatgcgcttcatacagcagaggcagcaaatcgtgcaaaaagtcagttcctgtctaatatgagtcatgatataagaactcctatgaatgcaattgtaggattttcacagcttatgttaagacattataataatccggataaagtcagaaactattcagaaaagatagttgtttcaagccagcatctgctgagtcttattaatgatgtccttgatatgagtaaaattgagtcagggaaaactactcttaatctttgtgatgtgaatcttgctgacatcataaatgagacagacaatataatcagaccgcaggcaaagaagaagaaccagacatttgttgtgaaatcagatggtgttgaatattgctgcattaccgcagataaattaagactcagccagatacttattaatatattgtctaatgctgttaaatatacagaagaaggcggtaacataacatttgaaataaaagaaataaaagttaccaatccacagattgtaaaatacaaattcatcatatctgataatggaataggaatgagtgaagaatatttaaaagacatatttaaaccgtttacaagagaagagacaagccttacagatgcagtccagggaacaggacttggaatggcaataaccaagaatcttattgatctcatgggtggaactataaaggtactaagcacacagggagtgggaacaacttacgaggtaactatggaattcagaattgcggatattaatacgaataaagacctctggaacagatataacataccaaagcatgagaatgaaccggatcatgtacttgtgggtaagaattttctaatagcagaagataatggtattaactcagatatgcttaaagaacttctaaaggaagagggggcagcctgtgattgtgcaaaaaacggaatggcagctgttgatttgttcagacattcaaagaaggggcagtatgatcttatatttatggatgtacagatgcctgacatggatggatatgaggctacaagagcaataagacaaatgaagcaccctgacgcaaaggatattccaatagtagctatgacagcaaatgcattttctaatgatgtaaaagctgcatttgattgtgggatgaatgctcatcttgcaaaacctgttaatatagaccgtataaaagacatagttgcaaattttacataaattttacataacttacataatacattttacaatgctcatttagaatacacatgatgtgtgaaaaagtcgttcaaaaaggagcttatgtaaaatgaatatttttggtgtacttacgatggcaggcggactggctttgttcttatatggaatgaatgtcatgggagattccttagcaaagctgtcaggaggtaaattagaacagatacttgaaaagctgacttctaaaagaattatggcagtattgcttggtatggctgtaacagcagttatacagtcatcatctgcaactacggtaatggttgtaggctttgttaattcgggtattatgcagctttcacaggctgtaggtattattatgggtgccaatattggtacgacagtgacttcatggatgttatcacttacaggtataagcggagcaggatggattaatcttttaaagccatcatccttctcaccggtgcttgctgttattggtataattatgactatgacctgtaaggacaattctaagaaaaaggatataggtaatattcttcttggatttgcaattcttatgttcggtatggaaactatgagtggcgcagttgcaccgctggctgacaatgagaagtttacgggtatgcttacactgttttctaatccgttattcggacttcttgcaggtacagtgcttacagcagttatacagtcatcatctgcgtcggttggtatattgcaggcattatgtgtaacaggtgcggttaactatgcaacagcaattcctattattatgggacagaatataggtacatgtgtaacagcacttatatcttctgtaggtgcaaagaagaatgccaagagagcatcaatgatacacctttattttaacatgattggtacagttatatttatggttatattttatagcctgaatatgttcgttcattttgaattcttatcaacaccggcaaatgcagcaggaatagcagtgattcacagtctctttaatatcggatgtgtaattatacttttcccattttctaatctgcttgtgaagcttgcaactctttctattccggatggaaaacatgaggaagttattcagacaggtgtggcagcagatcttgcagcactggatgaaagattcttagagactccggcagttgcgatggagttatgcaggaatacggctgtgaagatggcacatttgtcacagaaagcgctagataaagcgcttgacattattaataattattcagatactgcatatgatgaggttgtggcaatggaagaagatgtcgataagtacgaggataagctgggttcatatcttgtaaaggttggtaactgcgatttatcaagacatgataatcatacattttcaatacttcttcactgcatgagcgattttgaaagaatatctgaccatgcgattaatattgcaaaatctgcaaaagagatgaacagcaaggagtcatctttttcacagaatgcaagaaaagaacttgaaacatttgcaaaagcggtacatgatatagttagtaacacagtacaggtttttgaaaatcaggatattgaggcagcaaagcatattgagccgttagaacaggttattgatggactgaacttagagattaagcagcgtcatatcaacagattaagaaaaggcagatgtacaattgagacaggacttatactcgaagatattatgacgaattttgagagagtatcagaccattgctctaatattgctgtatgtatgattgaagtaagagataatggttttgaaacacatggatatctggagcatcttactaatgaggataatcctcagtttgcaaaagaatgcagacagtattataaacagtatcagcttccggaattaaagaaagctgactagaacaggagatgagaatatggctcttatatacatagttgaggatgatgaaagcataagggaaatagagacaattgcacttaagaacagtggacatatggtaggtgcatttggaagtttcaaagagttttttaagaagcttgatgagattcttccggaccttgtgttgcttgatgttatgcttcctgatgaaagtggttatgacatcattaagaagttaagactgaattctgcaactaagagactgccggttattatggtgacggcaaagtctacagagcttgatatgataaagggacttgaggatggtgctgacgattatattaagaagccgttttctgtaatggagcttattacaagagttaaagcacttcttagaagaacagaaacagacgaggcaggcgtgctggatgttggagagattgaacttaatcatgaaaggcatgctgttacggtctcaggaaagcaggttgaacttacatttaaagaatatgaattgttaagatatcttatggctaacaagaatatagtgctttcaagagattctattgtacttaaggtatggggaacagagtttgaaggtgagtcaagaactgtggatatgcatattaagactttaagacagaagttaggtgatgcaggctcgcgtataagaaccgtgcgtaatgtaggatatgttattgagtagcctgatataattgacagacagaacagggtggatatatgaagcagaagattaatttaaggcttattggaatagcagttatagcggttcttgctacagctatcggaataacttttatatattatggactgtttaagaaacaggtccaggccggactgagaactaatgctgaagtactcatggaaaccggagtttttgaaaagtcgtcgcaatatgctgatgtaaagcttccaattaataatctcagggttacatggatagattcagatggggtggtgctttttgataatgataatgatattaatgtaatgcctaatcataaagacagacctgagatacaggatgcatttcataccggacatggtcagtgtgtaagaaattctgacacgatggatatgaataccttttattatgctctaaaacagaaggatgggactgttataagagtatcctgtgatgcaagcagtttattaagtgtgtttggcaatgtatttccggctgtaacaggaatacttgcagtaattatagtagtgtgtatcgttctttcacaattacttacaaggacacttattgagcctattgaaagaatggctaagaatatggattccgtacaggagaagcctgtatataaagaaatagccccttttgcagagaaaatcaggacacagcatgagaatattcttgctgctgcaagaagcagacaggattttactgcaaatgtatcacatgaactaaagactcctcttaccgcaatatcaggctatgccgagcttattgagaatgagatggtaaaccatgaacagggaatacattttgcacatgagattaagcgtaattcagaaagattattatcattgattaatgatattataaggctttcagaattagaccacagcgaaatgccaaggcagtatgagaattttgatttgtatgagtttgttaaggattgtgcagagtctctgcaggttaatgcacagaaacagggaatacgtttttcgtatagaggttcaacatgcatgattcgtggcaataaggatatgataagggagcttattgataatcttgtacagaatgcaataagatataataaagaaggtggacatgtagaagtgtttgcaggaatggtagatggcaagccaaggttagaagtgactgatgatggaataggaattcctaaggatcaacaggacagggtatttgaaagattttacagagttgataagagccgttcaaaggaaactggtggaacagggcttggccttgctattgtaaagcatattgtagaacttcatgatgcaagaatatatttagaaagtgaagttgacaaggggacacagatacgcatcgaattctagaatgattaagagtggaagtttttatgtctttcactcttttttctttttataacagagtgattgtgttatattatataaaaagagaaaaacagatataatctgcggaagcagggaatataatatatattgaggattaataggaatatgaagaatatcagtactaaaaaatcagtagttcttattgtagcggttattgttttgatactggctggaattataatttcagtaagtacagataagaacagaaagaagcaggaagcggacagtaaagccagtgtaagtgtaacaaggacagatcttaagaatgaagcatcatctcaacaacagaatattaaggagcagacagatgttgagatattgtttgagaataaggctgtaccggttgggacaagcctgaaggtcacagcaattgtcacacctgatgatgacgataagtcaattgtatggacaagcagtaatacagatgtatttactgtagataaagacggagtaataactgttacagggagtggtacagctacgcttacggctacagttggaagtgtttctgatgcgattgtaatcgaaggaataagaaatgtagctgcaggttcagataatggattcagtgtgtacactcatacggcagggagtatttcgtcaggaagcaacataggttcaggcagtgccagtgaaggagattccagactagagaatctgcctgcaggagaaaataaatcagagagttctcaaggaaccggaaacagtggggatggtgtacaatctggtggggtgcagtctggaggcgtacagcctggcagtagtacaacagaaaactcatcttcagaagataataatgattctggaagttctggctcaggagaaattgaagatacgattattaataatggatttgaacagacagtttctaatgtttatgtatgtcagcagaatgggacatattatggtgagattataacacagagtaatgtgactattatatatattaagaaacgtaacagtgaatttgacagcaggattaataatgtaatcgagaatctcattcctggtaattcacagatgatatggaataattatctttcggcttcaacagacagaacatttacagttgatggaagaatggtaaggattgtagttgctacaggtggcggacactctcaaattgtaatatacaattaagtaaaaatatgttatatttaaacatatgcaggttaaacttgtttaatgaggtgaatgaattgcttaatgagaataaaatcaaaatgatgaccaagatggcaatatatgagaagaatgaaggaaaaagcatgttgaaaactgccaagtattttaagggtgattacatagcttttggagtattaaagacagtgattgccactacatttgcaggagtgattcttctggcgatgtatttcctgtgtaacgcagaaggaatgataagggatatcaataacctggattatataggacttgccaagaagtttgcattatattatgtgcttatgcttatcgtattctgcgtaattgccgggtttgtatattatttcagatatgagaataccagaaaaggtattaaaaggtatttttcaaggcttaataagctggaaagattctatacagggcagaagaagaaataattatttggaggcatagatggcatttttattggaattaaaggaaagttttaagaaattttacaacagatataatacatatgtggtaccagcatcaaagtttattattgcattgatatgttttattatgattaatacaagtattggttacatggataagttgaagaatccggtgtttgcactgttactttctgttatatgtgcatttcttccgggtggttttacactgatagttctttcagcgtttattcttatacagttgtatgtaattgctccggaatttgcgttactggtattgtgtgtaatgcttctgatgtatcttctgtatttcagatttgcacctaaaacagcttatatacttattattactgccatgttctgctggatgaagataccatttgtgcttccggtagcgattggtctgtgttcgtcagttgcggcagttatcccagtgagttttggtgttattatgtactacataataagaactgcaagtgattatgaggctgctatttctgatgattctttgtcagaaagtatgaaacagatatcttatcttatagaaagccttttaaagaacagacagatgctggtgcttattatagcagctgcagttactattattgttgtatatattatccgaagacagaaaatcgatcattcatggaaaatagctattattgtgggaagtataacacagttccttattctggttgtaggacagatagctttgaaatcagattttaatattgttcttataattataggaactatactgggggttacagctgcatatatctgcaatattgttttctttgcacttgattataagagaacagagtatgtacagtatgaggatgatgaatattattattatgtaaaggctgtaccaaagattaatgttgcaaatgctgatgtaagaattaagcatattaatgctaaaaagactaagaagacagatgatatcagacagatgagaaccggcgatacagctaaagataatggatatgcagtatctaacgaagaagatgatgatattttattctatgatgatgataagtaatcatcagaatatattttgctagttttatttagaagattataagaagaacggaggcgataatacagtgaataatttcataagggattatcttgttaaattatatattccgcgtataacatggaccgatattattgagattgtgattattgcttttgttatatataatgtcatggtatggattaagaataccaaggcatgggtattgcttaagggaattattattgttgttatattcgcactgattgcgtatattctgaatcttaagactattctgtggattgcaggaaagacaatcagtgttggtattattgcacttgttattatattccagccggagttaagaagagcattagagcagcttggacgaaagaagattctgtttggacttttcaggtttaatgacggaagagaaaagggtgaaaggtttagcagtaagactgcagaagagatagtaagggcatgctttgatatgggggctgcttatacaggagcacttatagttattgaacaggatatggttcttgaagaatatgagaaaacaggaattacggttgatggcctggttacaagccagctgcttatcaatatatttgagcataatacgccgcttcacgatggagctgttattataaggggagacagggttgttgctgcaacatgttatctgcctctttcagataataataatcttaataaggctcttggcacaaggcacagagcaggtgttggtatcagtgaagtgacagacagtatgactattatagtatctgaagaaaccggtaaggtttcggtggctgttggtggagaacttattcatgatattgatgcggattctcttagaaacaagctggaatatcttcgcaggagaactattgatgtgaagtcgttcaagatatggagaggaaggctaaagcatgaaggaaaagatgtttaagaacctgagccttaagattctgtcggctatatttgcggttgttttgtggacggttatagttaatgtatatgatccaaccacgagttatacattcagtaatgtgtcggtacagcttattaatacagagagtctgactgataagaattacagttatgaaattgtagagggtggcaagatatcagtatatgtaagtggaccgaagagtattgttactaatatcaaagcaagtgatattgttgcaactgcggatcttagcaagataagcgcatttgctgattatgttgatattcatgtatcagttgttaaagatggacaggttcttaataatgttgaagctacacctaaaacatctgctgtaagattaagcatagaaaacagagatactaagactgtaaatgttgtttcagagattaccggttcagcggcagatggctatgcagtggtaagaagagtgcttaatccaacatctgttaaggttacaggtccttcgtctgttatcgataatatagaccatgcagggatatcttttgatgtgacaggagcgactgcagatgtgacgggaacagcagatattcatttgtatgattctgataataatgaaattaatgattcttctgttgaacttacacagacaagtgtgggctatactgcacaggttgtaaggactaagactgtaagtatagaagttaagacgtcaggaaaaccggcagacggatacagagtttcaggagtgacgcttaatcgtgatagtgttgttgtatatggtgataccaatatgcttaacagtcttgataagattgttattcctgcaagtaatattaatgtagatggtttaactgaaaataaagtgtataagtttggtctttcggatttcatagataaatcgcttacaattctagataatgcaaggattgaggttacagtaagaatcgagagtacaggtaataagacaataacacttaatacatcagatattaaggttagtggacttgaaaccggaatgagctacagctttgaggatagaacattttcaatagatgtcgagggttcagagactgcaattgctgcattagacgcatctgccataacgatgactgcagatttgtctacatatactacgtcaggaatacaaagcattacattgtcggttaaacttccagatggagttacattaaagagagcagcatccgttaatgtgttgtttaaggataatacccaggaaacagaaactactcagtcgactcaggaaacaacatccgtgacgactggaaattgagaggtgattcatatggtaagtgagaagatactagttggaagtgcattaggaatacatcttcgtcctgcaggagcaatgtgtgatacagctgttaaatttgattcacacattacattcacatttaagaataaggttgttaatgcaaagagtgttatatctattcttgcatcaggcgttggctgtggagatgagataactctcatagcagaaggtccggacgaagaagaagcattgaaagcagtttctgagagctttagaaaagctttacaggactaatataaatcaagaaaagaggtaaagggtatgggttatatggaaacttacaaagcatggtgtgagaatgaatattttgatgaagacacacgtgcagaactcaaatcaattgcaggagatgagaaagagattgaggacagattctataaggatcttgagtttggaacaggcggactgagaggtgtcataggcaatggtactaacagaatgaatgtatacattgtaagaaaggcaactcaggggttagctaattttattatcaaggaaggaacacaggataagggtgttgctatttctcatgataatagaagaatgtcaagagaatttgcgcaggaagcagctctttgtcttgcggctaatggcattaaggtatacatattcccttcattaagaccaacaccagaactttcatttgcagtaagagaacttcactgtacagcaggtattatggttacggcaagccacaatcctccagaatacaatggatataaggtatactgggatgacggatgccagataacagcacctaaggatacacagattatcaatgaagttaaggctgttactgattttaatgatgttaagactattgatgaagaagaggctagagtaagaggcctgtataacattattggatatgatatggatgatgcatttattgcagcattaaagaagcagagccttaacggagatatcattaagcaggttgctgatgatattaagattgtatactctccattcaatggtacaggtaatgttcctgtaagaagaattttaagagagttaggtttcaagaatgtatatgttgttccagaacaggaaaaaccagatcctaactttacaacactcgagtaccctaatcctgaagaccctaaggcattcacatatgcattaagacttgctaaggaagttgatgcagatattattcttgcaactgaccctgatgcggacagacttggcgtatattctaaggacactaaatcaggtgagtacaagtcattcacaggtaatatgtctggtatgcttattgcagaataccttctttcacagagaaaggagaagggacttcttcatgagaatggtgcatttgtaaagactatcgtatctactaacttagctgatcttatcgctaaggaatataacttaaagcttattgaagttcttacaggatttaagtatattggtgagcagattaagttctttgagcagaataatacatacgaatatgaattcggttttgaagagagttacggctgcttggttggaactcatgcaagagacaaggatgccatcgtggctgttatggcattatgtgaagcagcagcttactataagtctaaaggcattactttatgggatcagatgattaatatctttgataagtacggctacttcaaggaaggacagaaggctgtaactatgaagggtgcagaaggtgctgtccagattgctaagatgatggatgatttaagaaataatccacctaagaagttcggagcatggaatgttgttgagttcagagattataagaaggatgagtgtacagttattgctacaggcgagaagaagcctacaggacttcctgaatctaacgtactttattttgaacttaatgaccatgcatggtgctgtgcaagaccttcaggaacagagcctaagattaagttctatatgggtgttaagggaacaggtcttgaggatgctgataagaagttagaagaacttactgatgcagtttctgaaattgttggtttataatcagttcaaatttaattaacaactaaaacacaatatgaacacatttcgttgttatattacatgtattgacagtgagatgtgttcatttgttatgtatggaatcttcattgtcataatacaatggtaaaaggagagaatgattatgtataacgacaataatgagaatgattcacagtaccgttacagtggcagtgatataccatataacaatactaacaatggcagtacatctaataataacacagcattttcaagtgcaccttatgaagctaagaagcacaagaaacacaaaagaggatttgcaaagaaagcagcatgctttgttctttcagcagtactttttggcgcaatagccggttcggttatgtttggtgttaattatgcaggtggaaagattgctggcagtaataagtctgatgctacaggtgttaatataccaacagtaagtaataatatttctaatgtcgctaagacagattcttcgcttacagaagatactaatctttcagcatcaggtaagatggatgcagaggcagttgctacagcagcccttcctgcaatggttcagcttaatggtacaacaacagttaaaagttcaagttattttggatatggacagagttatgaggcaacatcaagtggtacaggtattattgtaggcaagagtgatactgaattacttattgtaactaatgcacatgttgttgataatattgataatcttaaatgcgtattctctgatggcacaagtgcaagctgttctgttaagggttctaagtcagatcaggatattgcagtagccgcagtatcattaagtgatatttcatctgatacagcgtctaatattgcaattgcagaacttgaagattcatcagatattaaagttggacagcaggttgttgctattggtaatgcattaggtgaaggccagtcagttacaactggtataattagtgcaaaggatcgttcaattacagtcaacaatgtaacatttacaggacttcttatgacagatgcagcgattaactctggtaacagtggtggagctcttcttaattctgaaggaaaggttatcgctattaactttgcaaaaacaagcagtgatggtgtagaaggtatggcttattcaatccctgtttctaatgttaaggatattattgattcattaatgactaagcagacaagaaacaaggtttcgtcagataaggcagcataccttggaattgcagcagtagatattacaagtaattatgcatcatattatggatatcctgtaggtattcttataagaactgtagctgatgattcagcagcagacaaggcaggattagagacatacgacataattgtcggatttgatgaccagacagttactactatgtcaggacttactaacatgcttcagtattatgaggatggtgagaaggtaactatagattattatcatatggaaggaagcgagtatgttcttaagagcacggaggtaacgcttggctctatgaaggcatcttaaggatatattccaagtagatatttatggataataccaatgagaatatgacagaagataaggatattaataagaataacaatgtgaattccgatgattatgagaagatatgttttgtgtgcagaagaccagaatcaagagctggtaagatgattgttatgcctaacaatatatacatctgtcaggattgtatgcaaagaacattcgattcaattaacagcagcggaattaattatgaagatatgatgaagatgtcaaacatgcctggaatgggcatgtttggcaattttggcgttatggattcagacccggttccagaaaagcagaagcttaagaaaaagaaagaggataagaaggagttaccagcgcttgacgtttctaagctgcctgcaccacatgagattaagaaaaagttagatgagtatgttataggtcaggactatgctaagaaggtaatgtcggtggctgtatataatcattataaaagagtttcagcagatgctaagattctgggtgacgttgagattgagaagtctaatatgcttatgattggacctacaggaagtggtaagacatatcttgttaagacgcttgcaaggatattacaggtgccacttgctattacagatgcaacaacacttacagaggcaggatatatcggagatgatatagagtcagttgtttctaagcttttactggcagcagacaatgatgtagagaaagctgaacatggaattatatttattgatgagatagacaagattgccaagaagaaagagaccagaagcagagatgtaagtggcgagtctgtacagcagggaatgttaaagctgttagaaggcagtgaggttgaagttcctgttggtgcgacaagtaagaatgcaatggttccacaggtaactgttaacacgaaggatattctgtttatatgtggtggtgcatttccagatcttgaggatattatcaagacaaggcttaataagtcatcctcaatgggatttaatgctgaccttaaagataaatatgatgatgagaagaacatcatgtcttatgtgacggttgatgatcttagagaatacggaatgattccagaatttttaggaagactgcctatcatatattcacttgacagactggatgaggatatgcttgtcaatattctgaaagagcctaagaatgcaattcttaagcagtatcagaagctgttagagcttgatgaggtgaagcttgagtttacagatgatgcattaagaagcatagcaagaaaggcaatggaaaaagatacaggtgcaagagcactccgttctattattgaggattttatgcttgatataatgtatgagatacctaaagacagcaatataggttcagttacaattacagaagatgttgttgaaaagaaaggtgctccggtaataactatgagagcataatagttatagcagaataatacaatacatttctgaatacatatagcatgtacagtgattgttttatgttaaggagatgttatggcgtgtgattttgatataactaaagagaatatatatgattacataatagaagataccccaggggctgatgaatctattaaggcattatcagggatatgttcgcagagagctgattcgcaatggattatagctcatggagaactgcctgataaccgccagcttaatataagctctctggggtattttactattccaaagttatatgggcttatggaaggcgatgcagatataagtgcgcttgatgaaataggagctttacgggtacttggacaggataatctgaaggcagacgggagtaatgttcttatagggtatgtggataccggaatagattatcttaatgatgttttcaaggacagacttggaaatacaaggattcaggctatatgggatcagacagataaaatgggtgctgatgccgcaaaaacatatgcgcattttggcagagtatatgaaaaggatgaaatagacagggcaatagaggctgacaataacggagaaaatccatattcttatgttgcacaaaaagatacgtcagggcatggaacgctgctggcttcaatatcagcgggttcatatgctgacggatatgttggcgttgcaccaggagcagaacttttagtggttaaattaaaacaaagtaaacagtatctgagagatttttttctgataaaggatgacgttccagcttttgaggaaagtgatattatgctggctttaagatttcttgaagattacgctatacgtcttgaaaaaccattgataataatatttggtctgggaagtgctaatggttcaagaacaggcgcatctcctctggcagaaatgatggagaatcttactaaaaaacccaatatatcagttataacatgtatgggcaatgaagctaataataaatgtcattataaagggacagtaatgtcagccctggtacctgatgttatggaaattaatgttgatggaacaggaaagggttttacgatggaaatatgggcggatagtcttgatatattatccgtgtcgattgaatcaccgtcaggggaatatgttccaagaatacctgcaagaatgggtgcaagtatggagtatacatttctttatgagggaagtacagttacggtagattatcagataactgaaaatgttgctggaatggaggttatattcgtaagacttaagacaccagttgagggtacatggaaattctatatatatagtctcactaatataaaaggaagttataatgcatggcttccattaaagcagttttccggacaggatatatattttttaaaatccgacccggatacaacacttacagttccagcggcagctgatggtgttataagtgtaggagcatataatcattatacaggggctgcttattatgaaagtgggcgtggatatagcgctgacggaaggattaaacctgattttgttgcaccgggtgcgggggtatatggaattgctccatctggaggtgttaaggttactggaacaagctatgcagcggcttatgccgggggctgtgttgcacttttatattcatatcaggtaaatgtaaagaatagtcagatgattaatcataacgatattaaagcacagcttataagaggtgcagtacgctcagaatatatggtatatcctaaccctgtagctggttatggaaaactgaatatatatacaacatttaacatgatgagaatatcttaggttgaaatcactggtgttatatgctaaattgttcatacatgactaaaagaggagatagagaagtatgaaatataaggcattggcactggatttggacggaacattaactaatagagagaagaaagttccagcgggcaacaaagaagcgattgcgaaagcaatagatgcaggcgttaaggttattcttgcttcaggaagaccgctttttggaataacaccaatagccagagagcttgagcttgacaagaaaggcggttatatactggcatataatggcggctgtatagctgactgcaagacgggaaagcagatgtctgcgacaataatgccacaggactgtatagcagatatatgcagtcttgcaagagccaacggtgtgtatgctctgacatatgctgatacgcagatagctgctgagagtgattctgatgagtatgtaaagaaagaagcaatatgcaacagcactacaatcatgaaggttgatgatttgaatgcttatgtggattatcctgtagagaaatttctcgttgtaggagagcatgaaaagcttcttccggtacagaaagccctgttagataagcatgagggagtaatcaatgcatttttctcagagagctattttctggaagttgtgcctgcgggagttgcaaaggatgcatctttggataagctgctcacaatgcttgatataacaagtgaagaacttgttgcatgcggcgatggaatgaatgatattccaatgttaaagtatgcaggtcttgcagcggttatggagaatgcatatcctgaagttaagaaatatgcagatgtcaatgcaccatctaacgatgactgtggtgtggcatatgttatagataattatatattataataatggattataaaaaatatacccccggcggttttattggctgccgggggtatgttttattgattaattagaattgttattgagactgtcaacatattcatctacatcgaatacatcaccattctgaatcttactcataagctggatagctgtattaatactgtctgcataaggatacacaacagaagcacctctaagaccagttatttcgagataagcaggaccctgtccagcgggtggctgggttgatccttcaatactgtatgtctggatattccatgctgtaccgtcacttaactgaagtttaacaagatcagatattgtacttgttggaatattagtaaggaacatatcactaacagcatcaagtacggctgaatacttggtaagtattgcaggagaagtagctttttgtaagataccctttatagctgcagtctggttacgtccacgctggaagtctccagcagcaaatgcatgtctttctcttgaaaatgcaactgccatctcaccatcacattcattaggtcccttgacgaaatgatatggaataggagaagcatcttcgccacaagtaaattctacttctgagtcaattgtgattccaccaagtgcatctacaacagagacgcagcctgtgaaattaatctttacataataatcaatgtcaatgccatacagattctggagagtatccatagaagcttctacaccatagtttccagcatgtgtaagtttgtcgtaaccttttcttccatcaggaccggtaatcttaatgtaagaatctcttggggttgtgacaagaagaatctgcttggtttcaggattaataacggcaactatattgacatcactaagtgcattattagagagtgctgaatcggcaccatcttcacttgaaataccggaaacatatattataaatggttctttctttacgttaacgttggatttctggacagtaacaagcttcttatattcgtattgcttaataatcttaaccttggtatcaaaatcttcatactgtgaggcaacaaccttaagcatggaatcattcataacaattgcctgaacctctgtattatcataaaaggcagttacaaggtcatcccatgatttgtattctgcaagttccaggctgctcttgttaagctctgatttaacagaatcaaatgctgtcttgacattagcgttgcttgcagttgaattataagcaaacttgtaattggcaagatcatttaaagaggaagccttgtcatctgccagtacaactacatcaacgatgtcagtgttaatctcaggaagattaagtttattaaggacagaatcaagcttagatgatacaaggtatatgaaaacaatcactcctgacataagtactgcaagaatcttacctataatatgagccttcgtaaactgcgatgtgaaatcgtacaggaatatcagcagtaaaaatgcgttgaccgcaattaaatacttcaatggaagaatatctaacttaaatatattaaataaaagtaatcccgatacaataagctgtatcagaactaatataagaccaataagtgtaccccagccacgcctttttctttttcgttctttcttagaaagctcttctttattcttaaataaatatttcatatcgtctttacttcttgtaaaaaaattagacataattcactccttaattacaataggataataaaaaaataacgaatacattctaccatgattttatcaaaaagtaaaacttaattatcttaagcaagaaaaacaacataccttagatataggcttattttaattaatattattacaaataacttaaagttaataggtaaacgctataaaaaacttgcggaaattaaccagaacagatataataacgctagaattgatgtgcagtaatgtacaatcttaaataataatttaaaggagtgttttaaggttatggggtatgttgatgaagtattagacatcgtgtctaagaagaatgcagatcagcctgaatttttacaggcagtaacagaggttcttgagtctttaagaccagtcgttgaggctaacgaggaagtttacagaaagaacgctattcttgaaagaattacagagccagatcgtcagattatgttcagagttccttgggtagatgacaagggacaggtacaggtaaacagaggtttccgtgtacagttcaataacgctattggaccatacaagggtggtttaagattacatccttcagtaaacttaggcatcatcaagttcttaggtttcgaacaggtattcaagaactcacttacaactcttccaatcggtggtggtaagggtggttctgattttgatcctaagggcaagtcagacagagaaatcatggcattctgccagagctttatgacagaactttacaaatatattggtgctgatgtagatgttccagctggtgatattggaacaggtgcaagagaaatcggattcatgtttggtcagtacaagagaatccgtggtacatttgaaggcgtacttacaggtaagggacttacatatggtggatcacttgcaagaacacaagctacaggatatggtttattataccttactaatgctttatggaaagataatggaatgtcacttgaaggcaagacagcagctgtatctggttcaggtaatgttgctatctatgctatcgagaaggcacagcagttaggtgttaaggttgttacatgctcagactcaacaggctggatttatgatccagaaggaattgatgttgcacttcttaaggaagttaaggaagttaagagagcacgtcttacagaatatgctgctgctaagccatcagctcagtactttgctaagcagaatggtgagcacggagtatggcagtacaaggtaaatcttgctcttccatgtgctacacagaatgagttagacattgaggatgctaagatgcttgttgctaacggtgttgtatctgtaacagaaggtgctaacatgcctacaacattagaagctactaagtatctccaggagaatggtgttctcttcgtaggtggtaaggctgctaacgctggtggagttgctacatctgctcttgagatgagccagaactcagagagactttcatggacattcgaagaagttgatggaaagcttaaaggaatcatggaaacaatctacgctaacatttcagatgctgctaagagatatgatatgacagttggtggaaagacagactatgttgctggtgctaatatcgctggtttcgagaaggttgttgatgctatgcttgctcagggagtttgctaattacaggctttaatgtaataattgtcttataatatgatttaattgtaaggttctgcagacaatatgtctgtagaacctttttttacttggcagattgcgaaaaatgatttatattatatgattgtagaagtataaaaaatggaggtctgtatgagaaagaatatagcaagagtattgctgtacgcagcatgtgcagtacttgttgttttttacatattagtattatggtggggaaagaatcctaaggttggaacagaataccgaatgtactatctgacacatgagcttacagactggccaggttatggtaatctgaaatatacatttggaacgaaagagatatgtacagaacataaagaccgtaatggtaaagaacaaagcaatgtctgcagtcgtaaaggtcagggctggcagaaatctaagagatacgaaggaacgaagaatacagacaaagattcatatatatactatattccggaggaatcagctgataatatatatcttgtatgtgatattacggaatatgatacaacagcctctggtgataaaggaattgaagtatatgtgaatgataagctgattggaaatatagacagcaagggaacaacgaagctaaagataggatatgtcagcggtgatgagcttcttacagtgaagtttcatgctgacaatgcagaatatactctttacagtataagccttgataaaggtcaggcggaaacttaaatccaaagatgacagaatatgtgtaaatgtatagaaaggtagaattatatgaagaaatcgggatttaaatcattattaaaaaagattaagccatacgcagtacctggtataataacaggtctggttatgattgtaatacttatacttaaaggtatatggccttttggaagcagcagaatagattattttgacaacatgcagcaggtagcaccgctttatgcacatctgtgggatttcatgcatggtaaggcatcaatatggtttgactggtatacaggtcttggaacaaatgtgtcaatgagtatatcggcattttcaatgattacaccgtttaatcttttattatattttgttccaagaagttacatattagagagcatatcaataattacacttgttaagatgatattcatgtcagttgcaatgtatgcgcttattaataagaaatacaataatcttgtgtatggattaaaggttatgttttcatgcatgtatgccttttgtggttatgtaattctctatggttcatgctttacaccatggatggatatagttgcatttttccctattcttataatggcatacgacagaatgcttgagacaggaaagaaaatgttctatatatgcatgattgcgttgtgcttcataattaattattacctgagtgcaatgtcacttatatacatattccttatctgtggaataagaatagtagtcatgcaggagagaaagcagtggagggaaactgcatggaatgtcggtataggtacgattgcaggtatcggactttcagcattcgtgcttgttcctgtatttgcacagctttcttcgtcacagagaggtggtgcgtctaaggggcttttatcacagtatgcaggctggataacaagttcaattgttacagatggtgcaatggcagcactccagcgctggatgatgctttatggacttgcattcgttatagcagttattatcatgggaatgaaaatatataagtcagacagaagacagcttatatatactatagccatgcttgttgttgcattaggtccggtgtttatggaggctactaaccttatgtggcattttggctcatataacggatatacattaagaaacggatatctgatatcgttcacgcttatctgtgttgctgcaggaatggctgagaagatgtttgcagatataccattaaagagtgcgttttatcgcaggcaggcagcggcagtagcggtaattggtgcagtatatgttatgatttataacatattaccaataaacaatgaaatgcttgcaatggcattttttataatgatatttgcagtgatgtttgcagtgtatatgtttatgcttataagaaagaaagaatttaactgcaaatcagttatccttgttattgcacttgaattgtttatcggtgcatatgctcttataggacctcctaagttttatacatatgaagattatcagattggtgattatgtgcagtatgccaatgatgcggcagacagccttgatatagaagagtctgctacagacagaatagtaaatcctgatatcagtcttaatgccaattatcctcttatattgagaagaggagcattatcaagctttacagcagctttagaggacgatacacaaagttatgccaagagatggggatattctaagtatttcctgtggctgttagattcaggtggaacagtattcagtaatgcagtgctgcatgttacacaggcagttaatatcaatgaacttgacagtgctttatatacattagagaagaaggaaggcgattacagcctttacaacactaattataacctgccatttggattctgtgttgacagcagcttcagcaagcttgatatgactaatgttgactggattacataccataacagaatgtataaagcaatgactggagataaagaaacatttgtaacaagaatatatccacaggcagagactgctggcaatattaagtccatgactattaatgtcggaagcagaagtgctatatatatgaatattgcagatgtgaagaagcctaatgcggatgctaatgcatctaagcttgagagcagcatacatgtatatgtgaatggtgaggcagttgttgtacctacacttggagatgttaataatacagcatattttacggattataataataatcttctttatcttggcatatttgaagatgaagatgttcagattaagattgaatatgataagcctaaatatatgaaccagagtaagatgactatcggacttcttaatatggagaagatggataagctctgtgaggatttcgcagataagcagacagatgtttcatatactaataatacgcttacagttaagataaacagtgatggaactaaggattatgccctgataccggttattaagagcgctaactggaccgtgacacttgatggaaagacagttaagactaaagagatagcagggctgtttacaggtgtacaggttcacgaaggcgagaatacattagtgtttacatttgtgccaaagggcagaaatgcaggactgcttattacacttgtgacattgttaataactgtgttatgccttgtgattaattataagagaactataaatgttcctgtatgggctaagtactgtgcacagtatatatatattggattgtttgcaatagttgtggctgcaatgtttgtagtacctgtaataagtacaatcccggcagctatatatcatataatccgtatattattgaaatgaggcattagatgaacagactaaaaaataatgagaattgcaggcttctgttaaagatattgattatatttgcgatatcaagactgattatgcttatcatggttcctgtgtataatggaattatggggacacacaaatcatttctgtttcttatgaacgaatgggatgcaaagaaatatgcctatataatcaatcatggctatacacaccctacggatattgatcctcaggctaactgggcgttcttcccattatatgttatcgtgtgtgcagcattaaaggcagtgacaggcgggcttattaacacttatgttattggaatgatagtatctaatatatgcataattattgcagcattctttgctgttaaaggtcttaagaagcagacttctattaaagaagaatatacgatgattatgccagtgcttttatttatggcaccttacaccttctattgcagttctgtatatacggaagcgatgtttataatgttcattgtactttttttctatttcctttttgagaagaaatacatggcagcaggaattatggcagcatgctcaagtggaacaagaattgtaggctgtatacttgtatttgcactggttgtacagctatatattgacatggaaggaactaagataagctttggcaaggttaagacatttgtaatggatatgcttaaagcacctaagaagatactgtcagtgcttgtatgcccgctcggtgcatttgcatatatggcatttcttaatttcttctgtggtgatgcatgggcatataagaatgtccagattgcatggagagaggatgagtatttcccgattataggcgtgttgtggaaggcatgtacaggacagattgagccaagatatacatatatggggtggttctgtattgcaatactgatactttatggatatatgttttacagaaaatattactcaatggcagtgtttgggattatatcacttcttgtgccattgacatcacatgttatgagtacatgcagatttacggcaggaacatatgttgcatttgtgggagtgtatgacatacttacaagatgtaataaggctgtaagatacattattatggcggttcttattgcaatcgaaatatatcttttgttcttatggtacaattcagactgctggcttatgtagcagtcagaagaggaggcagatatgtcagatataatatcagagataagcagaatcagtgaagatgagctgcgaatgcagatagcgcttattgacaatgttaatatatctaatgcggttaaagagaccggatacaggctggttaatgtgcttgcagatgttgccaattcatttacacagagtataggaataaagaattcgattgattatgaggtaaaaaaagtatcagatctcgtacgggaagactgtcttcgctataaggcgttaaacagggaaaaacttgagaaaatgttatatgagcggcttgaagtgatgtgtcctgaaattgaaggagacatgaaggataaggaagtaaaagagcagatgtccagatacattattgatgaggcggcatctgcatacggaattaataaatatatgtcacccgctcataaaatagaagaaataagcataagatataacaatgcatttttaaataatattatgaaccagatacgtaatcttacagctgtccagaaaaagtcatatgctgaacaggttggaagaaaattaggggttgcttcaatggagactaaacgtgaggttcaaaaaagtcttatgccagagaaattcaatggcgagggaattatagatgtactcggcagacagagaagtacgacaaagcttgaagctgcaataagacttcttggggaagatgcattctggtcgacagaggcgcaggtaaagacaatgtatcaggcagtcagaaatatgacaagaatatcaaaacttcaggcggcgggatacatatggaaggtaagccatgcaaatgatatcaagttttatgcaccatcagaccttatgccgtcttatattgctgcggacaaaaagaaagccgctgatgataaggacagagaataccgtgttatgtgtactcaggttgaaaaggcacgcaaggaattagaaaaatgtgaaaaggatgtttctgtaaagacagacaggatgactgaagcacagaagaaatatgatgctgccgtggataggcttaatattgcacaaaatgattttgcaaaacttgaagatgtcaaagatgattacattaataacagaaagacagaagatgaatcaaaacgatattatgcacaggttaatgatacaaagagggaaatggacagaagtcttgatgatagtgacaggaagaaaaagagacttcaggagacagagaaagaattaaaacttgcatgtgagaaggcagaggagagaaagatatatcttgaatctgtacagaaaacggcagatgaagagaccaaaaaaagagcaaaggaacttaagataaaatggacagcctttttctttaaatattcatttgatgatgaagtatttgagtctgctgtgagtatatttagcagggaagaattacgatatattgaagaaactttaaaagaggcacatgattcagcttctatgctggcagtaggggataataatgtgataagggcatatactggtggaaaatacacagctgttattacatatgaggacagacatattatttctatacaaagtatgtgacatccggaaaggaaaagatgagacatgtataatgagattgtgaatagtcttgacagtataagtcagtttgcatcatctacaggattagaaagaggcagacagttattacatgatatgaataatccagagaagtcattaaaaataatacatgttgccggtactaatggaaaaggatcggtgtgtgcttatattgcaggaattttacagcataatggttataagacaggactttttacatctcctcatcttgatgatataacagaacgtataagaatcaatggaataatgatttcacaagaggattttgaagaagcatactggtatgtggaagaacacaggacacaggagcttgcgtattttgattatctttttggcatggcaatgtattattacagtaagcatgatgtggattatgttgttatggaaacgggtcttggcggaaagctggatgcaactaatgcagttgataatccggttgtctcagtaataacaacaatatcgcttgaacatactgcaattcttggtgatacaatagaaaagattgcaaatgaaaaagcagggataattaaaccgggaataccggttgtgtgcagcggcatagtgaaagaagctgctgatgtgataagaaagcgtgcagcagactttggatgcgactgtcatgtggttgacgacaatacatttgaactgatacaaaatacatacgggtatattgattttttaattcataatgagtattataagaatgattgcttccggttaagtacaaatgcgttgtaccagatggaaaatgcaagcattgcacttacggtatgtgctaatctgtgtgacagggggatgattaagcttgacaataaagcagtcagtatggcaatgtacgatacacactgggcaggaagaatggaactgttaagagataatctgtatgttgacggagcgcataatccacaagggattcaaagctttgtagattcagtaaacagtctttatgaaaacagtcggcttgataaggcaacattacttttttcagtagtaagtgacaagaattatgacagaatgattaagatactatgcagctgtaagcatttcagacagatatatgttacaataacgggcggtatcagaaagcttccagctgatataataaaggaaacatttgaagcacatattaaggatacaccggtatatgtatttgagagtgttgaagaagctatgaaaaaatgggataacagactgatgtttgcaacggggtcgctttatttagttggtgatgtggaccgtgcattggaaggaaaggaaaataatcatgattaattttgatgaagagatacagaagtttcagccaagtcttgaagtagaagatgctgaggacacaatatataacaatgatgtaccggatatcacagatctgatatcacagatacttagcggaaagaatacagataagtagtgaggggtggacatatgagatgttataaatgtggaagcttccttacagatggtgatacatgtccacaatgtggagagaatgtaagaatatataagaagacagccagagtatcagatgcatattataatgcaggactatataaagcaagagtaagagatttaaccggtgcagttgaatctcttaagataagccttatgattaacaagtacaataccaatgcaagaaatctgttaggtcttgtttactgtgagatgggtgatgtagttgaggctttaagccagtgggtagtaagtaagaattttacgcctgaaggcaatattgcaggacactatattaagaagatacagactaaccagaacagatttgagatgattacaggtactatccgtaaatataatctttctttgaaatatgccaaggaaggcaatcttgatatggctgtaatacagctcaagaaggtagttgccaataatccacagcttattaaggcacatcttctgcttgcacttatatatattaagcaggacgagctttcaagagcaaaaaagctgcttaacgctgttcttgcaatagataagaataatacacttgcacatatttatcagaaagagatagcagaaagaaatgcagcaaagaaagcggaaacatcaggttctttccttcctaagagaaaggaaaaggatattgataagaaaccgctaagtggcaacgatgttattcttccaaggtcgtcatataaagaaccaagtaatggtgcaataacaataataaatgtattggcaggtgttgtaataggcgcagcattaatatggtttcttattgttccggcaaggaataagggacttacacaggattataagaaaagtcttcaggagtatagtgagcagttatcttctggtaatgtggaactgaattctatgcagaaagaacttgaagaggttaaggcgcagaaggatgcgcttgagcagcaactcggtgttgtcaatggaacagaaggaagcaacaagctgttagtatcagtaatagaggcggcaagcgattatattgctaataagcctgatgatgctgcgaataagcttgttgatatagatgtcagtgcacttccaagtgagtcagcaaagactttatataatacaatagcaacggcgacacttccggcagcagcacagaccttctataacacaggaatgacagagtattacaagtccaactatgaagttgcggcagataatcttgtcaaagcatacaaatgtaataacagtgcagattcagcttattatgcagctaagtcatatgtagcattagcaaagactgatgatgcaaagaaatactataagtatattgtggatgattattcgactagcggatattacaaagaagccagcgattacgttaattcacattgatgaggtactaaaagataagcccccggcaaagataattctttgccgggggctttgttgcagaattagtgaagtgtaaaagcagagaggaaagaggagattattatgtcaaaacaggttaatacagcggatgagcaggatgaaatccagcatatggattatatatacatggttaatgatgacaagcttatgatacgaatgaatgcagaacttgaccatcatctggcagaagagatgcgtcaggttatagatgatgtaatagataaaagaggagtaactcatatagtatttgattttactaaagtggattttatggacagtgcaggaataggacttattatggggcgctacaagaaggttatggataaaggtgacataacaatcgtgggagtccgtgaaagtgttaagaggatacttcttatatcaggacttcataagatagttaacatatatgaacttaaaggacaggaggcataagtatgatagagaataacaatgttgaattattatttgaagccaggtcggaaaatgaagcatttgcaagggttgttgcggcagcctttgttacatatttagatccaacaatcgaagaattgcaggacataaaaacagcagtttccgaggcagtaactaacgcaatagtccatggctatgataatggtccgggaaaagtaagaatgagattaaagggcatacagaatcaggtaataatagaagtgcacgatgacggtcttggcatggaaaatgttgcaaaagcaatggaacctctgtatacaaccaagcctgaacaggaacgttcaggaatgggattttcgttcatggaggcattcatggatgatttaagagttgcgtcggcaccgggcaaaggaacaacagttcttatgagaaagaaaataggggagtaattgataggatgtgatgctatggatcagactaaggattgtaccagggaattgatcgctaaagcacacaataatgacaaagaggccagagagaagctggtaacagataatcttgggcttatatggaacataattaaaagatttaaggggagaggaacagaacaggaggatctgtttcagataggctgtatagggcttataaaggcaattgataatttcaatctggatatggatgttgcattttcaacatatgcagttcctatgataacaggtgagataagaagattcctgcgggatgacggaatggtaaaggtaagtcgttctataaaagaaaatgcagtaaaaagcatgagagcggcgggacagctccgtgacacgttaggctgtgaaccgacggtagaacagatagcagctgcctgtgagttgtcagttgaagacataacattgtcaatgtctgcatcaatggaggttgaatcaatatataagacaatctatcagggggatggaagtgaggtcatgctgatggacaagttagaagacaaggcagacattggggaaactgcatcaagtaaagtggcacttgcacagcttatggaaacactttcacagcgtgaaaaagagcttatcagaatgcgttattatgatgattacacacagatgcaggttgctaaggagttcggaatatcgcaggtgcaggtgtcgcggatggagaagaagattttaagtggcatgcgcaagcggctgtttgcgtgatagggttcattcggtatatggcagtcccgccgctgtgtccgtctatggcatatgccctcaggatttcttcatctagtgggagtaaatgccgccatctgtatagtttattacggtgcggataaacaaacgcgcttcgcttgaacgagtttatccacaccgcccttttacagacagcggcattaactcccacacgattcgaaataattcgggcgtatgccataggcggacacagcggcggggctgtacagatgttgaatgaacacaaataatcgaaagagctgaaaacagcatctgacaaattagcaattgaagcctgttttagaaccatgccagggcagcggtggggcgtggatggtctgctggcgggatattgaggacacaaatttgtggaataaatctgtccgggggtgccatactagagtgtggagggtttgttatgtcagagaagatttatttgaagattgaccagaaaaggtatgttaagaagcctaaggtcactattggggatgtgatgactgtttattgcagtgataaggatatgattgaaaaaatcggacatataacacttgtggagtttacgctgggcaagtatgaccggaaggtgtttgacgcacttgatgttgtggggattattcagaaggactatccggatgcagatattgaatgtcttggggaatgtgattttgttgttgagtacaagaagccggagaaggaaggcgctgtgcattggcttaaggtggctgttatatgttttataacaatggttggaagcgggtatggaattattgcgtacaacaatgacgtaagtacgacggatatatttgaccggatgtacgagcttcttggagcttctgcatataaggtaacaaatgcaatggagattgcctatgctgtgggattgtttattggaattgttatattttatgatcattttgcaggacaaaagctgtcaaaagcgccaacaccgcttgaggtggaaatggataaatatgacaaagatatatcagaatctgttattgacagggaaggtggaaaatgatagcggttattattcttataggggctatgtcgggagtgtttactgcagcagggctttttgcacttataaccagtgttggtgttattaacagatatgctgatgtcagcggaacaagcgggcatgtattttggtatgaggaatgtataataatcggtgctacagcagctaatgctgtatatgttcttggaatcacggttagaataggaatagctggctgtattatatttgggctgatatccgggatatttataggcacatttttaataagccttgcagagacagttaaagcattgcctatattcgttcacagggcaaaggcgggcaccggtcttggttttattgtggcggcgacagcggcaggaaaagcactaggacagcttgtatattacttatatatgtattgattttgcattgcaaaaagggaggatgtatgcacgatattaattctgaaagcggtaccaaagctgatattgaaaaaagaaatgaaagctataatgcttatgtaaaaaatgttacacctaaaggaagctgtgtggcaaaatgctttaaggcattcattgttggtggctgtatatgtgttgcaggacagattattttaaatgtatgcaagtggatgaaagtgcctgacacggatgcagcatcttatacaacacttatactggtatttttaagtgtgattcttaccggacttaatatttatccgtctataaccacatttggcggagcaggaagtcttgttccgattacaggatttgcaaacagcgttgctgcacctgcgattgagtataagaaggagggccgggtgttcggtattggctgcaagatattcacgattgccggtcctgttattctatatggaatattttttagctggtgtgcaggacttatatatctggctttaaagcttatacatgtactgtgattcttgattaagaaacatctgtatggtagaatcataggaactgttttaaagaaatgcgcaggatacgaggataatatgggaacttttttagaagattattataataaatttaatgaagaaaaaagactgacttcaagacacggacagattgaattccgtacatcgattcattatatacatgagtgtattgaagaattaaagagagaaggcagagagaatataaagattatggatataggtgcaggaacaggcagatacagcgttgcactggctgaggaaggctttgatgtaactgcagttgaactggtaaagcacaatcttggaatattgaaatccaagaattcatcagttaaggcttatcagggcaatgcacttaagttaaagcgtttcgaggatgaaacatttgacataaccctgctgttcgggccgatgtatcatctgttcggacaggaggataaggttaaggcattaaaggaggcggcccgtattacaaggaaaggtggctttattcttgtcgcttatgttatgaacgagtatggtgtaattacatatgcatttaaggaaagacatattaaggagtgtatggaacagggcaggctgacagaggatttccacacgatatcttctgagcaggatctgtatgattatgtgcgacttgaagatattgaaaatgttaatgaagcagcaggatgtgaacgtgtgaagattgtgacaccggatggaccggctaattacataagacagtttgtgaatcagcttgacgaggaggaatacgagatgttttacaggtatcatcttgcaacctgtgaaagagctgatttgcttggtgctgctgcacatacgcttgacataatacgaaaataatacataattaatacatttttggacagactacttataaagactaatggcacatgagtatgtgcggaaacgaggattatgactggaaaacagagtctgttatttgacaaagatgtatatgtgagatgtgctgcaacagtggttggaaagaaagaggctgatggtccgcttggtgaaatgtttgatattgcagtagaagatgatatgtttggaaaaaaaagctgggaggaggctgagagccacattcaggagatggcggttgacaagctgcttattaaaagcggcatggctgtgtcagacatagattatatctatgccggagaccttcttggacagcttattgctacatctttcggacttatgaaatatgaagtaccgatgtttggtctgtacggagcatgttcaacgatgggcgaggcgttatcacttggtgcaatgtgtgttaatgccggatatgcgcaaaatgtaattgcaattgcgtcaagccattttgcaagtgcggaaaagcagttccgttatccgctcgagtatggaaaccagagaccaattgcatctacatggacagttacaggagcaggggcgtatatcgtcggtgataaacctctggataagaaaaaatgtgttctcataaagggcattacaacaggaaagattgttgattacggtgtcaaggattcaatgaatatgggggcctgtatggctccagcagcagcagatcttatagaagctaatttcaaagaccttgatgttgataaggactattacgatgcaatatttacaggcgacttaggagagattggcaacaggatattgtctgagcttctaaaagagaaaggcattgatattgctgacaaactgtatgactgtggaatgcttatatacgaaggggaaactaagtgttcaggtggaagcggctgcggctgcagtgcagttgttcttggaagctgtattatggacaggcttataagaggagaatataaaagagtgctttttgtccctacaggagctttgttatctactgtaagttacaatgaaggaaaaagtgtgccgggtatagcccatggtgtaattcttgaaggaaaggagagttaaagccatggattttgttaaagcatttgtatgcggcggattaatatgtgttcttacacagattcttatggaaaagacaaagcttatgccgggaaggataatggtcattcttgtaacaacaggagttgtacttggagcagttggaatatacgagccgtttgttaaatttgcaggagcgggagcaacagttcctcttacgggatttggcaatgtcttatggaaggggatgaagaaagcaatagatgagcagggatttctggggctgtttacaggtggatttacctcatgtgcagttggagtgtcagcagcacttatatttggatttattgcgtcgcttatatttgaacctaagatgaagaaagaataaaataaaaggatagtggtccaattgaccactatccttttttgatgattaaggctgtttgttagatgacaagccggatgaatcagttttaccagatgtctctgatgaggcagcggttgtttcttgagaattgttcttgttgctgcctgttccggttgtaaccttggaaggcttggtttttgcactgtgaatagtgcataacttagataactcagtatctgtaattgagatatcagcatcccatgtcttgaattcagaaccgtctttatcctcgccaagcttatcagcagaagatttctttctcataatcttagttgtaacacttggacaaccggaagtagcaatatctccggattcattacatattgaaaccttaacatgtgttgtacagtattcagtaggaactgtgtcttcagtgaaatattctgttataacacagtttccttcagggtcctggtcacataagccctcaacaggaagaagccctgacttagagcatacagccgcctctacaataccagatggctgttcataacttccagttggaagattaagattttcatgaattgtctgcataattgtacgccatataacattgtggttgacaacatttccaagctctttggagttatcatcatagcctgcccatattacggctgtgtaatatggagtgaagccacagaaccatctgtcgctgtcgaactgtgttgtacctgtcttacctgctacaggctggcttgaaaagttagctgtacgtgcagtaccgtcagtagcaacagaacgtaatccttggataagaagccagtcagaattctcattaagtaccttatgtgtttctggtacagaattatcgataataatgttgccttctgaatcaagtactttggtgtagtaaataggttttgtgtaagttcctttattagctatggctgcataagcggcacacatatcaatattggaaacacctcgtgtcataccgccaagtgcaagtgattgcacaacatcgtgagcgccgttgattgcatttttaggagaaaccagcgttgaaataccgaatttctcaaggtaattataaccaacctgaggcgtaagctttgaaagaatcttaacagcaggtacattctgtgaaacagtaagagcttctcttaatgtcatcagacctctgtattcaccttttgtaaagttagtaacaagcttggcatcagttcctgaataataataaggagcatcatcaatagcagatgcaagtgaatatgttcctgtatcaagggcaggaccatatacagcaagtggcttgatacttgaacccggctgtcttgcaatgtcattagaagcacggtttaagcttcggttaagagtcttatcacctcgtccgccgaccataactttaacctgtccgttggtctgatccattatagtaaatgatatctggggctgtattgtaaatgtaagtgtctcagcatatatttcaccaccctctttaagaagctcctgcttatatgcttcaacataacttctcgcagcgtcttcatcggtcattgtaagactgaagcgggtatctccaagagtctttgtgtaccagttggccattgaattatgtgaataatatgaaaatgatccatcagtctgctttattgttaaagcataattgatagaaaaatgtgtattatcattgtagttgccaggatcattgatgacatcatcagcaacctgttgcatcattgtgtcctgagttgaataaacccgaagtccgccacgatatataaggcttgtagcctgtgcttctgtataccccttctgtgacataaggtcagaagtaagctggttgataagttcatcaacaaaatatgaataagttgaagttgatgttccggcaagttcaataccttcaagtcttgcatagacatcatcagcaattgcttcgtcatattcttcctgggatatatatccctgctctttcatattgagaaggacctgactctgccggtctttgtttctgtcggcgtgccttattggattaagaccggtaggacttttagtgatggatgcaattacagcacattcactgatagaaagctctgatacatctttgttaaagtatcctctggcagcagcctgtacaccataatatccgttaccaaggttaatggtattaagataattctcaagaatggcatctttagacattactgtttcaagctttacagccagatattgttcctgaacctttcgcttaatcttttcaattgtagattcgttgaaagcattgaaaacattatttttcagaagctgctgtgttattgtacttgcaccttgtgacatctcacctgatgaaagtgtaattgaagcagctcgtaagatacctctcatatcgataccattatgctcatagaaacgctcatcttctatagctataaatgcatgctgcaaatctttaggtatctggtcaattgttacatatgtcctgttagctcctgcagaagaaagcgtctgtatttcattctcatctgaatcatatatcttagttgcaaagccttcaggcgaaacattgacagatgcaatgtcaggggcattctctataattccctgaaaggaacctaatacaaggcatgaaccggaaacaacaacagctatagcagcaactaaagccagttttatgaaaaatatacctaatttggtgcccagcttggtagtagctgaattaagcagttttttcttttgttttatgcctttaccaccataattcatatattgtcctccttaataaagtcatgatattataacataaaaaggtatgacaggcaatcaataaggctgtataataactaaatatacatatataagaaggaatcagataatgaagaagataatatcaggtggaacaggtgaatttacagataagaaatcaagatttatagctaacatttatcatattgaagatgaagatatggcagtgaaaataatagaacagcttagaaagaaatattgggatgcacgacataactgttatgcatatgttttaggaggcaagagcgagatacagagattttcagatgatggtgagccgtcaggcacagcaggtaagccgatactggaagtaattacgggaaatgaatgtggaaactgtctgtgtgttgtgacaagatattttggaggtgttctgcttggaacaggagggcttataagagcgtatactaatgctgccaaggaagcactgtccgtctgcagacttggtgagcttacagagggtgtgcatgcattccttgatgttgattataattatgtgggaaaagtgcagtacatatgtgcacagaatgatataacaatagttaatacagaatatgctgatggtgttacatttgaactgctgatggagaatgcagcaagaaatgttctggagaagaatatgacagagatgtcatcgggaaagatatgcttaagggatatatgcagcatgcagatgtacagggatgatacaggaaaattgtgcagatgatgtctgaaatatgaataaattattaacagtggtaaaaaatcacaatacaatggtcggaatctgcttaaaagagtatataatgtgtaaatgtgatgtaaaataatctaaaaaagtcagggagcatagtgcattttttacataaaaaacaaagattatatgaagaaaaactattctcacaaaataatttttgataaaaaatttgaaaaaatgaaaaaattatgaatgcaggaaatggcataaatactgggttttcacagaaaaagcaaaaaaaatacaataattgttaaaattagccttgttaaaatagtacaaaaatgctaatatatcaatgtctaaaaaacgaaacggggtgagaatccccgcgaaccaaattaaggagggttttaaggtttatgaaaaagacattaaagaagtttgctgcagtaggtttatcacttacttcagttatgggcctcgtagcttgtggctctaacagcggcaaacaggacacaacaaaagcaacagttgattgggctaacgtacagaagccagagcagttcacagttatggttgatggtacagtagttaaggaaactaacggtgcacaggaattctacaagtatcttggcgaccttacaggtcttgatattaagtggattcgtccagaacattctagctactatgattcagttaagaatgcattcgcttcaggcgatatccctgatgtagttcttcttagttcagattaccttgctaacttcgcatctaacggatatctctgggatatgacagatgcttggaatcagtcagcaactaagaactcaggaagacttattgatcaggctgagattattgaatcaggaaatatggtagctggtccagacggagagaaggctctttacggattctcaccagcccgtggtaatggatgctgtacatacatcaagtcatcagctttaacagcagctggatataagccagaggaagttgcatctaagactcttacatatgatgagtattacaagatgcttaaggatatgaaggctgcatcagctaaccagaacttcgttatctcttgttcaggtttcgtagctggtggtaactctggtactccagaagctccatatactaactatcttccagaattctatcagaatgctaacttcacattctactatgatgaagcagctaaggaatacaaggatggattcgctcagcaggatatgaaggatgcccttgcaagacttaagacagctgttgatgatggtattcttgataaggcttctcagaaccagacaacatcagatgctcgtaataagtggaacgctaaggatgcttcaacagcttcttcagtattcacatactgggcaggtacatgggcttatacacttcagaactctatagctgataagacagataagattatcgctattaagcctattaaggagcttggtacatataaggagcgtcttgctactgcttggtgtattacatacaaggcatatgagaatggtaaggctgaaggaatcttcaagtacttcatcgatactatgcttgatggtggagatatccagattgcatggcagtatggtgctaagggaactcactgggatgataaggctgagacagttacagtttacaactcaaagggtgaggttgatgagaagaagactaagacatatgaagaaggtgtattccacttccttacaactccagaagataatacaaagcttatgtctaagaaccacattgataagagcttagctattgctacatttggtgataacacagatccaggtaacaagagcgttgacccacttatcacagagaactatgcaatgttcaatgctaacagcaagcttgagactccactttggaacacagaagtacttagcaacaatatctctgatatcaatactaagagacttgaagttgtttcacaggtagttcttggtgagaagacatatgatgaagctatggctgattacaagaagcaggttggtgctaagtgtgatgcagtagttgagtcattaaacgaaacacttaagaagtaatttaaacaataattattagatgtttatacatcttatgttagtatggcggcgcagagaaatccgcgccgtttatactgacaaaaaaggatttgcttatgaaatttatttaataggcatacgataataattaggaaagaaggtaaaaaaatgcagtgtccatcttgtaacacagagcttcctaagaaagctaaaatatgccctaagtgcggaacagcagtaggaaagccaaaaggaaatattaaattgatggccatcatcggacttattatcatgctcattgccagtcttttacctcttgttcagtcaggagagaagattaaagaaggcgtttatcctacagcatatgctttcagttacatgaatatcagtatgccagtgttatggtatttattcatcgcatgtatcgttgttggtatcattcttattgtagcaagaaaagaattcttttctatcattactacagtaattgcaactgttcttacagttgtttctgtatttgcagttcagtttacacttgttaatggtaaggtagcaggtggtggacttaagtatgttaatgttaaccttacagatattcttaacaatggatataatggcaattcatatcatattggttgtggatttgttgtacttgcaattggtattgttatagcagttgctggatgttttattgatattgttaagcctttcaagaaagatcttcatgttgatgctaagtatctttctaactcattaaatcagagcctcacaaataagatgtattattacagaggcttctaccttatgttcgtgccagttttcgttatgattatgttattcaactactggccaatgcttggtgttcgttattcgttcacaaaatatgttatcgctaatccatactacattggtctgtatcatttccagactatgtttactaacgatatctatttctggcaggcattcagaaacacattaattttgtcattaattaagttgttcttaaatacaggcgcagcagttattatctcacttcttctgaatgagattactaacatgattttcaagaagacagtacagacaattatctatcttcctcatttcatgtcatgggtagttgttgcttcagtatttaagatgttactggctccgtatgatacagctccagtcaactcaattcttataaatatgggtgttattgatagtgcaattgatttcatgaacagtacagcttactggcgtggaacattctatatcatgaatgtttggaaggatacaggttggggaacaatcctcttcttggctacattgtcaggtatcagcccagacctttatgaagcagcccagattgatggtgctaacagattcaagagactgatatacattacattaccagctcttgctaatacaattattacagtattcattcttaaccttgctaaggttatgaacctttttgaatctgtattcgtattgcagtcacctattacatatgctaaatcacaggttttacagacatatgtatatactaagacattcagtggtggtaactcagattatggttatacaactgctgtaggtttatttaagtctttcgttggtatgatcttagttctcggttgtaactgggcaagtaagaaagtacgtggacgaggaattgtataggagggaatagataatgagtgataatcagacactagtttataaaaagaaaaagaaaaaattcaaagtattcccaattgttaatgcaattttattcattatcattgcatgtgcaattatgattcctatttacaaagtaattattacttcaatagatgcatattcatcatatgattttagatggcttcctcagaagttctcttggggtggttaccgtgctattataacaagatcaaacctttatcatccattcttaatctcagttataacaactattgttggtacattcgttggacttttagttgttacacttggtggttatgtattaatccagtgggagatgccaggaagaaacttcttcgcttatatgcttctcttcacaatgattttcgatggtggtatgattcctaagttccttgttatcaagcagttaggattaatcaatactttgtgggcggttattctgccaatggctattaacgtatataacttagtacttatgagaaacttctttgaaggtattccagaatcacttttcgaagcagctcagattgatggatgctcaccaatgggtatcttcttcaagattgtacttcctctttcaaaggcagctcttgcatcaattggtttgatgttcgcagtaagcttctggaatgattatacaaacttcaagttatatattaataagaataatctttacaacttccagattcagttaagaagtatggttgttgatagtgatattcctaatgatggtgctgttaacccaacaacaatttctaatgcagcaactatcgtagctatccttcctttcatgatcatctacccattctgtcagaagtacttcgtacagggtgttaacgtaggtgccgttaaggagtaatgttaatattttgaatttattttggacgagccttaaaaggctcgtccttttttgcgcgagtagcgatgagaatagacagccaaatgcaccagctatgcttgcataggctggtgtttttgactgtctattcgaggagcaccgcgacaacgacagaacgaagttctggagtatgagctgcgagcgcgagtagcgatgagcgataaaactgtacttttatgtgctattaccagtcaaatagtggaataatactgtttaacatgatacaataaaacaaatattggttaggaggaaaaaggcttggataaaagttttgaaattaaaggatacattaataatgtattaaaagaaaccgggcttgaaggagcagatgcatttgataaggcacttcttcttaatgctttaggtaaacttgaagcagcagagcatagtgatgaatataaggatgttattacaggtgaattagagaagcttgtagagaatgataatatcagcataggcgagaatgaccttgtaaattatatgtatggtaatgcatgttacagtgttggaaagaatgatattgctgttaatattgccaaacagacagagacacagccacggacagaatcaggttattttacaggcgcagaaggtggaagatgcttatgtactgcttttaaggctttaagcttctatatgaattatgagactaaagatggtggtaaagaacattataatgatataattgcgcagtataatgcaatatatgcagaatgctttaagaacgcaggagaggcagcacatgatggtgatgttaaggctgtaaaagcacttgcattatttgcagcaggagcagttgatacacttgaagttatggatcaggcattgtatgagatatttgcaagaataagagaaatgtataaagcagcagtttcagttcttaatgatacaattgataatacagattcatggtttgtaaagcttatatatgcatatgcagtattgaaaggatgccgtatgaagcttatacagacagaaaaatatgcatccaaggctgaggaaatctttgaaaaagctactgatatgcatgttgcggataagagcggtgtggctgtatcagcggcatacataacagcttacagtgaatatataagaaacagggattatcaggattacggacgcagcaatggaggtgtattatggagttaaagttagttatcaagacaggaagaagtgctgtagtagaatttgatgacggtggaaagtattattctaaggaagaatacacactcctgattaatggagaagaatatggcaagacggaaaaggttgttacaacaatatatggtcttaagccagatacagaatataagattacagcggtgtatgcaggaaaagaatatggacctgttgaatttaagacggattatgaatatgtaacacttaatgtcagagaatttggtgcgtatggtgatggagagcatgatgatactaatgcaatccagtgtgcgattatggcagctcctaaggattccagagtattagttccagaaggtgtttataagatatcaagcattttcttaaaagataatcttaaccttgagcttgctaaaggagcggtactttcagcatttacagaaagagataagttccctgtattaccgggacagattgagacatacgatgagaaagattattacaaccttggtacatgggaaggcaatcctctggatatgttttcagcaattgtatgtggtatcaactgttcaaatgttacaattacaggtgaaggaactattgatggatgcacaactcacgataactggtggaagaattgtaagataagaaatactgcgtggagaccaagattattctttatcaataactgtagtaatgttactatgcatggaattacagttcagaattcaccatcatggacaatccacccatattttagtaaacatcttaagtttattgatgttaagattcttaatcctgctaattcacacaacacagatggtcttgacccggaaagctgtcaggatgttcttgtgcttggaacatacatttcagttggtgatgactgtatagcaatcaagtcaggcaagatatatatggctcagaaggaaaagactcctacagaggatatgacagtacgccagtgctgtatgagagacggacatggtgcagtaacagtaggaagcgagatagctgcgggagttaaagatgttcatatcagagactgtatgttcatgaatacagacagaggtttaagagttaagacaagaagaggccgtggtaaattatctgtacttgatgatatttcatttgagaatattgatatggataacgttatgacaccatttgttgttaacagcttctatttctgcgatccagatggaaagacagaatatgttggctctaggaagccgcttcctgttgatgacagaacaccttcaatcaagagccttacatttaaggatatcaatgcgaaaaactgccatgttgcaggtgcatatatattcggtctgccagagagtaaagttgagaaacttacatttgagaatattaactttagctatgctaaagatgcaaagccgggggtagcagcaatgatgcttggctgtgatgaagcaagcagacagggacttattgtaagtaatgtagaaaaacttatattaaagaatgtcaatattgagggctgcgatggagaagcaattgtggcagataatgttgataagattgaaagagattagtataaatatacagaaatatgaggaataatcatgaatttacatgcaccaaagggaattgatgttgagaattggttcattgagtgctataggaaacataaggggcatccgttaaagatacttatagggctttataaggggaattataataagttttttcttgcagtattatttttctttataaagcatgcccctgtgtgggtgctgccaattgttacagctaatattattaatgatattacaagtggttcgccagatactgtacagaatattattattcaggcaataattatggttgcattagttgttcttaatgtgccaatgaattatctgtatacaagatataaatcattagcaacaagatatgcagaaacaggacttagaaaagcacttgtaaggaaactgcagcagctttcaatttcgtaccacaaagagacacagtcaggcaggctgcaatcaaagataatgcgagatgtggaagcggttgagacgttgtcaacacagatgtttttaagcatattaaatattgcacttaatattggagttgcactttttgttacagtatcaaagagtcttatagtattcttattctttcttctcactacacctcttgcagcggcaactatggtatttttcagaaatattatgaagaagagaaatactgagttccgtaaggagatggaagagacgtctgcaagggttatggagatggttgaacttattccggttacaagggctcatgcacttgaagaggaagaagtaaccaagatgagcggacagctttttgcagttgcggagaaaggctataagcttgatgttatacaggcattatttggctcggttggatgggcaatattccaggttttccaggttgtgtgtctgggattcacaggatttcttgctttaaagggaagtgttggtcctggagatattacactttaccagagttattttgcaacaatagtaagtcaggtatcatcacttatgtcgcttataccagttattgccaagggagttgagtctgttaattctattggagaagtacttcttgaagaagatattgaatgcaatgacgggaaagaagcacttaaaagtgtagaaggtgagtttgattttaaaaatgtcaggtttgcctataataatacagataaaccagtacttcatgagcttaatcttcatgtcgataaaggacagacgattgcacttgtgggagaatcaggagctggtaaatctacaattctgaaccttgttataggctttaatttcgctacagacggagttgttacaattgatggacatgatatgagagatattgatcttagaacttatagaaagcatctggcagttgtaccacagacatcaatattattctcaggaactataagagataatataacatatggaatagatgatttcgatgaagaagcccttaataaagttgtggacgcagctaatttaagagatcttatagattcacttccggatggattagatacagttgtgggagagcatggtggaaagctttcaggaggacagaggcagcgtgtatcgattgcaagagcacttatgagaaatcctgaagtaatagttcttgatgaggcaacatcagcattagacagtatatctgagaagcttattcaggaggcacttaataatcttactaaagacaggacaacatttatagttgcacacagattatcgactataaagggtgcagacagaatagcggtaatagcagatggtcactgcgttgaatatggaacatatgatgagcttatggaacttaaaggcgaattctatcagatgaaatcaatacagagctaaaaaataaaaggaggcgggaatataacccgtctccttatttatatgcctgtcggttttaattacttattctcagcaaaccagattctgagtgtagagataagcttttccttagaatcaacatctaacttctgtacaatctgcatgatttcattgtcaagagctgtattctggtatgacttgtcaacgcttcctgcaagataatcaagagaaactcctgtaagctctgcataatatgaaagcattcttaatgtcataaggttacggccattctcaacgttacttatgtaaccaggtgtaacctctaatgccttagcaacgtcttcctgtgtaagaccgtgtgcaattcttaacttcttaactttagctcctaaatcgctatccataattcaaacctcctaaaaataattactttttgtttgctctgtaacgagctgtgtgatcaagaatcttcttacggattctaagactctttggtgttacttcaagtaattcgtctgtgtcaatataatccagtgcctgctccaagctaagaattttaggtggaacaagacggagagcctcatcagcacttgaagaacgagtgttggtaagatgctttgtcttgcatacattaacctcaatatcctcagtacgaggattttcgccaacgatcattccggcatataccttctcaccaggtccgatgaagagagtacctctttcctgcgcattgaaaagaccataagtgatagcatcaccgctttcgtaagcaataagagaaccattctttctgtaagaaatgtctcctttgtattcttcatatccttcaaaagaagaattgataataccgttacccttagtatcagtaaggaattcacctctgtatccgataagacctcttgaaggaatagagaactgaagtcttgtgtatccaccgttaattggtgacataccaaggagttcgccctttctctggcttaacttctggataacagatcctgtgcagtcatctggaacatcgatataagcaagttccataggctcaagcttcttacctctctcatctgtgtggtagagtacctcggctttacttactgcaaattcataaccttctcttctcatattctcaataagaactgaaagatgaagctcaccacgtcctgaaaccttaaatgagttctcaacaccaggtgtttcctcaactcttaaactaacatctgtattaagttccttgaaaagtctgtctcttaaatgtcttgaagtaacgaatttaccttctttacctgcaagaggactgtcattaaccatgaagtccatagaaagagtaggttctgaaatcttctggaaaggaatggcaacagggttgttaagtgaacagattgtatcaccgatatgaatatcagcaatacctgatacagcaacaatttcaccgattcctgcttcgttaacttctaccttattaagtccgttaaatgtataaagcttagtaattcttacacgcttcttaacgcttggatcatggtggttaacaatcataacctcctgattaaccttaaggcttccattatcaatcttacctacgccaattctaccaacgaattcgttgtagtcaatagtagagataagcatctgtgtatctgcatcagggtcaccctctggtgcaggaatgttattgacgatacagtcaaagagtggctgcatgtctttcttttcatcattaaggtcagccatagcatagcctgacttagctgaagcaaagatgaatggacagtcaagctgatcttcattagcatcaaggtcaatgaaaagctctaagatctcgtcaataacttcctcaggtcttgcttctggacggtctatcttgttaatacatactataacagaaagattcatgtcaagagctttctgtaaaacaaactttgtctgaggcataacaccttcgaatgcgtcaacaacaagaataacgccgttaaccatcttaagtactcgctcaacctcgccaccgaaatcagcatggccaggagtatcaataatgttaatcttagtatccttatatgtgatagctgtattcttagaaagaatagtgattcctctttctctttcgatatcattggaatccataactcgttcagcgacttcctgattggctctgaaagttccgctctgctttaacagctcatcaacaagggttgtcttaccatgatcaacgtgggcaataattgcaatattacgaatatcttcacgctttgttttcattaataatgtccttcctgaattaaacttaaaatatcttctatgattagcaacttttatattctatcacaatattcttaaaaaacaatactaaatatataaaaattttttcattttttgaacacagattattcaaaaagtttttgtaatatttgcgaaaacgacaacatatacatattagagaaaacaaagcacatgccacaacacattaataataaggtggcaaagaagggagaaatacagaatgcttgataaagtaattgaaaacaacagagtgtgtatcattggagagattgtctcagagttcactttcagccatgaggtctttggagagggcttctatattgctaatgtatcagtgaacagattaagtgatatggtggatgtcataccacttatgatatctgagaggcttattgatgttactaaggattatagaggaatgaagattgaggttgcaggacagttccgttcatataacagacatgaaggaactaagaataagcttgttctctcaatatttgtaagagaattaagattcttagaagatgacgagatgcctgaagagcagtctaagtccaaccagatattccttgatggatatgtatgcaagcctcctatttatagaaaaactccattaggaagagaaattgcagatatattagtggctgtaaacagaccatacggtaagtcggattacataccatgtatagcatggggaagaaatgcaagatttgcaggaggtcttgaagtgggtgcacatcttcaggtcagcggacgtgtacagagcagagagtacactaagaaaataggagaagaagaggttgagagaagagttgcttatgaggtatcagtaagcaagattgaccttgttgaagatgaggaataattaagacaacatttatgttctttagtttaaggatatatattgacataacattatcagagtgatatagtacattaactgtaagggtttcccctgcagcaggtagaggtcgcacgattcaagagtaattatcctgatgtcccggaagacatatgaaggatagtaaaaggggaaagtgccgaagaggattgtttccggagcagtcttactgggcgtaggattaatagttttacgactgtcatcgaatagatggagagctacttaaaggactattactatgatttctttaagagccagtctgtttgagcagattggctcttctatgttgttgagcttctcacatgggtagcgatgagaatagacaggaatcatgtacataataatagctgttaacagcggaaagaaggatggtatgtcagtatttaccggagccggtgtagcgattattacaccaatgaaagctaatggagaagttaattatgataagcttggagaattccttgattaccagattaataactcaacagatgcaattattatctgtggaacaacaggagaggcatcaacacttacacatgaggagcatgtagaaacaatcagatttgctgctgattatgtgaagaaaagagttcctgttattgcaggaacaggttctaactgcacagaaacagctgtatggctttcacaggaagcacagaaggcaggagttgatggatgtcttgtagttacaccatattataataaagcaacacagaagggtcttatccagcactatacagcagttgcgaagtcagtagaccttcctatcattatgtataatgttccaggaagaacaggctgcaatatccagccagagacagcagctaagcttgctaaggatgttgacaatatcgttgctattaaagctgcaacaggtaatcttgcacaggagagcaagacaatggcattagctgagggaagacttgatatgtactcaggtgaagacggacttattgttcctcttatgtcaattggagcaaagggtgtaatttcagtattatctaatgttgctcctaagcagacacatgatatctgcgctacatttgcagctggagatgttgctaaggctgcacagttacagtttaaggcattagagcttgtagatgcattattctgtgaggttaatccaattcctgttaagcatgcacttaaccttatgggatgggatatgggaccactcagaagcccattatgcgagatggaagaggctaaccttgagagattaaagaaagcaatggttaactacggaatactttaattgacaggagaatgaacatgacaagaataattatgcatggctgtaacggccatatgggacaggtcattacaggaatagttgctaacgatgctaatgcacagatagtagcaggaattgaccttcgcgatgacggacataacttatatccggtatttgcttcattagaagaatgtaatgttgaagcagatgttattattgatttcgcatcagctaaggcagaggatacacttgttgactatattaagaaaactaagattcctgctgtaatatgtacaacaggattaagcgatgagcagattgcatcaatcaatgaagcatcaaagagtgttgcaatattacgttcagctaatatgtcacttggaatcaatacattattcaagcttttacaggatgctgccaaagtgtttgcgtcagcaggctttgatattgagatagttgaaaagcaccacaaccagaagcttgatgcgccaagtggaacagctcttgcacttgcagattcaatgaaggaagtgcttgatgatgattatttctacagatatgacagaagccagttaagacagaagcgtgatcctaaggaaatcggaatcagtgccgtaagaggtggaactattgttggagagcatgaagtaatttttgctggagaagacgaggttatagaattcaagcataccgcacattctaaggctgtatttgcaaagggtgcagttgaggctgccaagttccttgcaggaaagccggctggaatgtacgatatgagagatgttattgcagctaagaactagttgtcagaacagttaatataatgatattcaatgcggcttgcttcggcgaagccgcattttttatataatgccacagctgccctgttattgcttgttacattaagtacgagtggaagtgaagcaatgttaaagtagtctttaagaaaatgcttcataaggcatgtaccaatgcctttcccacgaagcttctcatcaacgaatacgccgtatacattgacaaatgtgttctgtgtatcaagataaagaagagccacaggttctttatattccggcagatacataagataatcatcaccctcaagatagtattcggcattgtcaggctctgtagcctgtattgattttaagttaaaatgtgctttatcaagctggtacagatattcgtagaaacatacatcaccacataaagaacagttaagaagttctccacttataggcgcaataagctctaaattgccagcagagctgcttttaagctttctgcaacagatggatagcatattacgaaaatgtcctctatggcgaaaatcaggagctataagacctgaaacttcaacatacccgcattcatcattgataagcagtccaataaagccatacattacaggtgaatctgcatcttcatcaacaagcgcacactggataaagctgtcgttatgggaatcacagtaataaggctcgtagccgtcacatttgttaataagttcttcaagagcattcattaaaatgctgtccagatagtcaatctcaatatatttcatagtggttctccaataaaagtttataaaaatattactttgaaataagaaacatttgtttacaaaagtgtcaaaatgccttactatataaaggtatatacatcagtataacaaaataattgatttatcagcaataggttattgggaggatttacatgggtaaagttgccatacttacagacagtaacagtggaattacacaggctcagtctaaggagcttggagttaaagttataccaatgccgttctttatagatggagaacagtattttgaagatattaatcttacacaggaagagttttacgagaagttaaagcaggatgctgatatatctacttcacagccttctattggtgagatgcaggacgcatttgatgagcttctaaaggaatatgatgaacttgtatatattcctatgtcaagcgggctcagcggaacatgtcagacagctactatggttgctgatgattatgatggaaaggttcaggttgtcaataaccagagaatttctgtaaccatgagacagtctgttcttgatgcgaaggagcttgctaagagaggtaagtctgcggcagagattaaggagattcttgagaaacataagatggaatcaagcatatatattacacttgatactcttaagtacttaaagaagggcggaagaataactcctgcggcagctgctattggaactatgttaaagcttaatcctgtgcttcagattcagggtgagaagctagatgcatttgccaaggcaagaggtaaggcttctgcgaagaagattatgcttaaggcaatgcaggatgatttagatacaagatttgcagagtttgcaaaggatggaaagatgcatatggaggttgcctattcaggtaatcctgaggaggcagaggaatgggctgcgttagttaaagagacttttccgcagtttgatttccacatggatccgctttcactttcagttgcctgccacataggacatggtgcacttgcgatagcgacatctgcttatctgccagaacttgattaatacgaatgataagcctgtgacagcgcatgagttgttgcaggcttttgttatagatacggatatttccgtaatttaatatgaatggaggattgttatgccagcaagaagtgagattgatgataagtttaaatgggctgtgagtgatttatacagctctgatgaagcatgggagaaggattataacagtatacttgaactgactgaccagccaagtgagcttaagggcaggatgggcgagtctgccggcatgctttacaaggcgcttaaggagtatgaacgggtagaatacattactgaaagagtgtatgtgtatgcatttatgaaatattatgaggatacaggcaattcaaagtatcaggaaatatctggaaaagcccagatggctgcgatgaaggtgtcagagaagtatgcatttttagagcctgagcttatatcaatagataccgatgtgcttgataaatatatcagcgaggatgaaaggcttggaatgtataagcattttattgatgactgcctcgcagggaaagagcatacgctttctgaaaaggaggaagcactgcttgccaaggcatcacagatgtcaactgtgcctgatgaggtgttctctaagtttaacaatgctgatgttaagtttggcaaggtgaaaagagagaatggacaggaagatgagctgactaacggcaattttgccacatttatggaaagtcaggacagaaccgtaagaaaggcagcgtttgaggcgttgtataagcagtatggggcatatatcaacacgattgcggcagcgttttatggcaatgtcaagcaggcaatgttttatgcagacgcaaggggctacaagtcaacactgaacatgtatcttgatggttcatttattccggaaaatgtatataagaatcttattaagactgtcaatgacaatcttgacaaaatgtaccgatatgttgatatcaggaagaaggcacttggtgttgacgagctgcatttttatgatatctatgcaccgatggtagaggatattgactggaagataagctatgatgaggctaaggacattgttgtgaaggcacttgcaccaatgggcgaggagtatgtttcacacattaaagaaggcttcaataatggctgggtagatgtgtatgagaataccggcaagcgttcaggggcattttcatggggtgcttatggcacacacccatatgtatttcttaattactcagatacactcaatgatgtttttacggttattcatgagatgggacatgcaatgcacacttattattctaatgcaaaccagccttatatctatgctggatataagatattcgttgcggaggttgcgtcaacctgtaatgaagcgattcttatgcagtatatgttaaagaatactgatgatgagaagaagaaaagatatctgctcaatcatttctttgagcagtttaagggaactctttacagacagactatgtttgcagagtttgagatggaagcgcatgcaaaggctgaacatggtgaggttttatcagcagagagcctttgtgccatgtacaagaaactgaatgagaagtatttcggcccggatatggttattgatgatgagatagcacttgagtgggcaagaataccacatttttacacaccattctacgtataccagtatgcaacaggctattccgctgcaattgcaatatcaactaagatacttgcaggtgatgagcaggttatagcaggttacagaaagttcttgtcaggcggctcttcaatgcaccctattgagcttcttaagctgtgcggaatagatatgacaagaccggatgttgtgcaggaagcactggatgtgttttgggaattactaaaacagtggtaatgcttaatgtgttgtgaatataaagatgattctgggagataattcgtcttccagaatttttttatgggataaatgtaaccattgccggaataatccgtctttaattatgaaagggttaacgcttttaaaaaacagggagtacagacagtaatggatgataaacagataatcaatttattttttcaaagggatgaagatgcaattaaggtggttgatgaaaaatatggttctaagttaaatgcactggcagccaatatactgcaatcaagagaggatgggctggaatgtgtcaatgacacgtatatgaaagcatggaatagcataccgcctgcaagaccagagtatttattcgcatttctggcggcatctgcaagaaatattgcgattgatatgataagaaaaaacaatgcgggaaagagacaggccaaagttgttgaattgacaaaagaactggaagaatgtataggtgatggcggattgcagacacatctggacaaggaagatattggagagatgttatcgcattttcttgaaacagttgataaaaataaaagaattatatttctcaggcggtactggtactcggattcaattaaagatatttcagaaaggatgcagatgagcgaatcagcagtgaaagttactcttcacagaacgagaaaagaattaagaagatatatggaaagcgagggtttatatctatgaaaaaatcagaggcaatggatttatatgaagggcttaatggaattagtccgaaaatgattgatgaagcggaaaaatacaagaaaactgccagcgcggatatcaggcataaaaagagcaataatgtaaagaagataatggcagcaggtcttgtggcagcagcggctgttgctgctgtattgggagtcagagaattgaagccttctgtgacagaaagcgggaaccagagcagtaatcagctggcatcagagcagacaggatataaaattgctcatgtaatgaatgtgtatgcagccgggcttgatgatacatcagaatgtattttttctaatggagagaaaacttccgatatatccggagttgtggctggaatttcaagccaggttggagattcatctgtgatggggcaggttatggctggtataaatgtgacaggcaaagatatcttaaagattaattattctataatgggaaatgattcggatgtgacatataatctggcaaggatgaaagaggttgacaaggacagtcctgaatatcagacatcttctgaaaaattcagaaaaaagacggagaacggctatgattattacattattgaagatatcggggaagagtatgaggagaacggcaacagtcatagcgagggcatacagattgtaaagttctcaaagcatttagaaaaagaatctttgtatcaggaccgtcaggtatacaatgagatggttaaaaatatgtatgaagggattacattaagtgtaactgtgacatatggagacggaacaacagagattgttgatgtgggattcaaagaagtcggtggtggcgacaattcaggaaaagtatcagataaagtggctgtttatgtgaagtgatgagtgacagcgtattattagcagatcttaaacgaagagaaagacatggtgccgggtggagccatgtctttttgcataaataaaggaagccagataaatactgacttccttacaaaataaaagagcgcgagacggggatcgaacccgcgaccccctccttggcaaggaggtgctccaccactgagccactcgcgcaaacacaatcttctcacaagaaaactctcttgcgaacacaaacaagataatacacataaaatattaatctgtcaagtgcaaatttaaaaaagttgaatcttttatgttaatattataatataagagcatgataatatatgttaaataaagatataataggcagaaatctagacataaggagaatacgcgatgctcaatatagaatatggctcatatcagaaattatatgataaatatggagaagattttatatatgatcctgatatgtattttaataatacatatgatgaaaaatggattacatcagatatagcaagaaaaataataaaagatatagataaatcagaagtgcttggagagaattgtatagaaagtccaatacttggacagataagtccaaaagatttatcaggtggagcaaaaacattgatgttaatttataataatccgaatttggttattaatgcttcagcttgtggagataattgtgtaaagtggcttttacagatggctgaagaaaaagatatatttataagattacttcataatatgaactttggaacagcatttacaataaaagttatgaatacaaatcaggttgtacatactatgcctgaattgatacagataaacagtgatatattaagagggcgaagatgatggcagagccagcggcattagaattacatgtgataaaccatgtgtagttcttgaagggaaggactgggagaatgatttaagagaaatcaatcaaagtatagtatttgtggatgaaggggcaaaattcatcaatacagaagaatttgcatcggctataaagaattctgataattattatgtgttgataacaagacaggatttatgtaatttaccatatagtatacatgagatatatgaattgaatacggacaaaataggaaataggatgttttgcaagcagcaacgcatatataaaagtgataacatttcagaaaatgttatggtatcaaatattataacagaggattcaaaaacgggatatgagttttataatgaatatgctatatcacacaatatgatatgcgagcatgcagatggtaaaacaaatgtatctaagagaattataaataaatcaaattcagatgtaacattaattgtggtggatggagcagcgtatggttcagagatgaataatacaatgatattgattaatagtattccagggtacatattatttacaccagaatcatttgaatggttactattgaattcaaacattttaaataagccatatatactggatatactaaaagaaccatataattatattgaaagcagtgagttttttagctgggaaaactattttacagagttgctgaataaagctacaagagaaagcgaagttgttccatacagcaagggcaataataaatccataaggatgttcacaacagagaagaatatgaaaaaaattattgaatcaagtgatttaagatatttgttaaagacatgataaaaagaggaagtcagtatctactggcttcctctttaaaataaaaataaaagagcgcgagacggggatcgaacccgcgaccccctccttggcaaggaggtgctccaccactgagccactcgcgcaaacacaactaagatgataatagaaaaataacattttgtcaacacttttttgaggaaatttacaggaaattttcagaagttttcagaaagatttttaaaattcgaatttctgaaaaattaatatatgggaaaggtcgtcagggatttctatttttttgataatatggtatactttgcatgctgagtagcagaattagaaagaatggagattattatgaatccagcatcaattatgaagcttatgagtgccaagaacaagtttcagaagaaccatccgaagttcgtggcatttcttaacagatgttttgcaggtggtcttaaggaaggaactataattgagattacagttactaatcctggagaggcacctataacatctaatataaaggtacagcagtctgacttagagctgcttgaagaattaaaagaaatgggtagatagtttgcttcgcaaaacaacgcgaaataacaaggaggattggaatgtttgggaatgacaagtccagaaagaacggacttaatattatagttgtaggaggcggtaaggttggtgccactcttgtggagagactcagcagggagaaccatgatgttactcttattgataagaacagggttaagcttgatgcaataacaggtgcatatgatgttatgggagttgagggcaatggtgcaagctttgctgttcagaaagaagccggtattgactcagctgaccttcttatatcggtaactgattctgatgagctgaatcttttatgctgtacacttgcaaagagggctggcagatgtgaggcaattgcaagagtaagaacacctgaatacagtcaggaggctgcatttttaagagacagattaggtctggcaatgattattaatccggaatttgaggctgcaagtgagatagcacgtgtgctttacatgccgacagcacttgagattggaacattcgcacatggacaggcagagatgattaagataaaagtccctgagggtaaccagatgtgtggccatactcttgcggagatatccaaggcttcatcatctaaggttcttatatgtgcagttgagagggatggagaggtgttcattccatcaggacattttattataagggcagatgataagttatctttcattgcatcaagaaagaatgcaaggacatttcttgcaagtgtaggttttcagacacatcaggtcaagagtaccatgattgtcggaggtggaagagttgcatattatcttgcaaaacagcttcttaacatgggaattgatgtaaagattattgagaatgacaaggaacgcgcgttaaagttaagcgaggagctgccgggagctgttattatcaatggtgatggtactgacgagagccttttaagagaagaaggaattgagtatgtggagagctttgttccgcttacaggaatagatgaagagaatgttatgcttacactgtatgcaagaaaggtatctgaagccaaatgtattacgaaaataacaagaatgggattcagcagtgttattaacagtcttgatcttggcagtgtgatttatccaagatatataacatcagaagctatcattgcttatgtaagagctaagaaggagtctatgggaagcaataacatacagaccttgtatcatttgtttgaccagaaggcggaagctatagagtttaacgttgataaggaatcaggagttacgggcaagcagtttatggaacttaagctgaaggataatctgcttatagcacttattaaccgtaatggtaagattattattccaagtggtactgacagccttatggttggagatactgtggttattgtaacaactcatacagggtttgatgctataactgatattcttagataggaaaggctgggaacattgatatgaacagttctatagtaagatatattcttggacatgttttaaagatagaagcggctcttatggtcattcctgtgattgttggcgttatatacagggagaaggcaatatctgcattcttgataacaatggcattatgtgctgtatgtgggattcttatgacaattaaaaagcctgccaatacagttttttatctgaaggaggggtgcgtcacaactgcactcagctggattcttatgagtatatttggctgcctgcctttttttataagcagggaaattccttcatttacagatgcactttttgagacaatatcaggatttacaacaacaggagcaagtatattaagtgaagttgaagggctgtctcagagcattatgttctggagatgctttactcactggattggtggtatgggagttctggtatttctgcttgcagtaatacctcttacaggtggctctaatatcaatcttatgaaagcagagagtccgggaccatcagtgggtaaacttgttcctaagatcagatatacagcaagaatactgtatattatatattttgggatgactgtacttcagacagttcttcttctttttggaggaatgacattccttgatgcacttaatacagcaatgggaacagcaggaacaggtggatttggtatcagaaatgacagctttacaagcttttcaccttatatccagtgggttgtaaccatatttatgatattgtttggagttaatttcaatgcatattatcttattgtcctaagacagtttaagaaggctgttaaagtagaagaggtaagatgttatttcggaattattcttgcagcaacagcaattatatttgttaatatatacagaagtgtaggcgctgttgaacttacactgagacagtcaatgtttcaggttgcatctattataacgacaaccggattttcatcagtagatttcgatatgtggccgtcactgtcaaagtcggtgcttgttgtgcttatgtttgtgggagcatgtgccggaagtacaggtggcggaattaaggtttccaggtttataatagggataaagacaatattcagagagattcagtcatatattcatcctaagagtgttaaggtgattaagacagaaggaaagcctgttgatagtgaaacatgcaggtctgtgagtatatatttcataacatttatcatgatattcacagcgtccttactgctaatatctattgaaggaaaggatattgtgacgaatttcactgcagtagcagcgactattaataatataggcccggggctttcggctgtcggaccgacacagaattttggaagttattctgatttcagcaaatatgtactgatgtttgatatgcttgccggacgactggagttatttccactgataattctgttcacaccttcaatatggaaggatcttgtaaccaagaaggtttctgaaaggaaaatgcgtagaataagaaggggttaagtatgagtaatgtatctgattatttgaaatggagaggtgaccttgattttagccaggcaccatttaatgacgtggacaatttaatacttgcgcagattgcatatgttgattttactgatattgtaccggcaccaggaagtatcgagactattacaattgcggaagcggcagacacattttttgatacccatgatgagaaggagattaagaaatgcaaatctttcataggaaaagctccgtatcttttaagggaggcagcagcaacaaaaagatttggttcacttatacttactaattatgttgattatgtcgatggcggcaaagaagaacagtttgcggcatttcatgtaagaattgataacagacttacgtatattgctttcaggggaactgatgatacacttgtgggctggaaagaggattttaacatgagcttcttatcccctgttccatcgcagaaggatgcggtaagatatattgacacaaccgtgcagcgttcagaaggaaagctgattcttggcggacattccaaaggtggtaatctggcagtatatgcatcagtatttgcaagaccatcagtgaagaaaagaattattactgtttataataatgatggtccgggatttgacagtaattttgtaaagcatccggattatctggcaattctgcctaggattaagagcattgttccttattgttcagttgttggaatgcttcttaatcatgatggggattatgaggttgtaaagagcagccagtcaggtcttatgcagcatgattctatgtcatggcaggttataggaccagattttgagactgagcaggagttaagtcctaagagtaaaaggttaaatgcagcactgagcgcatggatagacgggcttacaagagaacagagggcagaattcgtagatacattattctcactggtaactgcaagtggtgcaaagaacctttcagagataagtacagccaggtttaagaatattaatgccgttcttaagtctttcagggaacttgacaaatcagaacgtgcaatgatacttaagatatttgcttcacttacaggtgagattggaaaagcttataagagcaattaataaggagataaagaatgggacaggttatatcagcaggaatattgttagttgtggttgttgccatatatattgcagtttcatataagcacgaaaaaagcggtcttgggaagggctgtgatggtaattgcggctcatgtggattaagaagctgtaaaactgacaagaagtgaggctttaatgcgtaatacgggggacaggttaaaagaatgccgcattatgaaaggcttatccagaggggaaatgtcagaaatgctgcatgtcagtactgactatcttgcccgtttggagacagggacacaaccggttacatacaggattatagagaaggtggcaaaacttgaaggctggaacagcgattatatcctgcatggaatagataataataatccattttcagagttgcacacactatgccctgatttcaggaaaaaagtttttataagaaatctgctatgtttgtttgacagcatgcttcaattcgggtataagaaagaaagggtagtggcatattaccatagaatgatacttgagattgttaatggaatggaactggatgttccagataatgtgcgtacaggatatacacttacagagataagacggatacatgatatgaataaaaaggacatggcaaatgtgcttggaatatcagagagaagctattgtacattagagaatggtttgtcaagaccagatgtaaagactttacagatagtatatgatatgtatggatttaatgtgcaatattttcttacgcgtaatccacttgattgtgaggctgtaaacaatatatacaggtgttttgatgaacctttaagagattttattatgagacgcatcagggacgactatgatgaaataataattatgaaaggccggacttatggtagagatatatagaacagaccagcaggtattaaatacattgacagatattcaggatggatgctggattaatatggtagatccgacaagcaaggagcttgagcagatagcagaacgctttgaaatagaacctgaggatatctcatcggcacttgatgaagaagaaagttcgcgtataagccttgaagacggatatactgttatacttgtggatattcctacacctgaggtaagacatgagaaaaaaatgtatacaacaattcctcttggtattatccttaaaagtgaagcaataattacagtgtgtaaggtagatacaccgattattaattattttgtaagaaataaggtgaaagagttcagtacaaagaaaaagatgcgttttatatatcagatgcttttccgttcagcttttgtgtatcaggctaatcttcgtcttattgataagaaaagaattgagatagaagagcgggttgatggagatacgtcagatactgatcttattgagcttcatgagttagaatctacacttgtttattttgcaacatctcttcgagctaacagtattgtgttagaaagactcagaagatataaaagacttgagcagtatcctgaagatatggagcttcttgaggatgtcatggtcgagtaccagcaggctatagagatgaccacgatatacagggatgtcattgatggtacaagggaactgatgtcatcagtaattgacagtaagctgaataatgtaatgaaataccttacttcaattacaattgtgatggctattccgacaataatatcaggtatatatggaatgaatgtaggtggagaatggatgccgtttgcaaagacaccttttggatttgagataataagtggaataatacttctgatatgtataatagttttatgggtattaaggaagaagaaaatgctataaaagcagtgtctgtattgattgcaggcactgcttttacttacttatgagtatatattatctgtaatttttctgccagcgtgataccatttctaaagcctcattctcagatgataccttagtaattataaccccatcaagatagatttcgtacacaggaaatttcttggctgtattgccgtgacttacctcaactctgttgtactttacgcgttccattaaaagacctcctcacatttaataatagtgttactaagtaaaaaccaacaatatgttgtattataacatgctttttaataaaaggaaatactatatttggtattggtactaaagtaccaaaaaatttgaattaaacgcactattatacttgtaaaatcgacatgtatataatataatttttataacatgtagaaagattaagtacgtataactaataataaaaaatataagaggtacattaatatgagcgataattatattgctgccagtgagaaatttgagattgttcataagatgagtagaagaatagcatctgttgataagtattgtgttataagtgttgcgaataaagcatttgaagaatattttggagaaattaaggagactcttatagaagtagttgcacctcaggataaagaaagactgatggattttatagagaagtatgatggaacagctaagagcggaatgtttaaatttattaacgcacagggcatagaaagatataatcatttatttgtgtatgaacgaagagctgtgggcaatgggcatatgagagatattgaacttgttgatgttgagtctatagaggaggctaataagagcttaagagatgatgtttctaaacataagatgctgcttgggctggatagagaatatacatttacatataacagagataatggcatattcagtatgtacaggtatgatgttgactcaagagatgtcatatataagtctgatattgatgaatggaagaagcggatgctttcggagggatatattgacgagaatgacaaggaaatctttgctaattttatatcagaagtacgctcttatacgcagacattttctataaaattcagaacaagcatgcgtacatataaaagggtgaaggagactttaagatttaaaggaacagtaatgaataaaagcgatggaagcaggattgtgataggtcgtgttgtccctgaggcagacagccatggcaattataatcagattactgatatgatagaagaattacagtttgattctcttacacatgtgtataacaagaaaactattaccgcatatgctgtaaaatgtctcaaggaagagcagaataacagagttacgatagccgttcttgatgttgaccattttaagaaggttaatgatgtatatggtcacatgtatggtgataaggtgcttgcaagggttggaagaaagcttaaggaagttgtaggcgaagatggagttgtaggacgtatcggcggagatgaatttgttattatattcaatggtattaatgatgagcatgcgttaaggggtatgcttcgtgcgataagaacccagattaagtgggaatttgttgatgattttgaagatttaatgataacatgttctataggagcagcttacagtcctaacaacggacatgagtatgaggaacttttcaggaaagcagattactgtctgtatgtagcgaaagaaaagggaagagacagatatgtattcttcagggatgacctccataaggattcatatgagaattctcttaatgcgaaggataagaatgtcaatgatggcagggaaatgaaggaactcagatttctttcaggcattatggagaatttttcagaagatggcaaagcagctattaaagagcttatacatcatatgtatgatacatttaaactggacagcattaatctttactggggagctaatctgaaccgtgcatactatatgggtgttgagcttggcggttcactgaatgctgattatgttaagacagaaggttttaagaagcttctggatggaaagaatcatgctgctgtgggattcgtcggaaggcagacagaccttgcacctgaatttggaacagacatgagagaaaagagagtgttttctactgtacaatgcataataggttcaccagataatgtgaaaggattgtttactattgaccgttgtaaggagtctgcacagtgggctgaatatgagattgagatggctgttgtaacggcttctcttatcaacattttggctgaaactgaatgtgatgagaattaatatatatagttttttattacaagatattgtgttttcaattgacttgtcaaactatatgttgtataatcaaatctgcttgggaaacagcataaacactgcgtttccagcagatttttttaatgtaaaggaaaatagcctgtattgctgaaagcagtatatacagggatatgatggtctttttgtgagggtttgaagtatgaaaattattaaaagaagtggttcagaggtaacatttgatatcagtaaaattatggatgctgtatcaaaagctaatatggaagttgtccatagtgagagattatcagaggaacagattgagacaatctctaataatgttgagagcatttgtaaagagatgaacaggtctttaagcgttgaagagattcaggatcttgtagagaatcagattatgaatttcagagcattttcagttgcaagaaagtatattacttatcgttataagagagcacttgtgcgtaaatctaattctacagataagcagatattaagccttctggagtgcaataatgaggaagtaaagcaggagaattccaacaagaatcctactgtaaacagtgttcagagagattatatggctggcgaggtaagcaaggatattacaaagagattccttctccctccagatattgtagatgcgcatgagcaggggcttatacatttccatgacgcagattattttgcacagcatatgcataactgctgtcttgtcaatcttgaggatatgttacagaatggaactgtaataagcgagactatgattgagaagccacacagcttttctactgcatgtaatattgcaactcaggcgattgcacagattgcaagttcacagtacggcggacagagtatatctttagcacatcttgcaccatttgtccaggtaagccgtgagaagtttattggacaggtaagagatgagttcgagaaaaccggaatagatgcttccgaagaaaagattagagaggttgcagaacttcgagtaaaggatgaaattaagcgtggtgtacagatgattcagtatcaggttatcactcttatgacaactaatggacaggcaccttttgttactgttttcatgtatcttgatgaggttccggaaggtcagacaagagatgaccttgcacttgttactgaggaagtattaagacagagaatgcagggtgttaagaatgaacagggtgtatatattacaccagcatttcctaagcttatatatgttcttgaggaagataatatccacgaagattccaagtactggtatcttacagaaatagctgcacagtgtacagctaagagaatggttccggattatatatctgaaaagaaaatgaaggaattaaaggttgatgcgaatggcaatggtcagtgttttccatgtatgggatgcagaagcttccttacaccatatattgatccagaaacaggaaagccaaagtattatggaagattcaatcagggtgttgtaactcttaatcttgttgatgttgcatgttcatcaggcaaggatatggataagttctggagtattcttaatgagagacttgacctgtgtaagagagcacttatgtgcagacattacagacttaagggaactccttcagatgttgcgccaattctctggcagaatggagcacttgcaagacttaagaaaggcgagacaattgacaagcttctttatggcggatattcaacaatttcgctcggttatgcaggtctttgcgaatgtacttattacatgaagggtgtaactcatactaatccggagggaacagaatttgccctcaaagtaatgcagtatcttaatgatacatgtaagagatgggcagcagagactaatattgatttctcactttatggaacaccgcttgagtcaacaacttataagttttcaaaatgtttacagaagagatttggtaagattgctggtgtaacagataagaattatataactaacagctatcatgttcatgtaactgagcagataaatgcatttgaaaagttaaaattcgaatcacagttccagaagttatctccaggtggagctatcagttatgttgaggttcctgatatgcagaataacatcccggcagtacttaaggttatgcagtacatttatgataatattatgtatgcagagcttaatactaagagtgattactgtcaggaatgtggttacacaggtcagattcagattataactgatgatgacggaaagcttatatgggagtgtcctaactgcggaaaccgtaatcaggataagatgaatgtcgcaagaagaacttgcggatatatcggaacacagttctggaatcagggaagaactcaggagattaaggagagagtgcttcatctgtaagattaaatataatatggcaggacatggattaataccgtgtcctgccattattattaatattcggaaaaatattcatgattggtcatgccgtataatgctgcgaaaagaattgacaatacaacagccagtattacgaacataacaacaaatccaacgtcattgattgtcattataagtgcgagtattgtccatattgcggtatatacgattttaacaataagattgcgctttatgtgttttggattctgtgttttcttatataatgccatgccaacataagcaaatattgtaattattataagcggtaaagcaaaaagtgctgcatatatagcaattatatataagaaaacagatgctgtgaaagaaagtccaccataaaataaatgccccataaatctatatcctgctgtgtaatcatcaggtgaatagctgccagctttaataatactgccgccggcattgttcataagacctcctgcatatataagtaataatataaatgtggcaataagtaaaacactgaaaacagtgtatatgattgtcagtactttgtcagttccttttgcgaatttcattgtaatctcccctctcaattgatagtaagaatatatcatattaattcattataaacaagaagcgactataataatggaatggaggcatgccgatatataattaaactaatgtgattcccgaaaaggagtttgggacagggttatgacaaggagggcatatgtcacttacgataagaagtacaatgaataatcaggcggctgcacagggaatagataatacagataagaatactgataattcaaagcaaaccaagaacagaaaaacaattaatgcatcggaacttaatctgaagccatataaagacaatcagattgatgccaagaggctccgggcaagaaagcaggcaatgaagcttatatctgacgcatggaaatctgctgataagacagataagaatattgaggatatgaagctcgataagcttaataagcttgatgaaatcacagaacttaagaataaggttagtgatttggagaatgaaaaggaagcataccgtgtggactatggtgtagataaggattcacaggaacagaaagaccttgagctgcttgaaaaatatcagaataaccgttatggttcggctgaggacacattttcaaaggaagaacttgaacgattaaaggaattacagaacactcctcttacagagtatcaggagaaggtacttaagctgaattcatcacagatacattttaaggatgaaattggtcagaaggaacttaagattgcatgcacgacagcttcaattgcacttgccgaaatcgacagggataagtctcaggaaatgctaaaggcacaggactcagcggaccagataataggtgctgttgagggagaggttaagaatctgcttgtaaatgaaggtaaagacaacattgacgacaaggtagaagagaataaggaaaaggctgacgaagcagagaagaaacaggaagaacagcaggaaaagattgacgaaaagcgcaaggaaagaaaagaacaggaagagattattgagggacaggcagaggctgataagttagagatgaatgctagtgtcaaaggcaatgatatcgaccatgtaactgaagctcagaagcagatagtcagaataatgaaagataataagctgcttaatgaggatattaagggaatagatattgatttgaatttctagaaagctgtaaagaaggactatgcatggcgggattgttacataacagccgggttttctgtgcagatggaaagagatatgtcttggtgagatttgtttttcctataagaaaacattttttacatgattaataggtcatttacagtacaatcttaataaaattcaggataatttcctatcagatagtgaattaaagctatttgataggaaaatttgtctttattaagggatgttttgtgaaaataagaaacatttttggaaaatctggtaaggaactacctataagaaatcaaaaatgcaactataaaaaggtatcatataagaatcatataatctgataaactatagaaggtatgccccaccttacagaataaaagtaaggcggggcatacatgtatcaacagagatgactttttattaaagaatctatgcagttagcattgattggagtattagcggtttcaaatgttgctatgaagttccttccaaggatatatcctgaattagcataatcactaatttttttgatggcattacaggcatattctgcattatccataatgccaaaatgttcccatatatattcctgccttgttttaacattaagataggtaaaatccgggtgtgttatgataccagattgcagctgcagaggatattcgtatcgataagggatattatagcgatagagtttgttagctatgataatttcagacttagaccgtacgcgttcaccattatcagtatagtattcagcacagtcaggagtgaatcctaaagaagtatattctgaggctttccagtttgcagtaaaatcttcatctgatacaaaaactggagtaaccatttctttgcggaagctgttaagtgaatcataaatatgctgaatttctgatggattatatttcttaagtatgacttcaagaaagtttaattctttcagcaggcattgttcaattcttaaatcataatctttttgtgcaagttcaattgcaaaattatagttatgctttttgatatatgttcctttggtatcatttacttcaaccttatgataatattggcagccatgagcttttctggcagttcgcagagaaccttcaggagcattagaaattcttccttgtatatcagctagtaaaacagacaattgtgaatgcctgcacataacagactttttaatcgtgtcaggtgctaatgtgtcaacatgttccatattataattctgtatatctcccataaaaatcctccttttgcaattataggtaaaagcgctgtttaataaatatactatataaatatataaaaatcaataact

SEQ ID NO: 8518 - DNA, 872 bp, Unknown
  gut microbiota DNA sequence
gttatacacctcggcatacacaatatcacgcagaaaaatttttatatgacttccggctgtctgtaccatgatatatttttcgtctttttcaagtctggaactcctttttatgttatgaactgcctttgtcacaacctctttaaatttctcatcggaaaatggcttaacaagataatgaaatgctccgacatcaaatgcctgaaaaacatactcctctgctgctgtcacaaaaatgagtatcatatcctcattgtcctgacgaagcatctttgccgtttccatcccatcctttcccggcatctgaatatccagaaaaagaatatccggcttactgccacttgcgatcagttcattacccgataaatatttctctataaccgcatctgacaataacttttttattttttcctccagtatctgaaccatagatacttcatcatcacagatagcaattcgcatattgtcacttccttgcttacatatatttataactattatatcggataagttcttgcaatatctatctggaatgttgtgaaatgacctttttttgttgtgaaaaggggctgtcgctttaacgattgaaaatcgttgaggcgacagcccctccaattacttttaactttccagcttcgtattcatcttccaaagctttccatgccactctgttttcttccacatagcggttttctgactgatttacctcaacccatggctgtggcgaatgaatgatcatcatgaccagataatccagacccattttttccaaagtctcatcaatactcttggctgccgactcattggtcttatgctccgcagcgaccttcgatacgacaaaaagctgctctctcggcacaccacaggttctgaca

SEQ ID NO: 8519 - DNA, 7203 bp, Unknown
  gut microbiota DNA sequence
cgcactgctttccagcttaaaatacctactcaaccgcctgaatttcctgcctgcgtaggtcttttccctgccctctacctgtcctctcactgctttccggcttaaaaaacctactcatccacacaaatttcctgcctgcgtaggtcttttccctgctctcaatctgtcctcgcacagctttccggcttaaaagacctactcaaccgtctgaatttcctgcttgcgtaggtcttttccctgccctctacctgtcctcacactgctttccggcttaaaagacctactcatccacacaaatttcctgcttacgtaggtcttttctctaccctctacctgtcctcgcactgctttccagcttaaaagacctactcaaccacctgaatttcctgcttgcgtaggtcttttctctgctctctacctgtcctcatacagctttccagcttaaaagacctactcaaccgcctgaatttcctgcttgcgtaggtcttttccaaacttcacatattctggcacagttctcagcctatcccagcccaactctccacatatcataacacagctttaagccccaaagtactctccagcttaaaacccatcctacaatatctctgcaagctctgcaaagctctctatcttagcaacatagcaatctttggatacgtctccaaatccatactcagcatatataaaatctatgcccgcatctttggcagactttgcatcgcctgctgtatcaccgacatacacagggttctttaagttgtttctttctataagtatcttattagactcgctctttggcagaaatgtccttccccaacattcagtatctttgaagaaatcggacataaggtgtgctgtaagaaaactttcaatataaccatcctgacaattgctcacaatatacaatggatatttcttgcttagtgtataaagagtttctgcaagctgtggataaagaattccacctctttctgcaagatatccattctcaaatgtacacagctcgtccataagtgcatttcttaccggttcctgttcttgtggaaacagctttgcagctatgtcgtacatcggaagtcccatacagtcattaaggtcagcttccactattggtgttctgtgaatctcttcatgacgagaaagtattatattccacgcctcacatattggctttcttgtatcccacatagtaccgtcaaggtcaaatattattccatcataagatttatcaagcattgttatcctccagatctttatctaattcatcaagcaatgtctttaactgtgtttcctgtgttatatcataaacaattgaaaagcagtctctagccagcttataatctttatcattcatcataagctcaccgactctgtatataattcctattgtcttagagtcaggtcctggttccacctcattcttatcaagtatttcctgcatctgtttaacagaatattccggtgtcttgtcatttaatgcctgctcaagatacttaagttcattatcagcattatctgtcttataatatatattgctgtaggtgtagcacactcttgccgcctcagtattatacctggcaacataataaaatcccatatttctgtaatatcttgccatcgttgcgcggctgcagcaaaatctgtatgcctgctttgtaacatcaagatatctcgacagcatattaagattcttataacattctgcaagaccaagatatgaatcaaggtcaacaggattccagcatatagccttcttaaatgcatcctcagctctgcgaaacttcgataacttcaggcacagactgccataagtcctgtagtactctccaaccggcagctctgtacacagcacatccgtttctggttcaaaataacatgcgtacacataatattccataacatgattaaggcttatatatattggtctgccgtccatgtccgattttttcacaaatgtatcatccatagttccggctttacgctcgtccgtacactcttctattctttcaagtattgcagataatatatctgccgctttgtcataatcacctgaattaaatatcttctcgtaatctgcaaatctgtctttgacatctgcaagcttctttatattcattacttctcctttttagcaggaatttcatatgttcctgtgagtattgcaacgctccgtggctcaacacatacacttctgttattatcatcaatcacagcacctgatacattagaactcatatcaaccttccatgtaccattaatcttaggaagtgcaaagctgtgattctcccagtgcatattatatgcagcatatatcagactgtggtcttcttcatccccatatacgcatgaatacataattcctaaatgcctgtcatatgtattcatctgtgcataccacgcattagttccatgatatgatatatcagggtagccacatgatatcctgtcacttaaagtaagcgactgcggcatatgaagtatcttattattctgtctgaattgtataagagcctttgtccattcaagaatttcttttccctctttagtttccttccagttaacccatgaaagttcactgtcaacacaatacggattattgttaccgttctgtgaattgccaaactcgtctccggcaagtataagcggagtacctgccgacaagaaaacaaatgccagtgcatttttaatctgacgcattcttagttctttaatctttctctttcttgtcgaaccttcctcgccacagttccagctgaaattaaaatcctcgccatccctgttattctcgccattaagctcattatgctttctgtcatagcttacaagatcattaagagtaaatccattgttgttggcaatataattaatacttgcactgtttgcctcattctttcttgatatagctgcaaattctccaagcatattctcgtcaccctttaacaggcggcgcgcaatattctggaaatcattattataattagccatatgcttcttcgttccggttttgccattccagtatacagttataatcttggtatccgctaaaagtgcatcctgtgaaagtgccttaagcgctgactcatcacagtacacatgaactccgtcaatgtgatattcagtaacccagtatcttacacactgcaggataaagcctgtactttcgtcagtaaaaaacatttccataacgacttcaatgccatttctgtgcagttctttaaccacattcttaaattcaactgtataatccctaaacacccccggatgctttgaagcaattgaagaatatgatgccttaggtgcgaaataaaatcctccgacatatccccagtaattaattttccgcgtattcttatccacgctgtaatgtgttccggctccgtattttgacattatagtatcagtcagctgtggaaaacggcctatttcatcaaattcatatgcgggctgtaactcaatagttgtgattccaagttccttaagatatggaatcttgttaattattcctgaaaatgttcctttatctttaaccttagatgttctgcttttagtaaaacctcttacattcatcttatagaatatacagtcgctgtaatcataattaagcggtctgtcatcttcccagtcataatctgccacatcaatcgcagccagatacacatctttctcgtccgtctgtccaaatcttccgcaatccgttatcgcctttgcatatgggtcaagatacattaagccatctatctcatagcagtagaaacatgtatctagcctcctgccagacacatgaactgaaaatatatttccacatttcattgatgaatccaattctatccgttcttttggcttcatatgtgcatcaaaaatcagcagagctgcactgtcgcattctgcctcatatgtaaaattatatccgtccttatatctgctgcatcccataagcatgggatttcctttactaataagcatattccactctccactctatttcttatacaagcccttcatggtattcttatccagcttatagaatctcattataaatattgtcacaatccagcctattatcggaattatgcaatagaaaaatattgtcagaaacttaagctgtggtgtcagcggatcctccacctgcggaaaaactttagaataccctgctatcgcaagtgctattcctacaaatcctgttccaagtgctgaaaatgatttgtcaataaatgaaaacagtgctcccattattcccggcacaaaatgtccactcagtgtatattcataatcagtacaatcggcaatcataggaacgactatattgttagatattgatttcactccgttaagcagcgtaaatactaacaaaaacgccaccgttataaagttaatatgtcttaatgatacatttgtaaggtctgaaaatatcatcataaacataagtatcgtctgaaaaataatagcaagatacgtcgaccttactaatgtcttcttctgtccgcatcgcttggcatgctctatcccaagatatattattcctaagttgggaataccaacaattattccaattataccagccagtggataattctgcatcagtattccataaagcattacaagaactgttgaattaccatataccatctgtgcgaatttgttagatgccgctgcaataacaagcattctgattggcttattatgtttaattatagccgcataatccctgaaatgtatctgctgcttcttatcctcatcaagcttgaagtactttacattatccttgtcccatattccgattacagccagtgctgagcatattccggctgcaataaccactgtgattacgaactctgagaaaagtgcctgtgactggaatgtcttatatttctcaataagatatacagaaacataaaaagcaacaagaccatgcgcgaacattataaatgttgagtcaaaaaatgttatcattggcctctgcttcatgtcattagtaattaccgattgtcctgacttaacaactgctgtctgaaatgtgtatcctattatatatactgaatatacaattataaaatacaatggtcttaaaataactggaacaaggcttgtagtaaagaacagtacaagactgctgattgccattagtaagtatcctataacaatataaggcctgaatttaccatatttcccattagtcttatctataaaataccctattaccggatctgttaccccatcaaatattctcattcccgtaagaataactgaaataagcacaactgaaagacctgctattccattagcataatatgagacatatcccatcatcgcaagaaacagattagttgatgtattattaagagaaaacaagccaatctgccatattctggctctgttctgctctatatgcccatgcttattctccatatattaatcctgccaatacatttgtaataatctctgttacgattatataatcatatgccctcatagtcaaattcaggtatgaagctttcctcagcaacatcaccttcctgaataaatccattattaatcccacagtctattgcataatctaccacagaattatattcttttcttgtcactttacgcgacaggagtggatgtttttttagtctgtcaaatggcgtgtactggctcattatgcttatgtatatatcatctccatatgtatcaataagatactttataaccgctttggaatccttagttgttcccggaagtacaagatgtcttacaattacgccttttttcataatcccgacttcaactcttccgctcttcacgagttcatcatcttctataaagaattccggctttcgggtctgtctgaccatctcatgtattgcagctttagccacatcagcataatctggtgctttcgagtactctgccgaaagcctgctgtctatgtatttcatgtctggaagatacacatccacaagcccgtcaagtatcttaagcgtgctgacattctcatatgcacttgaattgtacacaactggtatgacaagccccttattctttgccttgacaagtgcctctgctacctgcggcacaaaatgtgttgccgtgacaaggttaatgttgttggcacatttgtcctgaagttccagaaaaatgtctgaaagcctctcaattgttatctttttcccaacatgtgctgccgcaatctcagaattctggcagaatatgcaccttaatgtacaccctgaaaagaacactgccccacttccatgttcacctgatatgcatggttcttcccacatatgtagagcggctcttgccgcatatatatcattagtcattccgcaaaagcctttgttaacactcctgtcgacatggcaggctcttgggcatatattacatttcataatttccccttattgcgttattgtttatcaatcaatgaatccagctttgcaagtgcatcgctgattcctcctacttcacatattaaaccttcttcaacagcctgtctacccaccagcactgttcctaagtctttagagagctgtgtggtgtcaaccatcatttcctctactctttctttgcttacactgctgtgagccgcaataaatgatgttatcctgtcagatatccgttcaaaataatcatatgtctgctgaactccgataagtgttccgttcatcctcacaggatgtattatcatggtagctgtaggcacaataaatgaataatctgtactcacagcaagtggcacacctatactatgtgaatcgcctatgattagtgaaactgttggctttttcattgaagcaatcatctctgccagtgccagtcccgcactgacatccccaccaactgtattcataataaaaagcacacctttaatatctttatccatctcaatctccgccagcttaggaagcatatgttcatacttggttgctttgcttgttgcaggaagattatcgtgtccttctatctctccaataattgttatcacctgaagagcatttttcgtgacagcaccatctttataatcattatctgttttttcttcttcagatttgcccatgtccgcctcctgataatattattctctattatggttggcggctggacgaaataatattcacatatttttatattatttttatatttaaagtatttatatttctctttatatatgttattcttttaatataaaataatcataaaaggagatattttata

SEQ ID NO: 8520 - DNA, 3932 bp, Unknown
  gut microbiota DNA sequence
gcgataataaacagtctgtgcaacgcaagccgaagccttccgcttcctgccgaatgtacaatcccccacattccattatcacgctcacccgacagaccgtatattatgaaaaccatcataatcagcgcgaaataaaatgtgtaataataattcacaaaactgcctgccgccttattattaacaagataaagcgatacatcagctaccttttcaaaatccttaccggtctttacaatattattatatgtaaagctgttcttgtcagaaaatatagagaaagtcataagctgctgtgcattagtctgaatctgcttcatatcttcaggatacttctttatatattccaactggctttctatatcccttaataccgtcagaaacagaagctgttccctctcagacagcgccttatatttttccaaaacctcggtctccgcaccaatctgaacatcggactcttccccagtctccgcatcagcctgtacctcagattccacaacagtcccctgcttatccgctttcctgtaacttaatatcccctctatatctgaattcaccgcatttatcgcagcctcaatatcataatcaccataataatcaacacacctctgccgctgcacggtttcaaaccttaactccttaagccctgcgcccttcgtctgctgatatacatacaaagatacatttataaccagtaatgcaataaaaccaatgacaactttcctgttaatcagtctcctaaactcgttcatattccgccctcactgtgtaagcccaacctgcaagcacgctctataagtacactccaaaatcacttaacaggaactatctccacactgccgctaatgctgcttttatcaatatatgacagcttattagagtagcctattaccctaagcaggggtactcttaccgctttccaaagttacccggtaaacctactatttcaccaatttccacaatctggtaggtcttttttacattgtcagttggtttataatgcttctttccatcttaaatgcctactaaatatgtcacatctcacactttagtaggtcttttcctaatatgtctgtaatattagtcgcatcttgtcagctaaaaaacctactattttcacataaatcataaatttagtatgcaattttctttagctgccttaattcccatcaaaatttcttctcaaaatacctactatttcataacattgagcaacattagtaggcttttcaccaacttatgcacttgtttcatatgctatttgacactgccctatatgataaatacttaaccggaattatttcgaatattgctaatatatattttgcattaactactcaagcaatttcctgtcagaacacttaacttatacattatttccctctccacaaataataaattctttcctttcatcaataaatttagagtatattaattaacttccgcctttttaaactcataatttcccagaatatcctttttatctatatatacaagttctcctcccgtttttgcaaaaaacatatatctgtcatctccaaaatatgctgttcctgaattcttgtcgagtgcaattgtattaacaaccgttccatcagttttcagaacgaatatttttctttctatcttcctgctgtaatcagtcgcacttccagccccaccattagacatgtatagataatttccatcatatgacattgtggcacgtactattgtttcatctactttatacagcaatgttgactctgtatcgttaagttttcttgaatacagaccttttccaattacaaaatagaacaatatcccattatcttcatctacataataatccgatatattcttatctgaaatcatacttgcctctcctgtattataatcataacaatacagcagaaatgattcattaatctcatgtttatctctgtctaacgaataagtgaatatcttaaaaaataatttatccccaaaacttcttgctcctgatatagcagcatttttgccttcatatgaaaatgcttcttctgattgtccagtctttaaatctatctttttaataacttcttttccgacttcatcacttgctgtatgtcccagatgatcataagcatatatgcagtcaccatgaaaaaccattgatattgatgtaacaccatcattagcaaacaattctgccacatcttccctcttgcttccatctttctgtattcttacaaccttcgccatacctgcatcaactcttaccatatatatgtatcctttataataatagacaggtgtcgaaagataatccattgaataaaatgcattacaatcagagctgtcatgcgtacaatcaggctttgcacatacagctatagacttctttgcagtatcatcaaaatatctcaaagtagttccatcaatatcatatgtgagataataataaccatcctctgatttggcaattccgtgaatatccggattccaatagctctgttcatctgtttcttcgctgctcttgcctaagtttattgacttttccttctttcccctcaccattatcaacgcaactgataatgaaaccacacagattacagccccaataattattattgaaattttcttttttgacataaaagcacctctccaaaataatatatggcttatacatagctttgaatgtacaagccacatattaattataattcatgtattactcatgtaaacttaaattagcatatgtactacctgtatcagagcacacaaagtatctagcatatgattcaacagttatatatgcgacctgtctgcctgcgccaatactatatccatgctggtcagatgctgagaaagtatatttattagcataagcatcatcataacctaacgaatctgttacatacccaattaaagatatctcagattcatcatctgcatccaaatatgcatatgctgagaaatcgtccatctttaacatatacaagaatcttgtatcccctgcatatgtatgattacttgttgtttcatgataacctgcatatgcatacatatttccagtcataaatacagcaatcaccatacccattgccaatatcttttctaaaaaagcttttttcataattactccattctaaagcatttaaaccatggcaaatatatcttttctatcattcaacactatatttgtctcataaaattatctgtgatgctccaacacaaacaatttcacatttcaatatcatctcaaaattgtttacaagttacaattattccccaattaccgcctcctatcaaacatggtacctgcattacaaccataattattattcctagaaacatacaaatagtaacaatttcttttccagctatatctgctatgattctgttatctgactgagttggagaaaatattgcattgatatatctaatatcaacgcctttagttacctttgtgcatttgttatgcacacctacttcttctctttcttctttaacacatcaggctctttaggctaatacatactaagaaacgaggcagaattaacagaagccttagctgttttcttagctgcctctgccattcctttaagaatcctcttcatgaaatctaccctcctttcgtacccccaataacagcaatagtcctattatcagaagcattgtattaatatacaggcttatccggcataagaatgagtatttaccatatcttataaccacacctataatattcaatataaaagctataagcatagacactatcccaagcactgcacttacaaccatatatttttctttctgttccatcataagcttcttgttatgatgctctaatggagcattaagaacaattataagatatccagctaaagctataagccatgtgatgataatagtttctcgtatatacacttggattcttagcatcagcaacgaaatcagatacactccac

SEQ ID NO: 8521 - DNA, 434 bp, Unknown
  gut microbiota DNA sequence
actgcaaatacagcaaacatcataaccagccttacaatcaatcgtattacaataaatgttccaatagaaatatttagtccgcagtccctcataaatgtaagactcataagcggtgcttctgtatatggcatgccataataattctgcaaatatatcatatcaattccatacacaataaaatacaaaactatacagagtgccagagaagcggcaattctcttaatcttaaccgtattctttccgctcgcagcattgacaatatacttagttcctgtgcttgtctcaattccgatattctctgatacaataagcacaacagacgcaagcagagccataagaagcacaatctcccttgcctttccatacttgccgaatatttcctcgtatcctctgtccgacatcatatatccgtcaattccagtctcttccttaag

SEQ ID NO: 8522 - DNA, 19616 bp, Unknown
  gut microbiota DNA sequence
aaaataattttttaaaaaaaaaatgtagaaaaacaattctatatataataataatatacaaaatagcatagttttaagccatattttttatgaaaatgaacaaatttactccaaaaatgtctacattttattaatttactccaaatatatctacactcttacagagaagtagagctgatttactccaaaaatatctacattttttagcatcaggttacatagtaatattgattatttcgttaaaatttatcaaaatgccttaaataggggagtagagcatattttttacactaaaaattaaaaataaacgacaaaatatgaataaatcgcatggttgaggcaaataaaaaaaggataattgaaaataatcaattatcctccagtaatctacatcaattttttaaatgcgaaaatgtagacatttatccaagggtgtcaatcaacagtcctttgtcatttttatcattgtcagaattaagatcttctatttcagcatcagacaacggcaggaaagttatgataaatacaccattctttaattcaaacttttctattgcaatatggttatcaacaaactcctgaagactttcctggataagctgcagattcttctttttgttcttcaacttgaatcttacaatcttctggaagtatgtataactgtattcattaactcttgtttcctgattagcaatctgttcacgttttatcgcatagcatataatctttgaaagattattatcaagaacatcataagaagcagaagtaatggagataagcttcttctgaataattgcgttgcttagaatttctccaaattgtgctatggcatatgggcgttcagcatcttctttaataacaatattatcgaacaggttgaaatatatcttactgccttcagcttcataagagaagttatactctacaagttttcggcaggaattacttatcttgttaagaacgttcttacctacatgataatctacaacctctttacccagggtattaagatcgacaacaacagatttctctttagagaattcctgcatgttaatattagagataaatgcattgaccagcttaaggtcatcagtatccatagactttggtggtgttagcttaccattatccacagtaacctctaacagttcatctccatcatcatctgtgataatttcctttaacaaattattggaagctgtttccatcatcagagtaaaagaagatgggctgaataatggtttatcaacaaggtcaacaggatacattcttaggtaagaatcaatgttaccagcaagttcactttctatatacttccatgcacttataattagatcattcttaagagaattatatattgaattattagtgaaagagtagagtccgggaaaatcaatcaaaagacttccggaatcattcttccattcattagcagcttcttttttatctttgataatatcatcaagttctttatctccataaagtttagcatactcgtcaggtcttaatgacctggccagagaaataaaactagcaagaggatgtttgggatcatccagattcatattatcaatatcgttattgtatgccttataccatctggcacgtttctgaagacgcgacttttttatcttgtttataattggcattaaatcttcacggctcgtcttgccttcaagatactccatcagtgtttcgtctataagctctgcagcattatcagtaggaaagttcataagatttttctttttattgaaaaattcaagaatcgttgggttgatatgctttgcgagctcttctataaatcgcctagaatactgttccatattagctccttcaatgtaaatataaatacattatacggactttcgacataaaaagcaaatgtgaactgagttcagtcaggaagcttttcttaattattttgggttttgttttattttattttgattttttggtggagggatggtattatttgtatatgatttaaacatatgtcgtcatatatgaccaaactatactacaccactgcttttgagaaagggtaacatatgatttcagcaaaattcgaagatgagatatggatatatttccagacaaatttacgtgcaagaacacgaaaagaatattggaatgttataaggagctttgataaattaacaggacacgacccacttaaattaacaagaaaagaggcaatgaattattacaacagccttatagagaaagttaactctggcagactgtcatataatactgcagtaatgcgtctttcagttatgaaatctgtatgcacatttatagaaacttatactattaatcatggcaaacgatatgttaatcattttgaaagtatgtctcttccagaacaggataaaatattgccaaaagatgcaatacctgatactaaagaaattgataatcttctgagtgcggcattagatgccaatgacaataaagcatttctaatattttcacttgtaattaagatggggcttaccaatcaggaaatatgtaatctgaacaaagaatatatatgccgaaatcagacaggacacctatgtattaatatgccaccaaagaatcatataagcagatttcttattatacctgatgaccttggtacaattcttgatacatatattgtggctgaaaatatacagagcggcgcattatttacaaatatacgaaaaaaccgtattaaaatgcgcgatacagaacgtcttcttgcttcatacacagataagcttgtgaaagccaaaaaattgcgaaagcattatacaatgcagacacttcgtcatgcagctataagctatatgctaatgggaggagcatctaaagatgaagttgcttcatacactggagtaacaggaaaatggatgaacagatatgataaaataatagctgacaatgtaataaatgtagctgctaattataatgtaattaatatcaacccttctaaaattgacaaaaatgtatttgaataactataattacacaatgaataaaattcataactgtggattatacaaaaacatgtcaggagggatattatgatatataaaccatacaaacatctggttcagtattatgaaacagaccagatgggaatagttcatcattctaattacataagatggtttgaggaagcaaggtcatttctacttgaagaaaatggctttggctataagaaaatggaagaatcaggcataataagtcctgtattatcagttaatgccagatataagtctatgactcattactatgatactgttattattaatgtcaaggttattaaatacaatggtgtaaagattacgcttgaatatactgtgattgatgaaaagactggagaagtaagatgtactggcgaaagtgaacactgcttccttgatacatcaggatgtcctgtatcattaaaaagatctttaccagaattaaatgtaatgtttattaatatgacagaaaattaataatattcataaaccgcgatatagcaatttactataccgcggtttattatttacatatacatatattacttagataagactctcataaagctttgtaatctcttctacgcttgtttctcttggattacctggacggcatgcatcatcatatgctgactgtgcaaggaatggaatatcctctgacttaacaatatccttaagatcagcaggaattccaacatcagcagcaagcttcttaacagcatcaatagcagcttttctgtattcatcctgagtcatcttttctgtgccttcaacacccattgccttggcaatatcacgatacttttcaccagtagcaggtgcattatactccatacctgttggaagaataatagcattagctacaccatgtggtgtatcataaagtgctccaagtggatgagccatagaatgaacaataccaagacctacattagaaaatcccataccagctatgtactgacctaaagccattccttctcttccttcaggagtattatcaactgcacctcttaaactcttggcaataatctcaattgcctttagatggaacatatcagataattcccatgcaccagcagtaatataaccctcaatagcatgtgtaagagcatccataccggtagcagcagtaagacccttaggcatgcttgacatcatatcaggatctacaacagcaacaacaggaatatcatgaggatctacacataccatcttacgattcttctctgcatcagtaatcacataattaatggtaacttctgcggctgtaccagctgtagtaggaactgcaataataggaactgccggattctttgtatcagcaacaccctcaagacttcttacatcagcaaactcaggattgttgattataataccgattgccttggctgtatccatagaagaaccaccaccaatagctatcagataatctgttcccgcattcttgaatgcttctacacctgtctgtacattctcaattgttggattaggcttgatgttagaatataattcataagaaaaaccattatcatcaagaaccttaagaacctttgctgtcacaccaaacttaacaagatcaggatcagagcatacaaatgctttcttaaaccctcttgacttaacttctgttgcaatctcctggattgcacctgctccatgataagaagttccattcaaaataaatctctgtgccataaaaacgcctccataaatataaaattgttcacttttaaaagttgactatattttactactatgacaaaataataacaagttgattttataaaaaaagcataataaaatcatgatttcttataaacaattaccatttaacttctgtcagataaatgttatacttataacaattgattttatgcaatttattaatttcagaacaagaaagagaggtacaaattatgaatatatcagataaaataaaatacatcggagttgatgatacaacaatagatctttttgaaagccagtatgctgttccagatggtgtttcatataactcatatgtaattcttgatgacaaaacagccattatggatactgtcgacaagcgtggaatgaaagactgggaaaacaatcttcttaatgctctggatggaaggaatgctgattatgtaattatacagcatatggaacctgaccatgctggaagccttgccagacttattgaacttttccctgaaatcactgtagtaggtaatgccaagacatttgtaatgattaaccagttctttgagaatattaacattaagaattctcttactgttaaagaaggagatactcttaatcttggttcccacactcttacttttgtcatggcgccaatggttcactggcctgaggttatggtaacttatgaaagcagtgagaaggttctgttctcagctgatgggtttggaaaatttggggctctgtcgcttactgagaatgcggactgggcatgtgaagcaagaagatattattttaacatagttggtaaatatggtgctcctgtccagaccttacttaaaaaagcttcggcacttgatattaagactatatgtccattacatggtcctgtattatcagataacctcggatattaccttgacttatataacacatggagcagttatcagccagaaagcaaaggtgtatttatagcctatgcttcaattcatggcaatactgcatatgctgccgaacaatttgcagaaatgcttcgcaacaaaggcgttgataatgttgttattactgacctttcaagatgtgatattgctgaggcagtaaaagatgcattcagatatgacagaatggttctggctgccgcaagttatgatgcaggtgtattcccaattatgcaggattttcttcatcaccttcaggcaaaagcattccagaacagaacagtaggacttattgagaatggctcatgggcacctacagctgcaaaaacaatgcgaaacatacttgaaacaatgaaaaatataacaattgttgaacctgttgtcacaattaaatcagttcttaaagaaactgatattcctgcattagaccagcttgctgatgcacttaaataagtatttcttcattatgataatgaaataacaatatagttaaagagggtgtttttatgaacaatttcgctgttataacaaaagctgaacaggacgttgctaaagcaaaagcacatttatctgtccttaaacagaagattaacgatagtaaagctaagcttgaagaagcaaagaaagattatgatgataatatcaacgcagtatcatcagataattctggtattcatgaatatatactttcggttgatcttataaaagttgaattgaataaagcagaggcatcccttttgtcacttaaagatgagattaataatgctaaagaagcttctaaaaaagcatcagaagttcattctgcggctaaacagaagacaattgaaatgggagacagattctataatataaaaaagaaagctgatacttttaaagacagtatcagcaaagtagaagagaatctcaatgcaaaaaaagccgtatatgatgagtatattgatgcggctgataaatcacaggataagatagacgaagcaaaagccctgcttaaagaattggaagataaatataataaggctgtagcttctattcaggatttacaggaagaatacaatcgtaattcttcattaatatcaggcagaaagacgatgcttgaaaaagcagaggctgaagaagctgataagaaaaaagactatgaacagattcattcaattgaaacaattaaaaaagttgcatatgaccgtacaatagaggcacaaaaccgccttaagccggcgtatgatgaagctgttaacgcagagaaatatgcaaaagaagaatatgaagatgctgcaaaattattagaagaagcacatactgcatatgacaatgctgtcaatgatgaagctgctaaagaaaaaaaatataactcgcaggtagatattggcagagattctcacaattatgactatgatgctgtgcttgataatcttagagctgaagaaaagagcatttcattaataactgattttacaattaataatcccgatattcaggattattgcaagcacctgattctttataatctgacagtacatgattacaaagacatatcatttggagaatggattgttaatcttaagggattatccggacttgcatatataccggtaagtttcacaaaaaatggtatctctgataaaactaattattcatgtgaatgcaaaaaaacttctgataacagaattgatatatgtgaatgtgacatatcagacatgtcgcatattattaagaaaccattctttactgaaaaggattttttgaatggaacagatctttaccagttaagcctgaaatctattcaggatgatattaataatgcagaaattgcctataacaaagcaaaaacaaccacagataatgcagctgcaactttagaaacgcgaaaagccgcagttcctggtcttaagacagaatacgaaaaagctgtaaaaaatgctgaatcaataaaaatgaattttaatacacagcgtgctatggtaaatcgttctaaaactgaatatgatgaaacggccaaagctgctgctgctgcatataaaatctatgaacagtataaacagaaagctgatgcattattagaagaatataacagagtaacttctacaacctcttcaattaatatagaatatgaaaatgccagaaaaagtgtagataaaatacttaatgatattgacaatgccaaagatcatataaaaaaacttgaagcatttgatgaggattcagcttctgttcttaataatgcaaagcttgaatatgagaacgctaaagcacaatatgatgaagtcattgctgcacaacagaatgctgcagcaaatatgcctcaggttaaggatgaacttaacaaatgtattgctgatgaagaagctaagaaaaaagcaatggaagatgctcttgcagatgagatgaatatccacaagaaaatcaaccagacaaaagaaaacatcaatcagatacgctttaaactacatgaagctgaagaaaaacttggtaaagcccaggctaattctgatgaaaaaggacgtacttctgaatcattaaaacttgcatatgacaatgctaaaactgaatacgaaaaaaccaattatacatatacccaaagcagcagcatatgtaaccagctttctaaagtattctacaaattaaattatgaagcaacaagaagtgattataataaagctgattatgattctgcaaaatcagcatatgactctgcacttaatgaattcagtaaattaacaggtttaacatttaattatactgatgaaacagatactactatagatgaggtatctgataaatcttctgatacaaaggaaaaagggctgctatctaaattctttgggtcaagaaaaaaataacatataatgacaactatataacaggatggactaattaatgctttcaacaattgaatcaataaacagcgtaatcaataactttatctggggacttcctgcaatgatatgtattatcggcgtaggaattgtcttaagtgtaaaaaccagatttatccagataaggaaatttccttatgcaatgaaaataactatcgggcgcatgcttaagaagcgtaaagcttctgacggcgcccttacgccatttcaggctgtctgtacagctttagcagcaactgtaggtaccggtaatatagccggtgttgctggagcaattgcaattggtggtcctggggctgtattctggatgtggatatccgcaatacttggaatgtgtactaaattctccgaagtagttcttgctgtgcatttcagagaaactaataataatggtgagcttgttggcggtccgatgtactatattaaaaatggtcttaataagcactggcactggcttgcttatttattctcagcactcggtgttctcactgtatttggaacaggtaatgcaacacaggtaaataccataacagctgctttagattcagcattaattaattataacataatatctgctgattcaactcatgtgattaatcttataatcggaataataattatgatacttattgcacttataatgattggtggaataaaaagaattggcagagttacagaaaaactcataccatttatggctgtgttatatataattcttgccatcggagttgtacttattaatattaataatgttcctgctgtatttaaatcaatatttcaaggtgcattttctcctgcatcagttactggtggtgcagttggaagcttctttatgagtatgaaaaaaggagtatcaaggggcatcttttctaatgaagccggtcttggtaccgggtctattgcacatgcatgtgctgatacaagtaaacccgtaaagcagggctttttcggaatatttgaagtatttgtagatacaattgtaatatgtacactgactgctcttgttatattatgtagtggtgttccggtaggatatggtcaggctgctggtgcagaacttacaatatcaggctttacatctacatatggaggctgggtatcaatatttacagctgttgcaatgtgctgttttgccttttcaacagttataggatggggactctatggacaaagatgcatagaattcctttttggtcctaaagcaactaaaccattcatggctgcttactcacttgttgctgtagttggtgcaacaatgaatttaggtctaatgtggagcattgctgaaacttttaacgggcttatggtgattcctaatctaatagcagtattcctgctttcaaacaccgttgtacagcttttaaaagattattttaatggagaaggtaaaataaaatgaagaatattttactgatagctactggcggcacaattgcttcaaaagataatggcaatggtcttacgccatcaattgatgttaatattttacttgactatattccggtaatcagacaaaaatgccatgttaccggaatatcattaatgaatatcgatagtagtaatatggatacagttcacattagttccatttcagaatgcatcatgaacaattataatgactatgatggatttgttataacacatggaacagatacttgtgcttacactgcagctgcattatcatatcagcttattaatctttcaaagcctgtcattcttaccggctcacagttacccattgatgtagaaaaaactgatgccgtcatgaatttaacaaatgcatttatttattcatgtgaagacatttctggagtatttcttgcattttctgaaaaacttataaaaggaacatgtgctaagaaaatcaagacaaaaagttttgatgcatttgaaagtattaattttccatatattgcaacaatcagaaacaatatcgttgaatataacattaatacatttgaaaatataatgacatcaggcaatggatttcatatcaaaactgatatgtgtactgatatagcagttatcacactttttcctggaatgaattataatatttttgattatcttaattcatcgtgccgaggcgtaattattgaaggttttggtattggaggaatgccagataatattatagaatacattcacagacttacaactaatggcatatgtgttgttattacaactcaatgtctctatgaaggtgttaattgggagatatatgaagtcgggcgtaatcttgcaaaggaaaatgtcataaatggaaaatccatgacaattgaaaaccttacaatgaaactcatgtggtcgctggcacattataaaaacattactgatgtaaaaaattttatggaaaaggagttataacaatatgcttacagaacaaagacacgaaataattcttaatctactatctgaaaagggaagcattaccgtaactgaacttaaagacattctcaatacttctgaatcaacaataagacgtgatcttaatacacttgatgaacagggccggcttaccaaggtatttggaggagctgttgaaaagatcaatggtgtatctactaccgaattatccgtttcacaaaaagctgatgtaaacacagaagaaaagaaaaaaattgcaatgtatgctgcaagacttgtagtacctaatgatttcatatatattgatgctggaactactactgaatatctgattgattatcttgaagaaaagaatgcaacatatgttaccaacgcagtaacacatgcaagaaaacttgcaattgcaggctttaaggtaatactaattggcggtgaacttaaaggattaacagaagctgttgtaggaaatcaggcaattattacaatcgacagaatgaattttaataaaggattttttggaactaatggtattaccgaaaaatcaggttttactacacctgatattaatgaagcactcgttaaggaaactgcattcaaccactgtcacttcaagtatattcttgctgacagctcaaagttcggagagacaagtgccgtaacatttggtaatataggagaagccacaatacttacagacaaaaaaattggcagctttgcaaagctgccaaacataataacagtataattatatctgatattatagcacgctggcaatgattttacttataataagaacaaagttcctatcataatcattccagcggcttttatgattaaacacatcgtagaagaaatagtatcttctatatttaaattcaaaccatgcactgatgaaagccattatattactgtctgataactcattatataattccttatgccatgcctccacagatgaaacaataccgattgacatagaattattcttattatatctagataaaaatgccttatcattaagaatattcgtcatatccggcattctcttatattcaccacaagaatatataagctcggaattatcattatatattctcagtccatcaatctcaaactgctctaaaatattattggcaacatcatcaatcgcatcttttcctctggatacaagttcaagaattatgtcagataccacgcctgacatatattctgaatgatcagacaaatcaagaattttatgaatatgcctgctattattctcaagtgaaccatgcttgctttcattatatataataaatctgtttcgtcctttttcttttgcaaggtacaggcatttatcaacttttctgaaaagttcctcgtaatccgttccatctttaggaaacagacttacaccaacagaaagagtaactccaaaatcttcaattctgctgtcaaatgcatattgtaattccttacgcatagttgtaagaagaatcctcaaatcctcttcgtctttaatattattagtgaatatatagaattcatctcctccaaatcttccagcaattcctcgtccattaaggttagcattaataatgcctgctatcttacttaatacttcatcgccaaaaagatgaccatatgtatcattaatgctcttgaaattatcaacatcaaacataatcatataatgaatcttatcatctttggatgcaattaccgatttagtatattccatgcatgcacgtttattaagaagtccagtggcagaatcaacagcttcacttgttgcataataaggaataacatccgaaacacatccatcaacagtctcaagataacctgcaacaacagacgttttatttgttgaaaacaggctgtcaccattcactttaaacttgtacagttcatcgttatgctcatcaagcggcagataaaccatacagctgaacatattagaaccattctttaaataattataaaatgtagcaaactccttacgctctgaatcagaccttaatattcttaacattctttccctaaactgttccagagttcccttaataggtgcattgcactgattaccacggtacagatatattgtaaacatatccgtgtaagaattgtaatcaaataaataatttctgtatgtagaaagtattgtcctgtacttattgacattgtccaaagccataagatacctgctctcaactgctgaaagaaaataacatctgacttcaattacattctcacctgacagaatcttcccattattagaaatcaccatatctgtccagtaatattcaccaataccatttcttaacagaatcagcattctacaattctcacctggcttaagcgtctcaaaagccatcttaaaatccttaagattatcctgatgaacaatatcaagaaaattaataccaacaagtttttctacaaaatgatagaaatgttcatccgcattaataacttcataatttcttctgattaaaacatcacaatatgcaacacaattctcttttccaaaatgattctctgatataatcatagttcacttctccatcctgatatattattataattgtaacacgaatataacgaattatctagtgaaaaatatattaacttatatatgtatatttacttgaaaaacacattttgaaaatgtattctattagtacatttagcacatacatcagggggtatatatggagtacaaagtagcattatgtgacgatgacgaaaaaattgccagcaagataatggaggcatttaataatgaacttcatgcacataatcttgaagccacaattgattactattcatcagggaatgtattaattgaggctgtaaaagaaaagcattataatctcgccttgcttgatatagacatgactccgcttaacggatttgacacagcacaatctatatgttccatttcatcagatacaagaatagttttcgtaacttcacatgaggaacttgtatttgatacatttgaatatacaccattctactttatcagaaagaaatattatgaaaccggtgtgaaaaagcttgtaaacaaacttacacatacagacctgctcaccacttcggttcatcttgaaaagaacggttcaattacaagcattgactctgtaagtatcaagtacgcggtcagtcaggatcatatgctcaatatatatacaacctctggaaattatcagcttaggaaaaagctttcagaccttgaaagtgagcttgccggatataatttcataagagtacataaaagctgcctgattaactacatgcatgtaagaagattcgatgctgtcagttcagaagttgttatgaaagacggcttcaggataaaagtcgggcgctcctataaagatacatttaagaaaggctttgtacagtaccgccgtacaatgtaagacaacatactatgtttccatacatttcatttaattattcgcaatacattcttttactgactgtagcaataatattttacaataattcgcttaatataatcggcaaaaagaagagagtatatccatatataatccagcttattgtaacgattgcagtaccgctgcttacatatcaggcacagaaaatgctttcgatatattcatatccggtaatgccatatgtcatattctcacttataatatatgttctgttaattattgtccttaaatcatttgcgtcaataagaaacggcatgtttaatattcgtgatatcataattcttgcattgactttgattaccgtatgtgccgtatttacagtgactatgaaaatgcagcttacatcaggcagcctgctgattcttcttttattgtgcatactgatatttcttatatacgaactggctttgtcactatatatggcaaacagcaataaaaaatatgcagacaaacttcaggagcagttaacatctggcgaagattacatcaaaaatgtaagtatgcttgaccgtcagatacgctcgataaaacatgacatgaacaatcagcttcaggtgttaagcgggcttattaataacggacaatttaatgaagcatcagattttttaaaacagtacggtatcggtcttgaaaaaacaattgattatattaacaccaataatcctgtcatcaacacattaattaacagcaaaattgcatatgccaaaagtgaaaatataataacggcaattgatattaccaaggacatcaagcctatgaccggtaacgacctgtgttctattattggaaatgtgatagataacgcaatagaagcagagcttcacgaggaagagtctctgcgtcagcttcatattcaggcatactgggacgatgaagaaatggtattccatgtaagcaattacattaataaaacagttcttgacaggaactctggtcttgccacaaccaaggaggataagaactcccatggtctcggaactaacattgtaaaatcacttgctaaaaggaattatggaacatgtgattattacgaaacagagaatgaatttcactgtgaaatacgatggtagaatgcatatttaaacacattttcgcaactatactaataaaatatgtaacttacgtcgttaaacatgcatcttacgacaaaccgcagaataacagtcttgtactttaagtacagggctgttattctgtttttaagagataagtacttattcaaaataatttaacaggagggagaatttatttgcataaaaaaagattattgatttttcctgtgttattaactgtgttgtgcggctgcacagcaccgccttctaatgataccaataacatgttagaaaccaaaacatatctatacagctatgattatgaaacagagcctgatggagagttaatcacagcttatcatgaagaaaaaccatctgttgacttgaacgaatccagagatgttgtaaaagcaacagttaattttagaaaaaatactgtaacatacattaagatgaatgaaacatattcaaaaggtaattatgaatgtacagtaaaagaggcttataaaactgtatcttctgattttttctatacattagttgatgaacaatatcatgaagctctagcaaaagaaattgcaaaaagaccatatatttcaaaagatacaggaaaattaattaagccatacgattgttttttctgtgtaaaaattcatttaaaatacactggatctcaaccgactactatggaatttaattctgctgaatttgagaaaaaacctgattcattattatattccaatggttttcttatttttattgataatgctttatctaatgaaaagaaagataatttatatctagaacctggtaaagaatatgacttgtggcttttctatcatatatcgggaaatttttctgataaaaatatctattatattcagggtgattttcaaaattataacgaccatgatagttatgatggttatctaattgaactaaatgatttgactgaaattgattagtcttactactttaagaggagatatttaatatgaaattaaaaaaacaattaaaaacacaataatatttgttgctatgatgctggttataggtgtgtatactgcacctgtgatatcaaaagctggagatacatttggtgtcgcttttagtgtagatggtcaagaaaaatatacagaacgccaaaataaaaccacctcttcttctgtcaatatggaatgtacagataaagatattgatggctcatattactatgctagtgtacatgctgtcaatgcagccggaacacgtatagatgtttctcatggctatgaatattacttcgatgtaaatgaatcccacaacatgcttaactgggtatatgaagagcattataatatggcttgtgtaaaatgtcagggatattcagttgacgactatcatggtgcatggtttggcggttactggtatgcggacatttaaagacagtaaataggaaatataagttaatatatttcttattccttgtaataactgcgttgtgcaactgcacaacgcagctttctaataataatgaatattttataaaacataatagacttgaaaacatatacaataattttatgggagggaaagattattgaaaaagaaaatagtagttattagttttatattaataacaactttatgtggttgttcatcaccacaagtaaataaaacagatgatataacagaaactaaaacttatctttacagttacgattacgaaacagaaaccaatggtgaagtaagtactgcttatcatgaagaaaaaccatctgttgatttgaatgaatctcatagagaagttgaacctattgtcaatttcagaagtaaagctggtcttacctttattaaaatgaatgagacttatacctcgggaacaattgaatgtacagttttaaaagcttattcaacagtttcaaaacaatttgctgctgatacattcggagaagaatattctcaattattacttgataagataaataaatttcaaggctattatgatgaaaatggcaatctatataacgaaggacatcgtttctttcttatcaagatgcatatgaaatatttaggtaaaaccacttcaaaaattcaatttgattccccaataatatgtaaatatccagatggtacatattattcccttggaggaattgattacattgacaaagctttgctagaaaatgaatctcatcacataaccttaaatccaggtgatgaattcgattcatggtttctttatgaagcttatcgatatagccatgataagacctactatttaagaggttcatttcaaaactatattgatgacgacagctatagtagttatcttgtcgaacttaacgacattgaagatgtcgaataaatccatgtttttataactatactaataaaatatgtaacttacgtcgttaaacatgcatcttacgacaaacctcaaaataacagtcttgtactttgagtacggggctgttattctgtttttaagagataagtacttataaataattttgcaggaggataagaaatggttcacaaacattttattaaaaatgctgttatatttacagcaatgctattaattgtcggggttaactcagcacctataatgtctaaagctggcaatgactttggtgtggcatttagtgtggatggtgaaactaaatttacaggtagccaaaataaatatacctcttcttcagttcagatgtcatgcactgataaagatattgatggttcttattactatggtaaagtatacgcaattgatggcaatagcgatccggttgatgtatcacatggctatgaatattattatgatgtcaatgaaactcataacatgcttaactgggtaaatgaggaaggctatacacatgctactataagatgcgaagcgtattcggttgatgattaccatggagcatggtttggcggttactggtatccagatatctaggaggcataataattgaaacagaaaaaagtaactttttttttactattattaactgtgttgtgtggttgcacaacacagccttctaatgataccaataacatgttagaaactaaaacatatctatatagttatgattatgaaacagaacctaatggagagttaagcacagcttatcatgaggaaaagccatccgttgatttgaatgaatccagaaatgttgaaaaaggaactgtcaatttcaaaaataaaaacgctattacatacataaaaatgaatgaaacattttcaaagggaaattatgaatgtaccgtaacaaaagcttataaaactatatcttctgattttttctatacattagttgatgagcaatatcatgaagctctagcaaaagaaattgctaagcctaattatatttcaaaagatacaggaaaattaattgatgagaaaaattcttttttttgtgtgaaaatccatttgaaatatactggttctcaaccaactaatatgagcttttataccactggattttcaaaaagaactgataatttgatttatgcttcaggttttcttttctttatagataaagctttatcaaacaaagaaaaagatactttatatcttgaacctggtaaagagtatgatttatggtttttctatcatgtattaggaacatactccagtgataatacttattatatccaaggtgatttttacaattataacgattatgatagttatgatggttacctgattgaactaaatgatttgactgaaattaattagtcttactactttaagatgagatatttaatatgaaatttaaaaaaaataattaaaaacacaataatatttgctgctatgatgctggttataggtgtgtatactgcacctgtgatatcaaaagctggagatgatgtttggtacggagcatcctttgattttgatggtcatgaaaaatatttaccatcacaatttaaatacacatcatcatctgtgtggatgtcttgtactgataaggatattgatggttcatattattatgcacgtgttaatgctgttaatgtatctgataatcctgttgatgtatcgcatggatatgaatattattttgatgttaatgaaactcatactatgttaaattgggtttatgaaaaacattacaataaagcaactgttaaatgtactggctattccgttgacgattatcacggtgcatggtttggaggttactggaatccagatatttaaaattataaatattgaaatataagcttatatattctctattttatactagctgcgttgtgcgactgcacaccgcag

SEQ ID NO: 8523 - DNA, 14183 bp, Unknown
  gut microbiota DNA sequence
tcaaatattatcagttcattctatagaaaatttgaataatgatgaagaatatttgaaaataaatgatacattagaagacatattaaaaaagtatgaaatattagcaaatcaaaagaaaataactgtcaataattatatattagatgagaatatttatataggaaaaacagctttaaagattattctatctaatttgattagtaatgcggtaaaatatactgatgtaaatggggtaattaatattgggatagttaatgattggttatatatagagaatacatacggtaacaataaaatttcgaatatggataaaatatttgatgttaaatttgatttaaataaggaaaatagtaatggattaggtttatatattgtaagtaatattctgaataattacaatatggaatataaagcattgcaggatgaagaattttttatctttaaaattaaaatattttcttaaacaacatataattttgcaatacttattgaaaaatagagacttaaaggattgcctggagagtaaaatctaaataaagataaacacttcgaatcaagagcaacattaaacagaaagccgaggaaaccacatgcctaattacataatggatttaaggaagctcgtaggacacaggacgctgatgcagtgcgccgcaagcataataatagtgaatgaaaagaaccagattcttttaggaaagcgtacagataatcacaaatggggatatgccgggggttctattgaacttgacgagaaagtggaggactgtgcaagaagagagctgtttgaggagacaggtcttattgcagatgagatagaattttttatggtgaattccggtccggaggtgcattatgtgtatcctaatggagatgaagtgtctaatattgagattatatatgtgtgcagaaaataccatggagaattaaagagacaggaagaagaaattgaagaactgaagttttttaatattgccgaggttgaaatggataacatttcaccaccgataagaccagtggtgaaacggtttatagaacagaattcttagcaaatgctgtgcagatgaaatgcattttttctgaattcaataagcccttcatcacgcatttttccaagttccttggaaagtgctgaacggtcaacgttaagataatcggcaagctgctggcggtcgaatggaattacgaattcctgactgccagcttttcttgactcattggacagatatataagaagcctttctcggattgtcttaggtgatgtgcagaatatccggttagacagggtgagattcttctgaatggaaatgtgcagcagattgttaaggattgtatctttgcagtgcgtattttcaaattgtgaactcatcaatttatccatatcaagaaaaagaatcacacttgtttcagaagcgaccgcatctaccatgagcggttcgccagtcagagcatatgtttcagcaaatacatgtccaggagtaatattgctcataatagctttgttgccccacaaatctatatattcaatagttacctgaccagatgcaacaattccaatttcgtgaacgctgtctgttacatgatatataaacgaatttttgcggaattttctggcacgcagaaatccggctgcggtcatttctgatatttcatattcgttgatatctttaaatattggtgatttgataattgccataagttctccttatactgccccggtaaaatccaattttctgacttaaagtacatttttaataaattttcaaaaatgtggttaaaacaacatatttattatgctcattatattattctttaatcacgaaatcaatgagaacacaggaggattaagtgatgataagaagagttattcatattgatgaggataaatgtaatgggtgcggagcatgcgtgacagcatgtcatgagggggcaatcggattggttgatggaaaggcaagacttatgagagacgactactgtgatggccttggtgattgcctgccacagtgtcctacaggggcaatttcatttgtagaaagagaagcggcagcatatgatgaagctgcggttcttgccaataaagctgcaaaggagcaggcagcagcacataaaccacatttttcaggatgccctggaagcatgatgagacagtttaacaggaataatcaggaaaatgcatccccggttgcaccagaatcccagcttgcacaatggccatgtcagattaagcttgtgccggttaatgcaccatactttgacggagcaaagcttttaatcgcggcggattgtacagcatatgcatatgccaatatgcatcaggatttcatgaagggaaggattactattatcggctgtccgaagcttgatgatgttgattacagcgaaaagcttacacagataataagtaacaataatattcagagcgttactattgttcgaatggaagttccatgctgcggaggacttgaatatgctgcaaagacagcattacagaacagtggaaaattcattccatggcaggttgtgacgatttcaactgatgggaaaatcttagattaaaaaatattagaaataacactaaaatattgccaacacatgaattttgaattatagtattaatgctttataaaattcttataaatatttggaggacttatgaaaaaaataaaagcgcttatgccggaagcatatgactttaatggaaagcttccgctaaaacaggcaataccgcttggacttcagcatgtaatggcaatgtttgtaggtaatcttacaccgctgcttattattacaggtgcatgtggaattggggcaggaagtgaatatgcttctatccaggttgcacttttacagaatgcaatgattattgcaggtattgtaacacttattcagttattttcaattggacctgttggtggcaaggtacctattattatgggtacaagctcaggatttattggagtattcagcagtgttaccaagattatggggggtggaatattagcttatggtgcaattatgggagcatctattataggtggtctttttgagactgtacttggagcatttattaaaccattaagaaaattcttcccatcagtagtaacaggaacagtagttctttcaattggattgtcgctcatctcagtaggtatcaattcatttggaggtggaagctctgctaaggattttggttcgttggaaaatcttttcttagcatttgttgtgcttgtagttatattatttgttaagcactggactaagggatatcttagttcatctgcaattcttgttggaattattgtgggttatattgtagcaattattatgggactggttcttccacatacagcagttacagctgatggagttgagtatactaaatcatgggtacttaactggaacaaggtagcagaggctaaatggattgcaattccaaagtttatgccagttaagcctgtgtttgatttaagagcaatacttcctgtacttgtaatgtttgttgtaacagcagtagagactgttggtgatatttcaggcgttatggaaggtggaatgggaagagaggcaacagataaggagctttctggaggcgtaatgtgtgatggtcttggttcaacacttgcagcaatgtttggtgtgcttcctaatacatcattcagccagaatgtaggacttgttgcaatgactaaggttgtcaacagagttgcacttgcatcaggtgcggtatttcttatattatgcggacttatacctaagcttggagcacttatatcaatcatgccacagtcagtacttggtggtgcagcagttatgatgttctcatcaatcatagtaagtggtatccagcttattactaaagagccgcttgatgcaagaagactttcaattgtttcagttgcacttggtgtaggttacggaatgggtgtaagccctgcaattcttgaacatacaccacaggcagtacagcttatgtttggtgagtcaggtattgtacctgcagcatttgtggcaatattacttaatgtgatacttcctaagagcaaaccggctaatgaagaaacttcaaaagacgagtaatatcgtctggagtatcgatatcatatagttcatattcatcccgtacaggaactaatacaacctgtgcgggatatttttttgttaagaatccgccgccttttttctcaggaaggtttagaagctcatcgtaatattttgcaggaaatatacatggagaaccagcattttcattgtaggaaagtctgcatatcttatcatcataataaagaaatgtaagacacagaagctgcaggcttgtccttgtaataagcggctggtctgatggcaggaaaaggattccctgagggtgaggattacctgaagaagcgttatctgatagaattctggtaactccaagccggaccatctcatttctgtagggcatatcgtgtcgtagaaaatgtatatttttatcttcacatatatggacaacttcatcatgtcttgttactgcaagtgtctcaccaaagccagcaaaatggcttatagatactgcattttcaaaaagagagcgtccattaaagtctgtaatcagcttattagagccaaaacgttttgacataccggaagccataataatgcaagaaagcgtttcaaatgtgctgtcaatatcaataacaagaacatctttcctgttacagattctgtttagaaattctgtggattgttttctgattacagctaaaacatgtgaattatcaagcagtttttcaacagccttctgaaatgggatgcaagagctttcaagataaccaagctcatcaataacaaataacctttcaggagttgtatcaagatgtgtatcaatggcaggaattgcgcaattaataaatccatcttcaataattgtcatattattgcctttagatgcaggattaattccagatgtccggggtacaccaattacgaattctttattgtcagcaaccagattagatttaatgacaacctgtggcgtatccgttctatgactctgtaacagattgaaagaatcggacatatgttttaacatattattaacaagatgagattttccactgccgcggctgcctgttataaaaatgtgttttctgccggtcatcctgaaaaatgtaattacggcttctgcgtccaaataacaattattcataaatccccctattacaaagcaagaactattctgtgtacatttcccttggtatcagtacattcagtaacattgatattatcatatataagagacattttttcattgatttctgaaagactggctgcatgtacatcaatatctgaaacaatttttccatctttcataagaagaatcctgtcgcagtactcaagtgccagttccggactgtgtatacacatgagggcacatttgttatcggaaataatattccggatgtgtttcataagcatatggcggttagagaaatcaagcgcactgtcaggctcatcaagaagcagaagtgctgaatcttctataagtgtgcgtgcaagtatgcataactgcttctggccttcgcttaatgtgagaaaatctgcatcatataatccggaaagtcctacggaatcaatagctttatcagcacgatatttcatgttggaattgtatgattcaagcatgtgaagctgtggattaaagccaagcagacagacatctcttacagtcatacttacgcttattccatttctttgtggaatgtagcttatcatgccggctctttttctgacagacatactttcaagctggatttcaccaagcatgcattttccactatgtttaacaagattcatgacagctcttataagtgaggttttaccacagccgttattgccgataattgctgtaagctgtccaggctgaatgtcaaagcttacattctgtacagcacatttgcttccataatatactgatacatctgaaacatataattcaggattgaataaatcggacatcatacaacctcctttttattagctttgataagcaggattataagcagcggcgcaccaaggagtgatgtaaatatgcttacaggaagttctgatgaggatacacttcttgcaaatatatcagcaagtgtcatgattatggcaccagccagtccgcttgatatgtatgtgaatctgtcattgcgtcttgtaagtaatctggcaatgtgaggtgcaataagtccaataaagctgataagtcctgttacacatataattgatgatacgattaatgttgcaatcattaatatgataaaacgcagaactgtgacgttgacaccgagagcggcagcttcatcctcatttatcgagagaatgagaatctgtctgtataataaagtcatgattataaagcctgcacatgttacaaagaaaggaatagcaaggctgtcctttgaaacaccgttaaggcttcccatgatccagtattcaatagaagcaagctgtttttcaggatctgcagcaagtttgagaaacataagaattgtctgtgctacagaatgaatggcaataccggcaagtacaattgtgtaactgtttctgccgggaacaagataagccacaagtaatgtgattataagggcaattattcctccggcaaatgcggatattgatacaacaggggttaaagacgaaaccgcaactatagcaaaagctgcgccggcacttgcaccggaagaaacaccgacaacatcaggtgatgccagtggatttttaaatatcatctgatatacataaccagatattgaaaggccaaaacctccaataatacccataatggcgcgtggaagtcttagtcttttaaagaccataattgacatagtgtcccctgacagcagtccttttaatgtgagtggatactgtccggtaagaactgaccatgtaaacactgctataagaagcagtgcccacatgacagataatagtataattttgttccggtaattattaatattcttgaacataaatcatccttaattattttgcaggtgtaaatccataaaagctttcatagaatttagttacacaagtctcatagaaatctttagttaccttttccgggtgaagaacagaagcaatgtatatacttccaaggaagcttccgggaactggagaatcccatgcttcaatatcattaggaagctttattacatttttgttcttaacagcattgcagccggcaagattagcatcatttaagatatcttcgactgtatatgttgcatcagcagcgataacgatgtaatcagggttccatgcaagaatctgctcgtaagaaacatttgcccagtaggtatctgtaagttcagaagcaacatttttaccacctgcgttagtaagcagagtattctgatacatcttgcttccggcagttgagagaacagagctgttacctgcaaggtatacagatggtgtattttcgccagaaacattagtcttgttatcagctaaaaatgtcttaattgaattattaagtgcttcagcacgaccgacattgttagtaatctttccaacaagagttatacattcctctaaaagtgactggtcttctggattcacaacaacagccttgattccaagactttcaagagtatcagctgttttctttaatttcattggaagaaatacaacatcaggtgcagcagctacacatgcttctgtgttgaattccttggctgttcccatgttaggaaggctcacgattgctggagctgcaagcttgtaaatatttcttgtgttagccttggcttcgattccaacgagtttatcttgtaatccaagtgcaagaagaaggcttgttgaaatgtagtaagatgatgcaatcttttccggagccttttcaaatgttacggttcttccagcctggtcggtaacagtaagaggatagcttacgccaatctcattaaactgtgacattatgtcaaatgctgaagtagttgcttcttctgtgcccttatcagcagttgtggaattgccgcatgctgctaatgaaaaaatcatgagcattgctaaaaagagggcggtaaatcttttaaaattcttcatgttaaaatcctttctgcgaattggtttgtggaggtttgttagaacggacgtcacgaaaaattgttaaatccaacgcaggacacgctttcgctgcttgtcgctcgcagcggtactaggttcgcgggaatttgttgtcacttcgtgccaactattcccgcttaccaagtaccggcggctccaaagcatcctgcgttggactcaacaatttttcgtggctgacttcctaacaattatccaacaaattaatttacataaatagtagcgaatgaattttatcagattgacaagggttttacaagccgttatatttatataaggaaagagaatgagattatttatcaatttagtagcgaaggatgacagacaggttgtggcgggcacaggcccgatgcatgcaggcgagggctcgatttgcagcgtgctgtgtgggagttatgccgccatgtgcttaaaggtgtgtgaagaaaatctcgttcaagcgtagcgcgtttgattttctgcacactaataggctttgcagatggcggcatctactcccactaagctaagctgccatgagagtcatcacctgcaggtaacgggtctgcgcccgtcacaaccgtccgttgttcatatcactaataaatagattggagtttttatgcttactatacagaattataagaaagtagaaagccttgaagaagcctatgagcttaatcagaagaaagctaaccgtattgtcggcggcatgatgtggatgcgtatgggcgacaacagaatgaatacggctattgatatgtcagggcttggacttgataagattgaagaatcagatgaagaatttaagattggctgtatgacaactttaagacagttagaagttcatgagggttttaatgaatatacagatggctgtgctaaggaggctttaaggcatattgtaggtgtgcagttcaggaatcttgcaacagttggtggaagtatatatggaagatatggattttctgatgtgcttacgcttttaatcggactggattcttatgtagaactatacaagggaggcattgttccattaactgagtatgctgaccgtgattatgacagggacattgttgttaatattattgttaagaaaagaccggtgaatatgttttatgaagcagtgagaataacagaaacagatttgccggtgcttacatgtgcaggagtaaagtttaaagatactggagtctgcaatatctgcataggtgcaagaccgggaagagcaattgttgttaaagatacagaaggaatacttgcaggcggtattaacgagaagtcagtagaagaattcagtacatttgttaagaaaaatgtgcctacagcgggcaatatgagaggaagtgctgagtatagaagccatcttgcaggcgttcttgcaggcagggcacttcagaatattaacagagattaattggtgattacggattggagaatatatgttagttgatattaagttgaatggaaaatctgttaaagcagatattacggcagacatgacactctatgaattcgtgagagagcatggctgttacagcgtaaaatgtggctgtgaaacatctaactgtggcttatgtacagtatttcttaatgataagcctgtcctttcatgttcagttcttgcagcaagagcagacaaatgcagtgttacaacactcgaaggattacaggaggaggcgtctgaatttgtcacatttatagcagaccagggagcagagcagtgcggattctgtaatccgggatttgttatgaatgcattggcgcttttcagagagaatccttatcctgatgaagaggagataaaggagttcctttcaggaaatctgtgcagatgttcaggttatgagggacagttaagaggaattatgaatttccttgaggcaaagaaagcaaaggaggctgaatagatgaagtcggttaataaagctgtcagaaagaaagatgcgatggaactgcttcttgggaagccggtgtatacagatgatattgcacctaaggactgccttgttgtaaagcttctgcgctcaccatatgccaacgcatttgtaaagaatattaatactgatattgcgatgaaggtgccgggaatagaagcaatatttacatataaagatgttgaccagaatatgaaaagattcacatgtgcaggtcagacttatcctgagccaagtccttatgacaggcttattcttgataagcatgtaagatttataggcgacccggttgccattgttgcaggtgctgatgaacgctgtgttgataaggcaatgaagcttattaagacagaatatgaagtgcttgaaccattgcttgatttcactaaggcaaaggataatgagattcttgtacaccctgaggataactgggaggcattatgtccggttggagctgataataaaagaaatctgtgcgcgcatgatgagagcggcgacggagatatcgataaagtgttagatgagtgtgatattgtgattgacaggacatatcatactaaggcgtgtcagcagagcatgatggagactttcagaactttctgtacaatagatacttatggaagacttcatgtcgtaagttctacacagatagtattccattgcaggagaattatctcacatgcacttggaatatcgccatctaagataagagttaccaagccaagaatcggaggcggatttggagcaaagcagacatctgtgtcagagatatatcctgcatttgttacatggaagaccaaaaaaccgtctaagattatattttcaagggaagaaacacagtcagcttcatcaccaagacatgagatgcagatgcatgtaagacttggtgcaactaaggatggtattgtaaaaggaattgatttatacacattatctaatacaggcgcatatggcgagcatggtcctacaacagtaggcctttctggacacaagtcaattccattatatggaaaggcagaggcgttccgttttgtaagtgatgttgtatatactaatataatgtcagcgggtgcttacagaggttatggtgcgacacaggggctttttgcagttgagtcggctgtaaatgaactggcagacagacttcatatggacccgtttgaaatcagatttaagaacatagtaaaagagggtgatgtaatgcctgcttactatggacaggttaatacaagctgtgcacttgacagatgtcttgcaaaggtcaaagagatgattaaatgggatgagaaatatcctatgagaaagatttctgatactaaggcacgttttgtcggaatgggcatggcaatgcagggctcaggtatatcaggagttgatgtgggcagtgcgacactaaagcttaatgatgaaggcgtatatactatgaacatcggagctgctgatatgggaacaggctgtgatacaatacttgcacagattgcagcagaggttcttgaatgcagcacagacgatataagtgtatttggtgcagatacggacatatcaccttatgattcaggttcatacgcatcaagtacaacatatgtaacaggtaaggctgttgaaaaatgtgcattagagcttagagacagaatcgaaaagctgggtgctaaaatgttgggatgcgagaaatgtgatgtcacatttgatggaaagaaagtaatatgcgaatcaggtgagaacaaggataaatgtgtaaccttggccgatatatcaacagcatccatgtgtggtaatgatatagcactttcagttaccaatacacatacatctcctatttcaccaccaccatttatggttggagcagcggaggtcgaggttgaccttctcacaggagagagccgtgttgttgagtatgacgcatgtgttgattgtggaacacctgttaatcctaaccttgcaagagtacaggcagagggcggtatcttacagggaatcggaatgacaatgtcagagaatatcacatattcagataaaggcaagctgtatgagaactcatttttacagtacaaaattccatcaagaatggatattggacatattaatgttgagtttgagagtagttacgagaatgcaggtccttttggtgcgaaatcaatcggagaggttgtaattaatacaccgcttcctgcaattacagatgcattaagccatgcggcaggaaagagattttacgagcttcctataactcctgaccagattgcaatggcaggtgtaaaagataattaaaattgattgaccatagagccttgtaatgttagaataatttcttataatatgacagataatttacttacgaaaggaatcattactatgaattttcttgaagaaagaattatgaaggacggagttgtcaaagaaggcaacattcttaaagtagacagttttcttaatcatcagatggatgtcaggcttttcaagcagatgggagaagaatttaagagaagatttgctggaaagaatattaataagattataacaattgaggcttcaggaattggtattgcttgtatagttgcagaatgttttgatgtaccggttgtatttgcaaagaagtcacagagtgtcaatattgacggagatgtgtactctgcggaggttgaatcatttacacataagtgcaagaatcaggttcttatatctaaaaagtttgtaggtccagaggatcatgtacttattattgacgattttcttgccaatggatgtgcacttcagggacttatctctattgttaatcaggcaggcggaactgttgaaggtattggaattgcagttgagaagggcttccagacaggaggacagattatccgtaaccttggataccagcttgaatctctggctattgttgatggaatgaatgctgcagatggcagtattaatttcagagaggagtaatcatgaatgaatatcagtttttttcaccagtagatgtcgtatttggatgcggaagtctttctaagctgcatactcttaagatgccaggaaagaaagcacttcttgttataagcaatggtaagtctgcaaggatgaatggttcacttgacagaacaatagatgaacttaaacaagctgatgtttcatatgtgctttataacggaataggagctaatccgctgaagtcagcagttgaagaaggcgcaagaattggtcgcgagaatggagttgactttgttgttgctttaggtggcggttcagttatggatgcggctaagaatatggcaatgttcattccacagccatcagataatctgtgggattatgctaacagtccatcaggtggtaagatgacacctcctaatgaaatgcttccatggattgcaattactacatcagcaggaacaggctcagaggttgatactattggagtgatttctaatcctgatactaatgaaaagattggtattggtggaatggcgggcatgtttgcaaagtatgcaattgttgaccctgagcttatgaaaacagttccaccgaaattcactgcatatcagggatttgatgcgctttttcattcattggaagggtatataagcaacaaacataatattatgggagatatgattcagcgtgccgcgattgaaaatatcggacattatcttgcgagagcagttaaggatggtaacgatattgaggcaagagaacatgttgcatacgctaatacaatgtctggctattcaatggttgtaacatcatgtatatcagaacattctatggagcatgcaatgagtgcatatcaccctgagcttcctcatggagcgggacttatcatgctgtctaaggagtacttcacattctggattaataagcatgtatgtgatgaacgcttcattgatatggcatattttcttggaatggaaaatgcatctaaaccggaagatttcatcacggcacttcttgaattacagaaggcatgtggagttgatgaccttaagatgtctgattacggaataaagaaggaagaagcaatgacacttgccaagaacgcaagggcaacaatgatgagattgttcgtaagagaccctcaggaaactacggatgaagagattgcgggtatatacgagagagcgtatagataatttaatatgttaagataagtaaaaaggagctttt

SEQ ID NO: 8524 - DNA, 499 bp, Unknown
  gut microbiota DNA sequence
gtaccaaggctgtaatacctgtagatataggtggtgttatggttgactatgacaggataagaaagattgtcgagagtaaaaagaatatatttaaggcttcaacaccgcttcaggaggcacttggcagagtcgcaattgttgctgattctgcacatggtttcggagcaagtgagggtggtgttatgagtggaatgaagtctgactttacaagcttttcatttcatgcggtcaagaaccttacaacagctgaaggcggagctcttacatggagaagtattccgggagttgatgatgaggatatctataagcagataatgctttactcacttcacggacagtctaaggatgcacttgcaaagactaagcttggcgcatgggaatatgatatcaagggaacttattacaaatgcaatatgactgatattatggcttctattgggcttgtacagcttaagagatatccgggacttcttaagagaagaagagatataattgagag

SEQ ID NO: 8525 - DNA, 21976 bp, Unknown
  gut microbiota DNA sequence
taatttttaatattatataaatattcttaataagatatttcagaaacttttaagatgataatactctattaatcccaataaataaagtacttttttactataaagtactaatttatttaaaaaacatctcaagaagtggtaataatatatattttagaagatgcattaacacaaattatcattgccacacacaaaataatggaatataataattttatctaaaagtgcgttagaacattttctttcgggaaattcaggaggcatctattatgaataaatggcaaaaaataggactggcagtaggtatgggaactgctgttattactactacacacctgattaacagcataatattcaaatcatcaaccgctaataattatacaggtaaaagaataagaagcaattatcagtggaagttcggcaatattgcatatataactgccggctcaggttctccacttttacttatacacgatcttaattcttacagttcaagctacgaatgggaacagactataaacagttttgctaagaatcacaaggtttacgctattgatttattgggatgtggtcattctgataaacctaatcttacttatacaacatttatgtatacacagcttatcaatgatttcgtgctcaatgttattcgttccaagactgatgttgttgctacagcaggctcaacaccaattgtgataatggctgcatttaataatcatgcactgtttaataagattattcttgtttctcctttatcagttgaagatgctcttaaagggcctgataacttaagtggaataagaagacacattttaaatgtgcctgttattggaacttctgtatacaacattctgtttaacagaccatctcttagaaagcttctttcaaaaaattttatagatggaagaattccggctgattatatcaatgcatgccatgagaatgcacatcttggtgatgcttcagccaaatatctgtttatcagcactgaatgtaactttactactgttactatctcaaaagcactttctgagcttgataactgtatatacatgattaacggtatgcacaataataatgacgttattgatgaatatatccacattaatccagcaattgaaaatgttatgattcaggatgccaagaagcttccacaggttgaacagccgactgaattcgtaagacaggctgagatttttcttaattagttatcccttatgagatattttcatgaaatcctgataatcaacagttaaccaaaaataaacccatattatccacaatatgatgatttactaatcattttatgtgaataatgtgggttttctttatactatattgtgtatacatactgcttacgcaactggttctttagaaggaagtcccgcttttcttggaaactttccagatgtaggcttaatcttcttgatatatactaaagaacggtcaatatcagtaccaggaagctgaaatttcttcacttcttctatcgttccgccaagaacactgactgctttcttagcatttactaattcttcatcaatatctcctgacttatatgccacaaaatatccaccaacctttacgaatggaaggttatattccacaagagttgctaagttagcaacagcacgagaaacacttacatcaaaatgttctcttaagtcattatttcttccaccatcctctgctcttgaatgaactgtttctattcctgtaagtccaagttcttctattacctgattaagaaactttactcttttattaagtgaatcaagcaaaactacattaagctgtggatgtgctatttttaacggaagccccggaaaaccagcacctgttccaacatcaataagagaaatctctttctttttatgtcctattttttcaatatctaacacaagactgtcaacataatgctttaaaagaacttcttcgtaatctgtaattccagtaagattcataaagctattccattcaaccagcaacttataatacatatcaaactgctcgtactgtctgtctgtaagctcaacacctatagaattcagattattcttaaatgtttcatttatcatacatttctccttatcaatgattaatgctttcttctaagagactccaggtaaacaagaagcactgatatatcagcaggcgaaacacctgatattcttgaagcctgtccaattgaacgaggtctgaatttatcaagcttctgcatagcctcttttcttaatccgcttatttctaagtaatcaaggctgtctggtataagcttattttcaagctttttaaaatgttcaacctgtcttaactgtctgtctatatatccctcgtatttcagattaatattaacctgctcacatacatcacaaggcaactctggtctgtgcttatcaattggagcaagaacatcatatgaaagctccggtcttcttataagttctgcaagtgtagcacctgttgtaagctctgtacttccgttatctgtaagtaccttctgtacttcacttccagttcctatattaactgacttaacacgctcaatttcttcatctataagctgaatcttgcgggtaaggcggttcattctttcttcgcttataagtccgactctgtaaccatatttagtaagtcttatatctgcattatcctgtcttaatataagtctgtactctgcacggcttgtcatcattctgtaaggctctgctgtttccttagttacaaggtcatctataagaactcctatataactttctgaacggtcaagtataagtggttcttccttcttaacgaaaagtgccgcattgatacccgcgacaattccctgtgcagcagcttcctcatatcctgagcttccattaaactgtccaccagcaaataatccttcaatcttcttgaattcaagagaagactttaactgaacagcgttaatacagtcatactcaatagcataagcatttcttacgattcggacattctcaagaccaggaactgttctatacattgcatactgcacatcctcaggcattgaactgctcattccaccaagatacatttcattagtatacaagccctctggctcaatgaatacctgatgtctgtctttgtctgcaaatcttacaaccttatcctcaattgatggacagtatcttgggcctgttccgtggatatctcctgaataaagaggtgaacggtcaagattatccataataatcttgtgtgtctcttcattagtatatgtaagccagcagcttacctgctctttctgtatgctctcagggtctgtttcaaatgaaaatggcacaactctcttatcaccgaactgctctgtcatcttagaaaaatccactgaccttttatcaactctggcaggtgtacctgtcttgaatcttctcacttcaattccattatcaataagtgactgtgtaagatgattggcagcctgtaatccattaggacctgtatgatagcttacatcaccatatatacatcttgccttaagatatactcctgtacataaaacaactgctttagctatgtattctgcaccagaaacagtctttacaccgccaatttttccatcattaacaataatctctgaaacctctgcctgtcttatatgcagatgctcagtattctcaagcacatttctcattcttctgctgtaatcggacttgtcagcctgtgcacggagtgaatgaaccgcagggccttttgatgcatttaacatctttgactgtataaatgtagcatctatattctttcccatctcgccaccaagagcatctatttctcttacaagatgtcccttagaacttcctcctatattaggattacaaggcatcattgctatactttcaacgcttactgtaaatataattgtttcaagtcccattcttgcagcagcaagggcagcctcacaacctgcgtgaccagcacctactacaactacatcatattcttctctaatattaggcatattacttctccttatcaacctgcattacttacccatacagaactttgaaaaaattctgttggcaagatcatcttcaatctcctctcctattataagaccaagattctcatatgcagccattaaatcaatagtaaggaaatcttcacttaccatgttatcaattccatcaagtacaagctttaagctgttctcagccttctttaaaagttctttatgtcttgtacttgtaatatatacatcttcattgaacttaacttcaccattaaagaacatacttttaacagtttcctcaagttcttcaattcctgtttcctgctttgcagatatagtaactgtctcacaattgattattttcttaatatcttctgctgttgtaacctgtgcaagatcagctttattaagtattacaagaaccttcttatccttgataagttccataatctcataatcattatcatcaagtactcttgaagaatcaactacatatattacaagatcagcgatttctgcaagcttcttagccttattaaccccaatgctttcaacaacatcatcagtttttctgattcctgcagtatcaataagattaagagtaattccagacagattaatcatttcttcaagagtatctctcgtagttccttctatatcagtaacaattgctctctcttctcttgcaagtacattaagcaggcttgactttcctgcattagttttccccaaaatgactgtacgcactccatcgtgcataattctgccattgtcgcatgtttttaacaagttatccacattattaagacagttttccacatcatttttaaggttatctacattagcatctatatcaaaatgttcaggatcatcaagtgcagcctcaataaatgcaacattattcaatattatctctcttatattcttaatcttttcagataacttaccatctaactgattaacagaagatttcagggcataatcattctttgcattaataatatcaataacagcctccgcctgtgacaggtcaattcttccattaagaaatgctctctttgtaaattcaccaggctctgcaagccttgcaccagcgttaagtaccgcctctaacaccttcttagtaacaagaataccgccatgacagtcaatctcaacaatattctctcttgtataagtgttaggagctttcattacaattacaagtgcttcatcaatttcattaccgttatcacatatatttccaaaatgtaccgtatgactctgtacatttgcaagcttaatattcttttttgacttaaaaactttatctccaataataattgcatcaggaccgcttattcttacaatactaattccaccgcttgacactgtacttgtagatatagctgctattgtatcctccatttccatcctccatataaaaaatgctgtgataataataccacagcatttaataaaatcatatatctaattatctgttatatctgttattattctctctttcaagataaacaacaacatgtctgaaaggttcttcaccctcacttcttgtagaaacaaacttatctgcctgaagtgctgaatgaataattcttctttcatatgggttcataggctcaagtgaaacaggtcttctgcttctcttaaccttgtatgcaatgttcttagcaagagactcaagagtttcttttcttctctttctatagttctctgtatctaatttaactcttacatacttctcactgttcttgttaattacaagacttgtaagatactggatagaatcaagtgtctgtcctctcttaccgataagaacacccatgttatctccagaaagatctacattaacgctattttcttcatcgtcaaatgtaatatcagccttaacttccatgctcatagcaccaaacatgctgtcaagaaatgctttgatatcttttctgataacttccttctgttcttctgtaaaaggctcttcctttggctgtgcttcagccttaggagcttccttaacttctgcattcttgtgattatcagcaggcttgtgttcctttttgaactctttcttaggttcagacttgaattccttcttaggctctgccttttttaaatcatcagtcttcttttcaaatttcttttcaacatgaactggttcttctgacttcttaggagtctcaacagacttaacttctgattcttcctgtttttctcttgctttaatctttgcaggcttagaattaaatattcctaaaaatcctgaattacctttgtctataacttcataatcaagcttatcacttggaataccaagcttagtgcaggcattagttatagcttcttcaacagattttcctgtaacttcaatatattccattacttaaccctctctattttcttttatcgttgacctcattgtatcttgataccataccaaccttatcagcaagacttcctggtttagctgccttaccgcttgctgctgcggcttcctttaattcctgtatcttcttatcgttagcttcttttctttcctgaagcttctttgctctgtcagcacttgaagaagcagaagaattcttattattattcacattcttagtacttacagaagcacctttaacaatagtttctgctggaagtcccttcttggctctcttcttgttacgtttttcaacattcttttctacaatcttatctgttccaatcttatcgtaatatctgttaataaagatagtctggattgtctgtataacagcagttgcaatccagtaaacaccaagacctgaaggaagacttattgcaagaaatgctgacataagtggcatgaaataagtcatcatcttcatagatgctgctgctggattatcactgtcaggctgctccatgccagcctgtgaaaccttaacagatataaactgtgtaacacctgcaagaattggaattaatatagctatatgaagaccaaaacctgggttctgagacatattaacacctaagaaagtgttcatatggttaatcttatcaagattctgtgtaatcatatcagaaaaagctggaaatgcttcttttaacttaatccactgatctgaagtaaatgaattaagtgttgttacagctgtacttgtattactccagtcaacagttctgccatatatctcattaagtgtatcagcatatcctgatacagatgagataccatcagcaccattaagtccaagtatattaaggaaaagtaccttaatctgtgaaatataaagcggtatctgctggaaaactctgtaaagagcaaaaagaataggcatctggataagaagctgtacacagcttccccactgtgaaacaccgtatttttcataaacagccttagtttctgcctgcatcttctgcatagcaacagtatcactgttctttcctttatacttctcctgaatagcttttatctccgggttcataactgactgtaacttagtcatcttctgctgcttaatctgtaatggaagcattaacattttaacaagcagagtaaaaataatgattgctattgcaatattaccaattcctattgcattaagacccttgaaaaggatgtctaaaatgtaaccaagtaactgtgcaattggcttaataatactcaaattgtcacctccgcataatatagcactatccaaatattcagttgtttattgcttttttcttttcccatatctgcctactggcacaggatcaaagccataagcgttcttattaaatggattgcaccttaatattcttttaagtgccaaccacccacctaagaaaactccatacatttcaatagcttcaattgcgtattgcgaacatgttggaataaagctacagtattttcctcctttataaggagatattgcgagctggtataatcttatcatcttaagaactatgaacttgcccgcattctttaacttaatctttatatccttcatattaaccgcctgtttaatcctgcttataaagcttatgaagtttcaataaatgaatcattgattccttagtttcaaaaaaacccttatctttcaaactggctctggctacgacaacataatcatatccatcgggtatacagtctgtactaaggcggaatgcctctcttatcagtcttgccagtctgtgtcggacaatactattcccgaccttcttactcacagatacacctaatcgtttagtacccgttccattctcagaaatatacattataagattcttgttagcaaaagacttcttattgttgtacacctttttaaattcctgattacttcttaatgtttcaaaatccttatatttcataccattcaccattcttattaattaaaatgttgcttaaatttaatattaatataatctgaaaaaagcagatgagaaactcccatctgccaacaaaatcaagaaaatattaattaagctgaaagtttctttctacccttagctcttcttgctgataaaacttttcttccacctgcagtactcattcttgatctgaatccatgaaccttagatctctgtctgttctttggctgaaatgtcatcttcatagtctatgcacctccttcattaccattgtagtttattatggtaagaatattttcatataaaaaatttcaaaacacagaactgattatattgtgtaaacattataaagtcaagaaaaacttgataattactgtatttatttttatatatactaattctataaaaaacgctttcaacaggtttttcacaatccagtaatccgcataaataggacatttttaatattttttaataagaatataaaagagttttccacaaaatgttgataacttgtggaaaactctttataattacgttagttattaacgatatttttgaaaaagtgcctattttcgacctttttcgcgtttataatattttccacattcatgttaatacatttttatccataaaattatccacagggcttaatctgcccaaatattgaaataattttctaaatgatatattatataaaggaatgtatttttatgattggacaggctaattaacaagccagaaaggcctagaatttatggatgaattacagacattgattgataaatgggatttaattctctctacttttaaagaagaacacgaaattattgatgtttcttttaaaacatggattaaaccccttaaaatatataaacttgacggcaatgttcttactcttactttctcatctttagaagatgacgcttctactgatgaaaggagcattgtatatattgaaaaacgttacctcaagtttcttgaagttaccgtatgtgaagtaatgaacaaagaatatcaggtaattattatgtcatctgctgagaaaaaggaagatgaattaaagaaaaagacatcttcagtttctactgataatagtcttgcttcacagaatctgaatcctaattacacatttgacacatttgtaataggtactaataataatctggctcacgcagcatcactcgctgttgccgaaacacctggacagatatataaccctctgttcatatacggaggtgccggacttggtaaaactcatcttatgcaggctattgcacattttattattgcaagtgacccatctaagaaggttttatacgtaacttctgagacatttactaatgaacttatcgaatcggttaagactaacaaaaacactgaattcagaaataaataccgtaatattgacgttcttcttatcgatgatattcaatttataataggaaaggtttctactcaggaagaatttttcaatacctttaatgacctttatcttttaggaaaacagattgttatatcatctgatagaccacctaaggaaatggaaactcttcctgacagattaagaacacgttttgaaagcggacttccggtagatatccagattcctacatatgaaactaagatggctattattaataagaagtctgaagctttaggaattgattttccttatgaagttaaagattatgttgcaactaatattacttcaagtatcagggagcttgagggagcgcttaccaagctttcagcttattctaagctttcccacacacctcttactgcagagtttgctgagaatacacttaaggatcttatatctccttactctaagaaagagattacaccagaacttataattgatgtagttgctgaacatttccacattaagcctgaagatataatatctcataagagaagtgctgatatagcttttcctagacatattgcaatgtatctgtgcaggcagatgacacagacacctcttgaagctataggtaaagctttaggtggcagagatcattctactatattatatggttcagaaaagattgccaaagaaacagccaataatgaaactaccaagagcactattgatatattaataaagaagcttaatccatcttaaaaagttttccacaatgtttttaggataatttgttaattagatgttatttatatgttgaatgttctttataacttttttttagatttatgtacatttttttaagctttaatttttcacagacattgaacattaaatttagtgttttctaacatggttattattttcatatatccagtgtttttaaggctttacatactttttaacattttaacaacccctaagactacggctactgcatttatatatttatatatagctcttctccactacaattttatcgaaaggaagttatcaacatgaaattagtttttactaaatctaacttaaacaaagctgtaggtatcgtaatgaaggctgtacctacaagaactactatgaatattcttgaatgtattcttattgatgctactactaatgaaatcaagttcacaggtaacgatatggaacttggcattgaaactatagtagaaggtgaaattatagaaaaaggtaagattgccatagatgctaagcttttttctgaaattgtaagaaagcttcctgataatgatattactttaactactgattcaaataataatgcacttattacatgtgaaaaaagtaaatttaatatagcaggaaaatctggagatgatttttcttaccttcctgctattattaaagataagatgattacactttcccagttccagttaaaggaagttattaatcagacaatattctctattgctattaatgataataataaaatgatgacaggtgaactttttgaagtaaatgaaggtacacttaaagttgtaggtcttgatggtcacagaattgctatccgtaatattaagcttgaaggcagatctgatgacgtaagagtagttattccaggtaagactcttcaggaaataagcaagattcttaatgctgatgctgaaagttttgttaatatttactttactaacaatcatgtattatttgaatttgaccagactcatgttgtttctagacttatagagggtgattattttaagattagtcagatgctttctaacgattatgaaactaaagtatctattaataaaaaagaatttcttgattctattgacagagctaatcttcttataagagaaggagataagaagccaattattattaatatattaaatggtttattacaggtaaatgttaactctgcaattggagctcttaacgaagatattgatattgataaagaaggtaaggatattatgattggttttaatcctaagttccttatggatgcattaagggttatcgatgatgaaaatgtgactatgtatctagttaatcataaatcaccttgctttatcagagacaaggaagagaattatatttatcttatacttcctgttaacttcacagcttaacaagagaaaggaaagttatggaagaaataattttaagagatgatttcatcaaacttggacaggcaattaaagctgccggattagttgaatcaggtgttgaagccaagattgttattcaggatggtgaagttaaggttaatggcgttgttgaaacacagcgtggaaaaaaactttttggcggagaagttgtagaatacaacggctccagtattcttattaaaaaataggtgttaatgtgatagtcgaatctgttgagttaaaggattacagaaattatgaatttctggatatgaatttcaatgagcatgtaaacataatatatggtgacaatgcccagggaaagactaacatattagaatcaatatatatgtgttcaacttctaagtcacatcgtggaagtaaagacagagaaatagtcagatttggagaagatgaatcgcatattaaattgaatgttttaaagcatggtatgaaataccgcatagacatgcaccttaagaagaataaaaccaagggcatagcagttaatggaattcctataaaaaaagctgttgaactttttggaattattaatattgttttcttttctccggaggatcttaatattataaaaaacggtccttcagagagaagaagatttatggatatggaacttagccagcttgacaagatatatcttagtaaccttgttaattataacaaagtacttaatcagagaaacaagcttctcaaagatatagcattttcaccatcagaacagctgatgcagactcttgatatatgggacatgcagcttgttaagtatggaagccttattattaaaggcagaaaaattttcatagaaaagattaacacaataatcagtgatattcattccagacttactggtggtattgagaatattaaagtatgttacgttcctgatgttgatgtgaatgattttgaagaagaagtaagaaattcaagacaaaaggatattaaatacaaggttacaggcaaaggtcctcataaggatgatcttatatttttaataaatgacaatgatgtgagaaaatatggttcacagggacaacaaagaacagctgcactttcacttaagttatctgagattgaacttgtgaaacttgtaattaaagatactccggtacttcttcttgatgatgttttgtctgagttagacagtaacagacagaattttctgataaacagcattggagatatacaaacgattgttacatgcaccggacttgaagaatttattaataacagaatgaatatcaacaaaatatttaaagtaacagatggtcatgtagttaatgagaattaattacattttgctttgtaaaacaaggaggaattaaagtggcagatcagaatgcagagaagaattatggtggagaccagattcaggtactcgaaggtcttgaagctgtaagaaaaagacctggtatgtatattggaagtacatcaggaagaggacttcatcatcttgtgtatgagatagttgataatgcaattgacgaagctttagcaggtttttgtacacatattgaggttatgattaataaagataactctatcactgtaattgataatggtagaggtgtacctgttgatattaatcataagacaggaagacctgccattgaagttgtatataccgttcttcatgccgggggtaaattcggtggtggaggatataaggtgtcaggaggacttcacggtgttggtgcatcagtagttaatgctttgtctgaatggcttgaagttcaggtaaagagaaatggacacatttatcagcagagatacgaaagaggaaagatatgttatgaccttaagatagtaggtgactgcgatattgaggatacaggaactcaggttacttttcttcctgattcagagatttttcaggaaacaactgtatttgaatttgatattcttatgcacagattaagagaaatggcatttcttactaagggaatcaagattactcttacagatttaagagaagatcttgagcagcagaaagtattccattatgagggtggtatcaaagaatttgttcagtatcttaataagagtaaagaacctttatacagccagattatttattgtgaaggtgtgaaagacaatgttcaggttgaagtagcattccagcataatgatggatacaatgaggttgtcgattcatttgttaataatattaagacacctgaaggtggtacacatctgactggtttcagaaattcactgactaagacttttaatgattatgcaagaaagaataagattcttaaggatagtgatcagggactttcaggtgatgatataagagaaggtcttacagcaatcgtatctgttaagattgaagatccacagtttgaaggacagactaagcagaagcttggtaatacagttgcaaggggagcagttgacagtatagtaagtgaacagcttacttacttccttgagcagaatcctgcagttgcaaaatctatatgtgaaaaatcgttgcttgcacagcgagcgagagaagctgcaagaaaagcaagagacttaacaagaagaaagactgcacttgagagcacttcacttcctggcaagttagctgattgttcagataaagatcctaagaattgtgagatatatattgttgagggagattcagccggtggttctgcaaagactgcaagaagccgtgctacacaggcaatccttccacttcgtggtaagattcttaacgttgagaaagcaagacttgacagaatacttggaaatgcagagattaaagcgatgattactgcatttggtacaggtattcatgaagattttgatataagcaagctgcgttaccataagattattattatgacagatgccgatgtagatggtgcacatattgcaacacttcttcttacattcctgtacagattcatgcctgatctgattagagaaggccatgtatatcttgcacagccaccactttataaagttgagaagaataaaaaagtgtggtatgcctataatgatgatgagcttaatgcaatcatgactgagattggaagagaccagaataataaagtccagcgttataagggacttggtgagatggacgcagagcagttatgggaaacaacaatggacccacacaagagagtattattaagagttaatatgaatgaagatgatgattcagaacttgatgtaacattctcaacacttatgggtgacaaggtagagccaagaagagatttcatagaagcaaatgctaagtttgtaaagaatttggatatttaacaagcagcgcataagacaatatcggaatattatgtgcgtgcttgcacgctaaataatattgtgatgttgtcttgtatggtgcgactagcaccattcgtaaaatcgtcagattttacgaatgcgcgtgattaggatttacgcatggcgtattccagatttatacattgcgttaattaataacttcacggaaaggaattataataatggatgaacatatctttgataaagttcaagaagtcgatatgcagaaaaccatggaaaactattatatagattatgccatgagtgttatcgcttccagagcacttccggatgtaagagatggtcttaaaccggtacagagaagaattctatattcaatgatagaacttaacaacggtcctgataagccacatagaaaatgtgcccgtatcgttggtgatacaatgggtaaatatcacccacatggtgattcatcaatttatgaggcattagtaaagctggctcaggatttcaatacaagatatccacttgttgacggacatggtaactttggttcagtcgatggtgatggagccgcagccatgcgatatacagaggctagactcagtaagatatctatggagatgacaagagatcttaacaaagatactgtagatttcatacctaactttgatgaaacagaaaaagaacctacagtacttccatcaagatatcctaacctgttatgtaatggtacatcaggtattgccgtaggtatggctactaatattccacctcataacttaagagaagttataggtgctgttgtaaagatgattgacaataaggtggaagaagacagagacacaacaattgaggaaattcttgatatagttaaaggtcctgatttccctacaggtggaacaatcattggcaagttgggaattgaagaggcttaccgtacaggaagagccaaggtaaaggtaagagctgtaactaatattgaacccatgaataatggtaagaacagaattgtagttacagaacttccatacatggttaataaagcaaagcttatcgagaaaatagcagagcttgtaagagataagaagattgatggaatcactgatttaagagatgaatctgacagagaaggtatgagaattgccattgagttaagaagagatgtcaatcctaacataatacttaaccagttatacaaacacacacagttacaggatacatttggtgtaattatgcttgcattagtagataaccagccaaaggtacttaacctgtatgacatgttaaagtattaccttcttcatcaggaagaagttgttaccagaagaacaaagtttgatcttaataaggcagaagaaagagcccacattttagagggcttaatgattgctttagataatatcgacagagttatatcaataatcagaggttctgcaaatgtacagattgccaaggaaagcttaattgctgaatttgcactttcagaagcacaggcacaggctatcgtagatatgcgtctgagagctctgaccggtctggaaagaagcaagcttgaagctgaattgaaggaacttcatgaaaagattaaagaatacaaggcaattcttgcagataagaagttgcttcttggagttatcaagactgaaatttcagagatagcagacaagtatggtgatgacagaagaacttctatcggatatgatgaatacgatatttcaatggaagaccttattccagatgaaccatgtgttattgcaagaactaacttgggttatgtaaagagaatgacacctgataactttaagagccagcatcgtggtggtaagggaataaagggaatgcagacaattgatgatgattatatcaaagatttattcatgacaacatcacatcatgtacttacattctttactaacacaggacgagcttataagttaaaggcttatgaaattcctgaagcatcaagaacttcaagaggaactgcaataattaatcttttacagttagcaccgggtgagacaatcacagcagtagttcctgttaaaattgatacacttcaggatacagattacctgtttatggcaactaagaagggtatagttaaaaagacacctgttaaagattttgccaatataagaaagacaggaatccaggcaattaacttaagagaagatgatgaacttatagaagttaaacttacagatgatcaggcagagattcttatggtaacaatgcttggacagtgtataagatttaaggaaacagatgtaagacctacgggacgttcagcaatgggtgttataggtatgagtcttatggatgaggatgaagttgttggtgttcaggtaagtacccagggagatactatgcttatagtttctgaaaatggtatgggtaagagaacagacattgacgagtatacagttcagcatcgtggtggtaaaggtgtcaaatgttacaagataacagaaaagacaggtaatgtcgtaggagctaaggctgtagatgattcaagagaagtaatgcttattacaacagaaggaattataatcagacttcagtgttcagatatatctaatcttggaagaataacatcaggtgttaaacttattaaccttgatgaaggaattaaagtagcaacaattgccaaagtaaggaagcagcctgctgatgaagatggtaaggatgcagagggctttgaagaagacacagataaaacagtagaatctgaagattaatcttaaggaaactgccacatttatatatgtggcggtttcctttttagcaggagataacatggctttaattaatattaattatgaatcaaaaacacttggtatgcccgttatgattaatgcaattattcctcagggaagaggcagttataagactttatatcttcttcatggaatgggaggagattatacaacatggattacgaaatccagagtggcagattatgtagataatactgatatagcggtcataatgatttcaggtgataacaaatgttatgttgataatgtacatggaagaaaatattttacatttttaacagaagaacttatagaaacctgtactaactggtttggattatcatgtgacagaaaagaccgttacatagcaggaatgtcaatgggtggatatggagcagtacatgctgcacttattaagcctgatgtatatggcaaggtgttctcatattcaggactgcttgatatagagaaaagatttgacaatccacagggaataaatacatatcagatatttggagacagagaaaaattatcagataaccgatttgatataatgaactgtctaaaagaggataatttcaagacaaatgtggaaaattatccggaattttacattagatgtggattatatgatcagatacttccaatgagcagacaatggaataaatatgcattagattcaggacttaaagtgaattattatgaaactgccggcagtcatgattttattttctgggataaatgcatacatgagacagttaatataataaaagaccagtcgtacaggatggaggatatatatggcaacagtaatgaatattaatcatttttctatatatcttaagcgtaatatggaatgcacagttattctcccatcagatatgaaaaatgatgagaagcttcctgtattatggttatatcatggaagcagtggtgataatactgtatggctgtatcattcaccaatagctgaatatgttgatgagggcaggtttgcagcagtacttccaaatgtgcagaattcatgctatgttaatatgaatattggagataagtatgagtcatatgttggaaaagaattattcaatataattatgaatatgtttccatgtctttctgataaaagagagaataattacgtatcaggattttctaatggtggatacggatgtcttcatattgcactcagatatcctgaaaaatatggaactgtaggagcattttcagcaggtgacaaagctgattcagaatttcttaatgatggaagtgaaaagtcaataagaagaatagagctttatggtgatggagacctgcataaaacagaatatggaatcacatatcaggcagacagattaatagagcagaaaagtgtaaaacctgaaatatatcatgcctgcggagaacttgatccatggatagacatgaatcatatattgagagattatttcatgagccatattgaatacaattatgtatacgatgaaattgaacaaatcggacatgaatggaaattctggcgtgaagaattaaaaaggtttttagtatttactggattaattaataattaaaatacaagaagggaattggaaatgagagaggttaatgtatcaataataacagacaacattaaagaaatgtgcatagaggcaaatcattttctcacagatgatatgaagaatgtttttgaaaatgcagtaaaaaacgaagagtctgcacttggaaagcaggttcttggacagcttgaagaaaacctaaaagttgcaggagaggatatgatacctatatgccaggacacaggaatggcagtagtattcattaatgttggtcaggatgtccatcttacaggcggagatatcacagatgcaattaatgagggtgtaagaagaggatatgttgaaggatatttaagaaagtcagttgtaaaagatcctatctacagagagaataccaaagataacactccggcagtaatacattttaacatagttccaggagacaaagtcgacataacagttgcacctaagggattcggaagcgagaacatgagcagagtattcatgttaaagccggcagatggaatagagggtgtaaaggaagcaatacttacagcagtaaaggatgcaggtcctaatgcctgtcctccgatggtagtcggtgtaggaattggagggacatttgaaaaatgtgcttatcttgcaaagaaagcattaacaagagacctgaatgaagaatccccagttgaatatgtccgtgacttagaaaaggaaatgcttgagaaaatcaataagttaggaataggtcctggtggacttggcggaactcagacagcacttgcaatcaatatagagacatatcctacacatattgcaggacttccggttgcagtaaacatttgctgccatgtaaacagacattcacacagggtaatataatcagggaggctaatcatggataaatatattaatgcaccaataagtgatgaagatgcaaagagtcttcactcaggagattatgtatacataacaggaacaatatatacagcaagagatgcagcacataagagaatggcagaggctctgtcagctggacagccacttccaatagacatgaagaataatataatatattacatgggaccatctccggcaagagaaggaagaccaataggttcagcaggtccgacaacagcaagccgtatggataaatatgcaccagaccttcttgatttaggacttaaaggaatgataggaaagggaaagcgttcacaggcagtaattgatggaatcgtaagaaatggtgcagtgtactttgcagcagtaggaggagcaggagcaattcttagtaaatgtattaagaaatccacagttattgcttatgatgacttaggaacagaggctataagagaacttgaagtggaaaaccttcctgtaattgtagtaattgacagtgagggaaacaacttgtatgaaacagctataaaagaatacagcagagtataaatattaatgtacaaatattaaataaaagcctcttgacaatatcagggggctttgttagaataataaatgcgtttgacgcagaatttcatattaagagttaaacatatatggtttagggctcgcattcatggaatctggagtagtactcaagaggctgaagaggcgcccctgctaagggtgtaggtcgggcaaccggcgcgagggttcaaatccctcctgctccgttgacagaaagaaaaagacagtcagaatattctggctgtcttttttctttttgttattatgatatgcagaaaacaatgagtataagttattcacaatatttgcaaagttataaaggaaatgtggaatatgacagagagacagaaaatgattagtggacaattatacaagtcaggagtaaaggaacttgctaatgacagaatgttatgtaaagaacagtgctatgactttaatgcattaagaccatcacagacagaacaacagtctgctatgattaagaaaatattcggtaaggtgggagctaattgttttataacagctccattctggtgcgattacggatataatatagaagcaggtgacaatttctacgcaaatcacaatcttgtaatacttgactgtgccaaagtaacatttggtaataatgtgttcatagcaccagattgtggtttctatacagcaggacaccctgttgacgctgcaagccgtaatgaaggatgggaatatgcttatcctattaatgtaggtaatgatgtatggataggtggtggggtaaaagtaatgcctggagtaactataggtaataatgttgtaataggtggcggaagcgtagttgtaaaagatataccagacaacagtattgcagtaggtaatccatgtaaggtaataaaaaagatagaatcaggcaaagcaatggaatataatatagaagaaaagcatatataacttgtatataaatgtagtggaaacccctatatatagtgtgtttaaaaaaaattacaacttttttaaaaaaaattgaaaaaagttgttgacaatgtgtgtacctgatgatattatatacaagtcgccgcggtaagcggtaacaaataagacttaaaaca

SEQ ID NO: 8526 - DNA, 350 bp, Unknown
  gut microbiota DNA sequence
ttggttaagccctcgacctattagtacagatcagctccatatgtcaccacacttccaccttctgcctatctacctcgtcgtcttcaaggggtcttactaacttatgttatgggatatctcatcttgaggggggcttcacgcttagatgccttcagcgtttatcccgtcccgacttggctacccggctatgcatttggcaatgcaaccggtgcaccagaggtcagtccatcccggtcctctcgtactaaggacagctcctctcagatatcctacgcccacgccggatagggaccgaactgtctcacgacgttctgaacccagctcgcgtaccgctttaatgggcgaacagc

SEQ ID NO: 8527 - DNA, 707 bp, Unknown
  gut microbiota DNA sequence
tgtgctttcagggagaaactaatcacagagatatagtaagaataaaggcagactgtgagcaggatttatggtatgcattaagtatagattattatgatgaacaaaccaagtactatatgtttggttcatttggatatatgtttgatccaagtgattattcaggaattttaatagaattgaatgacattaaggatgaaggctgattatgctagaacaggagtaattatgaagggtaataaggtcacaattatttccagcttattcttgatgactgcgttgtgcggatgcacaacgcagtctgttgataaagcgaaggaaatagaagaaagtaatacatatgtatacaaatatgaatatgaaacaaatacagaaggacaggcagagacgcagtatcatgaagaaaagccgtcatttgatgattttgaaacagtaacaaagggaactatagcatcattgagaaataaaaatggaagtcttaaattaattaaaatgaacgaagtatatgaatggggcggaatggagtgttcgattacagaagcccacatgactacgaatgtggattatgcagatgaaatattagacgataatgtattagagccatgtaaagaagaattaaagagcatatatccgacaggaaaaagcagagtagataagaatgaaaaaattgtatgggttagagtacatattaagaatacaggtacaaaaga

SEQ ID NO: 8528 - DNA, 9041 bp, Unknown
  gut microbiota DNA sequence
gcgataataaacagtctgtgcaacgcaagccgaagccttccgcttcctgccgaatgtacaatcccccacattccattatcacgctcgcccgacagcccatatattatgaaaaccatcataatcagcgcgaaataaaatgtgtaatagtaatctacaaaactgcctgccgccttattattaacaagataaagcgatacatcagctaccttttcaaaatccttgcccgtctttacaatattgttatatgtaaaactattcttatcagaaaatatagagaaagtcataagctgctgtgcattagtctgaatctgcctgatgtcctcaggatacttactgatatattcaagctggctttctacgtcccttaatacggtcagaaacagaagctgttcgctatcagacagcggcttatatttttcaaaaaccacagatgtataattctcaactgctgcctcagactccacaccctgcttatcagccttcctgtaacttaatatcctctctatatccgaatccaccgcatttatcgcagcctcaatatcataattgccatagtaatcaacacaccactgccgctgcgcggtttcaaaccttaattccttaagccctgcgcccttcgtctgctgatagacatacaacgatacattaataataagcaatgcgataaaaccaatgacaactttcctgttaatcagtctcctaaactcgttcatattccgcccctcactgtgtaagcccgctccaaaatcacttaacaggaactatctccacactgctgctaatattgctcttattaatatacgacagcttattagagtagcctatgaacaggtacttgtcgtcgccgtagtacagattactcatttttcttctgtcgagttctatagtattgacaagggttccgtccggattaagtacaaatattttctcatcaataaaattagtaatctgagttgcacttcctgctccaccgttacacatatatatgtactttccatcataagacagggctgccattactattgaatcatccgccttatacaacagtttgccatcattttcattaagctttcttgaataaagtcccttatctatcacgaaatagtacagaattccattgtctgtatcaacataataatcagatatattcttgtcagatacctgctctgcgctgcctgtggcataatcataacaataaagcttgtaattaacatctgctgttaatgtctctttattaattgagttatgattaatcaagaaaaacagtttgtcaccaaagcttctcgcctcattaatagcgttgttcgctccctcatatgagaacacttcagttgtctttccatttgcaagttctgcctttacaatcactactttatcagtatctttactctcaactgcacctgtatgcccaatcctgtcatatgcatacacacagtcgtcatgaaatactaaagatacagttccgttatcacttgcaaacaaatctgcaacattttctctgctgtttccatctttagcaattctctctaacttagccattccattttcaactttcacagtgtacaggcttcccttatagtaatgaagcggtgaattgttatagctgctgtctaatactgcattacaatctgatgaattatgcttacattcagctttggcacacactggaatagtcttatgtgtactgtcatcgagatacataagcattgtagtcgaatcagtatcactccattccagataataataacctgactccgctttcgccacacgatgtccgtcagttctccagctgctcatctcgtctgactctgtcgcattgccgacattaattgttttgtctgattttcctctactcatccccagaactactgccgccacgattccgacaactgcaactgctgcaataattcctataataaccttttgcttacccttcatatgatgcatctcctttgttctgattatataatattttacaaccctttccacttcaacaaaaatgtcgtgaacgacaccaatttgtcgtaaactgcaatgatgattattatcatagtactttcaattatgtattaaaagatatatggaacaaaatgtcataaatgtggcatgaaatgcatatcatcgttgataatttcctgttagttattaataaacttctccgcatgttcctttttccagcttgtatactttgcttcatcattaatattgtaacgaccgacatttacagtgttaacccaattataacgtggtttttcactaaaagtatactttataacataatttccatactgcccctttttactaaactcagaataatctatataatatacatcagtttcagtaatccttttagttgcaagaagctcacatgatttatagttatcttcttttaatttatccaaaaaatcatataattcatcactattaaatttcttgccgagtttctctttaaataaagcctgcggtactccatatacttctactgtacataccggaccgccataatctttaaaatcctcatacagtgcaaaagaatatgctgcaacatcaacatcagccattgcatcatcacctgatttatattctttatctccatcattaataagatatgaaaatgcaaaaccaacacgttcatcacctactcctttcgatgaatcagagttgtatttcaatgcaaaatccggcgtagaccatgcattaactatcatactgtcacacgctgaatttccaattttgcttgatgtaccatctggtcttgcctccccttgtaattcctcatctctagcagaatttcctcttatatacatatcatcaagatagttcacaccttttttcttctcttcaacatatggataatatacatacaatccagaaggactcggttcatcatagaccataaaatcattaactattgaatatccattctcactctttgttgtttcatattcctgaagcacatagtttggctcagtcaatgtctcgttacttccgtgttgtccgcaagacaacaactgaagcgacacagctcctaataatacacatgctatttttcttttcatattcaatttcccccatataatcgtgaactcatttatttccctgatatacatatatacgaattccgtttgaaaaaagtcgagaaaattttctacttatttcataagtcccctccataataaaaaagctataaccaatgcagcctgtttttcacaatctatattacattaattatagctttttttatatattatcctagatagatgtcacaaaatgacgaaaaaacggcatgaaatgcattatctctctttactatccccgacaatcctgccatcactgatagtaattatcctgtccgtcatcttcgcaatcccctcgtcatgcgtaacaattataacagtctttccagacttattaatctccttaagaagctctaacacctcatgtcctgtcttctggtcaagtgctcctgtcggttcatcggcaagtatgatatctgcattagtcaccaacgcccttgctattgcaactctctgctgctgtcctcccgacatctttcccggcagcttatttctttccgataatattccaagatgttccatctgctttaatataatgcgctttctttccttgcgcttaacattggctgcaagaagcggaagttctatattctcatatgcagtgtaataatccatcagtgcaaaatgctggaacacatacccgatcttttccttacgcagcttatgtacctgtgaacggcttgctgctgtaacctcagtatcatcaagaaaatactttcctgctgtaggtgtatccatgcagcctataattttaagaagtgtactctttccacttcctgacgctcccataaccgaaatgaattcgccgtcctctatcttaaggcttacatcatcaagtgccttagtatcatcaaccttttcattgtatatctttgtaatattctctaatcttatcatttaataatcccccattaatcatcacttccaagaacctctacagaatcataatgcagtatctttataaccggatatgccattgaaagaataatcgttaccgcaatagctgctattgtcgtcaacaatgttgtaagattaacggttattataccaacccccgaagtcaccacatttataataactgcacttactgcaaatataataagagccgttacgcttaaagccagaatattacatgccattgcaccgattattcttgaatcactcattccgtatatcttctttacagcaatctccctgcttctctgaatcagccagaactgtgacatcagcaggcagttaaatatgcagaatacatataccatcacatttatcttcatattctcgccctgaagcgccttaaccacatctgactcaccctttgagttaagcttcttggcatttatctgtgattttgcgtccacactccttatattaccgaataccgcagaataggaattatcaagacttgttatgttgcttgacaattcaatcgtatagctgtcttttctgcatatttctttcaggacattagttccaagacaatctatactaagaaccatcttgtaatcataataatctgatgtactgcttcctataacaccgcatatctcatattcttcattctctaaagtcacatacttctttccgtccatttcgtatgcgtctttatacttatatcttccaacggcaataagccttttgccgctgtcccccggctcgcttcccgggagccgtccgcttaccatcttatatggaagctcctcattactcttaagaataacctcgcatttcgtattagcacttatctgtgcatatgaaagtgacagctttccgccgagtatcatattgccgtcttccactccgttgcttatataattaaacatatcctgactgtttccaacagtaacatctaactgtattctgttcttatacatggactgcagcctgtccgtttcctttgcatatgccttattatatattgaaagcacaccgaacacggcatagaacataacgagctggcttattataaaaaatactgatatcagcctgtacctgaatacactccgtaataatgcttttatctttcccatcagccttcactccttcccgaaaccatatccgccagtgaagtcctgccaatcattaccgcaggtatcacacatgatatcacaagaagtatcattactgatattatcagaattaccggcatataatgcatatgtgccacatatgccccctcatacagtcttcctgtttcctctaatacctttttcggaaacagtgtctcaaattcagccctaagccgtacaatccatgccgccacagccgcaagaaccatgacaattgcattctgcatggctataagccatataatatccgccttacacataccatttgcaagcataattccataatgttttcttctcataagacaatacacaatattagacgctgcaattgatactgctgcaagaaccgttatcataattgctgctatgaaaacagtatcgtccacgatactggaatcttctttttctttatcaatctcatccttatagttacttatattgacagttataccctcgtcataacagaatttcttaatcttatctgtcacttcatcaaatgtgccggactcacactgaaaatatatttcgtgcgcatacccactatcgacaccttctaattcttttttcaggcttcccgctatcacaatcatggaatcatcaagcgtgtaattatcccatttaccatatgagcctttaaacagtctgtcttcgtgtatccagcccgcaccctttttaagaataccgcctatcttaatctgcccaatatcatcatctacataacagttaatcatatcaccggcatgatactgctttctgtaattatatcctgcaaatacaatccgctcatcttctccaatgttctctaatatcttcttatcctcatcactgagcataagatttcctattgcagctatatccttatctatcatatttacctgtatagattcatcttcatcttcaaagagagtttcactaacaatatatccactccgtactacttccggcagggtactcatatattcatgtaccttatctgatatgtcctgtttaatattcctggtcacaaaatgaacatatcccgcatcagccgtattaacaccgaattctttctctgtctgttttatcgcatatctgctaccaatatatccggtaaacaccctgtctatcataaaaaatgatacaaaacacatgccaaataaaagcatggtcacaaacattcttcttgaatatatcctgaaaaccagccttagtttattataccatctcatatcttcccccctgtatactgagctgtctgcctaattattaatcatctgctccgcatgcgccttcttccattctgaatataccttctcattttttatcttatacccgcctgccgcacatgccttcagatataccttttcccctgcatctgaaaatttatattctattatataattaatgtagtctcccttcttattaagctgggcataatcaacataatatacacctgtttctgttatatcctttgaacaaagtaaatcacaatctttataatcgtttttcttaagcgtatccttatatttcagaaattcatttgctccaaatgtttttccaaattttttcttaaaaagagattttgggactccatataccgatatattcatcttagggatatcatcataaaaatcttcatacattgccactgatattgctccaatgtcaagactcaccatcgtatctgatgtagattttacatctccagttttttctactctatatgtaaacgcataccctgcactatccgacagataccagttgggaattgtatcattcaaattatagtaaggtaatgcaaaatcaggtacaatacaggcttctacatatggtgctccataagcactacttgtctgcttattatataatgcgccatctggtatattacccgcttcaaggtcaatccgcctttctgtcgacgattttatatgaagttcctccagataagaaacaccttgttgcttattttctatatatgggatatacagaatagtatccttatcaccattgttactcttaattctgtagaatccattaattattgtataaccttcatctgttgttgtagtttcatactcctgaataatataatcagggtcaataagtgtctcgtctgctgcattatctttcttaccacaagatggtagtgagaaaatcatcattcctgataatgacacccatgctattttcttacctattctgttcatagactatccccccagtcacaatcacgaactcatttatttttcctgatatacatatatacgaatctgttttgaaaaaagttgaaacaactttttacttatttcataaatcccctccataataaaaaagctataaccaatacaacctgtttttcacaatctctgttacattaattatagctttttttatattttatcctagataaatgtcacgaaatgacgaaaaagtggcatgaaatgcattatttttctttactatccccaacaatcctaatatccactcgatattattctccacttaccgccttcagttcgagcaagataccagccataacctgtttcctcatcatctacatcaaaaccggtattctccacatctttctctttctttgacgtatgaaaatcacttttgaaatatataacctcagtaaaatcatctgtccagccatctcttttggctaattcatttatccatttcaaaacactatctgaattactggatttatcacctgcataataaactttatgaagctcaaatcctttcatatgcctaatctttctttttattaccttaatagcttcatccatatctttttgtgtatagatatctgaagttccatagtctatttctactttaggcgttgttaccacttttgttattacaaagcctattactgcggcaacacaaaggattgctattactattataattacttttttcttttttgatttattgtaacaactatttgtttgtttaatagtattatcttctaacccttccatatcttgctccatctccctcctgttcatcccaatgatttacttcttctgaagcccatgcattataattatcactatgctgtgcaattttataatcaagatattttcccgtctcattttcctgataatgatatccatcttcatacataaaatcaacatttgttacaaatcccatgtgatcccagtctccatcattatctacatctaatgaaacaaaatctcctctctgaatattaacactaaaatcaaaattatcatgagttgtaaatcctactcccatatatcttgcaaaagtatccgcatatcattgatacaaccaccataaatacacttaaaatctttttcataaaaaataccttttaagattataaatcttacctttcatatttattgtatttccacttttcccattgcttaccttagttaccccatgcctctgttatgcacaactactttgtttccttcttctttaacacatcaggctcttttggctgatacatactaaaaaacgaggcagaattaacagaagccttagctgttttcttagctgcctctgccattcctttaagaatcctcttcatgaaatctaccctcctttcgtactcccaatagtagcaacagtcctattatcagaagcattgtattaatatacaggcttatctggcataagaatgagtatttaccatatcttgtaaccacacctataatattcaatataaaagatataagcatagacgctattccaagcactgcacttacaatcatatatttttctttctgttcaatcgtaagcttcttgttatgatgctctaatggagcattaagaacaattataagatatccagttaaagctataagccatgtgatgataatagtttctcgtatatacacttggattcttagcatcagcaacgaaatcagatacactccac

SEQ ID NO: 8529 - DNA, 17739 bp, Unknown
  gut microbiota DNA sequence
aataagttgattttttaactctacaaggctatgtatcaaaagttttctttcgtggctatccaaatacagatgattaaatttctctctcataagcacacctccacttctttagcttcattatattggaaagcaggggaaaggacaaatctgcaaaaagggacaaaaataagcgtaccactatttctaatgatacgcctatcctcattaaatcacttcaaaatgcttcaacgcatcccttatcgcttccactttctccgctgtcggatgcttcctcggctgtttcaattcttctaccgcattaggagcatcgtacatcggcaagcctaaatctctctttacctctgcgatatatgcggtatgtaccttgaagccatatttagcttctatgtactcctttatcattttgtaggtcactcgttccttgggcttgtattcttcggctcttttagcgatattatcaagcggaacttttccctcaccctcaccaaactcaacttttacattgatatgtccgtctggctttttgtgggaaagcagtacaaccgtctccacatgccccgtattaggaaacatatcaacacaacagcacttctctaccttatatcctctctcctgcagagtaacaaggtctcttgcaagcgaagtaggcttgcatgaaatatacaccattctgtcaacaccataatcaataatcttctcaagtgccttagggtggattccgtcacgaggtgggtcaagtacgataaaatctggcttaatctcaatattatcaagtgcctttaagacatcatctgcaatgaactcacagttagtaagaccgttctgagctgcattcttcttggcagcctcaacagcttcagcaacaatctcaacaccgatgaccttgctggcaaccggagataacatctgcgcaatcgtacctgtaccagtatacaggtcatatataaccggtttactgccagccacatctccaaatccgccagaaagcacatactcacgtgccttagagtaaagcacttccgctccaagagaattggtctggaagaatgagaacggagttatcttgaaacgtaagcccagaagttcctcctcaatataatcctgaccatacagaagctcagttttctcgttaattactgcatctgcaaggctgtcgttaaatgtatggagaacacctgtaagagtgcccttatattcaattgatgtcaggcggtttacaagctctgtgaaatcatgctcaatctgagttgttgtaacgatatcaacaagaatctgccctgtctttacagactttcttacaagaagatgacgcagatacccctcgtggcttaacttgtgctggaaaggaagctccttctctattgcataatcctgaacgcatgtgagaatctttctgtaatcctcatcaataatcttacattctgtaaccggaacaatatcatacatgctgtttcgtttgtgaagtccgagtgcaagcggtccatccttgtactcatcgccaaatgaaaattccatcttattacggtattcttctgtaaccggacttccgattatcccctcaaatggaagctcacccgaaacaacttcgctaagaagcttttccacctgtgcgctcttaatctttaactgttcctcgtaagctactgtctggtaagtgcagccaccgcatttgccaaaatgtggacatgccgggctggtttcaagcggactcttctcaacaacttccataagtctgccttcgcagtgtccttttcttttcttattcacgcagaatctgacagtctgtccaggaattgcgttcttgacgattgccttttccttctgtccgtcctcatctgtcacccacactgtcgccttgttagggaaatcaaccttttcaactttaccttcgtatacgcttccttttttcaatctatactccattccgcacatgaattgtgcctgttattaacatattaatagtttctggcagcacttattcacataacggcataccttatataattttatcagaaaaatgtgctaaagtatagtagtcacatttactccaccacgctggcattctttgcctgcactgcagaatgtattctttcaagtaccttgtcacacagccatgtataagcagccccggcagcattcagtcctatacgtaatgcaactgcataaggcattccaaaaagtcccgccgcaattgataatgcgccaaatgtattaaaagctgtctgccatgcataaccagcggaatatccgactccgataccacctatcatgcctatatacggatacattgattctggcagtactatatacatcactgcaaaaatcgcacatccaacaacattaaacaatgccctgtttccaattctcttatcaacatctttagaaaacggcagacacactgacatgcacgcaattccaatccacattgccctaggcagtcccatcagtgaaacaatcagcatagcgcttgatacgataaatgtaagcttaatgtaccatcttgtccttgctgaattaatattaaattccttaaacaaatcccaaaatgttcttctatatggtctgttcctctgattcttatagaaaataatcatgcatactaacatcccgacaagcagtcccacaactctcatcatatattcatgccctgtgacatcatatccctgcagcaaaagatacccaagaacgaatgttgaatgattatacataattacattgtgacatcccattatcataagaagcataatacacacaacatttattacaaatgcagcaactggcggtaccatattggaaaccctcggtcctgctatcaatatcgcatatattcccattatcgaaatcaaaccatgtgatgtcttaattccaaaatccgcctgtcttaataccagcaccgcaagaagcactgtaactccggcaacactattattattccccagcagcttactgaatactgtaactactgcgacgcagaatatcataaccagatacaccttaaaattatatataagaatatgtcttcttttctctttagaatcctgtgtgttcttgataagctgttttgaaccagccgagcttaactgtaactcctgataaaatgtcataaattcctgctttcctttcctccccttaaattttgcttaataacagggttgagtaatataacactgattacacccctatgtcaattaagaaataattaaatattatgcaataaaaaaagccacaaccactgacatatcctaatggacatatcaagccggctgtggctttcaatcatatcgcacttattacattacttctcgatgtcttcatcctcgaaatcatcgtcaaaatcttcgtcttcgaaatcttcatcatcgaaatcatctaaataatctggtgtaaaatatctgtatacagcataagcgataccagcaactgctgcaactgcaccaacgatagcaagaacagctatgataatcgtgctgcacttcttgcagcatttcttatcttcatcttccttcttgctaataagttctcctaatttagtagctgcaataagctcatctaatttttctttactcataacaatatctcctttcataccacggatttaataaatgtattatagcatagcgttaaacatttgtcattatagttttttaagtctggcaaatcctgccagcattttcttctgtccgtactctgcaaattcaactgttaccatatagtctcttgctgaatcctctatagcaagtacctttccttcaccgaatttcacatggctcaccatatcaccgacactgtagccaagtccgcctgaagattttgcacttatatctgcacctcttgcaacacctattacatttcttgaagataagccgcttcgtgtaggcattcctgcataagcacttcttacagaatctgccggagtctttctcttttctggtttcttaaggtcaaataattccataggatcttttccgaatcccggattagaaccgccatttatcttaacctttcttgaactatatgttcctgctgcccttccgcctggtgtgccgcttccgtagctgctaagaattgatctggctgttgcacgcatgttaatgccttttgtatccggctcatctgatgtaccgccatatgcaatcctgcctttagcatacccactggaattgttttctatgtgcatatattccttaggaatttcattaatgaatcttgaaaccttattcatctgtgtttcaccacgcaccatacgcgacttggcacttgtaagattaagtattttctctgctcttgttattccaacataacacagtcttctctcttcctcaatctcagttgaatcatctgacacaattgtcatatagcttggaaaaagtccatcctccattcctgtcatatacacgattgggaattccagacctttcgcactatgcagtgtcatcagcattacatgaggctctgactcatccagattatcaatatccgctattaatgcaacttcttcaagcagtcctgaaagtgtaggctcttcacctgcttccttacagccctcctcatagcttacaaccttattaatgaattcatccagattctcgcgtcttgcctcaacctcttccactgtttcattctgtgaaagactctcgatatatcctgtatcctcaattacagcctcagcaagttcctttaatgacatgaattcttccttggcacgcagtcttccaataaggtcaacaaatggctctaacttggaaagtgccgcattctttattgtgtcaatatcctttgcattgacaagtgcttcccagaaagtaatatcattaaaatctgcatattcctgcaatctgtcaatcgttgtattaccaattcccctcttcggaacatttataattcgcttaaccgcctgaccatcaagaccattatcaatagtttttagataagcaagaatatccttgatttcctttcgctgatagaaattctgtccgccatatatcttatatggaatgttgtgaatcatcagcttttcttcgagcgctcttgactgtgcattagttctgtaaagaatggcaacatcattataattccagccatcccttacatactctgcaataccactcgcaacgccttctgcctcatcatacccgttctcatacagagtataattgaccttctcgccctctccgttatcagtccagagtgacttgctctttcttccaatattattacttatcacagcatttgcagcattaagaatagtctgcgtcgaacggtaattctgctcaagctttataaccttagcgcctgtgaacacattttcaaagttaagaatattataaatgtttgctccacggaacttatatatagactggtcatcatcaccaaccacacatatattgccatactttgctgcaagcattgcaacaagcttaaactgtgatgtattagtatcctgatactcgtcgaccattatatatctgaatctgtcctgataatgctcaagtacctctgcatcactctggaacagctcaaccgtcttgaatatcaggtcatcaaaatcaagcgcattgttaagcttaagcgtcttctgatattctctgtatacacctgcgattcttctaagattatagtcgttacctgcctcaagctcgaactcatcaggagtctttaactcatctttagcagatgaaatcttactcataattgcacgctctttaagcatcttcgtatctatattcatcttcttacatatatccttgattacagacttctggtcgtccgtatcatatatcgtaaagttattatcgtatccaattctgtctatgtatcttcttaaaattctcacgcatgttgagtggaatgtacttacccatacagcccctgcaccctgtgccacagtagtctcaactcgttctttcatctctcttgcagctttattagtaaatgtaattgccataatattatatgggtctactccgcattcttctattaaatatgcaattctgttcgtaagcacacgcgtctttccagagcctgccccggcaataataagcagcgcgccatctgtatatttaactgcccttttctggctgtcattcaaatcttctaatctcatatatccaccttcatgcaaatgtgaaatctatatccaccttatttctgccaactaccacattatacaaaaacaacgggatgttgccaagccaatatgacaacatccctgattgttatttattaaattcacatattactaattgtcagattatgcaagctttgttccacagttagaacagaacttagcgccattagttggtgttccacagttaggacagaacttaggtgctgtgccacctgacacatttgcattattattcattgcagtattcatgttattcatcatctgctgtccaacctgcattcccatctggagctgcatcatatcactggcaatattcgaaccgcctcttgaattgccgatactatcagccatagccatctgtgtatatctgttcatatctccaaccattgcctgagaagctgccttattagtcatcttctgtacttcttccggataagagaagcttgagatagtaaagcttgttattgtgattcctaacttgctcatctccatatcaaggtctgtcttaatacccgctgaaatatcataagcattagcctgaagattaaacatatccttgccttctttagaaatccacttcataagaagctggtcaagaactgctgatattctttccttaacatctgcaacagtgtacatctgctttacacctgctaccttgtctataagcgtaatgtaatcagatactgaaaacgagaagttaccgaaagctcttattggcatgccacctggaagtgcctgtgttggaataagaataggattcttagttccccacttctctgtgaattccttagtattaacgaataaaacttcagctcttactccactgttgaagccaaacttaaagcctttaagtgttgataagaatggaataatctgtgattcaatatcaaagcttccctcgtccttaaagataccttcaatcttaccattatacataaagattgcatcctgaccggcgcggataatcagcttactgcctttcttgatttctctgttggtccatttccagaagattatatcgtctctgtactcttcccattcaactacgttggcaaactgccctttgaataatcccatgttccctctccttatctatgtattgcttatctcattataaatgtgcttctgaattataagcccatctgagccttaagtgctgctaattcatcatcaactgctgtgttagctggctctgcatcatacttagctgcaagactgtcaacatctgcctcaagctgtgtctggttaagctctgccatagcatttgcctggtcaagcatcttatcagccttagcttccatcttgttaaatgcatccatgcttgttccaacgctgttcacgcttgaaccaaccttattgattctctcctgagccttagctgctgctaccttagccttaactgcatctcttcttgcttcaagagactggatatccttgcagagcttatcatgcatctgacgcatcttagctgcattgtctgctgcaatattatatgtctgctgtaatgtagcctgcttagaaactaactgctgcttcttctcaaggaatgttcttgcatctgcctcattgccagccttaagagccttttctgcatatgactgatacttggcaacatctgctgtgcattcatcaagctctcttttacatcttgtctcctcagccataactgaagctgtctctgccttaacctttccaaggtcgctctcaagatttctcatgtactggtcaatcatcttctctggatcttcacacttatcgagaagtgcattgatgttagcgctcataatgtccttgaatcttgttaaaatacccataataatcctccattcctgtgccgctttctggcacatatcaccctctggtgcatccgaattctgtctcccagaattcttaaaaaacctttttcattataatatatcaggagcaaaatgtcacgaatatttgctcctatgaaacatattttataccgttgtaataaatattaaaatatcataatatgcacaatacactatgctaaagttcattatattattcctacttgaaatgtggttttaaaaactatataatatagcttaagcattaatataaatgtattctctcatgaatacgcatttttaaagaaatgaggaacatatgaacaacgatattaaagagcttatgagcggtattcttaaagatatgtccgctcttaactatataaaacccggagatgtgcctaacatcaatctgtacatggatcaggttacaacatttatgtatgaacatcttcacgatacaaagcgtaccactgatgataaagtactaaccaaaacgatgattaacaactatgccaagaacaatctgctgccatcaccagtaaagaaaaagtactctaaggagcatatatatatccttacatttatctattactttaagaacattctctcaataagtgatatacagaaaatgctcaatcctctcactgagaaattctttgatgaaggttccaagccggatctggattatatatataaagagattttttcaatggaatcctctcttgcaagacccttatctaaagatatatttgcaaagtctgaacaggcaagtaatgcatttacagatgtaaaggatgatgatgacagagaattcttacagttcttcagtcttgtatgtcttttaagctttgatgtatacatgaagaagaacatgattgaaagtctgattgatgattactctgccaagcatgcgccaaagcagcctgagaagtctgataaaacagacaaaaagaaataatccgtataaattaagggaactgccagtactgacagttcccttttacattgcttcatattgattacttattgtcttctgactctttctcaagcatgccaagtctttcaaatactctgtcatacccgtcattaccataattaagcgaacggtttaccctgctgattgtcgcagtagacgcacctgtcttctcggcaatatcaagatatgttctgtgttctcttaacatcttggcaacctcaaatctctgggataaggataaaatctcgttaattgtacatacatcctcaaagaaatcgtatgcttcatctaaatccttaagacttaatattgcctgaaaaagctgctcaacagcctgtgtctttaacttattattcataattatacaccccgattttccaaaaataacattggcttattactttcaaattttaacacagtgaagttttaaagtaaagacattattcacttcttaatgccacaacaggatcttttttagctgcaagctttgccgggataagtccggcaataaatgtaaggaacatacttattattataagtattactcctcctgcaaccggaagctgtgcaacattagaaatgtctgtaaggtgcttaatcaacgcatttgcaggtatgcacagcaataaagttacaacaatgccgagtgcgcctgagacaaaaccttcaataagtgtctctgcattgaatattcttgaaacatctttcttagaagcaccaatacttcttaatactccaatttccttagttctttcaagtactgaaatgtatgtgataatacctatcattatcgaagaaactataagtgatattgcaacaaatgctattaatacataagagattgcattaataattgtactcactgaagacatcattattccaacataatctgtgtagttaataacattttcttctttgccatcgtcctgctgcaacttattgtaatccttgataatattctgaaccttctccttagaatcaaaatcagttgcatatatatctatctgtgaaggtgtatcaaggtctgtaattccaagcttcgacttattgctgtctaatgttgcatctgttgttctagcctttagtgacgctgagaaaagctgtagtatctggtcatcgctcattccacttgtcattgcctgcatctgggcgctttcctctggtgaaagtgttgccatatatgcatttacatcgtccattgtaatctctgtatttctgtcattgtcaaatggaactcctgtaaatacatcaacgcttgtatcagcaagctgtgccttggcaatctcactattctttacttcttcgataatgtattcagtaagctttgctgtataaccgattccacttgaaattgaagtgctgactgcgtcatcattaggtctgattattccacatactttaatatcagttccgttatttacaacatttgtcatatacttatcatctttgctgtaatcgtcccatgtaccggtcacatcattgtacttatacatgtccgtaggcataacaagcttaaactctgtatcaagtatctcgtcaaatgtatagcttatatccttctctgtttcgtatgattcaccaaccatcattttcttaaagagtgttcttacttcctcagggtctttaagtcctaatgagtaaagtgtataatcatcaacctcgttattcttatctgtaacaagcacaacctcgttgaaattctctggccagtgtcctgcgaggacatcatactgctcatcaagaacctgctggtttcctaaaagctggttccacacactgctgttagaaaacatccccatacccatgcctgatgacattgcagaagatgtgcttgttgcaccctcgccatatatcgaatcaaacattgtacttgggtttaactgctctacaccgttagaagtatccttcatataaatgttaagaggaacatcatatgaatactggatatcacttacatatgacttaatgtcagagccgccgttttcaatgtatttcttaaactctgaaaggttattgctcttaacttcttttaccatggtattaatcatgtcacccatgatatcgttagaatatattttagacttatcctcatgctctgctgaatcagaattgcccgtcatgcttgtaaccatactgcttatatcaatcgactctgcctgaagcgttataggatagcttgaaagcgtgtctctctgaaccctgtcaatatataactgaataccatttgagatagacagaatcattgcaataccgataattcctatgcttcctgcaaatgcagtaagaatcgttcttgttttcttagtcatcaggttattaaaggaaagtgaaagtgctgtaaagaatgacatagatgttttctgcttcttccctgactttttaatcttcttttctgatgtcttaaccttagcagcctctttagccctgatatcagcttccatatcttctaacgtatatggatcagagtcatcagttatcacaccatctaacaatctgactatccttgtagaataatcttttgcaagctcaggattgtgagttaccatgattataagtctgtcctttgatatctcctttaaaagctccataatctggatacttgtctctgtatcaagtgctcctgtgggctcatcagcaagcaggatatcaggattatttacaagtgctcttgcaatagcaaccctttgcatctgtccacctgacatctgattaggcttcttgtgaatctgttcaccaagtccaaccttctcaagtgcctctatagctcttctctttctctctgtcttagatacacctgaaagcgtaagtgcaagctccacattagataaaactgtctggtgcggaatcagattgtaactctgaaacacaaaaccaatagaattatttctgtaaaaatcccagtctctgtccttataattcttagttgacactccatttatcttaaggtcaccactcgtatacttatcaagtccgcctataatgttaagcatggtagtcttaccacatccggactgtccaagaatcgacacgaactcacagtccctgaacctaagattaatgcccttcaatgcactcacagtagtagaaccggacacataatccttttttatatcatttaattcaagcatttaagtctccttttgttttattgcgggttgcggattgggaattggtctgcgtcttaaatgttgtgtatatcagttgcggtgtctgactatagcatacgcttgaaaaatccgagctgtgtgtaacttaatgtcgctatatacataagggcggtgcgtcaaatctcgttcaagcgaagcgcgtttgatttgacacaccgtaataaactctgtagatagcggcatttagttacactaagcgcaggattcatgaaagcgtatgctatagtcagatgccacaacgtcatgtacgcaagtcgaaggatgcagacaagttcccaatccgcactcctcaattaatatacaccatggaaagcttggcttgcaatttattccagcacattttatactaatattgttttttatttataaaaatataatgattatcaggagtctatgtgaaatactttatcagatttaaattacggaatttaacagtcgccggtcttgctttgattatggcagctacatctgctgttccattttttgcttatcctgaccagttgatggctgatacacaggatgacctcgatgctgttaataaacagcttgaagaattaaggaataaacagagcgaactcaatgcatcttacggagagcttaacgagaagctgtctgcttccggagagaagctttcttctattgaggatgcagttaatgctaagcagtcagagattgatgctaccaatatccaggttgctgatatgcaggcagagattaaccagcagtatgccgccatgaagctccgaatccagtttatgtatgagaataataatgctactattctgtcaacgcttctgtcagctgaaagcctttctgaccttttatccaagtcagaatatatccagcagatttctaattatgaccaccagaagatgcaggaattaagtgaccttctggcttctcttaaagaaactcaggcaaagcttgaacaagaaatggctgaacttgtcactcttaaagatgatgccgcccgcgaagctgataattttgctgtacttctctcacaatgccagacagagcttgacactacaagcgacagcatttctgatgcagaagcacttgcacttgaatacgaaaagcagattgaacaggaaatgttagagcgtcagcgccgtgaaatggaagctcttgaagctgcaaaaaaagcacaggaagaggctgacaaagtcaataacgccggtaatacaggcaataattcatcttccggctctgctatggttgaccagaacgctcttaacaatgttcttaagaatcacactgccgaagatgttgcaatgttggcagcaattattgaatgtgaagccggcaatcagtcatatgagggcaaatgtgctgtaggaagtgttgttatcaacagagttgcagacccacgctttgccaacagcataagtggcgtaatatatgcaccttatcagttttcacctgttgccagcggccgatttgcaatagtcctagcaagaggtgcgaatgcagcctgcacccaggcagccgttgatgtgcttaacggttatatcaatattaacgcattatattttcatgtatatgacagttctgtcgatgtgggcggaaccgttattggagaccatgtattttactaactcattaaatataccaaagggagaattattaactatgaagaaagcaactaaagcatctgataacagatattatcaggcaagattttctgctgcacagaaaaatgctgaatttgaaagccgtgaagcagcttcagatgtcgtaggtatagacagaacaagacttgcaagaattgaacttggcaatgtaacaccttatgcggacgaggttgtatctatgtcaaaatgctacaacgctcctgaactctgctacaattactgctcaaacgaatgtccgattggaaggcttacaatgaaggaagtcgagattaattcatttgacagattatcattaaaaatgcttggttctttgaatgatatcgaaaacctgcgagcttctattatcaatatctctgctgatggtcaggttgatattggagaacaggaggaattcaagcagatacttgaatccctcgaccttatttccaataatgcgaaagcccttgaattgtgggctaagaaaaacattaagaatatttaacggctgtatcttacataatctaccgtaacaaagcctttgtttgcactattggcagaattatcatgtgatacatatacaccgctctttacaccaacccatcttccggctttggcaataacggaaacagggttggtgtattcttttccgtctgtgcttatctctattgttactgtctcaacaggtgcttccttaacaggaagtcctccctcaacatagtttttagttcctgtctttttaactgtgtatctgaaatatatttccttaagattatcgtatgaagcaagcaattctttagtctctttagtataagcctggtcacagtcaaactgctgcacaccctttactgcatacacttccatcttaccgcctttaacagtcacatctgctgccagataatccattcccatatgaatgaatccggcattatcaccatcagacattccactgatattcatcttagtaatacagctaaattccggtgctggccacttctgcaggagaagatttctgtaatcgccaattggtctgtttgatgctctgccaactgcattaagctttatataagaaccatcatcagacacatttccgctttcatcaataccaaactgtgcccagtcactatcaggattggcgttccactgccactgcagtcccaggctatcttctgtgaattcatctgtagtatccggctcacatatctcataaactgcaccgacatcaggtttttcgtactccatcacaggctcgccgtaatcattgccatctttcttaactccaattacaggccagtcattttcccagctcattggctgcaaatgtgttattctgcccgctgcgtacacatcctgaaaatgtataaaccagtcctgtcctgtaactgtgtcaacccatgcaccctgatgaggtccatttacaggagaatctccttgtctcataaccactttatactcatatggtccaaacacatttttcgaccttaacactgtctgccagcctgtcttaacaccgccagccggtgcaaatatataataccatccgtttcgcttatacatcttaggaccttctattgtaatctggtcatttaagttaccatcaaatataatcttttcctcaccaataagccccattccatctggctgcatctctaccatatgaagcacactcttgtatccgatacggctcttggcaactcctgcaacaagatatgcctttccatcctcatcccagaatgggcatggatcaatccagcctgcgcccggtcttatattcactggcttactccactcaccataagggtctgttgctgtagtcatatatattccttcatccggcattgggaagcacacataatatgtaccctcatgatatcttattgcaggtgcccacactccgcatccatgaattggatttctatatctgaattctggaatttcagccaaaatgtagttaacaaccttccagtttacaagatccttagaatgaagcaacggcatagccggagcattagaaaagcttgatgatatcataaaataatcatcaccgacacggattgcgtctggatctgaataatcagcgtaaagtataggattcttgtatcgtccatttcctaaatctgctgtccacatatatgacctctttctgccagtttacggctcaataatttatttctgcttatgcagatatttctctgctatcatattacaacagttaaataagaatttccagtacttttataaagttattttataaaagttttttaattgacattttattattaagtattctgcgcttaaaccgatattatatataaccgtgttcattgctgaagatgaaaggcgggtatacttatgataattgcagacagtaacatgagtatgtcttcaagaagacactactcacaaaaggtatcaagcggcatggtcgcagccggcagctctggtaactcctttagttttggaatgagccaggcaagaagcagcttaagccagaaagaatcatattttagtaattcttctgattctccggacagaaagtatgacgacatgtttctgatgatgccactctacaatcgttctggcagacttaatgtcccggacgattcttctaaaacggatttggctggtgaggaatcaccagaaggcacggaggctttaacacctgcttacaacaaagccagcttagtttctatgcggcagaatgtaagcttcagttacacagaaataacaagaaaggtttatatgtccctgttggattttattcagtctctgtctttccgtggaatgtttcatgatactgacagtttatcctgcaattcagtctctggcacatcttcatctgacaaagcctcaaaaaccctttctattactaaccagatttctcctactgtgtggactgtaagaaccagatattcttcaacctatgaagaaaaggaaagcacttcattttcaacaaccggaactgttaaaacagcagacggcagggaacttaattttaatcttgatatgaccatgtcgcgcagatacatggaagaacacagcattgaatttgtttccagctttgacactgtactgacagacccgcttgttattaatcttggatgcaatcctgtttctatttctgataagtccttcagttttgacattgattgtgatggtaaagacgagactattgcacagatgaatcctgaaagtggctttcttgctcttgataagaacagcgacggaattatcaatgacggcagcgagctgttcggaaccaagaccggtaatggcttttcagagcttgcagaatacgattctgacggcaacggatggattgatgagaatgatgaagtctatgaccagttaaaggtctgggttaaagatgagaatggcaaggacacgctcttatcacttaaggaagccaatgtcggtgcaatctgtcttggcagctccaaaacaacatttcatgtaactgatgatgataacaatcttaaagctaaagtacgaagcagcggcatgtatcttcatgaagacggcagcgccggttctgtacagcaggtggatttttaattctgtattggggatatcttcgatatccccaatattttttgtatcccttgctaatgcctgggtgctatttttctctgttcgctgacacaattccatttttgcggttttgccaccggctctgtttttccgcgcaggctgcttgcgacctatatattcataatatttgctctcttataggcatattttgcgttttttcaatccaaaagcttcttctcaacctataaaattcattatttctattctttaataggtaaaactgctctctgcaatccgaaaatccacaaaatcacttgattttttaaaaaattttcctataagagacttcattatgcgactacctataggtatcatgtattgtctgcttataaagcttcctttattttaccatcatattttgcttagacttgttttttcaatacatttacatatttttaatatattaagttattgatttttatatatttatatagtatatttattaaac

SEQ ID NO: 8530 - DNA, 198 bp, Unknown
  gut microbiota DNA sequence
attctttttactctcgacaatctttcttatcctgtcatagtcaaccataacaccacctatatctacaggtattacagccttggtacgctcattaattgcagcttcaagcgcatcataatcaaggtgatatgtgtccttttcaacatcaataagaacaagctttgcattaacatgcgcaacgacacttgcagatgctgt

SEQ ID NO: 8531 - DNA, 559 bp, Unknown
  gut microbiota DNA sequence
tcccttgcctttccatacttgccgaatatttcctcgtatcctctgtccgacatcatatatccgtcaattccagtctcttccttaagtgtatctagatattcccgcttctgctcaaattccctcaccgcagcatagcgcgacgcatatatagacacagtcgaattaatctgcgataactcgtcaattccaatctccccattcccatactgttcagaagcttccatacttttctctacagcctgcatataatcagctctgcgctcatcaatcagggcggatatctgcgaataatcagcaccacccttttcaagatatatcctgtcacgctctctggagttgtccgagaaagccatctttccataactgataaaatacataacaaccagcagaagcaccacaataaccgtaaatcccctgcttgtcacaagcagcttgtgaagttccttgaatacaacaggcacatttgcaaaaatatgctgatatccggcatacagcttatcagtaagccgtgtcagcacatttttaccctgactcggacgcataagcacagttcccatta

SEQ ID NO: 8532 - DNA, 1237 bp, Unknown
  gut microbiota DNA sequence
ttttctacatttttttttcaaaaaatcattgtcaatgtctacatttttggcttaaatactagatattcgggatttattgtctttatatataaatcaataacacccaaatgtagataaatttggagtaaaacatacaaaatatgtaatttgaagtctacaaaaaaaaatcacaagaaatttcgtagataaaaacggagtaaaacaagtatctttttaaaaaatgtagataaattcagagtaaaataatatgaaaataaatataatgtggacaaaaatggagtaaaaaggcaaatttgattttagccccaaatactgttaaattatgggctaaaagggggtgaaatgtttggataattttgcgaatattggcaaagcagctataatccagtctttaggtattcagaagaattacacagaagtaattgaaactactgtagatgccatagattatagtaatacagcttgttcaacatgtaaatacaaagctatcatcaatacatttgatgaaaatagcaagccttatgctgatgcctgtgcttcctgtgcaagttgtccacataagacattaatccaaaagaacgtgtataagaaaatctaccataatgaaaaaaaccgttatggttacagacctatgcttaaggctaatgccattaagctgtttttgttgttgcatttttatcaccctgataataacggaattgtatataatctggaagcatgtgatcttgcgtctgttatcgggtgtaatgtaagaactgtatggaataatcttaaggttcttgaagaatatacatatatctcatattcaaagaatgaatatgggcttattaatgttatcctcaatgattatgaaaattattaccttcctgccaataaaggtgggcgaggttttcttgtcatgtcaaaggagcttctaacaaaacttaattcaacagattccctggtatcactccgtatctttataagggaacttttaagtcttgattctcctgaattaaaaggtgttgcaagtgttgattacaagaatatccgcgatatacgtaatactcttccagcttactgtaaaccttcggttattaaagcgaagcttacaaagaactcagatatattcaatgttacatttaaagatgatgttgtccggttcgagattgataaagcatatattccaaagaatcagaaggcctatgtacatgaggaatatgtaggaatcctgcagaattttatatgggaatttaat

SEQ ID NO: 8533 - DNA, 8734 bp, Unknown
  gut microbiota DNA sequence
aagggttgcaaggatgtatatgggagatatatctttagagcaggagaatcaggaagtggttctaagtattatgttacaggtagaataaggacaaaaagcactaagtaatctgtgaaacatcagaatatttagagttttttatttgcttcacaacaaaaaaagggcggttcacaacatcgctgtttattgtaaagaaagatatgccgaaagaatcagtaaagagaaatcatgttgtacagatttttaaggaaacggatttcagaatttaagctcaaggaggacaatacgatgaggatcaatggatttagtgggacaaatacgcagacaggaacaatgggaatgacacaggggaatgattctgtaagtaaaaatattcagaatcagattgcaaatgcacagcagaagctacaggatttatcatcgaatgaagaaatgccattagaggataagatgaaaaagcgtcaggagatacagcaggagattaacaatctcaatcagcagttaagacagcaccagatcgagcagagaagtaagcagcagagtaaaaattcgtcatctatggatgatatggtggctggaacaagtaacacttctaaaaagaaagacaccggattgtcacaggcaagtatgcaggcgatgatctccgcagattcttccatgaaacaggcaaaggtgcagggaagtatggcaacacagatacagggacgtgccagtgtgcttgaatctgaaatcaaacaggatgccggaaaaggaaatactgagaagaaggaagaagaactggcagagctgcaggcaaaggcacagtctgcgacagcagcacagatgtctacacttgcagatgcaaataaatcagtagaagaagctgcaaaagcggagaacagcaatacagaagacactgcaacaaagaacaatactgataaatccgagaaaacacaggaatctgcgggggctgcggcagaggagacagacagcgtaaagaatacggatatcaaaggggaaacacaggtgacagtagaaacaccgactttggaaaatgcacagaatgcaacacagcaggcagtgtatacaccgattgatattcgtttatagttggtaaaggagaatggtattatgtcagagattaagagttttagtgattacacaagtaaatataacagcaatgtagattattccgcattatttggaggaacttccgacagttcattcgtaggaaacaccaatatgctttctgattatgctgcgattaaaaacggaagctatggaaaacttatgaaagcatattatgcaaagcaggatgcagaaaaattatcgggtaaaggcgatacttcacagaagcttacactgatgaaaacaagtgcggattccctgaaaaaatcagcagatgcactaaacgatgcgtcactctgggaaaaaaagaaaataaaaaagaaggatgaaaagaccggggaagaaacagaggtagaggattatgactgggatgcaattaccaaaaaagtgaaatcttttattgatgattataatgacgttgttaaggaggcaggagaatccaatacaaaagatgtccttagaaatgcttcatggatgacaggcatgacagacaaaaccagtcatttactttctaaaataggtattaccataggaaaggggaataagctggagctggatgaagatgaattgaagaaagcagatatcagttcattgaaaacgatttttacaggttacaattcctttgcaggcaaaacagcccagaaagcagctggtatatcaaatgctgcaaaccgggcaagtgcaacgtatacaaacaatggtacatattctaaaacggattcctctctaacgtcacgtaagatagataaggaagtatagtatgttaagcctaaatgacaagaagaaaaatcttttgtattaatttgtcgggaaggaggaaccagatgagttttacagtcaatttatccggtggaggtttattgataaatagatttaatagttctaatatgttgaaaagtacacaggaaaaattgcagcgacagcaggaacgggataataaggtggctttttttgaagcacaaaaagaaaatctgaaaaaccgaaaggctgacactttggaagaaatctctgaaaagctggaaatgtttcataattatgagaatgaaattgcggcagcaaatcaggagtataataattcgcagatgtttcatgtcatggacgaggcagaagaacatggcgaaaagattgcggaagctgctgagaggaataagcctaaaacagaagaagaacgaaaggaagaaatggtggatgaagctcttggaacagaggaaaacaagggcatgatgtctgaaatcatggacgaactttcggagacaaccgaagaaatgacagagcagatgacggaaaaaactgtggagaatatggaagaacttccagacgaggttttgcaggagcagcttgttacagatagtttagaggcagcagaaatggtacaaacagagacaattaaaaggtatgtgccgattgatattagagtctaatggtatttatctgggaaggaaacagctatgaagatttacaataatacaaatattacatattctgcaatcgaacataacagcaggaaaaatacgaagcaaaattttccagcagatttagaaaagaaaatgacacagtatacagatacagtatctatttctaaaacggggcaggagagatttaggtatttatcttctgtcagctctatggattatcagaaccgttttgagagggaagtgacggatatatttgtcaaagaagatacagagagtgtaaagtccgattcctttgaacattatgtaaacagaatggcgacagcatataacaaaatgaaaaacagcattgaagaaaaatatgcggaacaagattatgagctggagtattatgtgacagaatcgggcaaaattgaggaattgaccaaagaaaaagaactggatatgctgaatcaggcatatgaaaaccacagtaattttatggcaacttccacagaaatctggtcagaattacaggattttacaccatcggtagtttaccataaagaaagtgaacagacagcaaatgaacagaacataggtgagaaccaggaaaatactgcaaaatctaaagaaaagggggttatcaaaaattcggcatatcaggcatttttatccgccatccagtcggataaccagaaattatcgcagcagtatttgggtgattggaaagatttaaggctaaatctgaatgtatcagatggtaatcggaaaatgcttaatggtatttgggattattatgctaataaaaggtaatgaaagctttgtaatacgaaaggagatgttagtatggcagttacaggtgtaaacaattactctaatatttacacaaatgcttataccggtaatatacggaaaaataatgctaaggaaaccacagaaaagcaggttgtggagcaaacagaagatgtaaagacagggataacccgaaaaactgcagcggatgaactttcctatctttctaaaaaaatttgacagtgatgcggtgtggatacggtatcagtgttaaaagtcgaggtggcaaatcatcaacaatatgttgagatgatttgccgcctttttgaagtctatacgtttctcccttttataccgatacatcaatagaattacgaacgagtctgttaccattttggacaagtgtagcttctatggattctcttgtgacattatcaagaatgcctgtatcaaatgcttgtccgggcttccaatttggattggctgattttacggctgcgtacatagcagctctgtactgtccttcatattgttctaaagtccatgtaccacttaaacgattacagtaacatccatacctgtaacaccatttgcattcagtaaatctccgtccgaatcaaactgttaatattcattgacatataaaagcctccctgcaaataaattcaaaacctgtttagaatgtgcgtataatcataaaaattagaactaacatatatgcgcataatctggaggaaccatgatattaaaaagaaaaatatataaaaaactactggaatggaaaaatgaatgttaggggaaaaagctttactgacagaaggcgccagacgtatgggaaagtctaccatctgcgaagaatttgggaaaaacgaatacgaaagctatattattcatccaaaaaatttaatcgtgaaagatggaattatctgcattccaccatatatgacgatgaatatataaaaatctgacatacacatttgattttaaaataattgttattatgatattataaagaaatgccaaaaaacaaaggagaggtgtatgtatcacaagaaattagaatcagatatcagatgtccattggaatacgggctggaagtatttggaggcaaatggaaatcaagagttatatgtgttctggcggataagaagacattaagatatagtgagttaagggcagaactggtgaatattacagatgcagttctttcaacaacattaaaggcacttattgcagatgatattgtatcaagaaaatcatacgatgaaatcccaccaagagttgaatattcacttacggaaaagggcttgtctgtaatgccgatattgcaaagtatatgcgactggtcatgtgcattttacaagaaagaaactgacaaagaaacgagccagtgcatgaagtgcgaccataagtaatggatgagaggaaggttattgtgtgaaaaaaataaccttccttttcaaattaacatttattgtgtaaaatgttacatagatttacctaagcggtatactggcgagcagtaatacgacacacgcaatatgcagaaatggagcggaaattgagcagattaacgattataaccaaggataaggctcaggttacaatggagtctttatatcaggatttggagagaagaatagtagcaagtccaccgggactgtgtactatcgaccttaccaggtcatttataaaaatgtgtcttgcacagtcatgtggcaaatgtgttccatgccgtgtgggactcaggcagcttgcgagactttttgatgatgtgcttgatggtaacgcaacagaggaaactcttgatgttatcaggcttacagcagagggtatctattattccgctgactgtgcaatcggatatgaggcagctaagcttgtattaaaatgtattgatggctgcgaggatgatttcaggtcacatattgagagaggattttgttcatgtaacagtaaccagccggttgcatgtgtgaagtcatgtccggcaggagtagatataccgggatacatagcacttgtgcatgaaggcaggtatgcagacgcggttcgtcttataagaagagacaatccactgcctacaacatgcgcatatatatgtgagcatccatgtgagaacagatgtaagagaacacttattgacgcgccagtcaacatcagggggcttaagaaaatggcggttgataatgccggtaatgttcctgttccagcatgtaatgagccaacaggtgagaaggttgcaatcatcggtggaggtccgggaggcctcagtgccgcatattatctggctcttatgggacataaggttactatatttgagcagagaaaacagcttggcggaatgttaagatatggaattcctaactacagacttccaagaaagaagcttgatgcggagattaattcaatactgtctacaggaatagaagtcaagaaaaatataagcgtaggaacagacattacgcttgaggatattaacaaagaatataatgcagtatacatttctatcggagcacatgcagacaagaagattggaattgatggtgaggatgctacaacaggcgtaacatcagcagtagaaatgcttcgtgcaattggtgatgatgagatgcctgattataccggcaagcgtgtggttgttattggcggtggaaatgtagcaatggatgttgcccgttcttctgtaagattaggtgctgagaaagtaagcattgtgtatagaagaagaaaagccgacatgacagcacttccagaagaggttgaaggcgcagaggcagagggctgtgatgttcttgagcttatgtcaccggtcagaatagagaaagatgaaaatgatgcagcagttggtttatgggttcagccacagatgataagcaggataaaaggcggcagaccatcacctaagactgcagctaaggacgaggttcttattccttgtgaccttatcgtagttgccatcggacagggtatcgagacaagatattttgaggagcatggagttacagtcaagagaggaacaattgaggcacttgatacaagcgagattaaagaacataaaggagtatttgcaggaggagactgcgtaacaggacctgcaacagtaatcagggctatagcagccggaaaggttgcggcagccaacattgatgaatatcttggttaccatcatgagataactacggacgtagagataccttatgccggatacgaggacaagataccttgcggccgagttgaggttgcactgcgtgatgccgcagacagaaagaaagactttgaacctattgagtatggattttcatgcgaggaagcatgtcaggaatctggacgctgcttaagatgtgatcattttggatttggttcattcagaggaggcagagagaaacaatggtaaatttaacaattaacggtaaagctgtatcagtaaaagaaggaactaccattcttgaagctgccagaacaataggagagacaatacctacactctgctatctcaaggaaatcaacgaaatcggtgcatgtcgtgtatgtgttgttgaagtagagggtactgacagatgtgtgacagcatgtaataactttgtagaagaaggcatggttgtctacactaattcaagaaaagtgcgtacaacaagaaagactaatgtcaagctcatactttcacagcatgattacaaatgtggtacatgtataagaagtggtaactgtgcgttacagtcaattgcaaatgaacttaatatatcagagatgccatatgattcaatcttagaaaaagataattgggataaaacatttccccttatcagagatgcccagaaatgtattaaatgtatgcgttgtgtgcaagtgtgtgataatattcagggaatgcacatatgggatgttgtaaatacaggttcgcgtacaactgtaaatgtgcgtgcaaacaggaacattgcggagactgcatgtacactttgtggtcagtgtgtaagcaactgtcctgtaggtgcacttacagagagagatgatgtcggaatagtacttgatgcgattgaaaatgaggatatcattacagtagtacagattgcacctgcagtaagaacagcatggggcgaagattttggtatgtctaaggaatatgcgacagcacaaagacttgttgcaggacttagaagaataggatttgattatatatttgacacaacatttgcagcagacatgacaattatggaggagggaagcgagtttcttgaaaggcttccagaaatcaaggagtcaggacttccaatgttcacatcatgctgtccaggatgggtgaaattcgtaaagagcgagttccctgagatggcaggcagactttcaacagcaaagtcaccacagcagatgtttggtgcaataacaaagtcgtattatgcagaaaagcttggggttgacccggagaagatattctgtgtgtcaatcatgccttgtcttgcaaaaaaggacgagtgtacatgggacggcggcaaagatgttgacgcagttcttacaacaagagaagttgaaagaatgttcaaagcatttttcataaagccggaagaacttgatgaggacgagtttgataatcctttaggtgaaggaacaggtgctggtgtcatattcggtgcaacaggcggtgttatggaggcggcgctcagaagtgcttactaccttgtgacaggaaataatcctgatgcggatgcgttccagtcagtgagaggtcttgagggctggaaggaagcaacatttgaccttaatgggacaactgtaaatgtagctgttgccagcggacttggcaacacaagacgtttggtgaatgctattaagaagggcgaggttcactatgatttcgttgaaataatgtcctgtccgggcggctgtatcaacggtggcgggcagccttacaaggaagatgctgtgatggttgaggagcgccgtcatgtgctgtacgggcttgataagcgcgataatcttagattctcacatgagaatccatcggttaagcagtgctatgaggagtattttgggaaaccgttgtcacatagggctcatgagatattgcatgtgaaatagaatcatttttcgataaggtatgtgtagaccggtctgcggctgggacagtgcagggtgtacaccttcggactgtcttcgcttagcagtagtaaatgccgccatctgcagagttttttacagggtgcgaaagcaaacgcgcttcgcttgaacgagctttcgcacactgaacttttgcagatggcggcattaacttctgcacagcttgccagactcaggcgtacaccctgcactgtcccaaccgcagtggctatatatgctggattggaaatatgattttattcacggtgcgtgttcggggcaggtgtggcagacggacgcacatggtcgttgcacttcaggtgctgggattagtgtatgttgtggg

SEQ ID NO: 8534 - DNA, 3335 bp, Unknown
  gut microbiota DNA sequence
tgggatagtgtcaaatagcacatgaaatcagcgcataagtagggaaaaacctactaatgttgctaaatgtgatgaattagtaggtttatttagaagaaattatgatgaaaatagagaagaaaaaagaaaattgcctactaaatttatgatttatgcgagaatagtaggttttttggctgacaagagatgtctaatgttgtaaacatataagaaaaagacctactaaagtgtgaaatatgatgaattagtaggtatttaatggggaaagaagcataataaaccaactaacaatgtaaaaaagacctatcagattgtgaaaattgatgaaaaagtaggtttaggaggctttttatggatataaatgagttatcaccatcagaggttttctcttattttcaggagatttgtgcgattccgcatggttctgggaatacagggatgattgcggattattgtctggagtttgctaagttgcatggacttaaggcaaggaaggacgcggctgataatgttgttatatttaaggctggttcttctggatatgaggactgtgagcctgtgattttgcagggacatcttgatatggtgtgtgagaaagagccggattgcgatattgacatgagtgtacagagcattaagacctgcaccgatggtaaggtggtatgggctgacggcactactcttggcgctgatgatggaattgcaattgcatttatactggcagtgcttgcttcggatacgattgcgcatcctcctatacaggcagtgcttacgagcgatgaagagattggaatgcttggcgcaagagacctcgacacttctgaccttacagcaaagagacttattaatattgattctgaaagtgagggaatattgtatgtaagctgtgctggtggtgtgagggctgagtgtgacattccggttgtgtatgaggacgcagtgggctgggtgtcaggtggagagcaggatgacaatgcatcagatgctgcaggaaatggccaggtctgctttgaggttaagataagcgggcttgccggcggtcattccggcgttgagattcacaaacaacacactaatgcgataagattgcttgcttcacttctttcacatgccagcggggcagcagatttccgtcttgtgtcgctttcaggtggtggcaaggaaaatgcaattccaaaagaagcaaaggcagttgtaagtgtcagaagctgcgatgccacaacatttgaacaaagcatcaaagagagtgcagatgtgtggatgcaggaaatcagttcgacagagccacatgctaagattgaggttggcaaggcagacgctgcagcagacaaagtcctcaatttccatagcactgaaaatgtaatatatgccctcgggttaagtcctgatggtgtgtacagaatgagtcaggaaatcaacggcatggtgcagacttcacttaatctgggaattgcttacctcgacgcagacaagcttgtgtacaaatatcttataagaagcaatacagcggctggtaagaaattattgcttgagagagttaatacatttgtaaaacatttgtcaggaaatgtagtcacaatgtcggactatcctgcgtgggaatacaagagtgattcgcagttaagaaagatatgcgttgagagctttacaaatgtgtacggccatgaaccggaagtgacctcaattcacgccggactcgaatgcggcatacttgccggtaaaatgccgggagtagatatgatatcatttggaccgacacttgaaagtgtgcatacgcctgatgagtgtatggatgcggcttcagtggagcggacctgggaatatctgatggagatacttaaaagtttataactaaatttgcgggagtaagtgtgtgacgacagattgcatcacatttacttccgcaaatttagttatatactacagaaaaatgggtagaatatgctatatattaaccataaggagaattaatacatgataaaagatggatttttataccttgcggcacttatatttgcagccgcagtattagtaaatctacctaagatttttaaaggaaaaaaggcacaggtgttctttaattttgcaccgccaattgtacttatatacctggggcttatgttgctttgcacaatgaaagtgtgggaccttagtgcaacaagcgctgtgtacaaatcagtcaagaacccgatattatatgcgatgcttttcataatgctgcttcgatgtgatttgaagaaaatcatcaagcttggacctaaaatgcttatcggtttcttcgcagcaactttgtcaatcggacttggattctttgtttcatatgcaatattccaccagctcttaggcgcaggttcatggaaagcactcggcgcactgtgcggaagctggatgggtggcggcggcaatatgcttgcgattcaggcagcacttgatgttgacgaagcaacaatggcttacgcccttgttatggattcaatctgcgcgactctttatgtaatgttccttctatgggcaatcggaaatcacgagaagttcaacaaatggacaaaggcagacacaagcataatcgacggtgttggagcagcactcgaagaggaagcaaaagccaacacaaagccgctcgtatggcagaacatcattcttctgcttggcgcaggtcttttagtgtcagcagtttcaatggaacttggaacaatgattaatgcacatttgtctttctttgacagcgcaacatggacagtccttatcgtatcagtgcttggtatcgtatttgccctgacaccatttggcaagataaagggaactgaggagatttcaaatgtaatgctttatatagtcattgccttaatcgcctcaagagcagacctcggagcagtcggcaatgccccaatatggcttctcgcaggattcgtaatcctccttattcatgtggcaatcatgattgcacttgcgaagacattgaaactcgatatcttcacatgctgcgttgcttccctcgccaacatcggcggaacagcaacagcaccggttctcgccggcgcatactcaaatgccctcgtaccagttggtatcatgatggcgcttctcggctatgtaatcggaaccggcggcggcctggttgtggctaatctgatgagtatatttgggtagattttaatggaataattgatggaatggatagcacttcggcagtggattggtactgctggggtgctgttttttatatgttgtagaattggtgaaaataaaaagaaacgagcatccttttccagtcgtgagactttactcagtcaaaaacccatttcttaattagtatattataaaatatgtatgag

SEQ ID NO: 8535 - DNA, 1014 bp, Unknown
  gut microbiota DNA sequence
atatataattatatgtgatattaatatattaaaagaattaaaacttttctaaaataacttggtgttgattgcttcaataatcaacaccagttgcttatcaaagctggatattcatagattaacatatatctatgaaagctcgtttatgaagtttttttctaaaaacatttatagacattcattcagcaaaatccacataacacacaattgaataatgcaggcttgttttagatatccgtaaatgctaatatacttatatagataaagataatattagtatatgtgcgttgatatctgcctgtgaaagagacgaggaggatatctatggcagagaagaaagacaatgtaccatctaaatttaaggacaatgtattctgtatgctgtacagggataagaagaatcttttagagctgtataatgcacttaacaattcagcttacacgaatgttgatgatttgcaggttacaacattaaatggaggttcgtacatgaagtataagaacgacgcttcatttttactatgtatgagcctgtatatgtttgagcagcagtctagcaagaatcctaatatgccgttaagatttttgcactatgtatcagatgtgttcagggagctgttcagtaattccatgcttcacaggagaagtatgattaagattcctgttccgcattttgtgacattctacaatggtctggaaaatggattgaagatgaggatgaaatcaggctgtcagatatgtacgagattccgacagacaatccggagctggagcttaaggtgcgtgttatcaacattaacgaagatgtacatatccttaataagtgcaaaacgctgcgtgattacatgacatttgttaataaggttagattcaagatgggtgttgaaggggacgatgtcaggattgcggtaacagaggcgatggacgaatgtatagatgaggatatacttgtcgatttctttgaaaagcacagggaggaggtcgtcgaagtgagtatatatgagtatgatgagg

SEQ ID NO: 8536 - DNA, 284 bp, Unknown
  gut microbiota DNA sequence
gtaacgggaaatgtcagcatatggtgaaggaggctgatatggctgagttaaaatataatgatgagaattttgatgatgactttgacgatttcgatgattatgatgacagatttcatcaacaaatgaagttgactatggtacttcttccatatatacacagaaagatatggaagatgctgttaaagttataaaaagaaagtttaagcatatgaagggatttgaacttcataaagtctattttgtagatgacgaattctccgaaagtactttgcaggcagtaaatg

SEQ ID NO: 8537 - DNA, 554 bp, Unknown
  gut microbiota DNA sequence
ctccttaactacctgtttttcagtttgataaactggaaattatatatgtctttgcaaatataccatatctattagctgtacaccgccctcataaattgggtggtcataattgtcaataaagaaattgggaatcttgtgagaacgaacaaatccacatttttcataaaatggtatcgtcaatggactgtcacctgttccaacctgcaaaacagaatattcatctgcatatttactggcaagaaaatcaattagtgctttgccatagccctttccctggttttccggattgactgcggtattcttgatttcaagtattccgttaccttcatcggtgacaacacattcagcttttacatcattatcttcaagcacatacatagttcctttttcaagataacgatcaaccatgctctcctgttcatcagctaataacaataatgatataaactgctttttatttttgttaacttctcgaattttcatacaacttgttactccatcaattaccatctaatttaattcatcaaattgatatttattgaaacgaaagatat

SEQ ID NO: 8538 - DNA, 2803 bp, Unknown
  gut microbiota DNA sequence
tatatttctctttatatatgttattcttttaatataaaataatcataaaaggagatattttatacttatgaggcaacagataggcagtttttcatctcatataatcaacaatgaatatgttaaagttgctgtaagaatatcttccagtggaatattttatgcaagatacttgtatgtactaaattccaacagagttaaaaactttattaataaggggactcttataaaggcttgactttttcttttactaatgtatacttaaaaaagtaaaacatagactatattaaatgaaatctgaggacggaacgggcagccgtcacccttgttggagatgtgggaatgtcaccccacctatttcatttattagtaagatggtaactccggttaccatctttttcttttttgactaccatttgactaccacacccctaaaaaagccccttttgactaccattgactaccaaaactttagtgaattttagcatatcacgaaaatttaaaaagtccgtgaagccagtatttgtctagcttcacggactttttaattcaagccacctgccggaatcgaaccggcgaccttttcattacgagtgaaacgctctaccgactgagccaaggtggcattataaccgtcataatgcggaaactgtattacattatatatattatttgtttttttgtaaagccgttatttcactaacaccaaggcagaccctcgaatattctatattagaacattaaaagaaaggggctatgtgaatgaagaaaatcatcagaatatatattgcaattattgcatctgtatgcctgttcatgtcattaccggctgatatatatgccgttgttatagatgtgagcagctataatggattcatacagtgggataatatgaaaaactatattgagggtacaattatccgtataggatatggcagtgatatccaatcacaggatgatgctgctgccataagaaatatggatgaatgtgaaaggcttggaattccttacggcgtctatctatacagttatgcattagattattacgatgcagcaagtgaaactgcccatgctctaagacttcttaaaggaaggtctcccgaacttggtgtgtggtttgatatggaagatgctgatggatataaagcaagaaacggtctggatgtatactccgaaggcgaactgctgtctgatttctgcgaaatgtttgttaatgctatgcgtatcagcggatataaaaccggcgtctatgccaattacaactattttacaaatgtgcttaaccttgacagactgaaatcaatcccagagatgaatatctggcttgcgcactggggaattgattctccaagccttgactgtaccatgtggcagtttggtgcagtagaaatcgaagatgaagaatatgatggcaatatatattactcagattattctgtaaaaaatgatggcaatactgatgaaactatccgtaccgatgatagttcatccaataatataaatgtttactatcagacaaagcttgcaacgggccgctggcttcctgttgttaagaataatgaagattatgccggaatacgtggccagaatatcaccggtcttgctatcacaacagataccggctatataaaatacagagtccatgtggacagtggctggctggatttcatagacagccgcaacactgatattaacgattattataacggatatgccggcaatgacacacctgttgatgctgttgagatatattattacacacctgatgacatcattaaatcatctggataccattacgcattctacagggtaagtcctgtgaacggtaactactatagttatcagaaagataataataaagataacggaatggatggctatgccggcatttggggacatttcatagacagattacagattgatataagataatatattcaataataaaactgccggaaagaatcaccttcatccggcagttaatatactaaaataaacactatttaattcctgcttcttttaagaatcttgccttaatctcatgttcaagccttacaatatcagcatccccaactttagacccggtttcttttccatatggtacataaccccccgccatattatcatggcctcctcccgtacctattcctctaagggcattgactgccagaactcctgacagatattttccaccacttcttattgacagtttaattccatccttctttggtgaatatacaattgacagattaattccatcaagcgtgagtgtaaaatcacatatagcagctataagtgattctttacattcatatccggcacatgcaaagcatacatcttcccttatatcaatagtactcagtgcatctttatatgccttaatatcatcaaaatgcagtacactactgtcaaggtttgtaagtatatccctgtctgccatcataaaaagcttataaaacatatcaagatcaagctgtgaaacacctctgcgcatatcagctgtgtccatcttgattccatataacagtgctgttgccacatcagctggcatatcaatatcattgtcaaaataataagatgctataatcgaagcacatgcaccaacatctggtcttatgtcgcaaaacctataatcaatatgctcatatacgggatggtggtcaatacatattatttcctgtccattcatatctataatattagaattacccttctgggcatcaacaagaataatctcatcttctttgttaaattcttcaaaacttatatattccttaacattaatattaagaagccttaccatctt

SEQ ID NO: 8539 - DNA, 271307 bp, Unknown
  gut microbiota DNA sequence
acatgcaattgcatcaggatccggaaaattatgtgtctgtataaaaactctttctgtgcttatactggctattacttcctctaaacagttcataaagtacccctcatatgactttaatatttttattatattctttatatgagttttattcaatcttgattatcactttttctgatatttttcataaattatattaaccatagtatgggagtaatctattggaatcaattctatctctggatcacatatattattcttatcatgataaaaatggagagaccccggtaatcaatgacctttctttcgaaataaagcccggtagtttcacatcaattgtcggtccatccggttgtggcaaatccacactgctctctcttctatgcgatcttataaagcctgaagcaggaaccatatatataagaccgccagagaataatacagactcccggatgggatatatgctgcagaaagataatctgtttgaatggcgcagtatatataaaaatgttatgttaggtcttgaaataaataacaaaaaaactcctgaaaacattgcctatgttaatcatctcttagagcaatacgaccttgcagaattcaaatcagcgaggccatcccagttatccggaggtatgagacagcgtgcagcacttatacgcacacttgctctgaaaccggatattttacttttagacgaaccattttctgcccttgattatcagacaagactcgaagtaagggaagatatatgtaatatattaagaagtgagaaaaaaacagtaatattagtaacgcacgatatatctgaagcaattgcaatgactgaccgtgttcttatcctcacaaacagacctgccagtcttttaaaaacagttgatatcaaatctcgtgacactctttcaacccagaaatattttgatgaaataagggaggtgttaaaatgaatatgagtcctttacaacgcaaattcgtaattaagcagcgcatatattccatatcagtaacactctcccgcctgatattattcttaggttttatcggtatatgggaatttactgccgacaaaggtattatcaatgcatttatattcagttcacctgtaagactgtataagacatttatggaccttgccaaagacggagtaatattcatgcatatatgggtaacactctatgaaaccatagtcgcatttgcaataattacagttgtcggcattatatttgcaatactgttatggtgcttcaaaggactgtcggactgtcttgagcctttcatggtagtattaaacagccttcctaagtcagctctggcaccgatgcttatagtatggcttggcactaataccaaggcaattattataacagctgtatccgtagcaatattcggcatgataattaatctgtacacaggttttcttggcattgacaaagaaaaaatcactctgatacggactcttggtggtaacaaatggcatattctgtgcaagcttatcatccccggctccaagaaaatcattataagtaacatgaaggtaaatataggtctgtgtcttgtaggtgtaattataggcgaattcttagctgctaaaaaaggacttggatacctcataatatacggaagccaggtatttaagatgagttatgttgtacttggcattgtcattttgtgcattatatcaacaattctctttgcgcttataaatataattcaaaagctgtttctaaaagactgattttatattataattaatatacatttcgcaaaacaaggaggctaaaatcctctgctcctgcatgggcagtcgcattttgcttcgcaaaacaaggaggatatatgctctctcttacaattaaggatttaaagcaatttatgaataaacttctgataagcgatacatttgatggtatgtgtctttcagaagcctatatatgcacaggatgcagttatacaatagacggaaagctcaacacacacttttataatgaagatgagcttaattccatgccttctgcaagatatacatcatggaagaacattaagcctttcgcattcagcataattaagggcaggaaagttcctgaacttttaaagataacatttgtactgcctgaagcagttgttgcaaagctgatacttgatactgaccttaactttgaccccgactgtgtcaacgggttatttcttaatgtacgctatcaggatggttcagtaaccatgacaacagcatcttcgcttagtactttcactctcgaccgttcacttgatgaagcatttgaacgatatattattaacttcctgtcagatgctgatatttcctatgaggaataatttagaattatttaataaatgttacaaaaccgcctgtttacacgcacaggcggtttttttgttagcactcttgtttaaggagtgctaatttttgcttgacttatgttttcttgtgtattaaattaacatttagtttaatactatacagattggagagtgaaatattatgtcaaaagaacatggtaatttatctattaacagtcagaatattttccctatcatcaagaaatggatgtattctgaccatgatatcttctatagagagttagtttctaatgcatgtgatgctatcactaagctcaagaagctttcaatgattggagagtatgaagctcctgatgatattgaatataaggttgaaattaagctttctgcaaaagataagacaatcaagatcattgataacggtatcggtatgactaaggaagaggttgatgagtatatcaaccagattgctttttcaggtgctgaagcattccttgagaagtataaggataaggctaacgacgaccagattattggacattttggtttaggtttctactcagcatttatggttgctgaccaggttactattgatactctttcatttaaggacggagcagaatcagttcactggtcatgtgacggaggaactgaatatgatataagtgagggaaccaaaacaactcctggtactgagattactctttacctcaatgaggacagctatgaatttgccaacgaatataaagctaaagaagttcttgataagtactgctctttcatgccggttccgatctttgtaactaacgaagatgccggtgaacagactgaggagattcctgaggaagaagttacagaaaaagatacagttcttgacacatttataaaggatgctgtaactgaagaagttgagaaagaagatggaactaaggaaactgttgagaaagttccagccaaaaagatggctaagattgtaaaaagaccagttgcaatcaacgatatccatccactctggacaaagcatcctaatgaatgttcagatgaagattacaaggaattctaccgcaaggtattccacgattataaagaaccattattctggattcaccttaacatggattatccattcaatcttaagggtattctctacttccctaagattaatacagagtatgaatctattgaaggtactataaagctttataacaatcaggtattcgtagcagataacatcaaagaagttattccagaatttttacttcttcttaaaggtgttattgactgcccagaccttccacttaatgtatcacgttcagcacttcagaacgatggatttgttaagaagatatctgattacatcactaaaaaggttgccgacaagctttcaggaatgtgtaaaacggataaagaaaactatgagaaatactgggatgacatcaatccatttatcaaattcggttgcttaaaggatgaaaaatttgccgagaagatgaacgattacattatattcaagaaccttgacggcaaatatttaactcttaaagaatgtcttgaagagaataaagagaaacacgaaaacacagtattctatgtaacagacgaagttgagcagagtcagtatatcaacatgtttaagaatgaaggaattgatgctgtaattcttactcataacattgaccagccattcatcaccaacatggaatctaagaatgagaatctcaagttcaagcgtatcgatgcagatctttcagacagctttaaggaagagacttctaaagacgagttgaaggacatgactgaaaagctctctaagactttcaaggatgctcttggcaaagagaatttaactgttaacgttgagaaattaaaggatgcatctatatcttcaatgattactctttcagaagaaagcagacgtatgcaggatatgatgaagatgtacggtatggcaggcatggatcctaatatgtttggtgccgaaggtcagactcttgtacttaatgctaacaatgaccttgttaaatatgttgcagaacatgcagacggtgaaaatactaagattatatgcgaacagctctatgaccttgctatgcttagtcatgcaccactctctcctgaacagatgactggatttattgcaagaagcaataaaatcatggaattacttgcaaaataatgccatttaaactatcattgtcttatataacaataaggaaatatataacatgactaattttaactatgacaattatgacgatgatactaaagcaaaatacgatgatggtatcgaatttttagatgatgatttttcttttgatgaagaagatgatgatgataacgtttatgatattccacgttacagcgatgagcctgttgctccacatcatcataaagaaaaacaggaaactattggacaggaaatattaagttatatcaaaatccttgccgttgctgttattgtagcatttctttttaccagatttataattgtaaacgctcaggttccatctggttcaatggaaaacaccattcttaccggagacagactaataggtttcagacttgcttatctgtttcatgaaccagaacgtggtgatattgtaatcttcaaatatcctgatgatgaatcacagaattttgtaaaaagagttatcggtattcctggtgatgtcattcagatttccaacggacatgtatatgtcaatggtgaacagcttgaagagaattatcttcgggagccaatgaacaatgatggtgaagagttaacctatgttgtacctgctgattcatattttatgcttggagataacagaaacaattctaaagattccagatactggaccaacacatttgtatcaaaggataagattattgctaaggtttctttcagatatttcaatgtcagaacgaagcgttttacattttctttcattaaatagccctctgaataaagaataatattaagggtacaataatatggccgctatgtttcaaaaacaatagcggtcatatttgttttttgaaaggagaaatattatgggtaatcttaactgtaatgctgcatcttgcatgcataactgtgacaaccagtgctgtcttaattcaatctgtgtagaaggaagcttggcatgccaatgtggtgaaacatgctgcagtgactatgaacatcagaaaccaggtgcaactaatatgtgccatcttcctaaagattctttatccatctcatgtgaagcaaccaactgcatatataacactaataaaaaatgtgatgctgaccatgtagacatatcaggtataaaggctgtaacagaggacgatacagtctgtacaacattccaggcaagaggataagtctagaactattctcatcgctactcgcgcgagtagcgcatatgccagactaaagtctggcattgtcgcggtgctcctcgaatatccgcccaatttataattcatgcaagcatgattataaattctgcagctattctcatcgctactcgcgcaaaaagggctgtcatgcatatgcatgacagcccttaataatacataaaaattatgctcttgatgtatactcacctgtacgagtatcaatcttaatcttatcgccctgattaacgaataatggaaccataatcttagctcctgtctctacgatagctggcttagtagcacctgttgctgtgttacccttgataccaggctctgtatctgttacttcaagctcaactgaaataggtggctcaatagcaaatacattaccatcatgtgaacaaagcttaaccatctcattctctttaacgaacttaagagaatcaccaacctgatcagcacttaatgcgatctggtcatatgtctctgtattcataaagttgtaaagatctccatcagcatataaatactgatattctgatctgtcgatgtgtgcaagatcaaacttctcagttggtctgaaagaattctctataacaccaccagaaataatattctttaacttagctctaacgaaaggtgatcccttaccaggcttaacatgctggaattcgattacctgccaaattccgttctcatactgaattgtaataccgttcttaaaactacctgcatctaccattctttggtatacctcctaaataatcaaatgacttctaatattgtataataaatataaacatttggcaactactttttcatagcaaggtcaacaactgcttccatggcatataaatatcccttaagtccaagtccaacaacctgtccgttgcacacaggaactgtcactgatgtatgtctgaactcttctcttgtatgtacattagatatatgaacctcaatcttaggaattgctgccacagatgcaagagcatctcttactgcatagctgtaatgagtaaacgctcccggattaataactattccatcaacatcattataatatgcttcctgaatcttatcaattatagcaccttcatgattgctctggaacacctcaacatcaactccaagctcctctgccttcttctcaatcattgaaacaagagcttcataattctgctctccatatatacctttctctcttattccaagaaaattaatgttaggtccgttcattacaagtatcttcatatcaatcctccattatgcctatattaacagctgaaactatatcagcatacatgtcttcaaatcttcttccatcagtcttaactataacatcagcagcgtccttataaagcgcctcccttgcggtcataagactttcaatcttttctcttaaattacctcctgcaagaagcggtctgcttgtgtccttagacagacgctttaccagttcatcaacagatgcttccagatatacaacaattccaagctccttaataagacttctgttaacttctcttaccggcagtcctccaccaacagatataacacagttatcacagacctgtgcaagctctttgatagcctgtgtctccatatccctaaatgtctcttccccggaatccctgaatatatccttaataagcttgttatacttattctctatatactcgtcagtatcaagaaattccatattgtgagtcctggtaatccatcttccaaatgttgtcttaccgcttcccataaaaccaataaggataatattattctttctattcattaatcccaagctccttctgaagacacttatacacctcatcagcctcttccttagtaatcttacagtcattccagagctcgtaagcacttactccctgatacagaagcatcttaagtccattataagcctttttcccctgtgccttaataagcttcataaacgtagtctctcccggattatatatgatatcaacaccaactgctgcctttttgtaaaatgcttcatcatcaataacaacagcttcgtcattcggatgaagtccaacacttgttgtctggataacaatataatcttctcccggaatatcagcataatcagcaatattcataggaataaccttatcattgttaaaatgtgcattaacagcctgtgcaatcgcctcagccttatcaactgttctgttcagcagatacacacactgtgcattcttacttgaacataagaatgttatagctcttgctgcgcctcctgctcccagaataataaccttagaatcagccagttcaattccttcatcttcaagttctctcgcaagtccaagaatatcagtgttgtatcctttgaatcctccgtcaacccttacaagagtattaacagctcctatagccttggcaagcggatctatatctacaagagaatcaataacctctgacttgtgtggaactgtgacattaagtcccagtatattgagactgtaagcacctcttacagcagatgccacatctcctttttccactttaaatgttgtataaaccatatcttttcctgtcagctgtgcaagattattatgaattgccggtgacacagaatgtcctaccggattaccaataagtccgcatactcttgttgttcctttgatgtccataatccaagctcctttaagcaattaatgctttcttcttttatagaaaaataatacaatccattccagtcttctcttaagaattatctgaatttcttcatgcttatcaataggctttacaagcacagacataatacctgccctgttagcgccccacacatctgtaaaaagctggtcaccaacaaagaatgtgttattcctgtctgttcccataatatccattgccttaatataattgaccggcgatggttttgctgccttacttacatatcttgacccacatgcatcagcaagcggctttacacgcggttctttgttattcgatataatacatgtatcaaatcctatcgctcttaaactgtcaaataaatcactgcacttcttcgtaaccggtgcaccatgttccacaagagtattgtcaatatcaaatataatacctctgtagcccttattatacagtccttcataatctatgtcgtaagctgaatcaatatatatatcaggataaaacctcttaaacataacaaaaatgctgcctttcttaattactgatatatattatttaaggattttcttaatctcttccataaatgaatcaacatccttaaattctctgtaaacagatgcaaatcttacataggcaacctcatcaactgccttaagcttgctcattacaatctcaccaatagttttagttgagatttctttctctccaatattaaatatctgcgtctcaatctcatcaaccatattattaatctgtgagatagatacaggccttttatggcacgatctgacaatacccgcagttatcttctctctgtcatatggttctctgttattatccttcttaatcacaataagaggcatagattcaatcttttcatatgtggtaaaacgcttaccacactcgtcacactgacgacgtcttcttattgagctgtcatcagtcggtcttgaatcaattaccttagtgttatctttaccacaaaatggacacttcacgctatctacctccaaattaaatatataaattaattatgaataagcccagccaaaatgtcaatccttttaatgttgataaattgaaaaaccaattattatttaaggagggattatggctggatacaaagtcgaaatatgcggagtcaatacaagtgaccttcctcttcttaaacccgcccaggcaaaagaactgcttgtaaagataaaatcaggagatacgcaggcaagagaaacatttataaaaggaaacttaaggcttgtattaagcattgtacaacgcttcagccagagtggtgaaaatcttgatgacctgtttcagataggctgtataggaatgattaaagcgattgacaattttgatatatcgttaaatgtacagttttcaacatatgctgttccaatgataatcggagagataaagcgttttctgcgtgataacagcactataagagtcagccgttccttaaaagatacagcctataaagcaataactacccgtgaaacacttatgaagaaaaatcttaaagaaccatcaattacagaaatcgcagaagaaataggcatatcaaaagctgatatcgtaattgcccttgaagcagtcacaccttcaatatcattatatgaaccggtattcaatgatggtggtgacaccctgtatgttattgatcaggtaaaggacaagaaaaacactgaagaccgctgggtaagaaatattgcgcttcgagaagctattaatcggctttccccaagagaacgccagataataatactccgtttctttgattgtcttacacagactgaagttgccaaagaccttgggatatcacaggcccaggtaagccgtcttgaaaaatgtgccttgcgtgatatgaaaagacacctttgctgatatgcgtaatataataatataagcacttaaccaggtattataatgcgtctatgtgaacttaaaggaaaaaccgtaataaacgataccgactgctgcatattaggttttgtggttgatattgatttcgacccgtcatcaggctgcatactggcactcattgtccctggtcccgccagattatgcggactgcttggaagagattttgaatatgtaattcctttcaaatgcatccgcacaatcggacctgatattatacttgtaagtatttgtcctgaaaaggttaagcaaaaatgtatctgaccagtattgaaaatcctttacttatgctataaaatagtaatatatatgttttacggaggcggataatcatggataagaaatatgtagcttatgcaggcagctatacacacgaaagcagtaagggtatccatatatatgactgtgatgtagctaaaggaagaataacagaacgtgaagaggtggcaattgataacccttctttcattgcattttcacatgataagaatttcttatactctatatgtgaccagggtgtttcagcttatgctgtattagaagatggaagtcttgagcttatgaatgttgcgtccattaacggaatgcgtggctgtcatatatgcgtaacaagtgataacagattccttgttgtttccggatatcatgacggcaagattactgttttgcacatcaatgctgatggttcagcgggatttatagctgatgaaatatttcataaaggaatcggaagtgttgccgaaagaaacttccgtcctcatataagctggagcacattcacacctgacgaagaacttttatgtgtatgtgaccctggaattgaccagattaagctttatgaattcaatcatgtaaccggtaaattaaagttatacgatataatccgttcacagcaggaatctgcaccaagacagattgaattcagtcaggatggtaagtttgcttatgttgtctgcgaaatgaagaattatattaatgtatattcttatgataagaattcagacaaagaccgttttgatttagtacagaatatattcactgtaagaagagaccataaatctaacagtgccgctgctaacataacatttgacagcacaggaaagcatctgctctgctctaacgccggcgataatacagttacaatatacaaggttgattccaaaacaggaaagctctcaagccttaattctctccctatcagtggtgattatcctaagtacataaggctcttccctgacgacaagcatttaatgtcaatgaataatgaagggaattctattacaatatttactgtaaaatacgacaaagggcttataataatgaatggtccggagcttaagatttcaagacctaataatatgataattaaagaacttaagtaaatgtgtctttgacacatatattaaaatggctgccgtttagtaacgacagccattaatttttatgaatatttctcttcacagtacttacatctataaacctgcttttcctcatcagcaagtacgaacacctgctttaagccctgctcgatagatgtgatacatcttggattcttacatttgataatattagtaacctgctttggaagagatagtctcttcttctctactatttcaccattcttaataatatttacagtaatgttatggtcaacgaatcctaaaacatcaagatcaacaagatcaagaccaccttcaatcttaataatgtctttctttcccatcttaccacttcttgcattcttaattatagcaacctgacagtcaagcttatcaagacctaagtaattgtatatcatcatggcctttcctgcttcaatatgatcaagaacaaagccttcattaagttctcctacatttaacataaatttccctccttatgcatccagtgaatcaagtacatgagctaatgatggattaactgctgtatcaagtccaagtaaagtaagtataagtgccattcttacatatacaccaaactgaacctgcttgaaataagcagctctgtcatcattatcaacatcaactgatatctcattaactcttggaagtggatgaagaacatacatatcaggctttccaagtgccatcttatcttcatcaagtatatagaagtctttcattcttaagtactcatcttcactgaagaatctttctctctgtactcttgtcatatagagaatatcaagctcaggcatagcctgctcaaggttctcaacttctacgaaatcacagttattagccttaagcacatcatccctgatataatcaggaattcttaattccttaggtgatataaggacaaactttacattattgtatcttactaatgaacttataagtgaatggactgttcttccgaacttaaggtctccacataaaccgatagtaaagttatcgagtgaaccacggagttcccttattgtcataagatctgtaagtgtctgtgtaggatgctgatgtccaccatcacctgcattgataataggaatgtgcgaatattcagaagctaccattggagcaccttcctttggatgacgcattgcacatatatctgcataacaagagataactcttatagtatctgcaacactttcaccctttgacgctgaacttgaagaagcctcagaaaagcctaatacctgaccgccaaggttaatcatggcagcctcaaaacttaatcttgttctagtacttggctcatagaacaatgtggctatcttctttccatcacatacatgaccatactttgatggatcctttgaaatgtctcttgcaagatctaataatcttgccagttcatcaacgcttaaatcaagcggactaagtaaatgtctcataatagaaaagcctccgtgtgtatatttaattaaaataattactctgttctgctgtatttttctgactgaaccttaataagttctgcatcattaaaataatcaatcttcatagcagccttgacatcatcaagagtgtcctgtgcaacagcgtaagccgcttctgtacctttcttaaggatattatatacttctggaatatccttttcatattcatgtcttcttgctctgattggttcaagctccttgttgataacattaagaaggaacttcttaaccttaacatctccaagaccacctcttctgtaatgatcctttaattcatcaagattcttataatcaggaagaaattcagcaaaatcctcatcactgctgaaagcatcaaggtaagtaaatactgtgttaccctcaacctgtccaggatcagatacctgaatatggttagggtctgtgtacatactcataacctttttcttaacttcctctggagtgtcagataagtagatgcagtttcctaatgacttgctcatcttagccttaccatcagtaccaggaagtcttaaacatgccttattatctggaagaagaatttctggttcaaccaatgcttctccatatacagaattaaactttcttacaatctcacgacactgctcaatcataggctcctgatcttctcctacaggaacagtagtagccttaaatgcagtaatatctgctgcctggcttataggataacagaaaaatcctaccggaatactcgcctcaaaattacgcatctgaatctcagatttaactgtagggtttctctgaagtcttgaaactgtaacgaggttcatataataaaatgtaagctctgtaagctgtgaaatctgtgactggataaatatattagacttagctgggtcaataccaactgaaagataatcgagtgcaacctcgataatgttctgtcttactttctctggattatcagcattatctgttaatgcctgtgcatccgcaatcataataaaaatcttctcatattcacctgaattctgtaattcaactcttcgctttaaagatccaacataatgacctaagtgaagtcttccggttggtctgtcacctgttaatataatcttagacataagcgccacctttcctcatcccaaaatcgtaaaaattatatcatacttttacgcaaatggcaaaatagtttaatataaattggcagaataactgcaattcctgcaaggaatgtaagtccctcattccagcacactgcatcaaagccaaaatgtggtatcagaagcacagcaacagccgcccttccagccatctcagcaagtcctgagagaatagaatatttgccatagcccataccctgaactgaataccttgcagtaaataaaagtgccagttctgcattaaacacacttatgtatcttataaacttcacagtgtaaccgacaacaactgtatcagctgcatcaacgaatataagtgccatatatctgccggtaaagaaacatactatcatcgtgattacagaatagataagaccaatctctaaagttctcttaaatccttcactgatacggtcaaatctcttagctccgaaattctgtccgacgaatgatgaaagagctgttcccaacgcatttaacggacacagaatcagattcttaatcttatatccggatgtaaatcctgcaatggcgtcttctccaagtgcatttacataaaattgcagaataattgcgccaattgcagtaatagaatactgcagtcccattggcatgcacattttaataatgttcttcatgtaatacggatggaactttctttcatctgcattaactggaaataacagtttgtacttcttaaagatgtatacagcactaagaactcctgcaattccctgtgaaaatatagtagcaactgcagctccggcaacaccccatttcacaacaacaaccagaaacagatcaagaaaaatattaataacagttgatactgccataaacattgttgattttttgctgtctccaaatgccatcagaatcccaaaacagaagttatacagaaccgtcaacggaagtcctaagaatataataacaagatacacatgtgcatccttaaatatattttcaggtgtctttaaccacgttaaaaagagtccactcatagacgctgtgactgctgtcataatgacagcaatcgcaagtgcaaagtagactccgttaataaaatattttcttaaatcagtattctttcctgcaccaaatgcctgtgacacaggaacacttattcctatacatgaacctatacagaaataacatacaatatacgtaagagaagaagttgcaccaactgctgccagtgccttagagcttaagaactgtccaacaattgctgcatctgcaatattataaagctgttgcagaagctgacccaaaagcaccggtcctgcaaatgataataaaatccttgttatcggtccattagtcatttttgtattatcaagtgtttctgtcctgctcatatatatctcccatattgaattaaatataaaccatccaatattatagacctacagacaaaaaaagcaagaaatattataagttagttttctttttttccgcacataactataattcttgatattaacagtataattaatgtaccagcaacagctccacacccatcaatcagcacatctgtaatccttccactccttcctgacacaaacagctggtgaatttcatctgttgctgcatatattaccgccgtacatattgcagttaatccattcttccacctgataaaacctggtgtcactgctcccagcacacatcctgcaagaattgcatactctgttgcatgagctgtttttcttactggataatcaatcttttttgccatatcaacctgctcatattcttgcagattatcaaaaccgggtacaaatatattacacactgtcattccaactttaatactctggttttctgattcatctcctggttttgccgaaaaagcaaatattactatcgcccagataagtgcaattatcaaaaaaatcattcttctaatattataattcatagtaacccttaatccttacctaaaaaaatccggcataagccggattgaatataataaaatgagcagcactataagccgggttatgtcagcataagctgtgatgatcatctatctagtcctgctgttgccagcaggctcaagcgacctacctaaagcttggcgggcaacctttatatcgcttttatttggtcttgcttcgaatggggtttacatgtgccactgctgttaccagcaatgcggtagtctcttacactgcctttccacccttaccatagctttcgccatggcggtatatttctgttgcactggccttggagttgcctccaccggacgttatccggcatcctgccctgtgaagcccggactttcctcacctgcacgaatgcagccgcgatcatctgtgctactcataatatttagttgtttttgctttcgtctactatctggtaaacttctatcttaaactgatcttctttactaataccaacaaatctacagccgtatgttgtctctatatcccctgaattactcattcgtattatttctattacagttgcaattcgttctttattggcaagtataacaacagtatcgtaataagtattaggcttaaacttataatcagacttaaatgccatgccatcttttgatatattaatgacattcacatctacggtatcgctagcatacccagaaacatatttatcatcaagctgtcttaatgatatataaacattgacatcagttcttcttgattttctcttttcaatccccatgatttccctctgtactgtacaggattatacctgttctccttcatttaatccatataatgatatcattaaattattggaagttcaaatatattttttatatacttctattacttcgttaattatatattattatttaataaacatagcatccccaaaactaaagaatctgtacttttcctgaactgcaacctcataagcgtgaagtacatgttctcttccagccagcgccgacacaagcataacaagcgttgattctggaagatggaagttcgttataagacagtctattgccttaaacttatatcccggatatatgaatatctctgtccatccactcttggctggaattgttccatcttcaagtgcgactgactcaagagttcttgtgcttgttgttccaacagcaattaccctgccgccattttttcttgtattattgatcatatctgcagcttcctgtgtaacaacataaaactccgaatgcatatgatggtcaagaatattctctaccttgacaggtctaaatgttccaagtcccacatgaagtgttactcttgcaatattaactcccatggccttgattttttcaagtagctctgttgtaaaatgtaatccggcagtaggtgctgctgcagaaccctcatgctttgcatatactgtctgatatctgttcttatcttcaagtttatgtgttatatatggtggaagtggcatctgtccaagctcatcaagaatctcttcaaatattccatcatatgtgaactggataagtctgtttccttcttcaactatatcaataatctctcctataagcttgccttcgccaaaacttatcttagcaccaaccttagccttctttcccggcttaacaagaacttcccatgtatcctgtctgtcttcaagtcttttaagaagaagcacttcaatagtagctcctgtatcagccttagtacctataagtctcgctggtattaccttagtgtcattaacaacaagacaatcacccggcttaagataatctacgatatctctgaatatcttatgttcaatctctcctgtttctttatcaagcaccataagtcttgaacttgatctgtcagacaaaggatcctgcgcaataagctcctctggcagatcataataaaaatcatgtaaatccatgtactactcctttcaaagcaaaggggcggcgccacacgccgcccctttaccgaccactgcaacagctgggtctgtattactttctaagttcgattccgtcagcctcaagatccttgaatatcttctccattactggtgtgatatccttatcctcaagtgtcctgtccttagctctgaatgcgattgagtaagcaactgacttgaagccttctttaatctggcttccttcgtagatatcgaagaggttgtagctttctaatatcttgccgccgcgcttttcaataatcttctcaacttcaccaactggaagttccttaggcattaccatactgatatctcttgttacagctgggaactttgcaattcctgtgaacttcttatcgaagcttgccatttctgtaactgttggaatatcaataacaacaatatatgttctctcaccgattgagtaagtatcggcaacatccggatgaagttctccgatgtaaccaatcttcttatcagcgtaatatacatcagcctgacgacctggatgtaagaatggaataccagccttagcatcatatgttggcttcttcttcattccaatcttctcaaggaattcttcaataacacccttcattgagtagaagtcaacactgccgaaagctccgagtgtgaattcaactctttcgtccggaagctcgttaacatcatctgctgcaaggtaaatcttagccaattcatataacttaacattcttgtttcttctgttatagttagtagacaatgatgtaagcattccgtggattggaagtgttctcataactgagaaatcctctcctaatgggttagagattacaactgtctttctgtatacagaatcagcaggaagctttaacttatcgaataccttagggctctcgaatgagtatgtcatagcctgtgagaatcctgtaaactgggcaacctcagaagctgcatcttcaatactctgctcaaatgaaatcttacccattgttgtctctcccttaggaagagttgtaggaatgttgtcatatccgaagaatcttgcaacttcctctgccatatccgcgtctctgttaagatcctgtctaaatgttggaataataagctcattagcatctttatcatattcaacttcaagtctttcaaagtaagaaagcatatcttcatctgatacattagtaccaagtaaagcattgtatttagccggctcaaaaggaagtctcttcttagttacagggtcaggatatacatcaaccacgcctcctacaacatcacctgcatcaagctcttcaataagctggcatgctctgttgatagcttctatagcgttctctgggtcaagtcccttctcgaacttaccagatgcgtctgttcttaagccaatcttcttagttgtctttctgatgttagttccgtcaaatgtagctgcttcgaaaagcattgtctgaacatcatcagtaatcattgagttctcgccacccatgatacctgcgataccaaccggcttctcaccgtcacagataagaagtgtctgtgcgtcaagagttctctcctgtccgtcaagtgttacgaacttttcgccatcagttgctgttcttacaacaatcttgtgacctgcaatagtatcatagtcatatgcatgcattggctgaccatattcttccataacatagttagtgatatcaacaatgttgttgattggtctgatacctgctgtcataagtctttgctgcatccactttggagatggagcaagtctgatattcttaacaactcttgcaacatatcttgagcaaagttctttagcttcaatatcaactgaaaccattgtgttaacatcctcatcgttacctgtcttagtaacaaccggtggattgaaaggctttctgaatgtagcagcagcctctcttgcgataccgataacgctgtagcagtctacacggttattagttatctcatattcaaatactgtatcattaagtcctaagtactctaccgcacttgaaccaacaacagcatcatctcctaatatatagattccttcctctggtgcatccgggaagaattctcttgaagaaccaagttcctcgatagagcacatcataccgcatgactccacgcctcttaacttgcccttcttaatcttaattccgtcttctggaagtgcaccgctgtcatgtcctccagcaactttacctccgtctaatactacaggaaccttctgtccgcttgaaccaacttcaatattaggtgcacctgttacaatctggacattctcgctgccaacattaacctgacatattacaagcttgtctgcatcaggatgtctctcaactgagagaatctgtccaactacgattttatcaaggttcttgtcaaatgcattaaaacactccaccttagttcctgaaagtgtcatagcatctctgaattcctggtctgtacactcaagacctggaaccattgcttttatccaatttaatgatgtattcatatcgtcattctccttaaatatactttatcttattccagtcgttagaccactatatgaatcgatttagaactgctttataaatctgatatcgttctcataaagaagtctcatgtcatcgatttcgtacttaagaagagcaactctctcaagtcctacaccaaaggcaaatcctgtatattcttccttatcaattccacaaagctcgaatacatgtgggtgaaccattccacagccgaggatttcaatccatccctcgcccttacagaaacggcatcctttaccaccacatttgaaacagcttacatccatctcggcactaggctcagtgaatgggaaatgatgtggtctgaatttaactttagtatcaggtccgaaaagctccttagcgaattctgctaaagttcccttaaggtctgcaaatgtgattcccttatcaattacaagaccttctacctgatggaagcatggtgaatgtgtagcatcaacttcatctgctctgtatacacgtcctggagaaatcattctgatagggagcttgcccttctccataactcttgcctgaacaggggaagtctgtgtacggagtactatcttatcattaatgtagaatgtatcctgttcatccttagccgggtggttagctggtatgttaagtgcctcaaagttgtagtaatcatactcaacttctggtccatcaactacttcataacccattccgatgaatatcttctggatttcttctaatgcaagtgtattaggatgcttatgtcctaactcatccctcttagatggaagagtaacatctattacttcactctttaactgaagttctctcttcttggcagctaattctgtcttagccttatctaatacttcttcaattgcctgtcttgtctcattaacaatctgaccaaccttaggtctgtcttctggtgcaacttccttcatacctttaagtacttctgtaagttcacccttctttccaaggaaagcgactctgatatcattcagtttatcaagcgaatcagtttcattaatctgtgctaaagctctttctctaattgcttcaagtctttctttcatccttatagcctccatacttctttcgctttttatcattcatatgcgtaaaaagccactgtttattgtaacatatcaattttattttgcaacccgtgaatgtcgcttctcatacatttcaattacgcgcattgcaccatcgctgtgtgccggatttgaaagcgttatctttttaatattttcctttgcttcatcaatacgtttttcattgtactctatctgctgccttaatttataacggcgagtatttatttcatgccgcacttcaaccatttccttaggattaatgattgccctcactcttccaagccatatatgtggactgtaaagtcctaaattcttaagcatattctcaagctcattttcagcagaattaagtgatgatgtcatatcaagcattctaatctgctcttttttcatctcctcgtacagtctgtatttcttatcaagttcatatgaacttttaactccgaactttgtatattcataatccagcgtatttgctgcattaatgaacttaatctttactttgttaagcagtgctgtagctttattaagttttatttcagttataatcacatttctttcagtaacctttaataaagcaaacattccaactgcaagaattgctgcaaataaagatattcctataaaaagtgccgtatcactgtcattttgaacaagtgtcatcgatataagaaatactgcaaacactgccgcaagcgcaaagattgctgttttcgcaagccttcttatcttaatctgtcttgtaacaagaacgtccgcatctgttctaagattaagctgttctgcctcaagtatccttaaatctctcttaacagtatcataataatcttcggatgctttcaaaagctttattccacctggcatttcattttccacagcttccatgcgcctgtatgccgcatttgacagcttatgttctgtacttttaagaatacgcctgtcaaccatcatgttgtctattgtctctgcacagctcaatattttatcacgtatctgtgtgggagcttcttccataatctgtatatcattatattcttcagtaacagcctcatactcagctttagcattttctacatgtgtcgctgcttcttccatgatatcacactgttctcttacataaacctcaatatcatgtgtactgaaatcctttatattgacactgtctatattcctgctcatcgcatattctgcaattttatcaaggtcggatttttcctttggaagctcaataggtatagcatcgatctctttgcggtcttcctcatcctttccatatttctcaactgccttgataagtgtctgtgcctgcatactgtttaacagatgatcatatttttcttcttctatcttggcctgctgctgcttttcctttgttttatcatcaagctctccgctcttgcgttcttcatgttttttcttattcttcttgtcaaatgtttcatatatattcaatatattaaacattttattggcagctttttctttttctgcctcttctagcagttcctcatctctgtacgattcatcatcgtaatcatcatatattatttctttttctgcctttttaaatattcccatatatccaccacaattctttaaaatgttttgctatatttaatgtattccgttctccacctgtcaagtctttcatctaccgccctgttgtactgtgccagattgccatctgcttttaatctggcaatatcctcaagttccctatattcatcactatatctggcattgtccatcaaagtttccaattccttccggactacatattcttcttcatccgtatcaacattaacaggttctttatccttctttgccataattaaagctgctatactgcatttttttgactcctcatgctgacccgtcctatatgcctcatcataatatatcactgctttatcatacataaacattcttgcataggcagttcccatgttatgataaacctttgcataatcagctgccaacaaatcttttcccttgtaatcttttataattgactcgtaacatctgacggcggcaaaataatatccagcattgagatatccgtctcctcttgctttaagcctttcgcatacgctctgctttccaagagtattaagaatctcttttaactgctcaatctctgcaacagaataataatctattgtcttgagtattattacaaatatctgtgctaatgaacctcctgtttctttcagcttccttactctttctgccagctctttttctccggtttcatcaagaaaactgataagattatcatctataaaatcctgtccaatcagatatatattattataaatataataacagagttcttctgctgtatataacttcacacctgtctgtaaaacagtcagtggtgtatctgccttctttcctctgcacagtattattttccccattgtatttctccgtttcctgatgttttccacattctcagcttcttaatacaagttctttgcttataacttttcctgaacttttgacaaactcgccaaatccaagatcttttattgtaatattacacttgtcagaatctgcaaagcttacgctcacagatactcttgttgttttcccttccctgaatggaatttcacttatatcaacaacttcatcataatatttattctcaggtgttattattttaaatgtaatgcttctcatatcctcaagtatacattccacagtccgtccggcagtataccagttacttcccggtcttaccagcctgaatctcattggcttttcatatgacgaaatatctatttctataccacatttcacatgattatcaagaagcattatgacattcttaaacacttccggcttcaatatctccattgccgcaaagcatgcaccctttgcaaaaagattctgtccgacaaatgcttttcttctcgtaaccataagctttgcaaatctttcaggaagcttttcaacatcaaaaccttcacctgtaagatatgccgccgaaacatgtcttttagaaaaatactcttctgcaaatgtacacaactcattctcagcctgtccaagttctttgcttatcacagctttttttaatatatcagatgtgtatcctgtatgttcctgaagcagatagttactattgtcattcttcctgactgcaagataatcacaccttattccttcacttgtgtagtcaaacagtgccacaccagcagcatgaagctcacttttctgtctgtacgcataatatgcaaagctttcaactctgcttaatacctgccatctgccatctgatacaccacattttttaagagtatccctgacagcaaatatttcatcagaatgataatcgggaatggttacacatatgctttgaatctgtgatgtacctattgctcgcatacattcagcgacaacatttgcaagactggtcttttcctttgaatcctctgtcagttttaccgtctgcacattccgtgaattatatgaatatacacttgcctgaattttactatatcctatatctattcctgctataagtcctttacactgctccatatctgctatcctcatttgacaattgtaaacatttctcttgtgacgtattcctcaacacagtaactatacatgagctttcttaatgttgtaaggtcatgctgctgtctgcttgcaagacaatcattaagcatgtcaatccttccatctgtgttctctgatggaatatccttatattcgcagactaccggctctgtagatgcctgttcattgctgtcattaactataaatgtatattctaatgaatccccataaaacagattaaacctgcatgtaaatattccccatccgttagacttcataacctgcaccagcctgtcagccccattaatactatatgtcaaagatactttatcatctggatctgctatgtattcaacaatagtaagtccctgcatattgtatggtaaatccagtattcctttgaattttttgaaaaatccatatattctgtcatgttcacataattcattaagaactgattgtgcaagttctttttcagatgtatcttctcttaacgcaacagggtttcttgacagattcttaagccatgctacataacaacactctggcaatccatatccatcccccatgcactcctctataactctgaatactatatcattagccttcttctgcctgagaagatagaattgtgaattataagataaatatgcctttactataagcatatcaggaatcttactataataatcagcaaacacctctgtaaattttccggtatgcacacctgtatacatcatctgggcaagaattctttctgacatatgcaatacatttacattataattaactgctgctttccacacagcatacatttcgtcattagttccattatagtattcacacatataggcaagaacaggttcattataaatgttatgtctaaatatatattgagtaacctcatcaataatctgactatgtccgtctgatacatttgtaagaatatagtcagtcattttaagaagttttgccgcttttgccatacaacaaccgtatatacctgctatctcatatgcctgtgaatacattgatgaatctataagtatctctatcagctttcccgcatccttcttcgtcagattatctgtatcaacataattgtattcatgccagaaatcatcttcttcataataatgatagtaataatcaatcatccaggcattaacctgctgtttatactgttcactgataccatgttccttttttattgttttgtacagcttaagtgtttcttgtgtatactgtgaattctttctcatttcacagattctgctcataattattctggaattgttctttccataatcacctgcagcctcaaacacctctgcatactgctgtatatcaaacactttttctatatcataatcaattgtatcttttctaatctgtccgtcaatacattcaaatgtaatctcgcagtcacttccatatatacatatatatgctgtttcccctgaaagctcatatactgtttcttctgtaaactgcggatatctgacatgtacatatcttaccacatcactaaagcactgcattctgtacatatatggcattttacttacaaatgtgcctgtgtcatcacacacaagctgtgtcttaagaagtgccttgtataatacaacaagattgtcactgatattgccggctttaagctgttcatacacatatatctctatatttctttcataaccttcatagatattcttatagtacgaatctctgcccgtcgccacatttgcatataaaaatgctttatcttcatctgcaagagtattgtcatatgcaaaatacatcaacactatctttggtagctgcctgtctgtctttttaggcatactggcaatataaaactcatataatcttgttatttttaagcctcttaatactcctttttcatatatctcaaagcagttttctcctgtcatgcccattcttaccatctgggttacaagaactgtcagtatctcgtctttctcatatttatcatatatcttttttagtataataagagtattaatattaatattcttctcattagccacaacatctgcaatctgcattgcaagcttctcactgataatgtcgttcctgcatccataattaataacctgcatttcaaactgattaagcacccgtagtaaaacaggctgtgcattaataatattcatagcctcaatatacataacagggcttacgcatcccgaattaattacatcctttattcttacaagtcttatgctcttattatctgaatctgtactcaggtaaaatagtatccatagtattctatatgtatcatagccattctcaaagaacttcttaacctgtgataaaacctgagccgtatactcctcttcacgcacaataagtgtcgaaacatacagaaaatagcagtaaagttctacattttcgccaattcttccgactatatctttcttgatattattatatatctgtgttgctgtttcctctcttccggacgccataagcagttgtatctgcacaatatcataaaatacatctgtgcccttaattccccttattctgtcaactgtctgcatagattcagcaatccatttttctttcttgattttcttcattctgaaatcaagataaagcttcgtaagcttatattgtgccagtttttcttctcttctgacttcaaaatcttccgattcgtcagctttcttacatataacactcacatttatctttaaatgctgcgtataacttactatatgtatatatccatagttgttgcctgcatgcattttctgtggattaactatatatttaattacagccctgtcacctgcaaaatcatcagttgataagctgcctttctctaattcaataaaatctgcatctgcatatatatcaatctctgtttcttctgtgccactctttataagcacacattcaaactgctctgcttcatctttgtgtataattgtattctcttcgttatcaatgtgtagaacaactgcttcagtcttaacatgatttcttatatcatcctgattctctttcgtacatctgaatacaaatggtatctttttctcgccggcattacatactactgtaaatgttccctctatctcatcattttcttcaagtccggaagcgtccacctgatattcagttataatatgcgtaccaccaaattgttctgaaaaaatctttaccctctcattatcagcatagaccattccataaaccttatcggtggcatcacatatgaagcttcctgtagcaactgtattacacataatatccatagtaatctgttcctcactacatgacagctttggtactttaataattgaattgcctcttgaaagtctgtttatgtaatccctcattggaaactatgcctccgacttaatcttatccaaatgtttcttaatatccctctcatatcccatatctcccggctcatagaatttttcattcacataagcatccggaagatactgctgtctgacataatgattaggataatcatgtgcatataagtatcctacaccgtgtcctaacttggcactgcccttataatgggcatcctgcaaatgtacaggaaccggtgcagtctttgaattcttaactacatcaagtgccttatcaattgccatgtaacatgcattactcttaggtgctgtcgcaacatagagtgccgcctgacttaatataatacgtgcttccggcattccgatgcgctcaacagcctgtgccgcagccactgcaacctgcagtgcattaggatcagcattgcctacatcctcactggcacatatcattattcgtcttgctatgaatttaatatcttcacctgcatacagcatcttggcaagataatagcttactgcatcagggtctgagcctctcatgctcttaataaatgctgatattgtatcatagtggttgtcaccctctttatcatatcttaccgagcgcttctggatacattcctgtgctgttgcaagatctatatgtataactccatcatctgatctgtctgttgtgagtattccaagttcaatggcattaagtgcatttctcgcatctccgttggatatatctgcaaggaattccagtgcatcatcgtctattgctgcattgtagcttcccatgcccttcttctcatcatacacagcacgctttattattgtcttgatatcttctttctctagtggttttaattcaaatattattgaccttgatattaaagctccatttacttcaaagtacggattctctgtcgttgcaccaataagaattattgttccatcctcaacaaatggaagcagataatcctgctgtcccttattaaagcggtgaatctcgtctacgaaaagaatggtctttcttccatacattccaagattgtctttcgccttggcaacaacctcttccatatccttctttccggcaactgtggcattaacctgattaaactctgcacttgttgtattagcaattattctagctaaagttgtctttcctgttccaggtggaccataaaatattactgagctaagcttatctgccttaattgccctgtaaagcagtttgtcctttccgattatatgagactgtcctaccatttcatcgagtgtttccggtcttaatctcatagccaatggagattctgtattcttattgttttcacgcatatattcaaataaatccataacttatacctgttttaatacatttgcaattatcttagttctgttccaagccacaatctttcaacgtagcctatattgctgatatcatttcccttcagtgtattagaataaagaatattatcagcatcatacgcatagattcggttcttgtaaaaatatgttccctctgtatctgtaactgcatctgattccagaattgcaacagctttgctcttaatgttatccatatagtactgcctgccgcctgaaacatatgttaaagccttacttttattatacactttagataatgaacctgcattaacatctgacgcaatgtctgtaatcttgttgttatcaactactcgaagctgtcctttcgcattaacatacactatctgaccatctgatgaattatatatgtaattcttttccttagtcatagaatcaacatccacatactcactcactttagtttctctgataagtgctgatgtcattgatgtacctgaaattctgtatataagcgaattgtctctatcaaatacataatctgcatcattgtctgtcttcctgtctatcttatacgcagatgcatctttgcatgagtaataatatactccatcactcttagaatacagcaatgtatccacatcttttcttgtattaaggctgtctgcattcgctgtatacacacctgtcatgttctctgacaccggccataactgcataactgcatctgcaactgaaaccggcttttcttttttttcataatcatatgtatacaatgagcctgcattagtaagacatactatcaggtgctttgactcatacacatatgccttattaagattaccctctataagagttgtctgtgcctcaggctgtttcttaacttctttgactctgctcatggcgaggcttgttccattagtagaaccctcgtcattaataatattaatattcgtgtatataacaagaccgtcatcagagatatacataatctctttctgcagattatcttctgacacaagaacacattcgtccttactccatatgtacattgaatatctgccagacgagttggactcatcatatgttaccgtaacaaaatactttccattgtcactcgcaacgcttaagatattcttacctgaatctatctgttccggccactgtgctgtatagaaagtcttactgtctgccgcaaatattgcatcactttcatcacacacataattgctgtccagccctgctatatcatatatctttccgttgtagcttacataaagagcataattcttcttagttgcaagcttgtatattccaaatgctgcgacaccaataagcactactgctatcagcgctgccgctatcattttcattcttttgtttactttatgtcgtgcaattcttatctgtggcttttcctgattaccattcctgttgccacctgtttttccgctactttgtccctgctttctgctgtccgctttgcttctgttctgactctgcttcttactttctgtcttgtttctgctctgcttctttatcgcctgcacgcgttttgctaatgcctgtccatagtcactctgtgattcctcttttttatcagaagaagcagacctctctttcaaagcctgcttctcctcatatgcttttcttctggcaagataatcactgttgttaactaatataacaggtccatcacatcttgggcactgactgccctcatattcctgaccacatttagtacacagcataattctttccttttaattatcgatttaaattccgttcttttattaattaaaatctgaacttatcttcaaaatacgccttaagatctgctatctttattctttcctgttgcattgtatctctgtctcttacagttacagcaccatcttcttctgaatcaaaatcatatgtgatacagaatggagtaccaatctcatcctgtcttctgtatctctttccaatattacctctgtcatcaaactcacaattgtaatacttagaaagttctgcatacaccttttctgcaccttcatttaacttcttagaaagtggaagaatacctatcttaactggtgctaatgctgggtggaaatgaagaactgttcttacatctcctccttcaagctcttcctcatcgtaagctgagcaaaggaatgctaatgttacacggtccgcaccaagtgaaggctcgataacatatggtatatacttctccttagcttcatcatcaaagtatgacatatcttcaccagatactgtctgatgctgtgtaagatcataatctgttctgtcagcgataccccagagctcgccccatccgaatgggaagaggaattcgatatctgttgttcccttagagtaaaagcagagttcttctggtgaatgatctcttgctctcatctcatcttctttcattcctaatgccttaagccagtcgatacagtactgtctccagtatgtgaaccactcaagatctgttccaggcttgcagaagaactctaattccatctgctcgaactctcttgttctgaatgtgaagttacctggtgtaatctcattacggaatgacttaccaatctgtccgataccaaaaggtactttctttcttgatgttctctgaacattcttgaagttaacgaagataccctgagctgtctctggtcttaaatatactgtgttcttggcatcctcagttacaccctggaatgtcttaaacataaggttaaactgtcttatatctgtgaagttatgctttccacatgaaggacagcagatattcttctcatcgatgaaattcttcatctgctcctgtgtccatccatcaactgaaccgccgagatcatatgaattctcgtctgcccagtcttctataagtttatctgctctgaatctctcatgacattccttgcagtccattaatggatcagaaaatccaccaagatgacctgatgctacccaagtctgagggttcataagaattgcacagtcaactcctacattgtatgggctttcctgtacgaacttctgccaccatgccttcttaacattgttctttaactcaacaccaaggttaccataatcccaggtattagctaatccgccatagatttcagaacctgggtaaacaaatcctcttgccttagctaaagaaacaattttctccattgtcttttccataataatataatcctcctaaaggcaacagcctgactacatcgaactgcatcggctgctacataatcttaatcattttataacatttagtgctgattagcaagaggttgatgggaatcttgttttggacttcctccgtgcttcccaccgcttcaacgtccaatcctccgctctttctcactccttttggacttactccgtgcttcccgctgcttcaacgtccaatccgccgcttctgcaaatcccttttggacttactccgtgcttcccgccgcttcaacgtccaatccgccgcttctgcaaatcccttttggacttcctccgtgcttcccgccgcttcaacgtccaatttgccgcttctgcaaatcccttttggacttcctccgtgcttcccgctgcttcaacgtccaatccgccgctctttctcactccttttggacttcctcccgccttcccaccgcttcaacgtccaatccgccgcttccacgcatgcatttgtcgtttgtgaatattttataaattattgcttgactttaatgccagaatattttatattcttattataatcgcaacgcattagaaggaggatatttcttgtttatcaattacaacatttcagaaattatcagccagctttcatctgccatacattatgatgaaagcattgtaaagaatctgcctgatggcaagctcaattgcacacataatggacgttatattaagtggtttctaagcgatgggaataatatatcttacatacacaagaaagacagacatcttgcttccaagcttgccttgaaaaaatttttgttatcaagaattgaagataataaaaggcttctttccacatacaagcaatgtaacagcaccaatatccaatccgaattattattaaaagataacgattttaggaaactgcttacagactatccagagaattccaagcatatatattgcaaccgggatttattcagagatttccacaatgaacagtttcagcctgtcattgattcatggctgtctgaagaatataatcacaacgaagcatacccacaagcgcttaagcatccatgtacatccggcaatgtcgtcaggtcgaagtccgaagctatgattgacttgttacttaaccagtatggaattccataccgatatgaatgtgaactaaagcttgacaacataagtttctatcctgatttcacattatttaatcctatatctggacagcttgtttactgggaacattttggcatgatggatgacccgcaatactctcttaatgcttcaagaaaaatatccagatacatagctgggaatattattccgggaattaatttaataatgacatttgaaacatcttccaatccactatcaggagttattgcagagtcaaagatagaggagtacctgctgatatgcaacaatcagcaagccccctcttaacaccgtagcaattttattcaattacaaccatatttgccaccaggtttcccataatagcaattcaacataactatgcattaatcctcccaaggacgaatcctgtaagcagcccctatctcatcacatagcttctggcactctgcctcttcctcatgagatatggttgtgtcaactgttgtaaggacaacattagggatatacttagtacattcctttgcgaaacttatcatttcatcaaatgatttttcgccgaacttacttcttacaagtgcattgtattcatctttgtgtggattgttaagactgattgatattgtgtcaatcaagccttccatctctggcacgatgtctctgccattaacaagatttccaactccattagtgttgattcttgtctttttgccatatgttttcttgacatattcagcaaccttgataagaacttcgaatctttctgttggttctccgaatccacagaatacaacctcttcatactcatccatattgaacttttcaaattcagctataacctcatcatatgatggttctctctcaagccagagtctgcctgactctccgattctgtccattgtctgtcttaaacagaaagtacatgaatatggacatttgttagttaaattaacatataaattattatgaaccttatataatatctccattgtaattcttctcctttttacttcaacgtagtcagcagttcctcaaacggcacaccgtctgtcagcggaatatccatctctatcgccttgagtatgcatttttttataaatgtagatgcttttcttactgactcatggaaattcacaccatttacagcatctgcagctattatagatgcaaatatatctcctgttccggaacgctgtgttccaaccttcatagtcttaataagatagtcttccctgttcttttcgtaacagtaattaccaatataatggccccgctggattcctgtaataacaatcttggatggtcccattgcaacaagcttcatcgcaatttttttaagctcatcattggaataatccggtctgtatggttcgtcagttataatacatgcttctgtgagatttggagtaagaatatctgcatattttacaagcttcttcatctcctggcatgtctcatcagtatatgtcggatacagatttccgtaatcacccataaccgggtcgataacaacaatattatcttcagtcttgaaattcttgaaaaattcttcaacaattgcaatctgattatgtgaacctaagaaccctgttacaattccatcgaatttaaggtttaacttcttccactctgccatataaggcggcatattctctgtgaaatctttaaaataaaagctgtcaaaacctgtatgattagaaaatatcgatgtaggcattggacagcactgaatcttcattgctgatataacaggcagctcaactgcaatagaacatcttccaaaaccagaataatcattaattgctgctattttcttctggttattatgacacacatttttatccggcatattgtctctcctttcgtctgaatgttacataaaatctttaccccttaatatacaaaaaactggcatatgataacatagccagtttatgtaatatttatatggtcagattaagcatttccttcgacttaaattctttatcgaatacaatgctttccagcctgtttaccacaagccttaattcttcctggacttctttggtaacggtgaatgaatacagcctgttaagctgtgttgtaacaatatactggagtgtatataccgttgagcccgaaagtgtaattccatcatatacatttgtggcacaattcttacagcatagtccgtttcttgaatatgaatatacatacagattgtcttctcttccgcattcgtgacatgtgaagaaatccggacattcaccgttgactgcaatcattcttatctcgtatatgaatcttataagttcatggcttacagcacctctgcccaatgcctttagagtgatataaagcagattaatcatttctgttgcatcaagattctccctgccataataatctgcaatctcagcaaaatagcaggcgtagcacacggcattaaggtcatttaccacattttcaaagtactccttagccgatgctttatacatcgtatatgattcgcgtccacgatacacctcaaatgttccgaatataaagcttctcgtaacaccaatcaatgcgctgttaggctttctcgcacctttcgcaaataccgttatcttgccatactccttagtcagtataaccagtcttctgtcatattccccgacaggcatggcggaaagtatcatgcctgtaacagtagtaacctccgccatcgcaccctcctgtcatgtatattatttgtccttcttcttgtcatatccgaagttcttaagaagaatatcactgtcgcgccattccttcttaacttttacccatagcttaagattaaccttcatgtcaagctgcttctcaatctcatatcttgcattagttccgattttcttaagcatttcgccgcccttgccaataataattcctttgtgagaatctctttcgcatatgatagtagcgtcgatatctgttataggacctcttgcatttcttctttccttgaagctgtcaataacaaccgcgattccgtgtggaatctcatcatttaatgcatgaagtgccttctctcttataagctctgcaacaatctgcttcattggctggtctgttactgtatcttcatcatagtacatcggaccataatcaagatgtgagaatataacatcaagcaggtcgtcaacattattgccgtttcttgcgcacacaggaacaatatcaacaaaatcaagttcctttctgtagcagtcaataaccggtagaatctcctctttcttaattgtgtcagtcttattgataacaagaactataggagtcttacactctttaagcttctcaacgatatgctcctcggcagctccaagatgtgttgtaggctcaacaagccagcatataaggtcaacctcactgattgtcttctctgccgcaccaaccatgtattcaccaagcttgttcttagccttgtggatacccggagtatcaacgaaaacaatctgtcctcgctcatcagtgtatacagtctgtattctgtttcttgtagtctgaggcttgttagaagtaatcgcaatcttctgtccgattatctgattcataagtgttgacttaccaacattaggtcttcctataaatgttacaaagcctgtcttagttcttgtgttctctgccttagcacccccggtaattccactggctgcaagcatctcatctaaattcatacattcttcctttctattatccctgcaccttgataagtggctgtatcttatcaaaaagctcactctctttattgatttccttgctgcttcccacaacgcagaaataattctcatccattgcacatcttacaagtggagcaagctctcttattctttctacattacagtcaagaacctgacctctttctttcttgagtgattcataatctgtgttacagatgtatgcaccaaatgatcttgttccctttgctgccggattcataggtgtatctatatcaccgattgttcctattatgaacttgaccatatccctgtcgcttacatcaaaatgttcaagatagtctgctgcattttcatatatatcgttagtctttcttaagttagggtctctgtaagaaaccatatacatgtcaccgtttctgtaagaaccgctcatgcagccgtatgcgccgcctttaactcttacattaatccagagataatcatacgagaatataaccttaagcactcttaatgctcctgtgtattcatatcctccatccctgaaattaccacatcttgcaacatactgaacctgtgaagctgaagtatatcctgtcttgacatttgcaggtgtgtactttctttcgcatgctggcatgtccgattttttcaattcttccgcatactttccaaaagcaggtacaaatgcatcatatcccttatcatcagcagtaaagctcacaataatattctctttgtggaatatataatcgacaagtttgcttaacttatctgcgatatcttccttaagctcatcaaactgtgagtcaagcttctgtataagctcatagaacccatatcctctcatctcgttagaataatatgcatttcttgagaactgtgccatacctgcaagcattgctgttgaatgtcctgcacttgtcattgtgctttccattcttgacttaagcttcgcaattatctctttaagtctcttataatctgagaactttgtcttatatataatttcattcatcatatcaaggacgaactggatattgtcatagagaaccttacccttaacctcatacataatagtacatttgtcaaaatccttattatctgtgtatatggcagcatcagttgagattccaccacagttaatattgatttcattagtcagctctgtatatgtgtacttttcagtatccataagtccaagaaccgagcttaaaagtccgatatatggaagcagttcatcaggcacattcttacagtcgtagcacatcattatatatgcaattccattagtgaacatattgtggtggattacatcaacaccaccaatcttcttagggtcaatatataacttagccggctctcttgtgatatcctttaactcaagctgtggaatcttctcaagatccttctggcttgaaggtgtatcctgatattcctttaatgcctttgtctgcttaacaagctcttccagctcttccttggaaagtgttgccttatactttgcaagctgctctgcttcctttgcttccttctcctctgcaagtccatgctttggaacaaggcttaacactacctcatgattattattaataatattgtcttcaatgaatttctcaaagaagccattctctgaattcttcttgattatttcaaatgtctcacctgcctcaacatgaacaaatggcttgttctcatcataaagccagctgtccatcattgtgagataatacataagtccctttggatatggtccaaaatcagcttctctgtatttgaattcgtaatagttgattcctgccttaaccattctcttgctaagaccgttcttaacaatatcagaaagcgtgtcttcaacaacactcacaaatctgtctctgtcactttcattcgcattcttagtaataattgaatacaccggctgatacacagaagtctctaacacactatacacatctgttccaattccggcatcaataagtgcctgcttaagcggagcacccggtgccatgataagtgcataatcaagaatctgtaatgcaagatagcttactgggtctgttgatgttccgataacaacattgtaagaaagataagtgttatcctcctctggctcatcatcagtaattgcatactctcttgtctcatacttaggtgcgtcaaatgctttctggaaagttacctcggcatctatattgacatcattcttatcaaaagctgagaggtattcgttattaagatattcaagcctctcatcaacatcaatatctccgtacagatagatataactgttcacaggatgataatattccttgtgatacttaatgaaatcttcatacttaagctgtggtatagcctcagggtcaccaccggattcattcttgtattcagaatcagggaagagtgatacaaatgtatatcttgaaagcacatcatctgctgaagaatacacacccttcatctcattaaatacaactccgttataagcaagctctccatctacatcttcaagctcataatgccagccttcctgcttgaatatctcctcatgctcatacattgcaggatagaataccgcatccatatagacatccataatattcttgaaatctgccatattgcagcttgcaacaggatatactgtcttatccggataagtcattgcattaagaaatgtgttaagagaacccttgcataattctacaaatgggtctttaaccggatattttcttgaaccacacaaggtagaatgttcaattatatgctgcattcccgtgtcattatccggtggtgtcttaaaacctatagaaaataccttgttatcatcatcattagaaataattgcaactctcgcacctgatttcttatgctttaataaaagtcctacggaattaaggtcattaagcttttcaatgttcacaagctcatatgcaccgtaatctttattaagttcgttatatcttgtctctaaattcatattactgctttaatctccaatctttacaataaggaattatacatataaatataataccccacaatgtaggattttaccacattgtggggtgagtgtaaacttacattacatatgtaagctatagtatttatttgccgaaaagacctttcttcttaccgtgtctttcattgcctgtaagcgccttttcatatgccataagtgcgtccttctgctcctgattaagctttgtaggaatatcaactattaaagtgatataatgatcgcctctctgtgctgcatttcttacacttggcatacctttgcctttaagtcttactcttgtacctgatgctgttcccggcttaacttcgtacaatacttctccatcaacagtcttaaccttgatttcaccgccaagtaccgctgttggatagcttattacaacattagagaatatattgtatccgtctctttcaaattctgtgcttgctgagataataacagcaactaagagatcacctcttggtccgccattaactcccggctcacctttgccctgtatacgtacgcactggccattatcgataccagctgggatattgacttcaatagtcttcttgctgcttatatagcctgttccgtaacaatccggacacttctccttaattatcttaccagttccatgacagtcaggacatggctgctggcttcttaccattccaaggaatgactgctgtgtgaaagttacctgtccacggccaccacatttgctacaggtctctggtgatgtaccaggcttagctcctgtaccgtgacagcttgagcactcatcctttaatgtaacatctatcttcttggttgttccccttactgactcgtcaaatgtaattcttacattaactcttacatcagcacctcttcttggtccattgctgtttcgtctgcttccgccgcctccgaacataccgccaaagagatctccgaaaatatctcccatgtcaccaaaatcgaaatcgaagccacctgctccagctccacctgctccgccttcaaatgcggcatggccaaactggtcatactgtcttctcttttcagcatcgcttaacaccgcataagcttcagaagcctctttgaattttatttcagcttctttatcccctggattcatatcaggatgatatttctttgcaagttgtctgtatgctttcttaatagcagcgtcatcggcatccttaggcacgccaaggacttcataataatctctcttatctgccatgattgcttcctctttcttatttaatcaacagaaactgcacggagtttacaccccatgcagtccttattccagtcagttattgctgacaattaaacctctttgtaatctccgtcaactacatcatcaccgtatggagctgaaccattagaagcaccagcacccatatcaggacctgcacctgctcccatgtctgggcctgcaccaccagcagcctgctgtgactcatataacttagcgaaaagcttctgagcactttccataagtttttccttggcagccttgatttcatcaacctgtgcatctgtcatgttttctgggtcagaaccatcaacaagtgcctttaatgcgttaaggtcagtctcaactgcagccttgtcagaagcatcaagcttgtcgcctgcctcatccatagccttctgtgtctggaataccattgaatcagcttcgttacgtgcatcaatagcatccttacgcttcttatcctgagcctcgaactcagcagcttccttaactgccttatcgatatcttcatcagacatgttagaaccagcagtaattgtgatgtgctgttccttacctgttccaaggtccttagcagatacatttacaataccattggcatcgatatcaaatgtaacttcaatctgtggaacacctcttcttgctggagggataccatcaagtctgaactgtccaagtgacttgttatctctggcaaactgtctttcaccctgtacaacgttgatatcaacggctgtctggttatcagcagctgtagagaaaatctggctcttctttgtaggaatagttgtatttctctcaataagtcttgtagcaataccacccattgtctcgattgaaagtgaaagtggtgttacatcaagaagaaggatatcaccagcacctgcatcaccagctaacttaccaccctggatagaagcaccgatagctacacactcatctgggttaagagtcttgcttggctcatgtcctgttaatgacttaaccttatcctgtacagcagggattcttgtagaaccaccaactaataatacctttgaaagctctgaagctgtaagacctgcatctgaaagtgcattcttaactggctctgcagtcttttctacaaggtcatgtgttaattcatcgaatttagctcttgtaagagtcatctcaaagtgctttggtccttcagctgtagctgtgatgtaaggaagattgatttctgtctgagttgtgcttgaaagttccttcttagccttctcagctgcttccttaagtctctgaagagccattgtatccttagaaaggtcaacgccttccttagccttgaaatcatttaacatatactgtgtaacagcattatcgaaatcatcaccaccaagcttgttattaccagctgtagcaagaacttcaattacaccatcaccgatttcgataatagacacatcgaatgtaccaccacctaaatcgtaaaccataatcttctgctcatgctcattatcaagaccataagctaaagctgctgctgtaggctcgttgataatacgctttacatcaagacctgcaatcttaccagcatccttagtagcctgacgctgtgcatcgttgaagtaagcaggaactgttataactgcctctgtaaccttctcaccaagataattctctgcatctgactttaacttctgtaaaatcatagctgagatttcctgtggagtatatttctttccatcaatctcaaccttgtaatctgtacccatatgtctcttgatagaagagattgtcttatcagcattagtaactgcctgacgctttgcaggatcacctacaagtctctctcctgtctttgaaaatgcaactactgaaggagtagttcttaaaccttctgcgttagcgataacaactggcttaccaccttccattacagctacgcaagaattagttgtacctaaatcaataccaataatctttcccataataaaatgtcctttctataattaaattgattaataccttgtgttacatatgctttctggcttatcgctagttagcaaccttgaccatgctgtgtcttataacctggtctctgtatgtgtagcccttctcaaactcttcaactacgatgttctctccaactgaatcatcctcaacatgcattactgcattgtgaaaatccggattgaactcaccgcctaaagcttcaataggcttaacatctgcatcctcaagcatctttaaaagctgcttgtgaaccatatccattccctttgcgaatggagtttcaagttcctcatctgtcacactcttaaatcctctgtcgaagttatcaacaataggtaaaagcttcttaatgatatctgaggctcccatctcgaacatagtagatttctctttctctgttctctttctgaaattatcaaactcagccatctgcctctttactctatcctgaagttcttctataactgcatccttaggatctttcttcttagagctctcagtgctctcatcctgtgcctcggccttgcctgattcatcagcttcacatgtattctgactttcatcagccttacattctgattcgcagtcgcaggcttcttttttcttagcatcagtctcctgattctttacttcatcctgaactgtctcttctgatttctttttctttacatcctttgacacttcaataccaacctttcctaagttttcttaaatacatcatccaaatgcgtctgcatctcttttaaggtatcaacaaccttttcataatccatacgcttcggtccaataataccaattgttcccttcattccatcctgcaattcatatgtggctgttaccacactacagtccttcatggactcaaccggtgtttcatttcctatatatacctgaatgccgtggttatcatcttcagtcttatctgaatcatccttgtcattaacaagtccagacaagccctgtttttcctccaaggcatatataagctcacttgctttcccggaatcactaagctccggatacttgaatatgttagttgcgccgcttgtgtatatcttcaggtcgtcagccttacttatagtctcaacaatcgcgtctaacacttctttaacaatacccatatgctcacctgcctggctctccatcttggatataagtcccagatgcatctcctgcaatgtaagacctgtgagtgttgtattaagaagaagattaagcttcagaagattctctggtgaaatatcctcgctgatagttataaccttgttccttataagattaccttccataacaataacagcaagaagcttattcggttcaagctgtgaaagctgaacaaatcttaacttattaccagttaccttaggagttgttatcatcgtggcataattagtattattcgccagaacctttgctacattctgaagaagctcctctactctgtctaccttctctgataaggcatccttcatagaatcaagttctttctctttatcaccaacctgctgttctcttaaggatatctcttcctctttctgggccattaaatcgtcaacatataatctgtaacccttatcagttggaattcttccagcagaggtatgtggctgtacaatgtagccaagctcttctaagtctgccatctcattccttatagttgctgaacttagctgtaagtcagtcagcttggaaatcgttcttgagccaaccggttctccggtatcaagataattctgaataacagctttaagtatcttaaccttacggtcatccagtcgtccatccgtctccatggcatcctctcctttcatcttgttagcactcattaagttggagtgctaatatcgatacatttaagatatcactaccctaacatgatgtcaacaacaatatttcttttttctataaataatttataaatttattgaacagaatcttaacatactatataattcagctataaatatcattattatatatagagatatttaccaaggagttacaatgaaaaagcacagttcaaaaaaaacttttttaaagattctgcttatactttctcttatcgctgcatctgttacaatattatcattccttattgatatgaaaaattcttctcctgataatgtaagtattaacataacacaagttgggactatttcatcggatgatttatcgcgtggggaagttaataattctgacaattcacaggaagataataaaaataataattcagaggattcttataaagattttcacaatacaattcactctgaaaatgaactaaaagaactactggcatccggaagaaaagcatatatagataattttccgtgtctgaatcagttaccggagctacctaccggctgtgaagtcacttcactcactatggttcttaactatcttggatatgatgctgataaaactgatattgcagctaattatctagaaaaaggagactatcctgatgctaatcccaacaccacatttgtaggaacaccttttgataaagcttcttatggatgttttgctcctgtaatcactgattgtgccaatctgtatggcgcccatgccgttaatatatcaggtgcctcaattgatcagttctgccagtatgttgagaacgggcagcctgttattgtctgggcaactatgaatatggagtccactgattatggttcttctgtatggattgctaaggatggtcagcttgttatctggcccggtatggaacactgccttgttatgattggatttgattctgccaaaaatgaagtatatatggcggatcctcttaacgaaaatataacaacctataatttttctgtattttatcaaagatggcttgaacttggctgtcagggagtaattgttgacagataaacaaaaaatctccggaccattattacacagtccggagatttttatattttcattagattccaagaatcttcttaacttcatcacacatcttatcagaatcgcatacaatatcatgaagaactggtgctgttctgatttcttcaattgcgttaggaactttgacattgcttatcttgctaagctcatctacaagttcgaagtctcccattgaatcatatttggaatcaatagcattcataacgcttcttgtaaacttatatgggcttgctgttgaagcaataactgtcttagttgtatcgcctgtttcttttctgtacttatcatatacagttgcagcaactgatgtatgtgtatcaattacatatccgcaatcttcatatatcttcctgattgtagctgcgtcctctgcctcggtagcataattgccatagaagtcagctaactgtgctttcatatcatctgtaatcttgtactttccttctgactttaatgatgccataagttctgcattcttagctgcattattaccggcaattctgtatataagtctctcaagattactagagataaggatatccatagatggtgaagttgtaagaacgaattctctatttctgtcatactcacctgttgtgaagaaatcatataataccttattctcattagatgcacatataaacttattaataggaagtcccatattcttagcataaaatgcagctaaaatattaccaaagttacctgtaggaacaactacatttatcttctcgccatccttaatctctccattagctaataacttggcatacgcatatacataataaacaatctgtggaacaagtcttccgatattgattgaattagctgatgagaactggaatccggcatcattcataaccttctccaattccttatcagagaaaatgttcttaacacctgtctgtgcatcatcaaagttacccttgattccgattacatatgtattatcacccttctgggttaccatctgcttctcctgaattgggcttacaccattcttaggatagaagacgataatcttagtcccaggaacattagcaaatccagctaaagctgcctttcctgtatctcctgatgtagctgtaagaatgacaatttcattcttaacattgttcttctttgcagaagttgtaagaagatgtggaagtatagaaagtgccatatccttgaaagctattgtagctccatggaaaagttcaaggaaatattcattctcaactttaacaagtggagtcatctcctctgtatcgaacttagaatcataagctctgtctatacagctcttaagttcttcctctgtaaaatcatcaagcataagcttcataacttcataagcaacttccttataattcatcttagacaactcttctaagcttttatctaatgatggaatactctctggtacaaaaagtcctccgtctgctgccagcccctttaatatagcctgcgatgcagtaaccttaacattgtcgtctctagtacttctgtagaacatgctcatctttaatacacctcataattaatatagtgtgcctgcgttaacatcgcaggcttttgatattatacaacagacttctgtacaaaaacaatacccttatgtacgaaatacattttaaaataatattactttccagttacaggtacacacatcagcacatataacatctcttcttcatcttcatatgccttgcttataacaattcctgtcacgtctcctgctactttaagattatgttctttcatatatgtaatatgctttccaatcataatctgacgaacttcatcatcagacttctcactcattatgcttaattttgccggaattcttgagattcccataacagatggcttggctgtataatgcctggcatagtcattggtcttgagactgtatttctcaacatgcccctcttttacagcaattccacagcatatagtaaatctgccctcttcaatctcttcctttggaatcatatatatgtgttgtaattcaggagaattatacagaaattctttcacctgcaataaccgttccggctcctgaagcagtttttcaccatatttgtacagaacgtatcttaagtcaaggctgttcttttcatatatgtccgaattgactgcagccttattcatcagcacataatcatctttcagccggtgccttaaatatgtcatatacgcaatctgcctgtccatctcatccatacgtttcttgtatgcctcaatagactgttctaatgaaaaatgctgcatctttgctatctgttcatgtgaaaatccatacttcacatgcattttagcattaagtacgccgaatatcccatcatcatcataatacctgtatccactgttttcatcacgcacagccgatatataccccatatcctcatatcgtctgacagtattagtagacacatctaataattttgccagatcactaattttatatctcatgccttctgcctcttaatataatatttagtaagccggaacaaatggcagctctatcggatctgtctttgtgttttccgttttatcgttttctgaactggtactgtctgttccggaagtattgtcagttcctgaagtatccttatcagccgcatcgctactggcggcagcagtactttcgggtacgatacttactggcggcagctcagaattaatgttattatactgcgcatcagaagcattttcctgtacattcttcttttcgccggtcttctgtgattcaccagttgtctgtgattcaccagccggaatcatatgtgcatctctgccatcatcatattcctgaccgctttcactttgcagcttctggctgttatcagttgaaatgttattcttattctttccacatgctgataacggcaatgtcataagtgtaattatcataattataaatgttatatttcttttactcattcttttacctttcaatatgctctgccaatgtgttatcatttattatatataattatatctgtatacacaattaatatatgttataatctttatatcaatggtagtgtcaaatggcacattaaatcagagtataagtttggggaagcctactaatattgcaaaatatgatgaaatagtgggtttaaaggacaaatttataaaacgattgggggattctcatgacaggagtttacgaggcaagaaagaaaagtggtgaaatatattaccgtgcgtcatttacatataagaataaacacatcagcctcggaagttcctctgacgaggcttcctgtcatgccatgtacaacgaagcctgtgagataataaacaattcttctgaccactggattgatactgaccacagaacaacttcatataatgaagcaatgacactttctcttggtaaatacatctcacttatcaatttcagggataacaacatttatataaagacacctatatatatgtgccataaatatttcctgtattttctcaaagaacatgaggttttacagttttctactgacgaccttttttactattccaaccacacaattatgagccgcggaggatattattttgtaaatgattatggaatgcagacaagcattctctcaagattcggagtaagaagccactctgtaaaaggcagggattatgtatttaaaaatggggatacgcatgattacagatacgaaaacattcttgttgtcaataaatacaatggtgtttcccagtttactaagaatggacgaattatgtacagaaccaggattcatattaacggcgactatatactcggtgaattctcatccgaagcagaagctgcaattgcgtataacaaggccgttgacatgctttcaggccttgtaaatataacttatacccctaattacatagaaggcatatcctccgtagaatatgcctccctttatcacaatattatattgtctaagaatttcagaaattatgtaaagtctatctcttaagcctccacaatctttccagcaatagcacttgctgctgctgtagctggagacgcaaggaatatcttaaccttgcttgttcccattcttccaaggaagtttctgttgttagttgcaacaactacctctccgtcagtaagaattccgcctgttcgtccacagcataatccgcatcctggatgtgtaacaattgctccggattcaacaagtgtctcaagtgttccgtctgcaagagcttctttatatatcttgcggcttgcaggagtaactattaacttgacaaatggtgcaaccttcttacctttaagaatagctgctgcacactgaagatcctctaatcttccattagtacatgaaccgatgaatacctgatctactgctgttccggcaagctctgtaacaggcttgatgttatctacctgtgaaggacatgcaagaactggaactaaatcctctgcattatatgtaatctctcttgcatatactgcatccgcatctccctttaaatcctttaattcatctgtaagttctacattacagtactctgctgtcttttcatctggtgtaaaaagagcacatttggcaccggcttcaatagccatgttagacatagtcatacggcttgcaacgctcatctcgtcaattgttgaacctgtgaattcaagtgcctgataagttgcgccatctgctccaaggtcaccgataagtcttaatatgatatcctttgaacgcacattttcaggaagctttccattgactgttaccttgatagtctgtggaactttaacccacattttgcctgttcctaatacacttgccatctctgtatatccgatacctgatgaaaatgcaccaacacagccgtatgttgttgtgtggctgtctgtaccaaatgcgatatctcccggctttacataacctgcctctgtcattaactgatggcagattccgtctgaacggtggatattcttcattccgtatttttccacaaattcattaccaatacggaaatgtcttgtatcatcaacctgacttgctggaacaaggtggtcatatataagaactgccttatcagggtcccatatcttagtgaatcccatttcctcgaatttctctttaacaaatggaatgaaaatatcatgaatcattactctgtcaacattaacagttacgatatctcccggctttacttccctgccaatattctttccaataatcttctcaataattgtatgtcccattattcttacctctccctgtcttagtcaagaccgttaagctttctcattgccttaacaagtccgcctgcattaagtatatccacaagattatcaggaagtgaagcaataggatatgcttttccattgtgtgtaatctttgcatttacttcaacatcaatagtatcgccttccgtaacttcgtcgtgaaggtctgcattctctataaggagaagtccgttattaatagaatttctgaagaatattcttgcatatgatttggcaataacacatttaatacctaatgccttaataacctcaggtgcctgctctcttgatgaaccacaaccaaagttctttcctgcaacaatgatgtcgcctggcttaatctgacctgcaagttctggtcttaatggcgaaaatgcatatggcttcatatcttctactgtctttaatgcgaggtactctgtaggaataatgatatctgtatcaatgtcatcaccaagcacccatactttaccgctaaatttctcgttcataattactcctttgaagttaaatccttatcttataccatgtctgctgttgctatctcgcccttgattgctgatgctgtaacagttgccgctgaagcaagatatacgaaagaatctttatgtcctgcacgacccttgaagtttcgtgtacctgtgctgataagagtctcgccctcaccgataacaccctgacagctgccccagcatacagagcagttaggattcataacaattgcacctgcatccatgaatatatcaaggagtccctctttcatagcctgaagatatactgaacggcttgcaggaactacaaggaatcttaccttaggagcaacctttttccctttgatgatcgctgcgccaactcttaaatcctcgattcgtccattgttacatgaaccaagaaatgcttcgtcaatcttaacgccaagtgattccttagccggaactacattgtcaacaaaatgtggctttgcaacgattggctgtattgttgaaaggtcaatatcataaacctgctcaaatactgcatcatcatctgatgtaaagcatgcctttggctctctgccatgctccttaagataatccattgcaacatcatcaacttccatgagtgcagtcttagcacctgcctctacgcaaaggttacagattgatattctgtctgccattgaaaggctgtgtaagccttctcctgcaaattccattgctttatagttagcaccgttagcgccaatctttccaataatagagagtattaaatctcttgcatatactccatcgttaagctttcccttaaggttgaatcttaatgttccaggaaccattacccatgatgttcctgtaaccattgcatacaaataatctgtacaaccaacaccagtaccaaatgcacctaacgcaccatatgcacaagtatggctgtctgctccaaatataagctcaccaggcaccacatgattttccatcataacctgatgacacacaccctcgccctcgtagaacttaatatcattagccttagcaaagtctctcatcttcttctgtgaggctgctgtcttaggactgtctgatggaatattgtggtctacaatccatacaagcttatccttgtcagcaatatgaggattctttaacttctcatacatgccgatagtaagatgtgttgttccatcattactcataagtctgtcaagagtaacagttgcaatatcaccagccttaacctgtgaaagacctgctgcccttgcaataatcttctctgcaatagtcatgccatgctttgcctcgcccgctgttacagctgcactctcagactcttctgcctcatcattaagtgatgcaataagtccgccctgattaagaatagcctgcatcttggctggaagctttgtacatgtataagtctttccattaacagttataattccatcttctaatgaaagctcgcattcatccccggcattaacttcgtcatggagttctttacatacaataacaggaagtcctatattaatagcattacgatagaatattcttgcaaatgatttggcaatcactgccttgacacctaacgccttaagtacgcttggtgcctgctctcttgatgaaccacatccaaagttgtcatctgcaacaacgaaatctcccggctttacagcagaagcaaaatcagagtctaatgattcaaatgtatgactcttcatctcatcaattgtcggaaacaaaagatactgcgatgcaataatctgatctgtatcaacatctttatcaaacttaaatatcctacccattgttttctccttatcttatccctgatataacaggtattattaatagtcattttaacattttaccctattaaagtgtgtttttcaatcgttaatattaacagaaacggtaattaagtgaaaggtcgttatccttaaccttaacctgtgtatatgccccacttactatcggcattgaaggtgaaagatgcccgaaatcacagtccattataaccggcacattatactttgccgcaatacctgtaaccgctctgtactggtcaagccccatcatttcctgtccgtagcacagcggtcttcctatgagaaatcccttcacattcttaaaccatccggcattatccatctgccacatagcccttctgattgcaaatacattcagatcacagctctctaagaaccatataattccgtcatctgcgtatctttcgttaaactctttaaccttgtcaaaacttgtacctgtaagattaacaagacagtccatgcagccgccgacaagccttccttcaaatgcaatctccgtatcacattcatccccaccaacatattttcttaaaatcttcttctcagtaagattgtattgtggtgcagggttctcctcattctttagagactctctctcccatgtgtcatatccatggacctgtttttccacaactccgttattgttcttgcagccttttccacgaagcacatcaaaagtatccacaagcgcctgatgccagtccttcattgcaaatgcgcctgcacatggtccgtatacacttgccgtatcagcaatcgtgttctgtaaaaatgtgaagttggtattatcagaatatccaagataccacttaggctttgccgccttaatcctgtcaaaatcaacaaagttcagaatctcacacatcagttcaccaccgccacatgatataagcacatcattgacattactctcatacatctgtgtaagctccttaccgcattcctgcggtgtgttgcttatcccaattcccttgtcctcataacaattaggaccaagctctactgtataaccttctttttcaaatcttttaattgtcattccgaatgctgttttataaggctccgtcgcacaaccaaaagatggtgcaacgaagcctataattccgccttcggctaagaattcaggatatctcatatactgcctccttacctcatcattcagattctgcctgaataattaatctacatatatttctttactacattaatagcattgctgcctattactacactataatgctcccttataaatgcaacacgttcttcttttgaagaatcaaacacactgtactccatcaaaagattcagaagacttctgtatttttcctctgagcatcttcctttctcaagtacaagataatatgtatcatcttctttattcttatacagtgcattagttattccccatgttcttgaacttacagtacacatttcctcaaaatcattaaggctttccaacctgaatacgccgcatccggctttaataacattacttgctttcttcttctgtcctgtcttcttaagttcatctgtctgtgcatctggtaattcgaacttatctagactgtctccaaatgtttcaaaaggtgcatctttaaatgtaccttcaccattcttaatcacattactcttctctggttttgaaaatgccttagatatactttcccctgcttttcttaacatattacccagatcttctttaccagatgaaactgtaagaagtattgaatggtctggctgtggtgcaagctgtagtgacataacctccccacttaaagtaacacctatatttttttcagcctcctccataataacttcaagaaggctgtgtatcttgtctgtatcattcttaaagaaatcatctaaggaaatattattatcttccaggtcttcctcatcgagtctgcactggaatcttctatcattgattttcttaaattccatatatcctctttccaaactttaataatatatatcaatatattattattacatacttttactaattctgtctactatttttgtgataataaggttcttattaacaaatgtacccctttcattaactcttatgcgtcccctgttaccggtaacatctgcatatatctccagtctgtcagaactgattcttgcatacacatcacatgtcttaacatatacattctgcataaccctgctaattatatcatcttctatctcaaaacattctgctgtactcttatgtgacaattctcttgccgtgcggacagcctcttttttccctttagtaagcattgcatacacaccctcaccatgcacgggaacacattctccataatccatgattgtatatctatacagaaaactattatgtagccttgctgccttaatatcttctaaaagtacaaatacagcatcacattctgacgcatccagcttttcaatacattttcttatatccgtctctactacacagcttattccatcatacatatgtttaatacgctccgtcttgctgtatgagtcagttgcaacaacagcattttcaataagatcttttgcatgtctctttcttatcattacatatcttgaatcgccgcgttttaaaacgcccgaaataacaaccccataaggaagattctcatcattcttttccatcctgataagctgtgccatgtcaacaactgccatatcaaccgaaccaagctcaagtgcctcacatgctgaatcaaaattatcatgtccgatatctacaatcttaacttgtgaagctgaagctttctgaattatctgaactgctttttttaatttaattctctctattccattgccgtacaaacccagtctgtacatttcatccaaatcttttctcatctatatctgtaaccttttaacagctttatttatttattttttattataacatatcattttaggttgttgaaagtacctgcatattatgtttataataataagaataaattttaataaggaatggtacagattaatgacttatatcaaatcaaaaagcagtattttaaaactgcttgcttcaattattattacactattctgcatagttcttttcccttccgccgttaaagcagaagacaatcaggctgcagaagtaaatgctgatataacactttctaaccagggaagcatcagcaggatgaccgatggttcttacaacaccaaaaccacattttcatcaggagacacaatcacaataacttcctctgaaaaaatgtactcactttatatcaaatgggatttaattccttcagaatggactctttcttataatggaaagactgaaactaacggaactaatggttttcttcacgaatatgtccagattcccgatggtacaactgagatgacaattacatttgcatctaaagaatcaatctgtgatatgcatgtatattccaagggttctgtgcctgaagatgttcagacatggaagactccatgcgataatgctgacattcttgttttcgcaacgcatgcagatgacgagatacttttccttggaggagtacttgccacttacggtggcgaacaaaatctttccgttcaggttgcctatatgtgcgaattcactacatcagccaagattagagaacacgaaaagcttgacggattgtgggaatcaggcataaagcattacccagtatgtggagattttcccgacctttacagtcagacattagaagctgcaaagaagcagtatgtatatgatgatgtcaaagcctatactacatcatgtataagacgatttaaacctcttgttgtagtaacacaggatcttaatggagaatatggtcacggcggtcatatgctattctctcatgctgttgcagaatcagtagagacaagcaatgattcctctgtatttccagagtcagcatccaattatggtacatgggatgttcctaaaacttatcttcatctgtacacagagaataaaattaccatgaacttaaggcttcctctttctcgtatgggaaaccgcacttcaattgaagtacagacagcagcttataaaaagcatgtatcgcagcagtggtgctggttctatgtatcagatgattatgaatacagctgtgctgattttggattatacaggactaccgttggtaatgataccggcaatgatatgttagaaaatattactacatatgaagagcaggaaagactcgctaaagaagctgccgaaaaggaatccatagaaagttccaaagctgctgaagaagcaagcattgctaaagaacagcaggaaataaaagcagcacacaaagaaacttctaaaagaaaagtatcagtggcagtgattgttataattgttgtaattattattggtgctgccgcattcggatatgtcagattacagcagtcaagaagaaagcattcccgcaggagaagataaataaggaggttttgccatgaaactgcttattaacataatagcaattattgtagttgctgttgtaattggatttcagttcaacagaacaaagaatctttataataaaaaatacgatgagaacaaagacgaattcaaaaaagatcaggaacaataaaacaaaatcaatcttatcaaaaagggctgccataatggcagcccttaaatattatcaattactgattattagttattgataagcatatcgctttcattgttccagctgtaaagctttctgatttctgccccaaccttctctgatggatgctcagaagcaagctttctcatagccttgaagtgaacctgtccaccagcatcgctcatgtcaagtaagaattccttagcaaatgaaccatcctgaatatcagaaaggatcttcttcatagccttcttagtatcctctgtgataatcttaggacctgttatgtaatcaccatactcagctgtattagagattgagtatctcattccagcgaatcctgactggtaaataaggtcaacgataagcttcatctcatgaatacactcgaagtaagcgttacgtggatcatatccagcttcgcaaagagtttcgaaaccagcctgcataagtgcacaaacaccaccgcaaagaactgcctgctcaccaaagaggtctgtctctgtttctgttctgaatgttgtctcaagaagaccagctcttgctccaccgataccaagaccataagcaagtgccatgtcaagagcctttcctgtctcatcctgctctacagctacaagacaaggagttccctttccagcctgatattctgaacgtactgtatgtccaggagccttaggggcaatcattgttacatcaacgcccttaggtgccttaattaaaccaaaatgaatgttgaaaccatgggcgaacataagcatgttacctggctcaagatttggctcgatatcttccttataaagcttagcctgcttctcatcattgataagaatcatgatgatgtccgctctcttagcagcttctgcagcagtaaatacttcaaatccctgctcctcagctctcttccatgacttagaaccctcataaagtccgataataacatgacaacctgaatccttaagatttaatgcatgtgcatgtccctggctaccataaccgataatagcgattgtcttaccgtcaagtaatgataaattacaatctgactgataatagatcttagcttctgccattttaaactacctccatataaatgtgttttatattgtaaaagttctccggatgctccaaagaattattacatcttattcaaatctgcgcttcctcttgcaagtcctgtaattcctgttcttgcaatctccgtaatattgaaatcttccagaagctccacaaacgcattcatcttgcttgagcttcctgtaagtgcaattatcatggactctttagatacatctacaatattggctctgaatatatctgcaatagaagatacctgttgtctcctctctggtccacattcaactttaatcataacaagttctctgcatactgattcatgtgcaggaagctccacaatttccttaacatctataagcttattaagctgtttctcaatctgttcaagtacatcatcttcacctgttacagctattgtcatacgtgacaattcaggattgagagtttcaccaaccgtaaggctgtctatattatatcctctacggctgaacattccagcgacacggctaagtacaccagatgaattacccacgagaatagaaaaaactgctcgtctcataacctaatctcctaaattctgatattaaaatgcataaaaatgcatttattgtcaattattataacacagaacatcaatctgtcaattgcccacttatagcatttactactccaagaactaccattctgagcatgataacatctgtatcactccactttcttctgttagtgccaaatatatcaaattctaccatatattctttaccatcagcgccatcagccttcatctgaagaaacgagcatatattgttgtctctgagttttctaaaaacttccgggaattctatagtaagtgacgctatattattcaccatgttaacgccatattcatcaaaatgattcacaaatttatcatcattaacatatgctgcctcaattacattattcttatagtgacctgtactgtatatgcattccatatcattaccactgtaaatacttattccatgaatattaagcttatcggtaagctctgaaagcacttcttttactgtcatcattccaagcgatactttcattacaatattggttgcaagctcatatttagccataggcttcataaagccacttccaaatgcaatgtcatgcttcatgtcagccagaatatctccatgcttattataatcatatataatatatctgtccttgcctttttccttggctatataaagtgctgcatcagctatcttaaacaatgtctcaaaatcactgccatccttgccaaactgtgcgataccaattgatgttgaaaacatatactctggctgcttctgtgcaagcgataccttaagtccctttctcattgccttaagcataatgcgaagttcttcaaccgtaacatcttttataagtactataaattcatctccacctatgcggccaacaattccacgtccgccaactgataattttaatgaatctgcaaatgctttaataacctcatcaccaaaataatgtccataactgtcattaacactcttgaagttatcaatatcaagaatcatcaggaacatctggcggtttctgtctgaaaccgctgttttattgatataatcagttatcatatctgttacagtcttcttgttatatatgcctgtcgctaaatcaagttttgcctcatctactccgacatactcctgaacagttctggttcttctatctggttcagatattacgcctactgtaattctgttttctccatcagccagaagtgactgtcctctgaagataagattgtcaactctttctcctttagacataacagatgacgacagcttaacaataaagttattcattccacttgcaattgctgtacataatgcttcaaactgaacagcatcatcacctgttacaaagcccttagtgatacacgcttctttccattccttaagactggttctatcaaatatctcagatttattattacgataacaatatattgtaatcattccagaaacaggatcatattcaaatatcttctcatcaataacattaattattgccctgtattttcttacacggtgataatacatgtcaaaatcattcgaaataacaattatatcctgtgccacaagctcaaccatacgatctgtaccaacttcgtatatacgcttctttaccagaagcatccatctgtatgaaccattctttataagacacctgactatacaatatctcacagacatatctgaattaataaactgctcaaaaaccatgacatcatccggatgcaccagtccgttaaatgcagaaagcatagtctcacccatgagattgtaaaatctttcatcacctattttaactacatatctgttatcaagtgtaaattctacttcattaggcatgttgccttgatatgaagtatccaattcgtatcttcgcataaaaagtcccccattctaaggaacaggacaattattctctaagcatgctgtccctgactggttttctcaaccttaactttgagtatcattcttcctcgtacatcaagagttctgaatatatatcctttgtattctacctcaaagttctccccgtcatcaggtatcttcccaagcttataaatcataaagccgctcaaagtatcaatatcttcgcattcaaactctattcctaacttagcttctacatcctcaagatctgcctgaccttctattatatatgaaccgtctgcgtcggttacaatctgttcttcttcttcatcatattcatcaagaatattaccaacgatttcttcaagaatatcttccatcgtgacaattcctgctgtctgtccatattcatcaacaacaatagccatatgaatcttttctgactgcatctgtctgaataacggacttatatttcttgtttcaggtatacaatatggcttaaaaagtactgtatcttctacatctctaagcttcctatcctgattatccttatcaacatatattttaagaagatcccggatatgtaaaatacctgtaatattatcaatgtctccatcatacacaggatatcttgaataattctctttcattatcttgtcaaatgcttctctgacagtaatatcatcatcaagtgccacgatattgtttctgtgcgtcattacatcagacgcctgtttctcgccgaattcaaagatattacctatcatctcagcttcattttcttcaagaacaccctgttcatggctctcattaaccatatccattatctcttctgttacatcttcatctcgttttcccctgccaaataacttaagcagagatgaaaacctcttttctttcccatccgcgggatggccgtcattcatagctttcctccatatttataagttgttctttaataaataattatcatttcaataataacacattattatgctgatagtcaattcatctcaaggcttacagacaatgctttattcacctgtcctattatatcattatcaaggtgacataccttatctttaagtcttcttttatctattgttctcaactgttctaacagaataaccgaatcctttaccatatcgtatctggcagaatcgagttcaacatgcgtcggcagtttgcttttatgcatctggcttgttattgctgcacagataactgtcggactatgtttattccccgtatcattctgaattataagtaccggtcttattcccccctgttctgaaccaaccaccggtcttaaatctgcataaaaaatatctcctctttttattaccacaactgtcacactcctaaagctatatttcttaccttggctttagtattgcctgattttaagtgtgtattcagttatcatttatcttttcagaacatatgcaattgcttctgatacatctgctgccgtcattccggccctgcctttgcctgatgccgcataatcccctgctttgccatgaacatatacagaaagacatgctgcttcaaatgcatctaaccccatggctgtcattcctgcaataagtccagtaagcacatcaccgcagcctcctgtggacattccgtcatttccagtacagttaatatatactttctgtccgtcagtaactactgttcttgcatcctttaatatgcatatacatgaatgttgtattgcatattccttagcagactcaatcatatgctctttaatatcagcaactgtctttcctgtaagccttgacatttccataatatgaggtgtgattataatctgcccttctctgcttcctttataatcaatatgttcgccagcaataatgttaagtgcatctgcatcaagtattcttactttatcatctctttcaagaacacatctggtaatctctgctgctgccacgttcatagataatcccggtcccacagctatactttttgcccattcaaaatctgctttaagttctgctgccagcggcatattatcctgatatgttgatatcagacattctggcattctgcataacagtgctgtcttattaatctcatgtgtaagtacctttacaagccctgttccacttctgtatgcggctgatgcactaagaattgcggctcctcccatattcttagagcctgctataataagtgttctgccatatgttcctttattagaatcaggttttcttacaagaagtctgcccacatcttcatcgtcatatgtaaaaatactgccgaaacatttgacttttttatgtaatatatcctctgttacaaatccggcattaatgacttttacactaccactgtatgaagctcccgggtaaaacatgatacctgtcttattatatccaaatgtgattgtgtaatctgctttgacagcaattcccataatctgtccattatctgcacttatgcctgacgcaatatcaacggcaattatcttcgtatcaggattctcccgggctttattaattgcttctataacctgcgcatatcttccctcaactgctcttgataagccaatgccaaatattgcatctattatataatcatattcagaaaaatcaatattgccatcatattcaacacagtcaattccaagattaccgacaattgatttctgaagcctgtattcatcagttccctccgatgtaccagcaaacacaacatgtacatcaattccatcttcattaagctgtcttgctgctgcaagaccatctgcaccattattcccgcttccgcatacacacacaacttttattcctgttttcttattgttgtgctctgcatgctttcttaaaaaagctgaaacccccagtgctgctctttccataagcaccactgagggaatcccaaattcatgtattgaacagttatcaactgctttcattgtatgtgaatcagttaaatatctcatacctcttcctcatttaccttatcaagttccttcataacgtcagggcctaatatgtcatgcattgcagaatacatacggttattaacctcttccttatcttgcttgataagtatattcttctttaactttactcttgttgcattaatccacttatccagaacctcaaggtcttccttattactgttaatcttgttataacacacctttactgtttcaatcataagacgctcattggcattaacaagatctcttggaatatcgagtgcttcatcttcaagagaattaatcttatccttagcttcctgaataagtctctgattcttctccatcacttttgctctcttaggatcattatcctcatcctgcatattatcaacaacatcctgaataagctgattctttattttttttacttccttaatatcattattaacctgtccctgcttcttaagaagctcattaacctgtttttcccaataacagatttcatcagtctttaatttatccgttataagatgataccatctctcatcgagagtaagtatcggtatctgttttatggctgtacaacttttcagcttttcaatatcaagttctgccatattatcctcccaaacagttacttcctgttagcaatagtgtatgaaagtctcataagactttctgacaaatgtacattttcaacaataacatcatccggaagattaagatctgtatgtgcaaagttccatatagccttaactcctgcatcagcaacaaccttcgctatctgtctggcagcttccttcggaatagtgagtgcaacaatctcgatttcattatctttaataaaatcagtaagctcattcatcattcttacttctattccacgaatcttagttcctttaatcttagtattattatcaaatattcccttaataacaaaacctctcttctcgaaatcactatagttaacaatagcctttcctaaattaccggctccgataataaccatattgtgattacggtctatgccaagaatctttccaatctcttcatacagatactgaacattatagccatatccctgctgtccaaatcctccaaagttattaagatcctgtcttatctgtgaggctgttaccttcattctggcactcagctctttagatgatattctctgtacaccagactctatcagctctcccagatatctgtaatatcttggcagtcttcttattaccgccgacgaaatctttttctcttccattacaccaaacctccagaccacgattgctcattttaccaagatataaacgagtatataaataaactataacaagctatacatagtataaccatttttctttaatatgtcaaaattttaaccaagaactcttttagcaatatcaacagattcttttgcatcctttgcatagaaatctgcatctatctctttagcatattccggtgtaagtaccgcacctccaaccatgaccttgcagtcaagattattttctcttataagtgcaattgtttccttcatagatacaagtgttgttgtcataagagctgataatccgcacagtttaacatcattatctcttattgcatcaacaactgcctggtactcaacatcctttccaaggtcaataacatcatacccataattctccaggagaaccttaacaatattctttcctatatcatgaacatcacccttgactgtagctataactatctttcctttgcttacaggggcattatcagacataaccatatgctttcttataacttcaaatgctgcctgtgcaacacctgctgacataataagctgtggaaggaacaatgtacccttctcgaattcagcacctatcttatcaagtgcaggaataagcacctgattaacaatctccattgaatccatagtcttaagaagtgcctctgttatctcagcaccttcgttcttaagtcctttttcaacagcatagaaaagatcatctcctgtgtaatttccatctttcttttccttcttgacaggatcaatcttagaaacatttggcatagcaccatagttctttatgtaatcaactgaattcttatcaatattagcaagaagcttatacgcccttaccgcgcctgtcatctctgggatgttaggattgataattgcaaggtcaagtccgttagtaagtgccattgtaaggaaaatgtggtttacaagcactctgtttggaagtccgaatgaaatgttagaaacaccaagcactgtctttaagccaagctcattcttaactgtatgaagtgcattaagagtttccattacgccctcctgctcagcagaagctgtgagtgtaaggcagtcaatataaatatcttctttagggattcccattgcagcagccctgtccataatcttctttgctatcgcaactctgtcctctgccttcttaggaataccatctttatcaagtgcgagtcctataactcctgcaccatatttcttaacaagaggaagaacattgttaagagactcctcctcaccattaactgaattgacaagcggcttaccattgtatacacggagtgctgcctcaagtacttcaggtattgtagaatcaatctgcaacggaacatccacaactgcctgtaatgactttattgtatcaatcatcatttcacgttcatcaattcccggaaggcctacattgacatcaagaatatctgcgccacctgatatctgctctaaagcctgtccaagaatataatccatatcgtgtcttaacaaagcttccttaaaaagcttcttacctgtaggattgattctttcaccgataattcttggttcatcaataacaacagtgcttgtagctgaacacactgcacctggaatatatttgtgtggtgctgccggattgccttctctttttaacatctctgataattctttaatgaattcagggttagttccacagcagccaccgaatatcttaatgccatattttcttaaatccttcatgaaatctgcaaactgggttgcagtaacattgtaaagattagtttcagggtcaggaagtcctgcattaggctttactactatcggaagattagtccattttacaagttcttcaataaccggctctaattctttaggtcctaatgagcagttaacgccaagtgcatcaacaccaagtcctgtaagtgtaagagccattgccgatatagagcagcctgtaaaggttctcatattctgttcaaatgtcatcgtggcaacaataggaaggtcgctgttttccttcgctgcaagtacagcagccttgacatctaaaaggtcagtcattgtctcaaatacaacaaggtctgctcccgcagctgctcctgcctttactatctcggcatacatatcatatgcttcttcaaaacttaatacacctgtcggctcaagaagctgtccgattggtcctacatcgagtgcaacaaggccgtccggctttactgtatctcttgccttctttgcattgacaatcccggcagttacaagctcctcaacactttttccgcattcttcaagcttatatctgtttgcaccaaatgtattggcatataccacatctgagcctgcattgtaatactgccctgcaatcgaaacaagaagctcaggtcttgttatattaagtacttccggtgtctctcccatcttcatacccgctgcctgaagcattgtacccatagcaccatcaaatattatatagtctctagtttttaagagttctctgaatctgtcagccactacaatgtcctcccattcctctgtatgcgcagtttttattaagattgcatgttgcacaacctctgttcttagtacttacaggctccttagtaagtccaataaccgcagttaccgactttaccggagccagcatatatgatttattaagattaagtcctatctttttaccggcgtctaacaccttcagaaaaggctcctgcatgcttattggcaggtcaccataaccaattccaaacctgaatgtctggtaataatcaggatattcctctcttaaaagttcttcaaccttatcacatacctgttcaacagctacacttgccaggctgtcaaacaccagtgcctttgccatatctgtaagttgcagcactcttagctgtctgtcaataccttccgatatggttacagccatgcatattgcactgtcacatttatacagatgcttcttaatagactctcctggaagcaccatgcttgtattcttaaatgccacaccgtcttcattaactgtaaaatcaaacttcttataaataaatcttggaactgcagtctttaacacaagctcctcacattcatccataagctcttccacccgctcatcaggtgcatttttcttataaccaagatatcttaacgcttcttttctgttaagactggtaagcttaatacttttctccatttcttcttaccttgccgcttttacttctgcgttctttaagtttgtcatgttttccacgtgactcgtcttttcttcttcttgtatctggctttgacttggattttcttgcaggcttggcagatacattcgctttctctacattaacctttctgcccttgataagtacattgtcattcattgctgcaagtactgcttccgcatgctttgcaggaacatcaacaaatgtataattatccatcatatcaattgcaccgacaagtcttcccggcattccggattctcctgcaatcgctccaagaatattggctggtgtaatcttgtccttcttaccaacattaataaagagtcttaccattcttgatgtatctgcattttcatcaaaatgaaaattctctacctcatcgattctgtccaatgtatctccaactatcatcttaagaagagctgctgccatatccattgatgtataatcttcctgattaacatgctcctcaaccatatcaagcatggctctgtgctcatcagcttcaatcatctctttaatcttgtcaaatataccatccatcttggtgttcttgacatcatcaagtgatgggattggctttgcaagaatcttggtcttgcaatatctctcaatatcctttaacttatatacttctcttccagatataaatgaaagtgcaagtcctgattttccagcccttcctgttcttcctattctgtgtacataatattcttcgtcctgtggaaggtcatagttaaatactatatcaactccgtcaacatcaattcctcttgccgcaacatcagttgcaataagaatttctgtctttccacttctgaaatcgtccattacacggtctctctgttgctgtttcatatctccgtgtataccgtcagcaaaatatcctctgcccttaagctctgatataagctcgtctacctgtctcttagtgttacagaacacaactgacagcttaggattgtatatatcaataagacggcttaagatttctgttttattcttaggtcttacttcataatagaactgatcaatattagaaactgtaagttcttttcttacaaccttgataatcttagcgtctttctggaattttcttgcaatctccattataggcttaggcattgtagctgagaaaagaactgtctgtctttcctctggtgtctctgtaagaattgtttccatatcctcacggaatcccatatcaagcatctcatcagcttcatctaatataaccatagatacagaatcaaacttaacagtcttccttctcatatgatccataactcgtcccggagttccaacaataatctgtacgccggcttttaaagacttaatctgtcttacgatctcttgtccgccatataccggtaacaccttaatgtcgctcatgtacttggcaagctttcttatttcttctgcaacctgtactgcaagctctcttgtagggcagagtacaattgcctgtggtttcttaacatctggattaatcttctgtaacatagggatagagtacgcagcagtcttacctgttccggtctgtgcctgtccgataacatcaattccttccaatactgcaggaatagcctgtgtctgtataggagatgtctcctcaaagcccatatcctctaccgctcttaaaattctttcatcaatatttaattcatcaaatttcattctttaatctccatttctataacttgttaattttacattacagaaagccataagtcaaagtaataattgcattttatttcttgtacatatataatcgttttaaatatcaattcagccttcaccagaggatactgtccgtctagggcatacgccctcaaggattgctgcacttagtgggagtaaatgccgctatctacaaagtttattgcggtgtgcatcagcaaacgcgcttcgcttgaacgagctttagcacaccgctcttatgtatatagcggcattaactcccacacagttcgcaatatatcgggcgtatgccctagatggacagtatcgcggcagtgtccagatgtcgaatgaacataaacaatcaaagaagccccagactggatgcagcaaattagcaatcctggcgggttttacgaagcatgcctgcacaatgacagactaaatgcacatatccacctctggtgaaggctggatacatataataaaaggagtatgtatgattttatcttgtaataatattagtaaatcttttggaacggatgtcattatcaagtcctgttcatttaatatagaagatcacgagaaggctgccattgttggaatcaatggtgccggtaaatctactctgttaaagattatcaccggtgaagaacctgctgatacaggcattgtcactcttgctaaggataagactcttggttatcttgctcagcagcaggaccttcagtctgacagaagcatttatgatgagcttctttctgtaaagcagtatatccttgatatggagagtgaattaagaagaattgaggctgccatgaacagtgcttcaggtgatgagcttgatgctcttatgaacagatacaccaatcttaatcatgaattcgagatgaataacggttacgcatataaaagcgagattacaggcgtacttaaaggtcttggttttgctgaagaggatttctctttacatgtaaataccttatccggtggccagaaaacccgtgtatctctaggtaagctattactttccaagcctgatattattatgcttgatgagcctaccaaccaccttgatatggaatctataagctggttagagaattaccttcttaattacaatggtgcggttcttatcgttgcacacgacagatatttccttgataagattgtaagcaaaattatcgagattgataacggtgactgtactgtattttctggtaattacacagattatgcctcaaagaaggcaattcttcgtaatatgaagttaaaggaatacttaaatcagcagcgtaatatcaaacatcaggaagaggttattgccaagttaaagcagtttaaccgtgagaaatccatcaaacgtgcggagagccgtgaaaaaatgcttgataagattgaggttgttgacaaaccagttgagcttaatgccaggatgaacattaaacttgagccatctgttataagtggtaatgatgtccttactgttactgaccttaccaaatcgtttgacggcaatactctttttaataatattaattttgagattaagcgtggtgaacgtgttgctttaataggtaataacggaactggtaagactactatattaaagcttattaacggcattatcccgccagacagcggaagcatttatcttggtgctaaagttgccatcggttattatgatcaggaacaccatgttcttgaccctgacaagactctttttcaggagattcaggacgcatatcctgacctcaacaatacacagataagaaatactcttgcagcatttctttttactgatgatgatgtattcaaatatatccgcgatttaagtggtggtgaacgcggacgtgtttcactggcaaagcttatgctttccaatgccaacctgcttattctcgatgagcctactaaccaccttgatattgtatccaaggaaattcttgagaacgcccttaacagctacactggcacaattctttatgtctcacacgacagatactttattaatgcaacagcaacaagaataattgaactcactaaccggaatattgttaattatattggtaattatgattattatctggaaaaaagggatatacttacagcaaaggcttcccctgatgcacaattgagttcttctgataacactaccaaaaaagattcaaagctctcatggcagcagtcgcgtgaagaacaaaataagcttaagaaaaagcagaatgaaattaagaaaaccgaaataagaattgctgatattgaagacagattatccgctattgatacagaatattcagatccttcaataggcagtaatacagcccgtttaatggaacttcataatgaatccactcaactaaagaaagaattagacgaactgtatgaacactgggaagaattaatggatgaaacgtaagtatttacattcagcaaaaagtgccaaaaatccccattttgagccactttttattgacaaatcatgaatctaggagtataaataatctatacttattattacttaattttttaaggaggacaattaaatcatgaataagacagaattagttgctgctatcgcagaaaaggctggactttctaagaaggacgctgaaggtgctgttaaggctttcacagatactgttgcagagcagttaaaggctggcgagaagattcagttagtaggtttcggtacatttgaagttgctgaaagagctgctagaacaggaaagaatcctcagacaggcgaagctattaagattcctgcttctaaggctccaaagttcaaggctggtaaggctttaaaggatgttgttaacacacctgcagctccagctaagaagtctaagaagaagtaattaattatgacttttaaaggctgtcacttatgtggcagccttttttctctttatttaattaagttcatgaaatcgaggtttattaattatggaaatcgaacgcaagtatcttgtgtcaggcatccctgacaatatagattcttatccctgccgctttattgaacagggctatcttaacactgctcctgttgtccgtgtaagacgcgacaatgataattactatctcacttataagggtggcggaatgatggctagggaagaatataatcttccacttaacaaagaagcctatgaacatctgattaagaaagctgatggcaatatcatcaccaagaagcgttatgaaatccctgatggcaatggatatactattgaacttgacatatttgaggggctctttgctggcactatccttgcagaagttgaatttccaactatcgaagctgctaattcatacactgtcccttcatggtttattgatgatgttactaatgatcctgcttatcataacagtaatatgagcagaaaagttttctaatatagaggtctggaatatggataaagaaattatgtttgaatatattcaacggcttaagcttgcagtaataactcttttcaaatggttattctgctcggttgtatgtggctgttttattggttctgtcggtgctgtatttcacctgatgcttggttatgtaggcagcctgcgcgttgaatacccatttttactattcggactgcctgttgccggtatcatcattgtattcatgtacaatatagtccatgaagctggaaaccgtggaactaaccttgtcataaccgcaatacagtcgaatgatgaagtcccgggaagagttgctccccttataattgtatcaacactgcttacccatctgtgtggtggttctgccggacgagaaggtgctgcacttcaggtaggaggtgcaataggcaatacatttgcaaagctgtttaaattcgatgagaaagatacacgaattatgattatgtgtggcatgagtgcctgtttctcggcacttttcggaacacctattgcgtcagctgttttctccatggaagtaatcagcgtcggtgttatgtattatgctgctttagtgccatgcgtactcgctgcatttatagcacagggcatagcctctgcactaggacttgaatctacacattttgtagttgatgaaatcgcttctttttcttttattaatggcagtaaattcatcatcatgtccgtactttttgctcttgcaagcattctgctgtgtgttgttttacacggtacttcaaagctctacactgattacataaacaacccatacataagaataattattgccggtgctcttgttattgccatgcgttacatatttggcacaactgattatctcggtgcaggctcagatattattgcaagaagctttgtaacaagttgtgcatggtatgtattccttttaaaaatgctgtttacagccgtaactttgggcggtggattcaaaggtggcgaaattgttcctactcttttcgtgggtgcaacgcttggaagcttcttagcacctatattcggactccctgtcggattatgtgcagcatgtggtatggtaagtgtgttctgcggagtaactaactgccccctcacatcattcattctatctattgagatgtttggtgcatcaacaatgaaattcacaattctgtgtattgcattaagttatctgttatccggatattacagcctgtataacagccagaaaatcgtctattctaagtataagacagaatatataaaccgccggtcccattgacctgtacagatcaaagaaccgacggttcttttattggagggctgctatttacacatatctccagtcttctatccgaaactgtattgaaacaatcccattatattcattaatatccgggtaatacaccatagatatcttccttccaacctctggtatctcctgtccgtctaatttgaacctgattgctgtcaccagcttgccatgctcactttctaactgacatcttaatacatttttattttttccaatcacagctgactgtctgacagtaagatttctgtctgcaaacaccggtttttcattacctttcccgaaaggctgcagcttctcaaactgttttataagttttatatcaacataatcaaccggcataggcacatctatccacactgtaggggtaagaacattttctgtcattgtctgattctcattcagtgctttcctgaattcatcaattttatcaatatcaagcgatattccggcagccattggatgtccgccatatttgttaaggagcttaccacatttgcttatctcctcaaacatgttatagccttctattgaacgccctgaaccctttgcaccatcttctgctttagtgattactattgaaggcctatagaatttttctcttactcttccggcaattattcccgcaacactttcatggcagtcaggaagatacacaactaacaccttatcgtcttttagttcagtgttctcaacctgttcaattgcaatagcggcatattcttctgttatatcttttctttcaacattaagtgtgcgaagctctaaagccttatttctcgcgtcctccatatctgtagtaagaagcagttcaatggctcttcttgctgaatcaagtcttcctgttgcattaagacatggacctataacaaatcctatgtgatatgagcttatcttgtctatctcaagctcacacgcctctacaagtgctcttataccaatattagtagttactgccagatgctttaaaccatatttaacaattaccctattctcatctgataaatcaactacatcccctattgttgcaattgccataagctctgcatattcttcaagattgattggattaagtccaagtctctcatatagaatcttaataaccttgaaggctactcccgctccacacagcttatcaaatggatatgggcagtcctcctgtttaggattaacgattgcatctgcctgtggtactttatgtatcttttcaccatcaacatagtcaaacggaatatcatgatgatcagtaacaattactgtcatgcccttttctttagcatatttaatctgctcaatcgcagcaattccattatcgcatgtaatgattgtatctgtgccattattatatgcttcatctattaagtgctcattaataccgtatccgtcaataattctgtctggtactgcaaatgttacatctgctcctgcagcctttagccctttgtagagaattgttgttgaacatattccatctatatcataatcaccgataatatgtattttctttcctgcttgtatcttgtctgtgaggatatcaacacatttgtctgcatcctttaataaatgtggtgaatgcatgtcatccaccgttccattaagatacatatttatctgctcatacgtttctaaccctctgttacggataatcctcgccataacctggtcaatgccaaatctttccccaattgctttgaaatcagctttcttggtgtatactctccagttgctttccactcttttctccctgtttcattattaaaccaattatggcgggaactgatatacaatccccgccatgtcataaacttattgtatctgttaattaaacctgagaaccgtcttcaaaaacctctttcttagaagctgcttttttattattctcttctacaacgcctctcttcttgccgcccattacataccacatagcacttgttaagcatactgatgagtaagcaccaacaacaatacctacgataagtggaagtgtgaactccttaacagaagttacgcccataatgaaaagaacaataagcattataagtgttgttatagatgtatatactgttcttgacattgtacttgtaattgatgagttaacaagctctgtaatgttagtctttgaattagctgtctttaactgctctcttattctgtcaaagataataattgtaccgttgatagagtaacctactattgtaagcatacatgcaataaatgttgttccaaccggaattcttgcaaatgcatagaatgcaagaacaacaagtacatcatgaagaagtgctaatacagcagctaatgcgaatctgatatcacggaatcttacaaagatgtatataagcatacagattgtagcaagtataaccgaaagaatagcatctctcttaactgttgcagaaactgatgaactgattgtatctgtctcaacgattgttccatccttgattgggtacttagcagtaaccgcattttcaatagcttctctctggtcaagtgaaagatcagatgtcttgaaagaaacctgtgttgaatctgcaaccttctgctgctgaacctctgtaatacctgcagcatctctgattacaggaatgatgttatcctcaatctcttctgctgtatactctttatcaaatgtaaatgttgttgttgaaccaccaacgaactcaaggctgaagtttaatgctctgtttccaagaccagcctgaactgccatagtgatgataccagcaacgattacaactgctgaaccgatagcagcccatttcttaatgccaagtacattaagagtctttctgtatacattcttaccataccacttagcgtctcttataccaaagttatataagagtttcattataaccttagtaataacaagtgatgtaaagattgaaacgatattaccaacagcaagtgttgtagcaaagcccttaactggacctgtaccgaatatgtacaatactaaagctgcgataagtgttgttacgttaccatctacgatagatgatgttgccttgttataacctgaaaggatagcattctctacagactttccggcaccaatctcttctcttattcttgtatagataataacattaccatctaccgccataccaataccaagaataatacctgcaatacctggaagtgtaagagtaagatcatatacacttacaaggaataaaacaagtgctgtatagataatcagtgataatgttgcaacaagtccaggaattctgaacataacaatcatgaataagcaaagtaatgcaagacctatagcagctgcaattaaacttgtcttgattgctgcatgtccaagctgtgcaccaacaatgttagagcttacttcctcaagtgtaagaggaatagaaccaactcttatgtatgttgcaaggttatctgcctcatcgaatgattccatacctgtgatagttgctgtaccacctgatatagctgtcttaacgttaggtgcacttacaacttctccatcatatacaatatatattcttttaccgatattagctgatgttgcatcgtagaacttagttgatccctcatctgtaaatgtaagctgcactccataaggagtatcttcctgactattagtatctgtgtaagcctgtgcagcttttacatcagaacctgtaagtagtggtgtgtagtcatttccctgtgaaaatgctgtatatcctgtggaatcaaggaattccaatgaacctggtgtaccaagttccttaagaatctcattagcatctgttactccaggaatctcaacagtgattctgttgtcaccttccttataaacctgtgactctgtactctttccttctactcgcttctgaagcttgtagatagtatcctctacatcctgtgatgtaaagttatcttccttaatctggtatgtgatacttacaccaccggcaagatcaagaccaagatctatatcgtaagtgcttccgtatccctttccattaagtccgaaaaatgctgttaatacaagtccaaccagtaaaacagcaacgattattgaataaataatcttcttaggtaaactgtacttcatgttaaaaactctcccttttacttattcttcctcagccatggctgcacgaatcattattgcacattctatacgctttttctgaagttcacatccaacatcatacgcatcattaatgttaccatggaagttatatgagttagctgcacaaccaccactgcaatagaacttggcaaaacaattcttacatttttcctttgaatagacattgctattcttaaacatatctctgatgtccggtcttactattccatcatcgacattacccataaggaaatcttcattgccaacaaactgatgacacgggtagaaatctccccaaggtgtaactgcaagatactcacagcctgaaccacatcctgacaatctcttggcaacacatggaccaccattaatatctatcataaagtggaagaaattaaagcctttaccagctttctttcgcttaatgatttctttcgcaaggatatcgtactgttcacaaaggaacggaatatcctcttctcttatggcataggaatctgttggctgcgcaacaacaggttcaacagaaatctgctcaaatccttcatcagcaagatgaagaacatcttctgaaaagtccagattattatgtgtaaatgtacctcttacataataattcatctgatttctgctctctgccactttcttgaacttaggcattataatgtcatatgaacttccatgattgtttcttgtaggacgcataaggtcgttaatctccttacgtccatcaatactaagaacaatattgctcatttccttattggcgaaatcaagaatctcgtcattaagaagaataccattagtcgtaagtgtgaatctgaacttcttattattagcttcttctatgcttcttccgtattcaacaagctgtttaacaacttcaaaattcatagttggctctccgccaaagaaatcaacctcaagattctttcttgaacctgaattggcaacaaggaaatcaagtgccttctttcctacctcatagctcataagagctcttcttccatgatattcaccttcttcagcaaaacaatatttacatgcaagattacagtcatgtgctatatgaaggcataaagccttaacaactgtaggtctgtctttaaaattgtctatatatggttcatatatatcttctgtaaagagctggcctgcttccttaagttcgccaatctcttcatatgcttctttaatatcctgaacagaatacttatctttaagttcttctgtaatctgctcaagcgtattattctcgtaaagtcctataatatcgtataccatgtcatcaacaacatgtactgagccgctgttgacatccaatacaatgttatagccgttattcttatactgatgtatcatttaaaaatagcctccaaaccgtaaatgttctcaatgcatttacgaaaaataagagagtgcagaatagttcgacactctcttactaaaaatactagttattcttattctcacagctctggttaccaactgtgcaagatgtcttacatgctgactggcatgatgtctggcactcgccacatccgccgtgcttcattgtatcctttaatacgcggttgctgattgtcttaatatgtttcacgacaatacctccttcatatattcaaattatatcgtattatatcatgtacaagtgttattttcaatcatttattctaaagatttgttcagataatcattcttcttttaaaagtctttttacaatttttatgtattttgcattaaatacagctacttttcttatatttttacataaattattgttttatattattaagatatgctatgtatttataggagattattatgtttacatctaaagatttaaagaaacttattattccattgatatttgagcagttacttgctgtgagtgtcggctttgttgatacattcatggtatctattgcaggtgaagcagccgtttccggtgtcgctcttgtcgataatataagcaacctgcttatccagatattatcagcccttgccactggcggtgctgttgtatgcagtcagtatcttggaagtaagaatatagatatgtcaaagaaatctgctggacagcttatatttattatgagtacactgtcggctttgctgatggtgatatcacttattggaaatcatgggattattaatttcatatttggtaagattgaaaaagatgtttttgaaagtgcaagtatttatttttacataacagcagtttcttaccctttcttaggtgtatataatgctggtgctgctcttttcagaagcataggaaacagtaagataagcatgaacacaagtcttattatgaacataattaatatatgtggaaatgctttatttatatttgtgttcaatatgggcgttgcaggtgtagctttagcaactcttatatccagaattatatctgcaataattattattgctcttatgtttaaagctgaatctgcaataagaataaagtctggcagggattttctgccatgcccttctattatcaggaagattctttcaattggtcttccgagcggattggaaaacggcatgttccagataggtaagctttctgtttcaagccttgtttcaacatttggtactgctgccatcgctgccaactctgttgccaattctgttacaatgtttgccaatattccgggtaacgcaatcggcatggcaatgattaccgttatcggccagtgtattggtgccaagaaacctgatgaggccaaaagatatggcaagaagcttatgtttattgcatacgcaggtattcttgcaaccaacattataatgacaatagttgccgttcctgtggtaggacttttccatctgtcaccggaagcaacaaaaacaggtttaagccttatccattgcttctctctcgttgcaatatttatatggccactaagctttactatgcctaacgcactccgtgcagccggtgatgccaagtacacaatgatggtaagtatcttctccatgtgggcgttccgcgtaggaagcagctacctactcggtggcacacttggtcttggcgtgcttggtgtatggttcggtatgtttatcgactggggattccgctcacttgcattcctgataaggtttcttcgtggaaaatggacgcagaaggcggttatctgatgataattatatgacagtctgatgtctgggaactgtctcttaacactggatatctactgtcagatggacgacaagtcgtctaattctggatatataatgtcatttgcgtgctgaatatacttataaactgcgttaaccaggttactttacatatattattacgctcgacctataagaacaattaaaatgtatgattaataggtactatttctacttaatttctttttaattcagcttgaataacgaaaaagcctataagatgtatgcatcttttacatcttataggcttttttagcgtttatcttagtagttatttatcaaaattacctatcaagcacctcataatgcgactacctataggtatcacatcaataaaaaagttcctgccaatcaggcgctttgagcccgccggtacttaatgagcgtgtaacgcgaatttagtaccgctgcgaggcgagagcagcgaaagcgtgcctgattggcaggaacttattttatttcttaccagcttattacttcatgtccgtcctctgttacaagaacctgaatttcccactgtgctgaaggaagtccatcagctgtagatacttcccaaccgttcttttcatctgtaacaacatttaccttacccatattaaccataggctctattgtaaacatcattcccggagccataaccatgtctgttccttttctagtgttatacccaacccaaggatcttcatggaattcaagtccgactccatgaccgccgatttctcttacaacagtatatccattagcatatgcatggtcatgtactgcctgtcccatatcacctaagaatccccaaggtttaacctgctcaagtcctaattcaacacattccttagtaacatcaacaagcttctttacctcaggcttaacatcacctatacagaacattcttgatgaatctgaaaaatatccatgaagaattgtagaacagtcaacatttacaatatcacctgacttaaggataacatccttagatggaaatccgtggcatacctgctcattaacagatgtacacacactgtaaggatatccttcataattaagtggtgctggaattcctcccatatcagtagttacatcatatacaatcttatcaatctcagcagtgttcatgccttcatgtattgctgctgcaaccgcatcaaggcatgctacatttatcttagcactctctttaatcttctcaatctgttcaggtgtcttgattaacttgtgtgatggcacaatatgtccaatatcctcaagatatcttaacttatcgtcaaatgcttcatgacacgctttgtatttcttaccactgccacaccagcaatggtcgtttcttcctaatttcttaatcattgttctgccttcctgttacatatattataatcatacacaactataaggctttcttaatattttttcaatatctgtttcaaatgattaatcattattaacattaaaagccctgattcccggatataccgcactagtgccaagctgttcctcaattcttaaaagctggttatacttagcaactcgctctgaccttgaaggagcacctgtcttaatctggcaagtgttaagagcaacagcgaggtctgcaattgttgtatctgctgtctcacctgatctgtgtgagctgattgctgtatatcctgccttatgagccatcttgatagcttcaagtgtctctgaaactgaaccaatctgattaagcttaataagaattgcattacctgctccaagttcaattcccttagagagtctctctgtattagtaacaaaaagatcatcacctacaagctgaaccttatctccaagtctgtctgtaagcttcttccagccttcccagtcctcttcatcaagaccatcttcaatagatataataggatacttctcacataatttagcccagtgctcaataagctcctctgctgtatactctgttccagccttaggaagcttgtaatacccctttcctttctcactcttccactctgaagaagctgcatccattgcaatcctaaaatccctgcccggcttatatccagccttttctactgcctgtaatattgtctcaattgcttcctcatctgacttaagtgccggagcaaagccaccctcatcgcctacagaggttgcaagtcctctttctttaagtatagctgcaagtgcatggaatacttctgcacaccatcttaagcattccttaaagcttggtgccccaacgggcataatcatgaattcctgaacatcaagcccacttgataatgcatggcagcctccattaataatattcatcattggaacaggaagcctgtttcctgatactccgcctaggaatctgtaaagaggaatatcaagagagacagcagctgctcttgctgctgcaatagataccgcaagaatagcatttgcaccaagattagacttatccttagttccatcagctttaatcatcgctgcatcaactgcatatatatcagatgcatctattccaaagaggcagtcattaataacagtgtttatgttctctactgccttagtaacaccctttcccaaatatcttgacttatccttatctcttaactcaagcgcctcaaattcacctgtagatgctcctgaaggtgctgcacctcttccaacagtcccatccgcaagataaacctctgcctcaactgtaggattgcctcttgaatcaagaatttctctgcctataaccttttcaatctctaaatatgctgccatataatcctccttttttaaatgctttgcaatttcaagttagtgttttctaacttaagcaatgcaattttaacaccatgcagacaaatccacaatgcaagaaaatgggaagttttctcattaaaaaacttcccattcataattatatccagctattcagttagtatacacaagataaatcctacttttccatcttctgtaaaaatgctttggttctttcattacttggattgtcaataacatcctccggctttccctgctcaacaataactccgccatccatgaatattaccctgtctgcaacttttcttgcaaactcaatctcatgtgtaactataatcattgtcatcttttcatcagcaagctgtcttaaaaccttaagaattcctgcagtaatctcagggtcaagtgctgatgtaggctcatcaaagaaaagcatttcaggattcattgcaagtgctcttgctatcgcaactcgctgctgctgtcctcctgacaactggcatggataactgttctctttgccatcaagtccaactttctttaaaagctctttggcttctttctctacttcattcttgtcccttttctggacacaaacaggtgcatcagtaacatttttcataactgtataatgcggaaaaagattaaagttctggaacacaagtccatatgtattcttgatttctcttaattctttctttccaacatacactgaaactccgtccttgtcctcacatgcagtttcaccacctaacttaagagttccagaatccattgtctcaagaagtgttgcacagcgaagcagtgttgatttacctgaaccggaaggtccaagaattgcaacaacctcgccctcattaacttccattgatatatccttaagcacctcagtatcgccgaaggattttttcaaatgtgttatctctaataattttttcatattaaaatcctccttaatcaaaatactgcatacgcttttctaacttttccataaccatagcaacaaggaaattgaaaatgtaatagaacaatcctgctatgaataatggcatgatacttgctgttgaagccgctacctgcttggcaagtgtaaacatttctgtgtaagcaagtgcaaatgcaagtgatgtatccttaacaagtgttataacctcgttagtaaccggaggaagtactctcttaaccatctgagggaatataatcttccagaatgtctgtaccttggaatatccgagtacctctgctgcctcgtactgtcctttaggtatgctctcaattccacctctgtatatttctgcaaaatatgctgcataattaagtgcaaatccgataattacagcatagaatctgtatgttgccgtaaccttcattccaaacagataatatggtccgaagaacacaacaagaagctgtaacataagaggagttcctctcattatagatatgtatattcttgcaatccatcttacaatacctattcttgactttcttatttcacatacgagaagtcctagcggcattgagaatataagtgttaagaagaatattgcaagagttgctaacattcctgatgaaagctgcttaactatatccacaagtctttcaccaaatgaagccttagtagtactggtgctgtcaagaagatatgcactgtctgttccttcttctccaagacatacgctgtctgtaagtccccatttctcagcaatcttgtcaaatgtgccatcagcaagcatatcattaaggcttgtctgaacctcatctcttaatgctgtattacctaacttaaaaccaataccatactgttctgatgaaacagtctcatcaagcattgtgaacttattacctctctgttcaagctggtactttgcaacgcccatatccatacatacagcatctgctgaacctgattcaagattcataaatgctgagttataatcagacacctgctgaagtgttttaaactgtgccgcaagtgcaagattctcttctgtcgcatcctctccggtaaatgctgcaagagctgatgaatcagcctgtacaatgacaaccttacccttaaggtcttctaacttctttattcctgaaccagatttaactataacaacctgtgaattatcaatatatgccttagaccatgtatactcacgttctcttccattaagcgtgaatccgttccatatacagtcaatagaacctgaactaagctccatatctttagaatcccagtcaataggctgcttaaccagattccagccatttctttcacatacctcctgtgcaagatccaggtcaaaacctacatactctccactatcatccttataaccataaggtgggaattccgcatcaaatcctactgtaaatgtagttcgtccatcatcactttttttattaccgcacgctgtgaacattcccacaatcacagacaacattgccagtaacaggacggcttttctgatattcttagccatataaaaatccatgcctttctcgctttaatatgctttcactttaccatagtaaatcaagcttgtctattataacatgaatcacctgataaaaacactataaatattctaaataaatccaaaatttctcaatataaatatccacgctgtaagagtcacacttgaaagtaatgttgtaagcacaactatgcttgatgacagcacctcgtcattatccatacctttagccataacaaagcaggtaactgtagatggtgaagcaagcataataagaattgccataagttcctgattacgaaatcccatttttactgctataggaagaaatattgctgctagacccacgagttttaaaaatgtagcaataaccgtaggtttaatcttcttaattgcctttttcccttcaaatgacgcaccaatacatataagtgcaacaggtgtagctgtctgcgcaatattattaattgtcttattgataattaccggatatcttaatcctgcaagagaagataacaaccccagcacaattcctataattatcggattagttacaatattaaagcacgcttttttaatgttttctttcttatccgtagattgttcttctgtgctgccatgacactcaggatgtgccttaaaggtaagcactattaccgaaaatatattaaacaacggaactgcagcaactatcataagtggtgccattccagtgctctggtacatattctgtatgaatgccatcccaagtatcgccgcactgcttctgaatgatgcctgcacaaatgcacccttctgcgtatcatccttcatgaatatctctgtgcatatccatattccgctaaacattatagtagtaacaatcatgcagtacagtacaaacttaacatcaaactgcgatttaaaatctgctgctgctaaatccctgaataacagtactggaagtgccaccttaaatacatatttattagccacatttgcaaaatggtcatctataacgccaagctgctttattacccagccaactatcataactaaaaatattggtaccgttgcatttatactatataagaagctgtccatctgtctctccttctactacttattaatatcaagccagtatgtatgatcaagcggaccgctgccgcttccaagattaagtcctgctttcaatgcacctgtcaggtactctttagccgccttcacactttcttctattgataatccctgtgcaagattagctgcaatggctgatgacaatgtacagccagttccatgtgtgttagggttatcaatcctttctccattaagccacactatactgccatctacgcacagacagtcattagctgtatgaactgcatgtccaccttttactaaaacagctgcatgaccgccttttgtcttcagatgttcatatatctttatcgctgctttcttcatcgaatctgcactgtcaacagtcatttctgtaagaacctctgtctccggaatattaggagttataacatcagcaagcaccatcaggcgttctttaagaacctctgctgcatcttctttaataagtctgcttccacttgttgataccataaccgggtcaagaacgatattttttgccttatatgtaattaacgcatctgctattgtttctataagctcctttgacgcaaccattcctatcttaactgcatcaggatatatatctgtaaatattgcatcaagctgtgccttaagaaattcaggtgaagattccgatattcctgtaactcctaaagtattctgtgctgtaagggcagtaattgctgacattccatataccttatgtgctgcaaatgtttttaagtctgcctgtattcctgctccaccactgcaatcacttcctgctattgttaatgctgtattcatataattccctttctacatctattctcatcgctgcccgaaacgtttgttgcgggcagctcatatgccagaacttcgttccggcattgtcgcggcgctcctcgagaaaacatataaagttctcagttcgtgcaagcacggctgcgaactttccatgttttctctcatcgctgcccgcacaaaaaaagcaccgaggttacctcggtgcttttagtgcagtcggcgggacttgaacccgcacccaagcaatatggactagatccttagtctagcgcgtatgccaattccgccacgactgcttgttttgttttcgtgtcgttcgctgctcgctgacgacttgattataatatcatcagtcacacacattgtcaacaacttttttaaattttttcaaaaaaattcatatttaacttttttagtcattcatattgacacattttaaattctcttataaaatatcaatgttgcgtaacttatattaagttcgttacatattatatatgcagaagtgtcggaatggcagacgagcaagattcagattcttgtgcgggttaccgcgtgtgggttcaagtcccatcttctgcactgattaaaagaaccgtgtgattttgtgtcacacggttcttttttcatatcaattatataactttcctttttaatatctcctgcataacaaaagccttgcgcatctcattcttatcaaacttaatgtcatcaagaatagctttacctcccgtctgactctgtggaacaatctcatcattatattcatgtccgcagtcatactgtgtaaatgtgtgtccgcctgtcatatcagaataagttcctgtgcttcctgcctgcataactggtgaatgaaattctgctttatcaagtgtcttcattgcaggtgcagcattatctgctgctggcggtggagtaacatattgcggaaccggtgcctctgctctatgcgaagtaacattctttccattaaagttattttttgaacgaatctcctgcttaagcttttcagtttctgcacttgtcatcttctgagtacctaaatatgtctgtacagacggatcaatgtactgcttttcaccataagaattcaccatgtatggtgcagactgtgcatcgctgtcattcttcttattcagattagcaccatggcttaatgagccattcccggaactgttattctgcatctgatgcatattacgaccatattctggcacattctggttatgatcctgcatattccgctggtgttcctgcatgcgctcattctgcattttcttagctttcttaatattcgatataattatcaaagcaaacactgcccaaacaattaatatttccataaaacccgctttcccttttaattcacaagtccattatatagttgccggcttctctgtttctcctgctatcgactgtctcatcttagtatcagcctttaaattctgaaggtcataataatccttaaagcccattctgcctgttcttaaagcttcagccaaagccttaggtacttctgcctcagcagctacaacgctcgctttcatctcctgctcaagagcaacagcggctgctcttctctcctctgccttagcctgtgcaatattcttatcagcctcagcctgaagactctgtagatgagcacctatatttcttccaatatcaacatccgcaatatcaatagaaagaatctggaatgctgttccaatatcaagccccttctgtaatatagccttggagatagaatcaggattctcaagcacgctcttgtgcgaatctgctgaaccaactgttgttacaataccctcaccgactctggcaattacagtagcctcgcctgcaccaccaaccaactggttaatattagttctaacagtaactcttgccttaactaacagttcaataccatccttggcaactgctgaaatattaggcgtctcaataaccttaggattaacactcattctgacagcctctaaaacatcacggcctgcaaggtcgatagctgcagccatctcaaatggtatgttcataccagctctgcttgatgcaataagtgcattaacaacagcatctacatggccacctgccatataatgtgactcgagctgattagtgttaagctgtaatccggcttttcttgcctgaataagtggaagcacaattcttgctggcggaacctttctcagtctcataccgataagagttcctataccgacatggcttcctgatgctaatgctgtaatccataatctcattggtacaaatgcgaataacaatataagcagtaccacaataatgattggaataattggaatgtaaggcataattaatccccctttatatattttgattttcaaaaatattattacatataatgagaaaaaatgccacatttatatagaatcattttaaaaaatctgctatagtaattagtaatcgataattttttgtcaatcattacaaaggaggtttcattatgttatctaatgatgctactattcagaatattaagcatgaaatcctgtatgaagttgccaagctcgcatatgcaggaaggtttgaagaagaaaaggacgaactggcatacaagatgttccccggtcctaaagcaagattccgctgttgtgtatataaagaaagagaaatcgcaagacagcgaatccgccttgcagaaggcaaatgtccaacagaaagtgaccatccgggtgccaataacataatccaggtaattgaagccgcatgtgccgactgtccactttctcactatatcgtaactgataattgcagaaaatgtatgatgaaagcctgccagcaggcatgtaagttcggtgctgtaagcatgacaagagacagagcctacatagaccctgacaaatgcaaggaatgcggcatgtgtgccaaagcctgtccatacaatgcaatcgcagaccttataagaccatgtaagaaaatctgtccagccaatgctattacaatggatgagaatggcatctgtgaaatagatgaaaacaaatgtatccagtgcggacagtgtatccacgcctgtccattcggtgctatcggttctaaaactgatatagtcgatgtaataaaggcaatcgtagacggaaagaaagtcgttgccatggtagcacctgctgttgaaggacagtttggagacacaataacaatgagcagcatccgcacagcatgcaagaagctgggctttaatgatatgtatgaggtaggtcttggcggtgaccttactgcacaggccgaggcagaagaatggcttgaagcagctaaagaaggaaagaagcttacaacctcatgctgtcctgcatttgttaatctgattaagaaacagtatcctgagcttgcagaacatatatcaacaactatatcccctatgtttgcactttcaagacttcttaagtcagaagatcctgatacaataaccgtatttatcggaccatgtatagccaagaagaatgaaaagcaggaatataagggtcagggaaatgctgatttcgtacttacaatcggtgaattcagagcaatgatgcgggctaaagaagtagttcttgagcctgaggaaaacagcgaccagcaggcaagcatatatggtaaaagattcggtaacggaggcggtgtttccgctgctgttgcacagtgtatgcgtgaagcaggtgctgaccctgataaattcaatatagaaaaatgctcaggtgctgccgaatgtaagaaagcacttacacttcttaaagtaggaaaactccctgcagatttcattgagggaatggtatgtgaaggcggctgtgttggtgggccaagccgtcacagaagcggaaagaatcctgttcttgctgccaaagaccgtgacaagctgctcgccgaagcagacgaccgtaatgtttcagacaacttaagtaaatatgacttaacagcattttcaatgcacaaataaaattaacacaaaaatagcgctggcaatattcacattgtcaacgctatttttttagtgctgcttttaaagcaagcacaacaagtttttcaaatatcacactcaatacaacaattataaccgtccacgccagcaaatcatccgtatcaagatatattttcgacatataaagcatttgtccaacagaacctttgggcattccgataatctctgctgccactcctgctttccaagccataccagcagtaactcttcctgctgatataagataaggtgaaagctgtggcatgataatataacgtattctgcgaatccaaggaatatgaaatacatctgccatttccctgatgcctttatcagtacttctaagaccggtcagtgtattctggtatataacaggcacaactattaaaaatgcaatgaacaccgacaggttctttgccgtaaaccatataagacatataaccacaaaagacgcaacaggtactgccttaattgtaaccatccacggccacagaatatattcaacaggcttacatatatatgcaagcactgcacatataattccacacaataatcctgcgagaaatccaccgacaatatgatacattgtaaaccacacagttcctgcaaaacccggttcattccatatagtaaataatctgccaagcacttgtaccggtgtcactaataatatcggtgaatcaatctttagcgcagctatttcccataaaataagtgccagcataactgccagcactttatatattacattcaatatcttcttattaatattcataatagaaatcatctttcggcatactgccacctaccgacttaggattctggtcatatagcacctgtaagaacccttcaagtgcacttctcatgttattattaatatagcatacaatatggcacttaggaagagccttcttagctattgctgctgatgcaacaacaccatactcagcaataagctgtgctgtctcatcaacattgcttgaagtataggcaacactttcgttatattcatcaatgaacttcttaagctgttctggatatttttcagcaaattcttttcttacaacaattacacctgtaacaatcttagaattattattaatcttctcccatgcttcattaagatccataacaactcttaaaccactaatctgggcacttgctgctgtaacaaaaggctgtggaagaacagcaattgcaccatcttctgactttaacttagaaagtgcttctgttgtatctgaacaccacacaatattaacatctttatcagcatcaagtccgttacctgaaagaatatatcttatggtatattccggcactgcacccattcctgtagcatatatagtcttacccttaaggtcgctgatactgttgacagtgttacctctctctacaagattaagaactccaagtgtattaacagcaacaacctgaaccttaccttccgtcttattatatatattagctgcaagattagatggaacagctgctatatcaatctctccggttgcaagtggtgttacaaatgcagatgcatctgtagcaaaatcttcaaatgcatatgtgttcttagtattgccattctctgaatctttacgcagcttaaccattcccattgctgtaggtcctgccatagctccgattcttattgttgttgtctcttctgtctgtctctcgccttcgttattggctgattttcctgcacatgctgcaaatgaaaataccataataaccgaaagcataactgctagtaatttcttcaacttattattctcctgatatatttaattagtattccatgaactcctgtatatcccttaatacatcctcaatctcgccgtctccatcattaattgtaagctgtaatggtttactgatatccagactgaacaaaccaactaatgatttgccatcaacacagctatatcctgattcaacatcaaacccacatgagtacttactaattgtacttacaaacctttgaaccttctccacagaatccaaaagaatcatcactgtcagcatattatctcctccgcttcctcatattgtaattcccatatcagagactaatatacaccataaaacttataaaaacaaccattatctaagactaaaatatggcacggatgccacagaaaacgcttatctaagctgttttcatatcatccatgccatattctgataatcataaattagagattagtatatcccataaggtagtaatcaactgctcttgcacagtctcttccctgccttatagctttcacaacgagtgactgtcctgtatgcatatctcctgctgtaaatacacccggtacacttgtttcaaatccgtcttctgctgtctttacattagttctttctgtaagttcaactccaaatgcgtctgtgacatatttctgtgaacccaagaaacctgctgctatcagtacaagctcacatggaagctctgcttctgttccctccacagggaccatcattcttcttcctgtcttttcatcagtcttagactcaagctttactgtaacaacacttgtaagattacccttcttatccttcttgaattccttaactgtagttgtatatatccttggatcatgtccgaatactgcaattgcttcttcctgaccgtaatctgtcttgcagactaaaggccactgtggccaaggattgttctccgcacgctcatctggtgcttttggcatcatctcaagctgtgttaccgacttacagccgtgtcttatacatgttccgacacagtcattacctgtatcaccaccaccgataacgataacatttttatcctttgcagaaatgtatctgccatccttaagtcctgaatcaagaagactctttgtagttgctgtaaggaaatctactgcaaaatatattccattggcatctcttccaggagcattgatatctcttggattagcagcaccacacgcaagtactacagcatcataatctgccataagcttcttagccttaatgttctcaccaacatttgcattagttacgaactcaatgccttcttccttcataatatcaagctttctgtcaattatatgcttttcaagcttcatattaggaatgccatatcttaaaagtccaccgatacggtcagctctttcatatacagtaacactgtgtcctctctgatttaactggtctgctacagcaagtccggcagggcctgaacctactacagcaattctcttcttagttcttaccttaggaggatttgctttcgcataacctttggcatatgcatgttcaatgattgccatttcattctctttggtacatactgccttgccattaagtccgcatgtacatgctttctcacagagtgcaggacacacacggcttgtaaattcaggaaagttacttgtcttatgtaacctgtgatatgcctgttcccagtttcctgtgtaaagaagatcattccattccggaataagattattaagcggacatccgctagtcattccctttattgtcataccagactggcagaatggcacgccacagtccatgcagcgtgaactctgctttctctgctcatcttctgacagaggtgtatgaaattcattaaaattctttattctttccttaggtgaaaccgctgtagcttcaactctttcatagtctaaaaatcctgttggctttcccatggttagctcctttcatgtatgttataaacttgcactgtccctacgggtgcacctccaaaagcttcgcttttgtcagtcgcgactgcgtctcaaccctacttggtagccgcatagaatgcttctatctgagcctgttcgctgctaagtcctttttcttccatctgtactatcatgttaagcatcttcttataatcatgtggcatgattttcttgaactttggaagatattctccgaagttatcaagtatttccttgcccttcttagaattagtataagcaacatgttctgttataagctgctttaactcaaggacatcatatttgttagaaactgcttccattgaaacgagctgcttattaactctcttgtaaagacttgtgtcttcatcaagaacataagcaattccaccgctcataccagcagcaaagttcttgccagtcttgcctaatactactactgtaccacctgtcatatattcacagccgtggtcaccagttccctcaacaactgctgttgcacctgaatttcttacacagaatctttctccggcaacaccattgatgaacgccttaccacttgtagcaccatataatgcaacattaccgatgatgatattctcgtcttccttataagtacttcctgttggtggatatacaataagctttccacctgaaagtcccttaccaaagtaatcgttactatcaccgacaagctcaagtgtaagtcccttaggaataaatgcaccaaagctctgtccgcctgcgccattacattttactgtatatgtatcatcatcaagcttatcatcaaatcttcttgtaatctcagcgccaagaagtgttcctaatgtacggtctgtattagcaacatcgatttcaagacttctcttgcttcctgtctccatggcagactcgaacttcttaagtaaaatcttttcatcaactgtcttctcaagttcgaaatcaaatacatttttcttatcataatgtatctttgtctgcttaacatatggattatcaagaatctgtgataaatcaatctctgctgaacgtccgctcttggcaacattcttctgctcaagcagatctgttcttcctaccagctcatcaagtgtcttaattcctaagtcagccattatctcacggagttcctgtgcaatgaatctcatgaaattaacaacatattcaggcttacctgtaaatctcttacgaagctcaggattctgtgttgcaacaccaacagggcatgtatcaaggttacatactctcatcattacgcagcccatagttacaagtggagctgttgcaaatccgaattcctctgcgccaagcattgctgcaatagcaacatccctgccactcatcagcttaccatcagtctcaataataaccttattacgcagtccgttcattgtaagagtctgatgtgcctctgcaaggcctaattcccatggaagtccggcattatgtatagaacttcttggagctgcaccagtacctccatcgtaaccagagataagaattacctgtgcgcccgccttggcaacaccggaagcaactgtaccaacaccagcttctgaaacaagcttgactgatattcttgcattcttgttagcattcttaaggtcgtatataagctgtgccagatcctcgattgaatatatatcatgatgtggtggtggtgaaataagtgcaacacccggagttgaaagacgagtctttgcaatccaaggatacaccttctttcccggaagatgtccaccttcacccggcttagcgccctgtgccatcttaatctgaatctcctgtgcgcttacaaggtatcttgaagtaacaccaaacctaccagaagcaacctgcttgattgcagagcatctgttaagaccatccggaccaacctttaatctgtcaatgtcctctccaccttcacctgagttagacttaccatgaagcatgttcatggcaatagccatagtttcatgtgcctctcttgatattgaaccatatgacatagcaccagtcttgaatcttcttacgatagaatcaacactttcaacctcatcaatgctgattcccttcttagggaacttaatgttcataagacctcttaagttcttaacgccctcttccttattaacaagagctgtatattccttaaatgtcttgtaatctcctgttcttgtagcaagctgtaacaaatgtattgtctgtgggttatacagatgttcttccttgccgcttctcatcttatgagcgcccgagctgtcaagagtagtatctgtagaaagtccaagtggatcaaatgccttagagtgaagtgtctcaacatcttcctgaatatcctttagtgacacaccttcaattcttgaaactgtacccttaaagtatttatctataacatctgagttaataccaattgcctcaaatatcttagcgccctgatatgactggattgttgaaatacccatcttggcagcaatcttaacaatacctgtgataattgccttattgtaatcatcaactgctgcataataatccttgtcaagcatattaaggtcgataagctcctgaatactctcctgtgcaagatatgggttaattgcagaagcaccatatccaagaagagttgcaaaatgatggacatctcttggctcaccactctctaagattacagccatgcttgttctcttcttagtctgtacaagatactgctgtaatgcagcaaccgcaagtaatgaaggaatagcaacatggttctcatcaacacctctgtctgaaagaataataatattagcaccttctctgtgcgctctgtcaacttcaacaaataagtggtcgatagctctttcaagtgaagtgttcttataatatataataggaatagtctctaccttaaatccttcaacattcatattcttaatcttaagaaggtctgtgttagtaaggattggatcattaattcttaattgtttgcagttctcagccttttcctcaagaatattaccctctgttccaagataaacagttgttgatgtaacaaccttctctcttattgagtcaattggtggattagtaacctgtgcaaataactgtttgaaataattaaacagtggctgatgcttattagaaagtactgcaagtggagtatcaatacccatagcacctgtctgctctgttccgttaagagccataggaagtattgatgtcttgaaatcctcgtatgtatagccaaatgctttctggagtcttgctctttcttccttagtatgaacaggaactttcttgttaggaatctttaaatccttaagctggataagattactgtcaagccattctccataaggattcttagttgcatattcttccttaagcttatcatcctctataagctcgcccttaaccgtatcaataagaagcattttaccaggtcttaatctgtcctttaacttaattctgctctctgggattggaagtgcaccaacctctgaagaaagaataagataaccatcgttagtaatataatatcttgaaggacgaagaccattacggtcaagcactgctccgaagtaatctccatctgtaaatgcgatagaagccggaccatcccaaggttccatcattgttgcataatactgatagaagtccttcttttcctgtgccattgcaccattgttaatccatggctcaggaattgtaatcataacagcaagtggaagcggcatgccattcataacaaagaactccagtgtgttatctaacattgctgaatccgaaccgttagtattaacaaccggtgtaatctttgacatttcatcctcaagatatggagaagtcattgtctcttctcttgctaacattctgtctgcattacccttgatagtattaatctcaccgttatgtaccatgaatctgttaggatgagctctctcccagcttggattagtgttagttgagaatcttgaatgaacaagtgcaatagctgactcataatcaggattctcaaggtcgccaaagaactggcgaagctgtccaacaaggaacatacccttgtatacaatcgttctgcttgataatgaacatacgtaagttgtatcttctgctgtctgctcaaatactcgtcttgcaacataaagtcttctgtcgaattcaatacccttagctgcatttgcaggtctctttacaaatccctgcataatgtatggcatgcagtcaactgcctttttaccaagaacattaggaaatgttggaacatctctccagcctaagaattcaagcccttccttctcaacaatgatttcgaacatcttcttggctctgtttcttgccagctcatcctgtgggaagaaaaacattccgacaccataatcgcgctcatctccaagctcaatccctaatggctttacagctttcttaaagaatttgtgtgatatctgaagaaggataccaacaccatcaccagtctttccttctgcatccttaccagctctgtgctcaagattctctacaatgcttaaagcatcagatactgtctgatgtgtcttaattccgttaatacttacaatagctccgataccacaggcatcatgctcaagttcagatctgtaaagaccaggctgtttgatttcattttccataagtctaatcatcctttcgtatattctaaagctttgcttgcacataatatactcctgttttatggattttgtaaatatttttttgccgcaattgtctgataatttgactattgctactttcaattgtaattatcagataattatagaatttgtcacgatattatctcttaaaatgtaataccatctttatttatcattatatgttttacacttaatccctgcctgtttttaaacataaaagttgaattgtttctaaattgtgtctgatttttacctgtcggcgtaaaattagtaaaaaaataaagtgacaaaaccaaacatactaatttgcaaggttttatcactttatattattaatgattatctattagttattagcaggtactcctcctatcaggaaatcaaccgctttctccttaacagaaaactgtatttctgtatgttctccaccatattcaccatcaagtgtccatgatacaggctgtggtgattcgaaccttacagagctggtcttccatgtgcatacccagtcacatttactaaggtctttagttataaaagcattaataagtgactggactgctataggattattaagctctcttatcagggtaacttcaaataatccatcctgcagattaacatcattacctgtaagattctttattcctccaaccgaatctgtattacttatcattccatatacaaaatttccctcaacattcatctcctcagaatatacacgcatatactgtggtttaatcgttgataagcttctgaccgcttcaattacataagcctgatgtcccagtacattcttaagattctgtggagttccataagagacccttgtaaacgccccaaatgcagcaacataattaaatgagcgctctccatttaccattcctacatcacaaggaaaacgtttaccctttgctatattaacagcggccttcaccatatttcttggaattcccagacttgcagcaaaatcattcgttgttccactaggaatataccctatcggcggtttctctcctttatacttaagaacagcggctaccgtttcattcagagtaccatctccaccactacatgttataacatcatacctgccttcattatctaaaatgtgctgatagccgtcaagcgatgccttggtcggatatacagtaatctcatatccagccttagaaaatacctgtattatcttcatcagctgattcttaatctgagcttttcctgagtttggattaaatacaaacagcatcttcatcataatcacctgtcccatttatcacataatgcattaatctgatctgtaaacttagccagatctttattcgtaccaccctcattgtgtgtaataactgtcatgagacgctttccagcagcaacaagtctgtcaaatacagttttaccacgctgtgtactcgtcgttcttctagtctttctttccttaacaccttcagagataactctgtctgcaataaggtcataacttccgcctgtatatggtgccatggcatcataaccgtattcttctttaagacactccgtaaactcgtcacacacactgtcttcgccatgcacaacaaacacctttttaggctttctgtcaaatgcattaatccaacaaagaagcccatccttatcagcatggccactcgaaccctgaagctgtacaatctcagcctttatctggattggctcaccgaaaagcttaatctcttctgcaccatcaactataatacggcctgttgttccaacagcctgataaccgacaaatacaattgtacactctggtctccacaaattatgcttcaggtgatgtcttattcttcccgcttcacacatacctgatgaagaaataataaccttaggattaggatcaaagttaatctgctttgattcatctcccgtagttgcatacttaagccctggaaatgtaagcggattaatcccctttcttacaagttctactgcctcatcatcaaagcagctctccacattcttaataaatatgttcgtcgcctcaatagcaagtggactatccatatatacatcaaaatctctgccaacgagattatcttctttaatctttcttatgatataaagcagttcctgagttcttcctactgcaaaggacggaataacaacattaccgcctctttcaaatgttctcttaaatatatcagttaaatcttccacataattaggagttcctccgtggcttctgttaccataagttgactccataactacatagtcggcatccctgacatgcttcgggtctttaattatcggcttgttaatattacctatatcacccgaaaacacaatcttctctgttacatcaccattctctgtcttctctgttgcccatacctcgatactcgctgaaccaagaagatgtccaacatctgtgaatctaatcttaattccttctgcaatatcatataccctgtcatactcacagcctacgaactgcttgcagacattaactgctgcatccatatcatacagtggaacaaattccttgagttttcctcctgatctggcagccttccggtttctccattcagcttcaaacatctgaatatgtgcgctgtctcttaacattatctcacacagctgtgccgtagctgatgttgaatacacctgtcccctgaatccattcacatacataagaggaatcagacctgaatggtcaatgtgtgcatgcgtcagcaatatgcaatccacatcagatgctgcaataggaagttcctggttttcatatacatcattgccctgttccataccgcagtctacaagaatattaagacctgccgcctgtaagaaatgacagcttcctgttacctcatgatccgcgcctaaaaatgttagtttcataatatgcctcatttccgcgtcaacgctattttttcacgatatttctgatgtaattgtaacattttcctatgtaaaattaaatacaatcatatataaaaattgtattaattctctgtatattctatatccgtaaatgtaacatccgcatttctcgaaacgaagaatcctgcgtatacatgcttagggtctacggctgttagcttaaaatcaaatccgcctgttaagaactccccatcgcctaattttactgcatatccgtccggattagactttatacatacttctactgtatcacccggcttaagttctcttcctgtcacgcttccctgcataagttcgctgttctttcttgcaaaacagctccatgcctggtctttataagtaaggttaagtggtgctgccgctacataatcgccaagtacatctggcattttcttatcaatatacatgtcatctcttaccataagcccaaatgacacctgattgttatagaaataatcattaattgtcatcttagccttaagggtaaagttcacatttacaggaatcttcttatagtacattgcaattccgtctgtaacagtagatatcttgccatcattattcttaaccgcgatgtgtattccccctggaacttcttcaagtatataattatcagattccgttggcagagttgtaacatcaccgaatactgtgcctttgaatccatatgcatctttaaagttcttgctgtcagcaagctcatcgctgaacactaccggcttgtataaagcatttttttcaagatatctgttcttgtctggaagcggttcatctgcccttatattaactatattctctgaaagtcctgatattccagccttttcaagctcctgcataacaagaaaagcattaaccctgccgccccatatattagtgtgtgtattgtcaacacttacttctttattagatggccatgcgtgaagataaattgtctcttctggtcctaactcttcatataaagcctttgtcttttcagtcatatcaacacatacgattccaaggtctcttgcaaggtcacggactgcctgtgaataatcccctcccttaaactgtgcagcgtcatcagttatgtgaagctcctgctttgtccactctcctgttgcagttcttcttacaataggtgtacacagtattggtgtacatgaaacatcaagtgcccgcttaatataattgtcatataatgatgctgcaaatgtgcctttcttatccctgccgcctatcgggcttgtatatcttcctgtctctgttttctcatcattatgtccaaatccgattataagaaaatctcctgctttcatgcctgcaagaagctccttataattctcttccttagtaaagcttaagctgcttcttcctgaaagtgcaagattattaacctgcaccttgctgttaagataacaaccaagcttggttccgtatccatatcttggataatagtatttgtcatcaaaagagcttaatgttgaatcaccaacaacccataatgtactcatcgtatgtcacctcgttttaaatatatgtgttatcatcaatatgtcctattaaggtagttttcgcggaggtgttcctccatcgcagctatctctttctcgaactctctggcagatataagcaggcatccctgtcctcttataattacctgttctacaccatctgatgttgccaccgttacattatatttctttccattctcatgtgcaaatttttctatataatggtcagcagtttccgctgtcttcgtaaatacaacatgaatattatgaaaatctataaactcctcatcatgtccaggcactctgtatgcgtcaaataccacaatcagttcgcatcccttcattgcctgataattacacagtatatcaagcagcctgcctcttgcactgtcaagattgacctgtgcaagctctgatagctccttaaatgcatgtattatattatatccgtcaacaagaagaaaactcttcttatctggattatattcaggtgctttaggagggtttttaacattggcattaccgcctgtaacatatcttccaactgctgtgtcagcttttcttttcgataactttcttctttcattatcgcctctgctgttagaaaaatatgtttcgttcaagattctgtctacctcgtctgttccaatccactcgtcagacactgttcttgaagcctgctttgccgtaagcttgacctccctgtcagactgtccaccggcaaccccggaatccgtcacggctatctcgacatgtgcatgctctcttacttcattccacggcacaacatatcccgaaccgcctgcacagaatactgaatctaccggatttcttgtatcacgctcaggctcatatccgaatcgttcaataacctcttctgtattatggcatggtctgtagcctgccatcttaagagcaagtctgcctgttcccttagtataggcattaacctctgcctgatagttaccaatcactgaaaccggaccttcacctgtgataacaacattatcaccatcagcctcctgcatgttgaatgctgcacccattctctcgaagtctgtcattgccctgccgacataatctctcttcacctcaagtgaaaatgcgtagaatggctctaacaatactgattctgcctgcataagcccctgccttacagctctgtaggttgcctgcctgaaatctccgccttccgtatgctttggatgcgcccttcctgcaaccagcgtaatcttcatgtccgtgagttcagaacctgtaagcactcctctatgcattttttcacacaaatgtgtatacacaagcctctgccagttcttatcaagtatatcctcactgcaatgacattcgtatctcatgccgcttcccgactcacccggttcaagcagcagatgaacctccgcataatgtcttaaaggctcgaaatgtccgataccatacgccttattcttaatagtctctttatatacaatgcttccttcgccaaatgttacatctactccgaatcttgtcctgataatattagtcagtacttcgataagcacaggtcccattacacttacatgtatctctttaaaattctcatcccattcaacatgaagttcaggttcttcctcctcaagtgtacgaagctttgaaagcagtgccacaggatctgctcctgccggaagattaagcttgtaattaagaactggctcaagcactggtatattatcctcgccgcccgctccgataaactgtcctgctttggtttctgaaagtcctgtcactgcacacacagttccggctggtgcttcattaatgcttgtaaacttatctcctgcatagactcttatctggttgaccttctcattaccaataagcatcttggactttagcgaaccgccacacactttaagatgtgtaagcctttctcctctgtcatcccttgttatcttatacacctttgcagagaattcgtcactatattctggacatccagcatatgtatctattcctttaatcaattcttcaacgccattcattcttaatgccgagccgaaatatactggaaatatcctgcggttcataaccatatcgcttataagcgcatcgtcaacatgtgcagaatcaaggaactgctcaagtgcctcctcatgacacatcgctacttcctcataatctatattattaaaatcaacgcatgactctgacagcctgttctttaactgctccataattcttgccctgtcagttccttgctggtccatcttattaacaaatataaataccggaattccaagtctcttaagcagactccacaaagtctcagtatgtccctgtaccccatccattccacttataacaagaactgccgcatcaagcacccacaatgttctctccgtctctgccgaaaaatcaacatgtccaggtgtatcaagcagcgtatatgaactgccattgtaattataagctgcctgctttgaaaatatggttattcctcttgctctttccatatccactgtgtcaagaaatgtatcctgattatcaactcttccaagctttcttatacttcccgcactatatagaatcgcctctgacagagtcgtctttcctgcatcaacatgtgccagcatgccgatagttatcggattactatgtgccatatcatttcctttctccaagttttattccatgccttccttaagccatctcgcaatattggtaaaatcaatcttaagttctccattatatatattcaccggaaccggcttatcaaagccatatatcaccggatacacatcactttcaaagaaatacacaagaaccttctcctgcacaaaatccagtatccagtattcacgcactccagcctccatatacttggatagcttcaatgcataatccttcttcttggtagacgaagaaacgacctccacaacaaagtccggtgcaccatatataccaaatctcttaatcttagatgtatcgcatactattcctacgtccggctgaaccatagtcctttcatcacaatcaagctgtacatctacaggtgctataaatgggcggcagcttccaccatgttccataatataattagcaatctgcctgtaaatctccccgccaattgactgatgtccgaaagttggcgaagccatatcataaaagtatccgtcaatcagctccactctctgatcatcaggcaatgccctgtaatcatcaatagtgtattcaccattctttcttgccttatataatccacctgactcccttacttccaactgttcattaaagacctgttccagtgctgtaagagtatcatatcgcggactctctgtttccccagaaaaaatcttctgcactgttcccagaggcaccccagacaattcagctatcttggcatatgaatatcctttttccttcttcttctctttcatctcattaattgtcatataaccctctccaatcaaaacatgagtatccgtacatgattaaatataatttctatactcattataagagttgtatatccattagtcaaccaaaatataataaataaatatccgtttttcaaccgttttgtttccatacttactggttgaaacttaaatgatgttaaatatcgcacttgagcttagctcactcaccacatgattattcaataacctaccagattgccttatcatcataatttcgtaggtcatttttgcactaaaaaagagttttatattctaaaaaacatactaaatagctcaagttccattaaatagtaggttatttcttggatttttcgttgcgaattgcttgaaaagcagaaaaaacacctactaatcatgcgtaaaatgcagttatagtaggtgttggtatagaaattattaagggttattcaaccagtatccaaacactcttgtcttgtttatctacaatagtagaaatttgttttattgtattatcttcttgtaagcctgtcaatactatagttgaaatatattttattaatttatattgacatattctttttgtattgttattatatttatgatgcatcattttatattttaactatatccaatatatgaaacatacaagaaaggcgacatatgaataataccaacaacactactcaccagaaagatgtctcccttaagactttctggcgtgataataaacattttgcagaccttttcaatgctaccgtctttaatggtaaacaggtgcttaagcccaacaagcttactgagatggacactgatgtttctgctactatccagtctaagagttacaatgaatctattaccagaaacagagatgttgtaaagaagatgtcagacggcgtagagtttaatattctcgggcttgagattcaggacaagacacattatgccatgcctttgcgaaccatgacctatgacgcacttggctacataaaggaatacaacgacatcaagaaacaacataagctgaataaagattctttcagttctcatgaagaatttctttctggaattaacaagtctgaccgtttccaccctataataacgcttgttctttactatggtgagtcgttatgggatggtcctacctgcctgtctgacatgatgatttccatgcctgataatatcaaggcttacttctccggctataagttaaatctggttcagatacttgattctgataaatatacattttataatgaagatgtaagagatgtgtttaatattataaggaacatatataatgatgatttcgattcaatatatcgtgaatatgaatcccgcaatgtagatattgatgtaatggaactgatatgtaacataacctcagttccaaagcttatggacttatgtacagatactgaacaaggagggactgtcaatatgtgtgaagcaatgaaacgatttcaggctgaatgtgaaagcaaaggtatgaaagaaggtatcgattccgaaaaagtcaactctatcatctccatgctagaattcggcataaccaaagaacagatattaaccaagtacactaaagaggatttagaaagagcagaagctgctatcgctaatgagaactaacaccatactaataatattaaagccagttaatctagcgattaagattaactggcttattttatctgatacttttatagatttctggtcttctgtccctgaacaggccccagctcacgcgaaggtcggcatctgcgtcaaggtcggattccccatagacaatttcttccttgtctcttgatgcctgtgtcactatctcgcctgttgcatctgttacaaatgaagaaccatagaatacaagtgatgattcctgataaccattagcttcagatggtgtaaccttctcctcaccaatacggttggcagctactacaggaactatattgcacgctgaatgtccctgcatacatcttctccagtgcggcatgctgtcaacctcaagaatcggctctgagccaatcgctgtcggatagaaaaggatttctgctccctgtaccgccattcctctggctgtctctggaaaccactgatcccagcatattcctactccaattctggcatattttgtatcccacaccttaaagcctgtatctcccggtgtgaaatagaacttttcctgataataatggtcatcaggaatatgtgtttttctgtatattccaagaacacttccatctgcgtcaataactgcaacagtgttatagaacacatttatatctctttcataaaagcttattggaagcacaactttaagttcggctgccaccttctgaaaatgcttcacagccggattctcatcaacaggtgttgcaaatgcgtaataatcataatttctctcctgacagaaatactgtctttcaaaaagctcaggaagcagtattatctgtgcaccgttagctgccgcttcacgaaccatcttatcagcttttgcaatgttctcttctaccgaccgtgaacactgcatctgtatgcctgcatactttacatttctcacactattttacctccggaatctgttgtgtaatacagtggatattgcctccaccgactattatatctcttgcatatatcccgactatctttctgtcaggaaatgcttctttaagcacatttattgcaaggctgtccgcctcgtcatcaaactgcggcactatgactgagtcattggcaatatagaaattaacataagacgcagcaagacgctcgcctgcttctctcatgtcctcgccttcctcaaattcaaagccattaagttcttcctcagttatgcacacaggtttcttaggaataagcatttttcttactttaatgtgtcttcctttggcgtcagttacattctcaagaacagaaagacaagccttgctcatctcatactgcgggtcattctcatcatccgtccacgcaagcacaacttctcccggtgctgtgaatgcacacacattatccacatgctcgttagtctcatcgttgtatattccacatggaagccagattatcttgcttacattgcagtactgctttaatttatcctcaatctgttccctgctaagctgtggatttcttcccttactcaacagacagctttcagtaacaagcattgttccttcgccatctgtatgtattgaaccaccttcaagaacaaatggtgctgcattatatccctgacagccaagataagacataaactgtccggctacaaggttgtcattgtcccagtccgcgtacagtccgtcatatgttccgccccacgcattaaattcccagttaattccacgcaaatcacgcgcttcatatggtgtatccacatttccactcacaacgaatgtaggacctgtatctcttgcccatgcatcgtctgtatccatgactacaagcctgactgtttctgggagcatctttgctgcttcctcttttctaccttctgatacaatcatgtatacctgctcgctttcactgattacagacgcaatctgtgcaaatgctttcttagccgcctttgctccataagcccaagagcccggtctttctggccatatcataatgcagccctgatgtctttcaaattcagcaggcatgcgaaaaccatctgttgccggagtactgtttatataatccatatctataatctccccttgaaatcttcatagccaaaatgcttccacaccttacattccccatcactatccataattacaatatccggcagtgggattccgttaaatgtattgttcttaaccattgaatatatagccatatcttcaaatacgagtctgtccccgacattgatttccctgccgaattgataatcacctatgatatctcctgcaagacatgtataagatgacagtctgtatctgtatcttccattcttcgccggtttccatataccttcttttacgtccatatcaaaatcaatctctatgtccttatcaattccatactcatcttccatgtccgatattttcaatccgtcacgaagaggcggtgtatatggcatttccagtacatctggcatatgacacgctgcagatgcatcaagtataagagttgttattccattttcaaccttatcaagcactgtagccacaagatatcctgcattaagtgcaacagcttcccccggttcaacatacacctgtacgtcatatttccttcttacatgactgatacatttttcaagagtttcaatgtcgtaatcttcacgggttatatgatgtccgccgccaaaattaatccacttcatacctttcatgagaaatccgaatttctcttcaacagcctttaatgttgcctctaagtcatctgaattctgctcacataatgtatgaaaatgtattccttccatacctgataacacatccggttcttcctcaagtgcagctttcaggttcttaagtgtaactccaagtctgctgcccggcgcgcatgggtcatatattgcatggtcaccctgtgtagaaaactctggattaacacgaagtccaaagcttactcccgccgcaatacatcttgctttatgcttctttaactgtgaaactgagttaaagacaacatggtcacatatatttacaagctcatccatatcctcatcagtaaatgccggtgcaaatacatgattttcttttcccatacactcagcaccaagtctggcttcatatattccacttgccgtagttccgcttatatatttcccaatcagcggatattctgcatatgctgaaaatgctttctgcgccagcagtatgtggcagccggtatcttcttctactttatgaagtatctcaagattatgaataagcattttttcatctattacatatgccggtgtctttaactcatcaaatctcataattaacctctctttttagtctactaaaacaggattttcatcgacaacccatgggagaccgtacttattaagcgcatccatgtatggatccggatcaaattcatctgttgtgaatactcccggcttgttccagagtccctttgcaacaagcattgtaccaatcatagcaggtacgcctgttgtatatgaaatagcctgtgaacctacctcacggtaacattcctgatggtcgcacacattgtaaatatataccttcttctccttgccgtctttgatacctgtgaagatacagccgatattagtcttacctactgttcttggtccaagtgaagcagggtctggaagaagtgcctttaagaactggattggaacaatctcctgtccgttgaattcaaccgggtcagttcttaacattccgacattctcaaggcatttcatatgtgtaagatagctctgtccaaatgtcatgaagaaacgtattctcttaacatgcggaatattagcagcaagtgcctctatttcctcatggtgaagcaggtacatatccttcattcctactccctcaaaattgtactctctctttattgacatagcaggaatctcaacccagtgaccatcctcccaatatgagcctggtgctgatacctcacgaagattaatttccggattaaagttagttgcaaacggatatccgtggtcaccgccgttgcagtctaatatatcaattgtgtgtatctcatcaaaatagtgtttctgtgcataagctgtgaatacgcttgttacacccggatcaaaaccagttcctaaaagtgctgtaattccggcttctttatatttttctctgtaagcccactgccatgagtagtcaaaatatgctgtaaatccaagacgcttacatctctcctcatatacctttctccactcaggattatctgtatcctcacactcataattagcagtatcaacataaggaactttacacgcaaggcaggcatccataatcgtaaggtcctgatatggaagtgccacattaagaactacatccggcttaaattcattgataagcgcaataacctcatctgtgttgtcagcatcaacctttgctgttgtgatgttagtacttgtcttacccttcaattcgtctgctaatttgtcacatttgctcactgttctgctcgctatgcacaggtctgaaaacacctcgctcacctgacatatcttgtggattgctactgaagcaactcctccgcaaccaattactaatactctgctcatctttcttcctcctgttctaataattcttcaacatactttggcagcatgaatgcacctgtatgaagattagttgtgtaatattctgtatgtatatttcttctcttccactctgccggcttaaaatccttaagcggatgatatttctttgacgcaaatccaaacagccagtatcctgacggacttgttggtatatgtgcctgatacacgcggcttattggaaatgtgtggaacaccttcctgtgcatgcttctgcatgcatcctcatcctcatcatagaaaggacttccatgctggtacacaagtattccgtcctccttaagtgccttataacagtttccataaaattcccttgtaaacagtccctcactcgcaccaaacgggtctgttgcgtcattaattataaggtcatacatatcctgcttggagcgtaagaaccttaatgcatctgaattataaatgtgtactctctcatcttctaatcctactgccgtctctggaaaatactccctgcacacatcaacaaacatgttgtcctgttcaactatgtcaatattttcgatattgtcatactgcaacagttcctttgatacacctccgtcaccgccaccgattatcaatacatttttaacatcaggatggactgacattggcacatgcaccaccatctcgttatagatgaaacaatcctgttctgaaaatataacacttccattaagtgtcaggaattttccgaactctggcgactgaaatacatctattctctgatagtcgctctcgccagaaaacagttgtttttcaaccctgatatcaaacttcacatgtggtgaatgaagttctgaaaaccaaaattccatagaaactttctcccttctatattttaccgattaaacaaatcggacatttacattcttaatacattcagtgtctgcaatgttgaatcttccattccctgcattgaacagcccttctctactgaatactgaatatagtctattatctcgtctgtaatttcttcacccggcgcaagtataggaattcctggcggatatgccattacgaactcccctgatatatgtcctgctgcctcacggattggaactttaatcttatcggcatagaaggcttcctgcggtgaagcaagtacccttggaagcagcatttgtctgtctacttcaaagcgtttttcttcttttgaatacagacggctgatttcagccaatgctccgacaagtctttctatatcctgtattctgtcaccaattgatatgtacgccattatatttccaatgtcgccgaattctatctggatatcatactcatctcttaagatatcatacacctcaattccatcaagtccaatatcccttgtataaacacaaagcttggtaacatcataatcatagactgttccaccattaatcagttcttttccgtatgcataataaccgcctaccatattaatctcatctcttgcatactgtgcccactcactcacctttgcaaatgactgtctgccgcgcagggcaagatttcttcttgatatatcaaggcttgtcataagaagatatgacgcgctcgttgtctgcgtaatattaataattgtctgtacataatcagcattcataccattattggtaagaaggattgaactctgcgtaagcgaacctcctgacttatgcattgatattgctgcaaggtctgctcctgctttcattgaattcataggaaggttgtcaccaaaatacagatgcgttccatgtgcctcatcggcaagcaccttaagtccatatgaatgtgctatatcacatattcctttaatgtctgaacagattccataatatgtaggattgttcaccaaaaccgccaccgcattcggatgctcctgtattgtcttttcaacctgctgcacagttactccaagcactattccaagctttgcattaatttctgtattaagataaacaggaatcgcaccacacagaatcaatgcattaattacgcttttatgcacatttcttggaacgataatctcatctccagccttacatacagataacaccatgttctgtactgcctgcgtagttcctcctaccatgaaaaatgcgtgttctgccccaaatgcttctgctgtgagctcctctgcctccttgataacagaaacagggtggcacaggttatcaagtggcttcattgaattaacatctattccaacacatctttctccaagtaaatctaccagttctgggttgccccttcctctcttatgtcccggaacatcaaacggaacaattcttttctttctgaatttctcaattgcttcgtaaagcggcgcactcgcctgtctttttaagtccataatctccccctgttctcattgttgtctatgcttctattctcatcgctgctcgcgcaaaaaggcgtgattgatttaaaatcaatcacgcctgtataatcatattctatcttctttttgattactgtattgtcaaatacagaaaatctgacctttcagagtttatccaagtaagtcactgttaccgctcttattgaccgtttcacaagatgatatgctctctcgcatgataattttaaaatcaacttataaaatttgagcttctaactcaatcaataatgtgtgccctcgtcacactcggcaaccgacccgcccgtccgcaaggcttaacatgtaatcatgtggtctgtatttacgatatctttttatatccaaaatacctttaaaatataatataactgtctgctggtgtcaataacattttttatatttacttcatattttacctgaacttttcgaatatattacattattaaccctgaaacctaaagacattatttactttttatttgttaccatacaacttccgtgctaccgcaaatgcttcctcaggaatccccatttctctatacatttccttccagtcttctgtaagttgtccttttaattcaagctgtgttttcctgtttatacccgaaaataccccaaaccatttacggacatccggattgcttttgtaaaagctgccaccctcacgctttatctgcatgtccataactgctgttatctgtaacataagatgcaattcaccagttacatcagacgcctccatgagaacatcaggtcttttattgtaaaagtccataaagtactgcatagcaccctttgtatcctcttttgcaagaaaagacgacaaaactgctttcagctcccttgtttcggctttttcgccaaccattccaaccttgcattcctttaccttgatattgtttactctcacccacacaagcaataagaattcagatataaagccaaacacacgcctgtggtatgaatccttatcagtctccatatcaatgcgtttctgaacctcaaagaatatcgtaaacagccactcagcatatttatcaaaaagctctttagaagtgactatcatatttccaaaatatgtctcattgccattaacaagctgtataaatgtatcataatactcgggatataattccttaataacttcacctgtcatatcaagcgcacttacattatgattagcagaaaatccgtaatgatatgaattattaagaacgactctcttggttgtaacaagttcgtactccttaaaaatctgctcatactgcttttcattcataatatgctcgttctcatcaataagatatcttctgtaatggcatgttccaacataattaatatcatgcacatttttccatatccagtataatcctgtaagttcactataataaccgttaagagccgatatattatctcctgtatcgtccctgagataccccagtggtgaattaattgctgtacctacctgaagcggcacatacatattatcatcaggctttgtaaaatgtttatgtgtaagtgtgtaaattgttaagtccatattcaccctttatgccagaaatccacaggctcatactcctgcagttttgcaagaaatccaagttttccaagctcctcctgaattaaatccagcgtctgttcgtcatccgcaacaattgtatgataatgatatcctgatgtcacattcatcaataggctgctctttccatttgcaatttcctcaagatatttcctgatatcacgccttgaatggatattcatctccgctcttataacaccatataccttgtgatacacaaaaacgtctcttatccatccacccatgtcaactattgctccaagctctgcttccacctcatcatcttcatgtttaaccttaagtatgcggctgtactcctgcttatcattaagcacatagcctctgttagttgagaaaacatctatattcttcgcgcggataagcgctatatcctgcactataacctgcctgcttacatctaatatctgtgcaagctgtgtacccggcacaggacttgacgaatgttttaatatatctactatctgatttcttctctcttctccattcattgctacaactccccggttcaccccgacaatgattactcctgtacaggatgaagattttttaatgaaatgtccataattggtgcagaatgtgtaagtgcaccacttgatacaaagtctacaccaaggtcagtaatttttgcaatgttttctttagttacatttccagaaacttcaactaaagcttttccaccaattatattcatagcctctcgcatatcctcatgactcatattatcaagcataataatatctgcgcctgcctcaacagcttcacgtaccattgaaaggttctcaacttcaacttctatctttcttacaaatggtgcatattccttagccattgtaactgcctgcttaactccgcctgcagcacctatatggttatccttaaggagtactccgtctgtaagattatatctgtggttattaccacctccgattctgacagcatacttctcaaatatacggttattaggtgatgtctttcttgtatcaagaagctttgtcttagttcctgcaagcagcttcgcaacaccattagtatatgtcgcaattccactcattctctggagataattaagtgctgttctttctccacacagaagaactcttatatctcctcttacaactgccatcttctgacctttcttaacctcatccccgtcttttgcaaaaaatgtaatctctacatcttcatcaagcagttcaaatgttcttgcaaatacctgcaagccacatattattccatcctgcttgcatataagctcgacttctccaagctttggttctggcataacactgttagttgacacatcctcacttgtaatatcttctttaagtgctccaagaatgagcggatccacatttaactttaaagtaactttatcaaacatatcatttctccatttctatatattatgcgtaattcttcttctggctttcttcataggctttatctgcctcttcaatctttttattgactaattttgcatattctccgtcaattttcgactcatctgcatatttttctgcatcaaatgtatcaaaatatgtaatctcatcctgtgtcggtttaacaactgcattttcagtaatatcaagtgctgccctctttgcaaacacaagactttcaagaagtgagttgcttgcaagcctgtttcttccatgaactccgttgcaggctgtctcgcctattgcatacaggttatccattgttgttctgctctcatggtctaccttaattcctcccatgaaatagtgctgtgcaggaacaaccggaatacactcttttgacgggtcatatcccttatcaatacaatactgcactatattaggaaaatgcgtttttaattcttcttcaggtattgtccttaaatcttcccatacaaagtctgtattgtcctttgccatctgttttctaatctcttctgtaagcaggtctcttggaagcaactcattaacaaatctttttccattcttatcataaagctttgcaccttcgcctcttactgattcagatataagaaagctcctgtcttcctctttgtcagaataaaatgttgtcggatgaatctggacataattaatatcctttaattctactctatgctttatagcaattgcaattgcatctcctgtaagatgtctgaaattcgttgaatgtctgtataaaccaccaattccacctgtagcaagtacaacatctgaagcttctaccttaataagctctccattttctgtccttataaccgcaccaaggcatctgttatctctgcttattatatcaagcagtcttgtgtattccataattgtcacattgggaagagttctcaccttctctaacagatgacttgttatctctttacctgtaatatcttcatggaatattatcctgttagatgaatgagctccttctcttgtgtatgcaagacttccgtcagcctctcttgcaaatcttgctccacaatcgacaagatcttttactacatctgctgatgaacggatcattatttcaacagatttcttatcattttcataatggccggctttcattgtatcttcaaaataactgtcgtaatcttcttcacattttagcatacacataccgccctgtgccagaaatgaatcactgctctcacaatcagactttgttatcataagaatcttcttatcggcaggcagattcattgccatatacagaccagaacagccacatccggctatcagcacatctgttttaattgtattattcataggatacctccattctttctgcacatactacaatcttactttgcaagctcaagcatttttgtaagcggcttcattgctttctttgcaacttcttcatctacaaacacttcattattttcctgttcaagaacatcaagcaccttatctaaggttaccatcttcatgttgacacatacctggtcaggctttaatgtatacagtttcttgccaggtgccttttttcttatctcaccaaatacaccatcaactgttgcaattatgaattcctcacaatctgtatctacaacataatcaataattcctgatgtactgcctatgtaatcagcatgttttaatacttcctctgtacattcagggtgtgctgcaagctttgcctgtggatatttcttcttagtttcaacgaccatatcctctgttatcgcgacatgtcttggacagaagcctttattaagaatcacatttttctctggcacctgctttgcaacgaatcttccaagattctgatcaggaataaagaagatgtttttattaggaaggttctttactatctttactgcatttgatgatgtcacacagacgtctgaataagtctttagctctgctgttgaattgatgtaacagacaactgcaaggtcatcatactgttcacgcatcttaagaatttcttccttagttgccatatgtgccattggacaatcagcccccggctctggcataagcaccttcttttccggattaagaatcttagcactctcacccatgaactcaacacccgcaaatactataatatcctgatctaccttagtagctaccttgctaagatagaatgaatccccaacataatcagcaacttcctgaacatcttcatctacataataatgtgcaagaataactgcattcttctcttttttcaactttaaaatatcacttgtaactgacatattgcttctccaatcgttaaggtttacatatgcttgacttgcgttttacatacattgtgctagagtataccacgaatgtttacatgtgacaagacagttgtaaaattttctgtatagttggggtgttcccgtgctgtaacgggtggctctgcatgctggggtaatggctcagttcttcgcagcctgaggcttgggaattctgctctatgtatatgctttcactcgcaactgtgtgacttccgatgtaaaaaattcccagagaaatcattactttgccgatttctctgggaatttttactatttattatattatctgccactaatcttcctcaatatgttcccgtccctgtgcgattatgcttcttacatgatcgtctgccagtgaatagaatattgatttaccttctcttctgttcttaaccaacttgttctgtttcaatattcttagctgatgagatattgcagactgtgtcatattgagagcctgtgctaaatcacatacgcacacttctgcctcaaataatacatacagtattctaattctcgttgaatcaccgaataccttgaacaattctgcaaggtcatataattcattctcatctggcattgtttcattaactatctttaataagtcctcatgtatttctattgactcacagcattcacaatctgccattatattacctctttctttataagttctttacgaataatgctcttattgcattgattacagcaataaccattacacctacatctgcaaatattgctacccacatgtttgctatacctattgcaccaagcaccagacatataagctttatgcctattgcaaaataaatattttcataaacaatacgtaagcattttcttgatatcttaattgcctttgatatctttaacgggtcatcgtccatcaatactatgtcagctgcttctatagcggcgtcacttcctaatgcgcccattgctattccgatatctgctcttgaaagtaccggtgcatcattgataccatcacctacaaatgcaagctttttctttgatttcttatgttctaacagctcctcaaccttagaaaccttatctgccggaagcaattcactgtacacagcatctatatttaattctttagctacagcatctgctacattctttgcatcaccggtaagcattactgtcttacgtactccagctttcttaagttcttctatagcctgctttgcatgaggctttaacaaatctgatattagtataagtcctgcatatgcccggtcaactgccacatgaacctgagttccggcctcgttgcactctgcatattcaagaccgagtcttctcataagctttctgttacctgcagccacttctcttcctgatacattagccttaacaccttcaccaccgatttcctcaacatctgtaactaatgtcttgtcaatctcttttccataagctttctgtaaactcttgcttatagggtgtgttgaatagctttctgcaaatgcagcatattttataagttcatctttgtcaatagtgttattatatacaccactgacctcaaatactccctgtgtcatagttcctgtcttatcaaagacaacaatgtctgtctctgcaagtgcttcaagataacttgaaccttttacaagaacaccctgattacttgctccaccgattcctgcaaagaagctgagcggaatacttatgacaagtgcacaaggacagcttattactaaaaatgtaagcgctctgtatatccacattccccactgaggagatactcctaagaatatcatgcttacaagtggtggaattatagcaagtgccagcgcaccgtaacagactgcaggtgtatatatctttgcaaatttgctgataaagttctctgaacgcgatttcttggaacttgcattctctacaagatctaatatcttggatactgtggattccccaaattccttagttgtgcggatcttaagcacacctgacatattaatgcagccgcttattacttcatcaccggcctttgcctgtcttggaaggctttcacctgtaagtgcgcttgtattaagtgttgtattaccttcttcaataataccatcaataggaactttctctcccggctggacaacaataactgtaccaacctctacttcatcaggatctacctgctcaagctttccatcaacttcaatattggcataatcaggtctgatgtccataagctcacttatgttcttacggctctttccaactgcaatattctggaacagctcaccaatctgataaaagagcataaccgcaattgcttctgtaaaatcaccatcatctacaagtgcaattataattgcacctacagttgcaactgccataaggaaattctcatcaaatacctgtttgttaagaattcccttaattgctttccttaaaatatcatatccgataacaagataaggaatcatgtacattataaaaagaacaaccgtagggatatcaacaaatgtgtttatcaccttaaaagcaatcataaggactgctgcgataatgattcttgtaagcatctttttctgctttttattcatattctactccaatctgccagaacaactctcacggctttctattacagatatatctcgcaatcatcttctactttcttgcagttcttaagaacatcctgcataacagccttaggatcctgtccttcttcaaattcaacaatcatcttaagtgccataaaattaactgtagcatccttaacacctgctgtattcttagctgcatcttccatcttattagcacagtttgcacaatcaacatcaatcttataagtcttcttcataatattctctccttaaaacattaaataatcaaaattctttcatatgaacattcattcatatgttcattttcattataacacctataaaacttctgtcaacaagaattcactatatttttccgcaaacattttatgtcctttctcatctaaatgctgtctgtcaacttcacttggttttgcagcatcagcggcatcaaaataataaaatccattttcctttgctattttttcatattcccatgcaagctgccttgaaacattttcagaactttcattaaattcaggatcaaagccttcttcaccaacaccctttccaagatgaatcggagaaactataactatctttgcatgttctcctgctgtcttgttagcctttcttgcaactacctccattccttttgcaattgtctttgcatcagcatgaaattcagtcttgcagtcattcgtaccaagcattatagctataacatctaccggcttatgtgattcaacaactactccaataagatcaatgccctttcttgcatctcttacagcatctggaaatatagttgttcttccgcacagtccctcttcaataatattatattcatttccaagaagattagctattctgcctgtccatcttacatcataatcatatcttccttatttatcaggcttatatccataagtattagaatccccaaaaaacaaaatattcttcatcgccacatcctcccatataatatctatcatcatttattccatacttgtttggtatgtttatatgttaatgcttgtaagagaatttgtcaacaaaaattccatattaaaaccaaagtataatcactcaatttgcttgcatgttgtgtcagtccatatttccaagtggtggtctgtcagaatataagcttgattttttatgagctgtgtgggagttagggctgctatatacaaaaaatcagtgctaaaaaacgcgttcaagcgaagcgcgttgttttttagcactgtaataaattctgtatatagcagctcttactcccactaagcgaataaaccatgaaagcttgtgttctgacagaccaccacttggaaatgtccggacctaacacaaccctactgctctctttgcaagcctgtcagcctcttcatttccttcaactccagaatgtcccctgaccttcacgaatctgatattaattgaatcactgacagatgtaatataattataataatctattgttccttttttgttgcgtttccattctcccacagcccatgccttgatacctgcataatcatagaatatagaaacatctttaagtccaagctctattgctttttttacagcagccatgcttccaagaatctcccctgcgacattacgcatggatgccatctccttatcactgccattgcctgacaattcatatcttacaccatcatgcataagaaaaccgccatatccatacactcctgttgtaatattaaaagaaccatcaacaaatgcataatcatcgtcaggcattacatcttccatattgccacttccggtctttccattaatctcctgtacggcttcccttcccatataagcattcgcctcttctatagacatgaagctcttatattcaggagctggaaaaccatgtacattcttcttacattcttcccatgtctgatatactccgggaactttacctacacgcacagcataatatttcttagccatatatatcttacctatcctgattaataaaccctgattacaccagcaatctcttttactactgaaagtccgttaaatactgtcattgcatcattaaaattcttctctgcaacatcatctgtaataataaccagttcagcaacaccgtccttacggctcttctggaccacctgcgcaatacttacatcattgtttccaagaacacttgcaatgttagcaagaaccccctgcttgtctaatgcttctattcttaagaagaatttgctcctggtttcagatatatccttaacaggaagctctttgtagcatgagcagccaatcttgccgcatgagccatgaactatgttacggcatacatcaataatgtcacccataacagcagaagctgttggcatctggcctgcgcccctgcccataaacatggtatcatcacttgcatctccatgaacaaataccgcattaaatgaatctcttactgtagccagagggtgattctcatcaataagcataggatgaaccttaacttcaattccgtccggcgtatttctggcaagaccaagaagcttgataacatagccgaattccttagcatacttaatatcttctgctgtaatcttagtaataccctctgtatatacctgattaaatgttactcttgaattaaatgcgattgatgacataatagccatctttcttcctgcatcatatccttcaacatctgctgtagggtctgcctctgcatatcctaattcagttgccttggcaagagcgtctttgtaattcattcctgattcagtcatcttggtaaggatataattagttgttccgttaacaataccaataatctctgtgatattgttgccagccatgctctgctttaatggtctgattattggaattgctcctgcaacagccgcctcaaactgaagatcagcatgcattttgtctgccattcccataacctcttcaccatactcagcaagaagatccttattggcagtaacaacctgctttccagcctcaagtgcctcaagaatatactgctttgcaggagtagttccacccataagctctattacaatctcaatatccttatcttcaataatatccttccagttgtcagtcagtaattctctgtcaattggagcacggtctttatgaagatttcttacaagaaccttcttaactacaagttctgcccccgtcttactaatcacatcatctttcatactctgacataacttgtatacacctgttcctactgttcctgcacctaatatagccgcataaatctttctgctcattactttgtacgccctcattcctgtttattatgttaagtttattatattaatctgtgatatatttatttcatatctacagcatcaacctgatccttaaagttctttatcgcctttccagccttctttgttacagatacaattctcataagagatataaagtcccataatccttctatcatcagagcaattccaataaatactataagtgctgatgatgttgaaaatggattcaataatgcaattataccaataaccaccattacaactgcacctatgagctcaatccaccatttgtccgactctagatgatagaaatccacagcatactggagtttaaggattccatcaacaataataataattgcaagtgctgttcctaagaatacagcaataaagcctggtttaatcacgaaaaacataccaaatgcaagaagagtaactccctgtacaagaccatatgatccaagaatctcactgcctgcaattctgaaataattgataagccttaatactccccagacacataaggcaactccaattcctttgcatatgatttcctgggatgctgttggaaatattaccagcagtaagccaagaacaaacaatgcaattgaaacaataataatctcaaatttaattgtctttaacttcttataaatactgttcatatgctccatctccttttcactcatttcaaagaaccttagtccttttattcttttgattatacacaaaaaagaacatcacttcaagacatgcatttttttgcactttaatctgtccgtgatgttctttattattatttaatattaagttaacaaatacagattactctgctcttgacatagcctgctcgtaatctcttgttccaacccagatttctttagtatatgggcacttcttctgctcaatagagcgcttgataataaccgaaatacataccacatttgctattattgcaagcattgcaacaacgccctgtgctgtcgggttagctgttataccgaagtttgcaattgcatctcctgcacttgcacctgtagcatgacatgtaattgctgcattataaagatcaagtgccttaacaccagccttagttgctccaccatataatgatggcaatacactaaatgtattgcttaactggaataatggtaatacctgtgcaaacatacaccatgttgcaagtgtcatggctctgttctgaatccatccgcccttgttccataatgcattcgcaaatgtaggagcaagaagaagagctacaccacagtaccatgtatgtgttggaagattacagtatgtatactcaaaattccagatatcataagcaacgataaaccatattgtcatatccggccagagcatatcatccttcttcttagatgagtaaattccccaccagcctgtcatacagaagatattaataagtcctgcaataccattaacaatattccaccagccgccataaaggaatacaccttcattagatgcccaccacgcaccagaaaaatctccagtaatctgataagctcttatagctgattcaaaatcagatgctactgcaataagaatattaatagcaacgattataaatggccatggcttaaaccattctttctttccaattccccacttatacttaatcatgaggaaaccgacaactccgatatctgctgcataaagcttagcataatggaaccatccgttcatatactcatatgtctgattgctgtggccaccaaacagacctgcctgaattgctatgaaatagattgtgagtatagccggtatgataacgaataacacgataccgccaatcttagtacgacgacctatctcattaagaattactaatcctgcaaacacaagcacccaacccagtaactgagtcatggctgtgctgccataaagttgaaataacattgttcacgcctccaatcaattattgatgttatttatatatattttacacttttttaattattatttcaagttatttttataacaaatgacacttggtcatttctcacttctattttcatcgctgcacgcgcaaaaataaaggatagtccttacggactatcccatatattttaatatctgtgtttttttattgttgactaccacaagactttgctttgctgagcgcatattcttctgtattattgctcccctgattccatcaaaagatttaaagaaactattaattccaagctctctggcattctcctccagccggttaattgatgtataagctgcagaccactgggaattattaattgtctgttccagtcttatgaagtcataacacgccatatattcccttacatcctttatatatactgtcataacaacttcattctctatatctttatccttgaattttgaattagaaatatctattccgaatcttctaagattcgcgattattttcatcaatacctgttcgcgggctgacatactaacactccccctcacactcagctttcttatatactctgggtagtacattattatgctttagttttactttttccttcaggaataacatatatccatataagtgaacttacaaacaaaaacattggataaaacagctttggtagaatctgaaatgctgtaatgctatatccaagctctgaaaccgctgatatggcaaccagcatctgagcaccatatggtattattccttgaaatatacatgaaaatgtatcaagaagcgaagccgcttttcttggagtaatatcataatcctcagacatctcttttgcaatagggttagccattacaatagcaactgtattattagctgtagcaatatccattgttccaactaaaagtcccattccgagctgtccgcctttttttcctttaaataatcttcttattccattaagtaaagcgtcaaatccaccatattctttaataagtgaacacattacagatacaagaactgcaaccatacatgtctcaaacattcctgacgcaccacttcccatattaagaagcagagcctccaatgtaacctcgcccataacaagcataataactattcccgaaataatacctgttataagtacaacaaaaacgtttacaccaataattccacccgcaagtacaagcacatatggaataatctgaaaaagattatatgaatgtgcaatctcaccatgaatatctgtattaaaagaaagcacaagaattataacaatggtcacaattgctgccggaagtgctatccagaaattctccctgaacttgtccttcatggcacagccctgaccattacaagctgcaattgtagtatctgatataaacgaaagattatctccaaacattgcaccacccataacagatgcaacgcagagtgccatactaaagcctgacgcttccgacactgcaaccgcaatcggtgtaataagtgttattgttccaacagatgtacccattgcagtagatacaaagcaggcaacaataaaaagtaccgctactgcaaactttgcaggaataatgcttaacataaaataagctacactctctgcactgcttcttcctacaactccgacaaatattccggctgtaatgaatatcagaagcattgtaacaatgttcctgtcagccagcccttttgccattacatcaagcttttcatcaaacttaagctgtgaattctgcatgcacgctactagtattgcagccataaatgcaacaataattggtacattatagaatcccattggaatcttcatgacatattcaaatataattccggttccaagatacaacacaagaaaaacaagtataggtaccagcgcaaccggattagaattcctatcctttttcataataccaattaatcctcgcccatcttagcaagcttggcagcctggtcggcagcgatacatgcatcaataatatcctggatgtctccatccataatcttgtcaagcttatataatgtaagaccaattctgtggtctgttactcttccctgtgggaaattataagttcttatcttctcagctctgtcacctgtaccaatctggcttcttcttgcatctgcctctgcgtcatgtgctttctgagtctcaatgtcatataacttggctcttaaaagcgcaaatgctttctccttattctgtatctgtgacttctctgtctgtgaataaataactattcctgttggataatgagtaagtcgtacagcagaatcagttgtattgacacactgtccaccattacctgacgctcgcataacatcaatacggatgtccttctcatcaatgtggatatcaacctcttctgcctctggcataacagctacagaagcagtagaagtctgtattcgtccgttagattcagttaccgggattctctgtactctgtgtacaccagattcatacttcataatagagtaagctccctgtcccttaaccatgaattctacttccttcattccaccaataccggtttcatcgccacttaatacttcaaccttccagcctcttgcctgtgcatagtgtacatacattctgaaaagctctgctgcaaaaagtgccgcctcttctccacctgcacccgctctgatttcaacaacaatatccttatcatcattagggtctttaggtaaaagaagaatctttaattcatgctctaattcttctactcttgccttagattcattaagttcttccttcgccatctctttaagttcttcatctgtctcttcatcaagaatagcaagactgtcctcaatattcttcttacagttcttatactcagtataagtttctataagtggtgcaagactgctctgttctttcataagctttctgaacttttcctgatcattaaccacatcaggattaccaagttcagccgttatatcttcatatctgttgactgtatcttcaagtctgtcaaacatacgtgtcacttttcctttctatctctaactatataattactttctgcccataacaacacggtcaagaccagcgaggtcttttacaaccgttatatctcttaaaccagcctgcttcattatttcagaaacatctgctgcctgttcggctcctatctcataacacaggtatccgtctgtcttaagatattctcgtgctttctcagtgatttccctataaaacataagtccgtcctctgttccgtcaagtgcaagcagaggatcatgtaaacggacttcatcctgcagagtttctataaccttagttggtatatatggtggattggatactattgtattaaatgtaatatcattacccaattcgccaaataaatcactaagcataaaatcaatattatcagcctcgagattatgcttattcttctgtgcaactttaagtgccttttcagaaacatctactccaagcaccctgctttccgggaacttcttagcaagagtaatcccaatgcagcctgagcctgtacacatatcaagaatattatcaccatttcttgtaaccttgattacctcaccaacaagcacttctgtatcaggtcttggtataagcacatcttcattcacttcgaattcatatccatagaaatatgcttttcccagaatatgctgcagcggaacatgcgcagcccttttatcaatatactcttcatacagcaaaaaattctcttctgacaacatgctgtcaccattcacaagataaaaagttcttgtcataccattaatggcagataataattcaaaactgtcatggtctgcattatcgacgttattatctctaagtcgctttgcaccccattttactgcttctctaattgtcatcataattatctgtcttccagccttttctgtttaaacataggaacatcctcagaatactgctcttcttccggctcttttccagtttcgaactcaaagcccgcaactacctcttcctctgtaagttcctctgctttatcatcagcattataatcaattgaattatcatatacagtactttctgattcatcacttgcttcatatacaaaagcaaatgactccctgtctgtatcgtccataccaaattccatctccctgcccatctgtaaatacttttgttcaggggtaagttctgtttcctgattatcttctgacttctgttcctctatatcaatagttcttgtctcttcattcccatgaataagacttcctgatattgcaagttctgcctcagatgccacaagtgcttcaaccggattatcggcttctgaataatattcagcaataaactgtctccagtcaaatacttcctcaactgcccttatggcaacttcaatcatatccatatccggctctcttgtagtaagcttctgaaaccacattcccggtttactcaaaactcttacaaatgcattatcattctttcctgcccatcttattacctcataagaaactcctgcaattacaggaataagcagaattcttataagtatctgcagtgccgtattatcaactcttataaatataaaaaacacaatacttataaacattacaaagaataagaagcttgttccacatctcttatgatatcttgagctgttctttacattctctggtgtaagtcttgcaccattctcaatgcagttgatacatttgtgttcagcaccatgatacatgaaagtccttttaatatctttcatcatggatataagtaaaatgtatataacaaatattaataatctcacaacgccttctatgaaattaagaagtgtcttggaaattatgtattttgataccagtctggctgcaagatatggaagaaccataaacaatccaattgcaaagaatattgacaaaataaccgttactgccattagaaccgattcaaacttatccttaagaatattcttgccaacctcatcaatcttagtcttctcctgttctgccggatcatcataaaaagatgctgaataattaattgttgatatacctgtaacaagtgaatcaacaaaactgacaattcctcttattatagggaaattgagccactgatgcttttctgttaaatctctgctttctttgacaacaacttcaatttcattatcaggttttctgactgcaatagaatatttattcttattacgcatcataataccctcaattacagcctgtcccccaattcctgatggcttcatattacaccatacctttcttaaatgttttgtatacattcaaaaaaagttgaggtcccgaaaaacctcaaccttaatttcaaaattaattgtttgatactccgtacttcttgttgaacttatcaatacgtccgcgagtagatgatgccttctgctgtcctgtgtagaatggatggcactttgaacagatttctacgtggatttcttccttagttgaacctgttacgaactcgttaccgcagttgcaaacaacctttgcctgatagtaatctggatggattccttctctcatgatttcacctctttacaaattattaagtattacaattgtgaattccgccttagattccctttctgtcccgatgggatctatgcgcattagacacaatgacctctttatctgtcataaacagctttcatattgtatcacgatgcgacatgttatgcaagcattttttcaaaagagttataaaaagaaaatatattttaaatataatggttcttaactactgttcttacaagttcctgattattcttagtcttaacaaaaagatccagtattctctctgccgcctcatctgtctttaatccattaagagcttttctcattatatcaacagcttcctgctcttcactattaagaagaagatcttctcttcttgtacttgattttgctatatcaattgcagggaacactctcttttctgatagctttctgtcaagaacaagttccatgttacctgttcccttaaattcctcgaatacaacgtcatccatcttgcttcctgtctcaacaagagcagttgcaagaatcgtaagacttccaccctcgcgcatatttcttgctgcgccaaagaatctcttaggcatatgaagtgctgcagggtcaagaccacctgaaagtgtacgtccacttgcctgaaccgtaagattatatgctcttgcaagtcttgttatactgtcaagaagaattattacatctgtcttctgttcaacaagtctcttggctctttcaataaccatctctgacactctcttatgtctctctggaagttcatcaaatgttgaatatataacctcaacattatcacccacgattgattccttgatatcagttacttcctcaggtctttcatcaataagaagaattataagatgcatctcagggttattcttagttacagcattggcaatctgcttaagaagtgttgtcttaccagactttggctgtgaaacaatcattcctcgctgacctttacctattggtgatataagatcaaccattctcattgccactgtacttgaattcttttcaagatgaattctttcattaggaaaaattggcgtaaggctttcaaatgcaggtcttctctgtgcaactgacggatcttttccattgaccgtctcaagatacataagagccgaaaatttctcaccagatgttttcattctcttaggtccctgaataatatcacctgtctttagattaaactttcttatctgtgatggagaaacatatacatcgttctctcccggaagaaagttctcacatcttataaatccataaccatccgataaaacctcaagtattccatctgctaatggagcatcatgctcttgtcttggctgtgcatgataattatctttcttatcttctttaacatactgctcactcttatggtgtgactcatccgacattcctgccacatcatgctctgctccggcatcttcagaaacaacagcttcaacttctgccggctctttcttttcttctccttctgctgcagcaataatcgcatcaataagttcactctttctcattgttgatatattttttatattcttgtccttcgcaaattcgcgtaatacactaactgacaatgtttctaactttgccttcatataatccacctctgttattagtcatagtttaatgggaaatgatgcagaaatcgcatcaaagataaattgattatacaacgtattattctaaaagaaaagactaaaaatgctttttttagtcagagcaatatgttattatatataatactgttaaaagcactaattattgaaaggaagattagatatcatgactaatgcagagaaagccttacagctccatgaagagtggaatggtaaatttgaaacaactcctaaaatgaagattcagacaagagaagatcttgctcttgcttatactcctggtgtagcagaaccttgcaaggttattgccaaggacaaagaagcagcttataagtacactatcaagtctaacactatcgctgttgtatctgacggaagtgctgtacttggacttggtaatatcggtgctcatgccgctatgcctgttatggaaggaaaagctgttcttttcaaagaatttggtaacgttaacgctgtgcctgtctgccttgatacacaggacacagaagaaatcatcaaaacagtagttaatattgcacctgcatttggcggtatcaatcttgaagatatatcagctccaagatgtttcgaaatcgagacaagacttaaggagcttctggacatacctgtattccatgatgatcagcatggtacagctatcgttgtattagcaggtattattaacgggcttaaagttacaggcaagactaaagaagattgtcaggtagtagtcaacggtgccggttctgccggagttgctatcacaaagcttcttcttacatatggtttcaagcatgtaacaatgtgtgataagtctggtatcctttctaagacttcagaaggtcttaactggatgcagcaatcaatgatggaagtaactaaccttgagaacaagactggttctttagctgatgcactccgtggtgcagatatatttgtcggagtttctgctcctaatattgttacagccgatatggtcaagactatgaataaagatgcaattatatttgcaatggctaaccctgttccagagattatgcctgatgttgccaaggcagctggtgcaaaagttgttggtacaggacgttctgatttccctaaccaggttaataatgttattgcattccctggtatcttcaagggtgctcttgaaggccgtgcaagacagataactgaagatatgaagcttgctgctgcacttgcaattgctaaccttgttccagatgacgaagtaagtgatgtcaatatccttcctgaagcatttgacccaagagttgctgatgttgtaagcaaagccgtaattgaccatattgagaagtaattatgcttccatattattattctgtaagcgaatatcttaaagacacttatggtaagaaactatataaattaagtctttccggaaacatgacctgtcctaacagagacggaaagttaggtacaacaggctgtatattctgcagtggtcatggttccggtgattttgccgttaaagatattgacaaagctaagactttgatatctaataaatattccggcagtgaatatattgcatattttcaatcatttactaacacatatgctgatgccggatatctgcgcgaactttttatgcctgtaatactaagagacgatatccgtatcttgtctatcgcaacaagaccggattgtctcggtgatgacgtcctaaagcttcttgatgaactcaatcgcatcaagcctgtatggattgaattaggattacagacaattaataattcgactgccgactatatacgcagaggatatcctttatccgtatatgatgaagccgtaagcaatcttctttccataggaattgcaccggttgttcatatgataatcggtcttccacatgagacaataagcgattatattgctactgcccgctatatatcagacagtggtgcatcgggaatcaagatttctttattgcacattttaaaagatactgacctttacaatgattattgtaaaggattattcaaagctcttaccatggatgaataccttgccgcaataggagctatacttcctgtattgccaaaaagcatggtaatacacagacttaccggtgacggacctaagaatattcttgctgcacctttatggacagctgacaaaaagagagttctcaacacactctctcattacctcaaagaaaatatgatttatcaaggaaaagatttatgaacactgactcaaccacattgtacaaattaatgattttatatatgctgagcaaagtgaattttccattatcaaacacacagctttcatctttcatgttagataagcagtacacggattatttcactttccaggaaaccatcaactctctggttgaggacggctttattagaggctactcgcatcagagcagcacacattatactctcactaaagaaggtgaagaaactattgcatttttctacaccaagatatcaactgccatacgtgatgatatagagacctatctgtttgataacaaatacgaattaaagaatgaagccggaactgtaactgactgctacaagctgtctaatggtaattatattgcacattgtcagctaaaagaaggcgacacaactcttattgaacttaaccttaatgttccagttgaagaacaggcagagataatatgtgcaagatggcgtgaaaacagtcaggaagtatatgattatatcgttcgtaaacttatgtaaaaagctttccgacaggtgtatatgcctgtcagaaagctttttatttactcattatctgccgcttcttcctgtggcagtacatatgaatctataagctgccataattctttaagtccctgcttagtctgtgatgaaaaaggaataagaatatcttcctgccttaatccaagtcctgttcttacagctttcacctgtttgcttatctggcttctcttaatcttatccagctttgttgcaacaattacaggtctgtaaccgttatttacaatccagtcatacatcattctgtcattatcagatgggtcatgacggatatctatcaacaagaacacttgctttaactggctgctctttcttaaatatttctcaatcatcttaccccattttgccttaacagcagggcttacattagcatatccatagcctggaaggtcaacaagatacatactgtcattaatattgtagaaattaatagtctgtgtcttacctggctgtgatgacgttcttgcatatgatttcctgttcattaatgcattaataagcgatgatttaccaacatttgacttacctgcaaatgcaacctcagggaatgaagtctcaggaagtgtacttgtaactccgactactatatccagattaactttttttataaccataatccgctgctcctttcatttaacgcattaatgcctgtgcaaatacttctatagcattattaacatatattatattcatcccttcagttatctctgtgtcaagttcctctacatcagacctgttatcccgaggtacaaaaacatttgttatgcccgctgtcttacttgcaagaagcttttctttaagacctcctattggaagtaccttacctcttaatgtaagctctccagtcattgcaacatctgctcttacaggaattccagtaaccgcagacaatactgccgttgccattgtaatgccagcagaaggtccgtctttaggagttgcaccctctggtatatgaagatggaatgcatgcttctggaaatattcaggatccactttatatcgtcctttttctgtgacagatctgatataagaaacagctatgctcgctgattctttcattacatcccccatattacctgtaagcttgaactcgcctttgcctggcattgttataacctctatctcaagagtatctccacctgcctgtgtccatgcaagcccccttactataccagcttcaccctttacattctttttgtccggtctgtattttacttttccaagataatctgtaatattcttatcagatatattaactgttttcttcacagtcttgtctcttgttccatcagatgtgaacactccagctttgtataattctctaaccgcttttcttacaatctttgcaatctgcctttcaagacctcttacaccagcttctcttgtatacgaattaataatagttctaataactttatccgtgaactttacatcagatacaagtaatccattctctttaatctgtttcttaataaggtgttccttagcaatatgaaacttttcattagctgtatacgaaccaacttcaataatttccattctgtcaagcaatggacggcttatattagacagatcattagctgttgcaataaaaaacacatttgacaaatcaactggcatttctatatagtgatcaacaaaattaacgttctgctcgctgtctaatacttcaagaagtgccgctgatgtatcgcccttataatcactgcttatcttatctatctcatcaagaagcatgagaggattattaactccggcactcttaagtccctcaataattcttccaggcatagctccaatatatgtttttctgtgtcctcttatctcagcctcatctcttacaccacccagacagattctgacatactccttgccaagtgcctttgcaactgatctggctatagatgtcttacctgttcccggaggtcctgcaagacatattacaggtgcttttccacttcctgttatgtttcttaccgcaagtgattccagaattctttccttaatatctttcattccatagtggtccgaatcaagcacttttgcagcattatctatatctttgttatcttcagtcgacacattccatggtagttcaagacatgtctctatatatgttctctcaacattggcctcagcattattaccagcaagtgatttcagtctcttaatttctcttttaagtttatcctttacatactgcggtgaatcaagcttttcaacgtccgcctcatattcttccgcctctgttatggttcctccatcaagttcttcattaattgctgcaagttcttctcttaatatgtaatccttctggttcttatctactctttctcttacaatattgccaagttcttctttaatagtataagcatttatctcatttacaagtaatgttgcagcaaatgtatacatctgctcatagtcttctgcctcaagaaactgctgtcttttatcaaaatccatcataaattcctgagcaaattccatcatcagcttttctgcatcattatatgaaagccatctcttgactgtatcctttgcaaacttcggattaacatgtgcatactgtgtcaatagttctctcatacctacaattatagctctcgacaccattttatcaggcttttcaagcccttcaataacacttacatcagcaagcatcattcccgacgcttcttcaaatctatttacaagtgccttttcaagcccctctacctgaacccttaaaattttgcctggcatctttattatctgttttatcttagcaattgttcctactgtatataaatctgctatccctggttcgctcacctgcgaatctctctgtgttacaagatatataagttcatcagctgccatacttgcttctacagcttttacagacttctttctgctcacgtcaaagtgcattaccatcccaggaaaaacagtgacatttcttaatggaatagctggataatgtctatcatatttgttactcatatattcctctctatctaaaaagacggaccgtccatcatgaacagcccgcccgaattaatttcattactgtgcttttttaacagcatctgttctgtattctaacagaggctttgcgtttccttctacagcttccttagttattatacattttgatattgtttcatctgacggaatctcatacattacttcattcatgactgattctaagattgaacgtaaacctcttgctcctgtctttctctcaaagctcttgtgggctactgcctcaacagcttcatcagtaaactcaagtgctacctcatcaagtccaaaaagtgcctgatactgctttataatagcattcttaggctctcttagaattctcacaagtgcttcctcatcaagcgaatctaatgaaacaacaaccggaactcggcctacgaactcaggaataagtccaaatttgataagatcctgtggaagtgccttatggaacatctcacctatatcatcattactcttttccttaagttcagagttgaaaccaattgagctcttatccattcttgattcaataatcttctcaagtccatcaaatgcaccaccacatatgaagagaatattagttgtatcaattggaataagctcctgctgcggatgctttcttcctccctgtggtggaactgatgctattgttccctctaatatcttaagaagagcctgctgtacaccctctccagatacatctcttgttatagaaacattttctgacttcttagtaatcttatctatctcatcaatatatataataccatattgagctttttcaacatcataatctgcagcctgaataagctttaacaggatattctcaacatcctcgcctacatatccggcttctgtaagagttgtcgcatcagcaattgcaaaaggtacattaagaagtcttgcaagattctgtgcaaggaatgtctttcctgaacctgttggtccgagcataagaatattactcttctgtaactctacatccagatcagcctgtgacattattctcttataatgattatatacagcaacagcaagtaccttctttgcatcatcctgtccaataacataatcatcaaggaattcttttatctgcttcggcttaagcaggttgatattcattccatcaaccacttctttttcatctgcctctgtttcaaactcttcatcaaggatatcgctgcatatttctacacattcatcacaaatgtaaacgccattatgtcctgcgatcagctttttaacctgatcctgtgtcttattacagaatgagcatctaagcttctcgtcaatatttctgcctgccatactatcctccaaatcactataaatcctttaaataaaggtccgcttatcacacaaaaacaagggagacacctgcaaatgtgttatctgcaggcatcttccttatcataagcaattattatctcttctctacaacactatcgataagtccgtatgcaacagcttcctgtgctgtcatatagttatctctctctgtgtcgcgtgaaatttcttcaactgacttaccagtattagctgccagtatttcgtttaacttatttcttgtcttaagtatattctcagcaacgattctgatctcagtttcctgacctcttgcaccgcctgatggctggtgaatcataatctctgcattaggaagagcaagtctctttcccttggcaccgcctgaaagaaggaatgcacccatacttgcagccataccaatacagattgtagaaacatcacacttgatgtactgcattgtatcatatatagcaaaacctgctgatactgatcctcctgggctgttaatgtagaaatgtatatcctttcctggatcttctgcctcaaggaataacatctgtgctactacaagattagcagaaacatctgttacctcttctcctaagaatataattctgtctttaagcagacgtgaatatatatcatatgatctttcgcctctgctgttctgttctatgacataaggtacaaaactcattacacaacctccaatatactaaaatgtttcttacagcctcaattacttttcaacaactgatcctgtaataacttctatagccttctggattgcaagatcttccttaatctgcttcttctcatagtcgcccatgaattccttaatctgatcaagttccatcttgtaagtctcagccatcttctttaactctgcttcaaaatcttcttctgaagtctcaatattctcagccttaacaactgcttcaagaacaagtcttgactggattctcttaacagcttccggcttcatctcttccataatcttatctgcagtcattcctgtatactggaagtactgctcaactgataagccctgctgctgtaatctctgagcaaaatcctcaaccattctgttaacctgtgtgtcaaccatagcatctggaatatccatcttagaatcttcgataatcttagcgattgcttcgtcttcctgcttagccttagcttctcttgactttctgtcagcaatcttgttctttaaatcatccttatattcagcaattgtatcaaaatcagatacatcctgagcaaattcatcattaagctctggaagctgcttctccttaatttccttaacagaaaccttaaacatagctggcttacccttaagatcatctacatgatactcttctgggaatgtaacattgatttctttctcatcaccgatattcataccgataatctgatcttcaaatgtgtcaatgaaagaatgagatccgattgtaagtgggtaatctgttccctttccaccttcgaatgcaacaccatcaacaaatccttcgaaatcaataactgtattatcgccatccttaactgctctgtctgttacagctactgttcttgaattctgctcctgaactctctttaattcttcttctacatcagcatctgttgcttctgtatcagccttagttacttcaacgcccttgtactgtccaagttcaacttctggcttagtagctacaacagcttcaaaaatgaatggctttccagcctctaactgtgttacattaatctttggctgagaaacaagctcaagaccacactcatcagcagccttagcataagcatctggaataattgaattagcagcatcttcgtagaacacttctgcaccgtacatcttctcaatcatctttctaggtgctttaccttttctgaaaccaggaaggctgatcttgctcttattcttattatatgcagtattaagacctgcctcaaattcctcagcagtagactcaataacaagtttaaccatattcttctcttctaaattctcaactgtgaaactcattataaattaatcctcctatgaactatgtattgttactatcgtacaacatacccacgaattataacacaactgtttttagattaccagtactattttaaaaaaataaaagatagggctgcaaaccttatatttactaataaacattcggattacagcccatttatcacttaagataattcgtattcagttgtgagcatcccgcaattacttgccactcatctgctcttcctgtcttctgatcatctcttttaccatgttaccaccaactgaaccagcttctgctgatgtgaggtctccattgtaaccatcctttaagttaacaccaatttctgaagcaacctccatcttgaatctgtcaagtgcattctgtgcttccttcttagtcttataattagaacttgttgatttagccataataagcctccttattaaacacatttttaggtttaagccgaaaagttatggcgccataacttaacgtcttgatgttattatgtgtccgttaatactaattattatgacatattctggttgttaattattaggagacattttcgttgtttctgtttctaaatctttggctgtttcaggaattatgtttttatatacgtatatctcatcatatacaggtgcccatctgtatgttgctccgccagtgcagaaaacatacgcattacctttattagttacagcataacttacaaggcagcttcctgcttcattggtatatcccgtctttcctcctgtaacaagtactcctggtgcttcattaccatatattcttgaatacattgtacttgtaagctgtattccttccggatgctgtgctgttgctttagtcttatactgatatgttccaagtactttggctctggtttcatctttcatggcatattccataatcattgccatctctgatggagttgtatactgttcctcatcatataatcctgtcggattagtaaaatgtgtatacttaagcccaagttctttacatttttcattcataagatttgcaaattcttcattggaacctgcagccattatggcaagtgcctcggctgcatcagctcctgacggaagcacaagtccatacataagatcttcaacatctactgtctcaccttcaaggaatcctgcaacagatgcttcttccctgtaaagtctgttaagcatctcaaatccaaatgtataagtcttgggcatcttatctatattctctgatacaacaataagtgtcattaccttagtcattgaagccggatatatcttagtatcagcaagcttacctgctattattctatgattattgacatcaagtaatgctgcataaggcgacgctatctgtgcatcagctgacaaatcctgatagtctgctgccatctgtgaatatataagaggcggctctgttggtgcctctgttggcatcagtatctctgattgtgtctcatctgttatatcagaagcaaatgctgctttttgacctaatgtttttttcagccccagtgttacattcacaataactactgcaagcactattaaaaatgtcacagctgccatcataataagtcttcttcttaaaatcttctgtcttttcttcttcatcaactgtgattttctttttctgctgcggcgtattgcatcctcatcataattatcatattccatctttaaaagttcctctcgcataaaataaacttattatatatattgtgttgaagtccttaattgctctgcaagttcttctcccttaataagtcttacaagctcgaggcctaaatctagtgatgtacccattcctctcgatgttgtaatgttaccatctgtaactaccctctccggtgctgttattataactgcccccgttaactgcatttcaaagcctgggaatgccattgccttctttccttcaagtaatccaagatttccaagaattgaaggtgctgcacatatggctgcaattctgttattcttcttattgtattctttaagaagttccagtaaatccttgcaatcataatatgacttatgacccggaccacctggaaggaataacagctcatctccttcaaatacatattcatctaaaagctcatcagcctgaacaattaccccctgagcacttttaacattaatgtcacctgttattgatatcatatcagtcttaatatccgctcttcttaatatatctacaactgcaagtgcttctaccgtttcaaaaccatctgtaagaaatgcacataccttcattaattatttcctccgctcgaaaaaatatacatacgaattgattatacaacaattttttaattttacaaacttatattttataaaatattaatattaatgtattgtggttttaaaaactatgtgttatcatctcaattaacaaaacaaatcgtttttacaacgcggaggataatatatattatgtttgatataatcactgattcagcctgcgatattgttagagaatatgcagagacacacaatcttaagcttgtaccgctctacacaacttttgatggtgttaattatcttaaagaacaatatgacattactcatgatgaattctatagaagaatgacagacgaaggcgcatttcctaagtcatctcttccaagtgtgcaggattttgttgatgctattatgccaagtgtagaagctggcagacctgctattgtatgtacaattacatcatacttctcaggatcttataactcagcctgcacagctaaggacattatattagaagatcatcctgatgctaaggttacagttattaattcactgcttaattcagcatcattctcactcttcatatatcaggctctccagatgagaaaagcagggtattcatatgaggatacaatcaaagtccttgaagctttaagaaacgatggccgaataatgtttacaacagaatcgcttgaatacttaagtaaaggcggacgtcttgctaagactgcaattacaatcacaagcaaattaagcctccgtcctatcatcgttatgaaagaaggagaaatcgggcttggtggatttacacgaacaagaaacaagggtaaatctaatgttattgacatgattcagaaatacattgaatcaaagggaatgccgattgaaaactgggatatcactgttggttactgtactaatctggaagaagctgaaaagtacagagatgatgttgaagcacagcttggtgtgaagcttctcgaaagacgcgaagatttcaagacaagaatcagtattatctcaggctgccatacaggtccttacgcattaggaattgcttgcattcctaagtacaccactataaaattataatcaataaagaattaagcggaatggtttgaaactgccattccgcttttattaatctacttgctcatatggtccataatccagccatatatttcttcatatatttcttctttgttaagttcattacacagttcatgtctgcaattctcataaagtcttaaatcaatatcatcaatgtgaccatgatatgaatcatatgccctgtaaacgccttttccgtactctcccaccggatcatcaagccctgatatcataagcattggcagattcttaggaattctttctatgttgcgcggttttcttacatacagaatcatattcataagtcctctgtaaccattaaccgtaaacagaaatgttgtcagctttccagcattgtattcatcaacaaccgcttcatctcttgtcagccagtcattgactgttcttacattctttatgtgcttgttataagtgccaaacataatcttagatatcagtctgcttctgtaacggtcaccctttataagtcttactgcatcagcaagcacctttccagcaaaaaccatcggtgccggctggtgtcctgttcccattacaataactccatcaagttcatatccgtaatcacatatatatcttcttgtaacaaatgatcccatgctgtgtcctgcaagataatatggaataccaggatacattttcttgataagaactgtaagatgatgtgcatcctttgcaagtgcctctcctggattcttatctttaaaaaatcccagatcatcatccgtgcatactgactttccgtgtccaagatgatcatttccaacaacaacaaagcctctctctgccatatatcttgcaaatccgtcgtatctgtcaatatactcaatcatcccatgacatatctgcaataccgcaacaggctcgtcatattctgtctcatcgggacaccacataacaacatgaacagacgtctttccatcacatgatagaaaagaattgcttttcttctttatcataagccatcctccttatcgttttacgacattctcaattccttcaaatgcttcatttcctatataatctactgactttggcacaacaatctcactgatattcatatcagaaaatgcaccatactcaattcttttaatacctgaaggcagtttaacttccttaagtcccttgcagccagcaaatgcatatgccccaattacttccacactgtccggaatatttatttgtgtaagaccatctttattataaaatactcccgaagcaattgtccttacaccatccggaatattatacgttccactatctatgcttaccttgcataacacaccattaacaataatctcatcgttatctgcaagctggtcatgctcccactgtgtatctgtaaatgcattagttccaatagaattaactgattccggaatctcaattgttttaagattatagcagcttaagaatacattttcagctatataacttatcccatctgatataacaacatcagtaacagtcgtatcatcacggaatacaccactgcctattccatcaaccttcttgccatcaatcttagctggcacaataacctttgcatctgctcttcccttatcagtaagtccagttataactatattaccggcagcattctcctcatatgtaaatgttgctgctttggaagtccttttacatccaataaaactaaccagcataagcaccagcataattcctgaaatgattctttttcctctaaacatatcctgcctctttattatttatttctcgcccacatatagcaaaatgcctgtgttctcgctgcaaaatgattatccttaagaagctcttttacttcctgttttgaataccatgcagccgaaatctcctcaaacgttgaagtgcttggcgaaaaatctccagatgcttttccgataaccacagcatttgtctcattggaaaatcctattgcactgtagctgtcataaagcttgtcttcaattacaataaggtcaagccctgtctcttccttaagctcacgcttcgccgccacttcaggagtctcaccttcatcaataagccctgccggaaaattatacacataatctcctactgacattctatattctttattaatcaggatatgttcatccgcttcatcagtcgcaacaataacaactccgtctgtcttttcatttcttatatcttctatcgtctttatatccttgtttctgctgataatctcgtagacctttttcttgtcatcctcagttgtataatagagatcgtatctgctgataaaccttccttcatcaacttttttaacaccatcaaacttcatgtgtattatctgcctttcctgtctctcatatcattaaccgcttcatgaacaatatccattatccatctgttagaagcttttctcatagcaataccatattctatagtaacaccaaactttccattattgcactctttttctactattctctttatctgttcaaatgttttaccagcctctgcatccgtgacattcttcattactgcaacaaaattaccttcattaattcttgcaatatatgctctgtccataagtatcttcttaagcacaccagccacatttataagtgcctggttacctgctttctgtccatactgtatattaatatctgacaaatgattaatatcgcagacaactacagcaacactgccattatattcatcatactgtttacaatgctccataaagctgtacatgctgtaaactcctgtaagctggtcataaataaccatattttcaagttcagcataagccttctttaactccgacacatcctgcataacaataatagtacccagcagtcggtttttttcatctgaaagtctctcaatcctgcagtcatatattctgtcattatgcttccattcaaatgtatcctctccaggtttaacaggcaggtcattctccctgacaaaccactcaatattctgttccctgttatcgtattcaagattacctgcaacatccttcattgaagaattaaaatctgcaagaattccctcataatcaaacagtactacaggaatctgcatatgttcaattatcatttcatgtgtaactgtaagcatatttttcttagaataccagaaagtattccagtacaccattgttcccataagtgcatatagaaaaattgatatgtcaaaccttaagtcaacagctttcatgatgaatatatatttaaaagcaattataacaataagcccggcagccgtaaatatatatcttccccaatacgctgatggaatacgtatgcatttgataataagcagtgcaattataaatgctacaataaccatattcataatcgcatgaataccaaaccacagctcgccttcatagccgagaacatagactcctccacatttgttaagactatatttcaatgccgtttcattaaatatattaattataaatacaactgaatcaaccattgccgcaaatatgcacaaaacaactgcagttctggttattctgtttgcaagccttgtaaatacgcctgtatacgttaaaagcgcaacgagtgcaaaatcctgtgctgccatcattatgcttgttgccaccgacattgccatgtaattatctgtgataaaattgaccgagtatgtcacaacgcatatgagagcaagcatctctgtaagacacactatccgtgtcatcttatcccgctcaagacatgttcttataaacaccacgacaagcaccacagccgcaactccataaagagacagatacataatattcatattcccatatctcccatacccataatctatatacataatattaacattattaaacagcttactcaactatcagttataaaaattaccctgcactgaaaaagccccgcacgacacttttgtatcacgtagggctttccataccttaaaatgtattacatacatttgcagcttatagctttattcttattcattatatttcttacttaactgctgttactttgtaatctttatcctctacagctttttttaatacatcgttatcaacttctttagaaagtgtaacaactgctgttccgttctcatggcttacaactgcctctgttacaccatcaacagcctcaagtgccttcttaactgtagcttcacagtgtccacacatcataccctcaatattcatagtctttgtcatagttttgtctccttttgtcgttttatttttatttttgctagactttttcttataaatgtggtcttttcctgtatcatatatctttataagattaagtcttaatgcattagttactacacagaagcttgataagctcatagctgctgcaccaaacattggattaagtgtccatccaaatactggtatccacgcacctgctgcaagtgggattcctatacaattatagaagaatgcccagaacagattctcgtgtatgttggtaagtgttctctttgaaagtcttatagcagcaggaacatctgataacctgttcttcataagaactatatctgccgcatctattgcaacatctgtaccggctccaattgcaatacctatatcagctcttgtaagtgcaggtgcatcattaattccatcacctaccattataacacttccctgctccttaagtcttgctatctctttttcttttccttcaggaagtactcctgctataacttcatcgactccggcaagctttcctattgccttcgcacttctttcattatctccggtaatcatcacaaccctgattcccatattctgaagttccctgatagcctttgggctgtctttcttgatagtatccgcaacagctattattccaagaagcttgttatttcttgcaaagaaaagtggtgtttttccttctgatgataagtcatcagccttgtaccttaaatcatcagagatattacaatactctgaaatgaacttaagattaccacctgccactatatttgtatcaagcattcccttaagcccgttaccagcaactgccttaaagtcagtcacttcttctgcaaatgaattcttatcgccactctcttcaacataattaacaactgcctttgccaatggatgttcactttttctttcaagaccatatgctatagcaagaagctcattctgtaagattccttcacctgttataatatctgtaaccttgggttccccctctgtaatagtaccagtcttatcaagtgcaactgtctgcatcttgcctgtctgttccagagaaacagcagtcttgaacataattccgttctttgctccgactccgttaccaaccataattgcaaccggagttgcaagccctaacgcacaaggacagcttattacaagcactgagattcctctcgcaagtgcaaatcctaagtccttgccacataacagccatactactattgttataactgctattattattaccgcaggcacaaatacacctgaaactttatcagcaatctttgcaataggtgctttagttgcagccgcatcacttaccatctgtattattttggaaagtgttgtatcttctccaactcttgttgccctgcattttatatatcctgatgtattaagtgttgctgcacttacctgatctccctcctgtttatcaacaggaatgctctcacctgtaagagctgattcattaactgcagtgttaccttcaatgatgacaccatctacaggtatattctcacctggtcttacaacaaatatatcacctgtcataacctgttcaacagggacgcatgtttcctgcccatctgcataaagtactgccgtcttggcagcaagcttcataagactctttaatgcatctgtcgtctttccctttgagcgggcttcaagcatttttcctactgttataagtgtaagaatcatagccgctgactcaaaatagaattcatccatgtagtgcattacgcctgccatatcacctctcacctgacagtctgtcatggcaaaaagtgcatatgtactccacacaaatgctgctcctgaaccaagcgcaacaagtgtgtccatattaggtgaacgatgtaacaatcccttaaagccacttatgaagaaatgctgattaataaccattattattattgtaagcagcatttgtataagacccatagccacatgatttccttcaagtactgacggaagcggccagccccacatcatatgtcccatgctgaaatacataagcacaacaagaaatataactgaagctgctaatctcttctttaaaacaggggttgtcttatctgccagcgcatcttcctgctcctgcattgaaggactgctgctctttgcccccttaactgatgcaccatatcccgcagcttccacagctttaatgattacatctggggttgcagttccctcaacacccattgaattagtaagaagacttaccgaacagctttccactccaggcacattgctgacagccttctcaactcttgcctgacaagccgcacagctcattcctgtaacattgtactgttccatatcgcactactcctccttgcggttagttgttattcctgtcactttgaaatcaagtctctcaattgcaattcttatatcagcgtcatcgatttctctgtcaacctctatagttgcctgcttcttcttaagattaacctggcatgaagcaccatcaattttgttaacagatctctcaatactgttcttgcagttctcacaatgcatgccttcaatatctacagtcttaacagcaattacaggattatcaagtgtcttcttctcttccgcaacagtatctccaccaccgccacagcagccgccttcacctttcatatgcttaacactgcttataactgcaattactactattattgctaatataccgattattatagctgttcccatattatgcatctccttttatacttcattaccttgtgcaaattctagcgtatgaatttgccgattgtcttaacaagctcttctaccgtatcgtccttgccttctttaatatcttggactacacagctcttgatatggttatctaagagcaccttcgtaaaactgttaagtgctgactgggctgccgatacctgattaagaatgtcaatacagtatgcgtccttctcgaccattcccttaatccctcttatctgaccttcaattctgctaagcctgttacagaggtctttatattccttggcatcgcgttcttttgtcttatgacagcaacattctttttccattattcctccttagtctggttgttatattctgtgtctgataaacgctttattatatttatctgttgtgattgcaacataccctagtggggtatgctctatttacatgatgtataatataccccatatgggtatatgtcaactataattattgagattatttatcgaaaaatttttatttaacctgaaaattttaagataaacatactaactcatgatatatacttcattagtatgttttttaagaaaatttttttataaaaatattgtcagaaacccactaattcattacatctcgcttctttagtaggtaaattgagttgtatttttcactaactctgttatcacgacttcaatatacaagaaaacaacctactaaactccacaataactgcagtttggtaggttgttgcattatttgttatgtaaatttcagcattaatcaacctactattaatatacattttctaagtttagtaggtttatgcaaactatcccggtgaaatagttctaatctgcccggggcttacacatcaacactagaacaagcttatctcgtccccattgctgacattaacaaatcctttatatccacgttcctcaagctttccgaggaacttccccatcttcttaggctttacatataatgagcatactttaccttctgctctgtatttttctgctattgcataggcttccttaacctgtccctcatcgtacataacagcaatcttgtctgctgatgccttagtctcaacaccattctgcataaggattgagaagattctctcgaatccgattgagaatccaacagcgcttacctgctgtcctaagaacttgccaataaggttgtcatatcttccaccacctgcgatagcacccttgaaatcaatactttcaacttcaaatacagttcctgtatagtaaccctgacctcttactaaagaaaggtcaaatacaacatcaaactgaccgtctgaaagctcatttacagtgttaataattcctcttacactttctgctggagctttatcatccagtatagcttcaacactttcaaggcttatctcctgtgcacttgaaacacttccaaagaatccgataaacttctcaattgcagcagcgtcaaatcccttgtctgtaagctcagccttaacaccgtcaagtccaaccttatccatcttgtcaaatgtaatgcacacactatcaagctgatcctcggtaaatccacaattctgaaggaatgaacggagaagtcttctgtcattaatcttaaccttgaaattcttcatgccaatagccttaagagccttggttgttgtaagaataagttcaacctctgaatctgtagaatcagaaccgataatatcaatatcacactgaacaaactcacgaagtctgcccttctgtggtctttcagctctgtacactctgtccatctggatacatttcataggaagagtgagcttgtccttgttgttagcaaagtaacggctgagcggaagtgtaaggtcatatcttaatcccatatcagcaatttcattctcacaggctgttcctgtcttaggattttcctgaagtgaacttacagccttctcaagcttatcgcctctcttcataatcttgaatataagatttaagttctcaccaccatcactcttatcaagattctcaatatcctcaataataggtgttgtaatgtgttcaaatccattagcaacatatacctttaatatctcattctgaaggtaatccctgatttcaacctcattaggaagataatcattagtacccttaactggtgttattttcataattgtctcctcatttacacactaaggcagataaccggtattctccagccatctgcccccattttctttaatactaactattttctgccagtatcgaaaatgcttcgcattttgcctgactcttaacagttactaattaagcttcatcaattgccttaccaatatcatgtctcatatatttgttatcgaaatctacccattcagtagcttcataagccttggctcttgcttccttaaggtccttaccaagtgctgtaactccgagaactcgtcctccgttagttacaaccttaccctcttcattgaatttagaacctgcatggaataagaagtaatcatccttgcccttgaagttctccattcctttaatctcaaagcctttctcatatgcaagcgggtatccgtcagaagcgagaatcacacatacacatgcgttatcttcaaactgaaggtcaaccttatcaagagttccgtcaatacaagcctcaaatacatcaacaatatcattcttcattctaggaagaacaacctgtgcttcaggatcaccaaatcttgcattgtactcaagaacctttggtccctttggtgtaagcataagtccaaagaagataactcccttaaatggtctgccctcgctcttcattgcatcaacagttgcctgataaatgtatttcttacagaactcatcaacttccttagtgtagaaaggtgatggtgagaagttacccattccgcctgtattaagcccctgatcaccatccttagctctcttatgatcctgagctgatgacataatcttaattgtattaccatcaacaaatgaaagtactgaaacctcacggcctgtcatgaattcctcaatgacaatagtatcacctgctgttccgaatttcttgtcaagcataagctcatcaacacctgcaagtgcatcctctttgttctcacagatgagaacacccttgccaagtgcaagtccgtcagccttaagaacgataggatactcagcagtctcaaggtacttcttggcctctttggctgatgtaaatgtttcataagctgctgttggaatattgtatttcttcataaggtccttagaaaatgccttagatccttcaagaatagctgcattttttcttggtccgaatactcttaagccctctgcctcgaatacatcaacgacaccgccgacaagtgggtcgtccataccgataacagtaaggtcaatgctgttttccttagcaaatgctacaagcttctcaaactccattgccttaatatcaacacactctgcaagttctgcaattcccgcattacccggtgcacagtatatcttgtcaaccttaggactcttgcttaacttccagcatattgcatgctctcttccgccgctgcctacaactaatactttcatcttaattcctccgcatatcattatctatatacttagtcagtaatcattaattaacatgttcattggcaatcttgttaattgccttaggaagaagcttccattcagcctgctccataattcttctctgaagagtttcaggagtatcaccatcaagtacatcaactgccttctggaaaataatctctcctgtatccattccttcatctacataatgcacagttgcacctgataccttaacaccctttgccagagctgcttcatgaaccttgagtccatagaaaccaactccgcagaatgaaggtataagtgatggatgaatattaataattctgtggctgtactgatgaaccattttctctgggattcttacaaggaatcctgcgagtactataaggtcaacattaagctcattcactttatcaagcagcgcatcgttaaatgcatctctgttttcataatccttaggtgatatgcaatatgctggaatattgttatccttagctcttgtgagtgcatatgctccggcattattgcttataactgctacaagctctgtgttagtgattgttccatccttaacagcatcgataatagcctgaagattagttccgcctccggaaaccataactgcaactcttagcataaagtaactcccttctcgccagcttcaatgcttccgataacatatggagtctcacctgcagccttaactgccgccatcactgtatcaacatcagcaggatcaacagcaagtacaagaccgatacccatgttaaatgtattatacatcatatgctcttcgatattgccatcttctgcaagcatcttaaagattggtggtacttcgtagctgtccttcttaattactgccttaacaccgtctggaagcattctaggtacattttcatagaaaccaccacctgtgatatggctgcagcccttaaccttaacgcctgccttcttgatttccttcattgtcttaacatatattttagttggagcaagtaatgcctctcctaatgtctttccaagtgaatcgtaatatgtattaagagattcctctgtcattgtaaatacgcttcttacaagtgagaatccgttgctgtgtacaccgcttgaagcgataccgataagagtatcacccggcttgatgttctcgcctgtaataagatccttcttatcaacaacacctacagcaaatcctgcaaggtcatattcatcctgtggcataagtcccggatgctctgctgtctcaccaccgataagtgcacattcagactgtctgcagccctctgcaacgccgccaacgatagtagcaatcttttctggataattcttgccgcatgcgatgtaatcaaggaagaagagtggctctccaccagcacatacaacatcgttaacacacatagcaactgcatcaataccgatagtatcatgcttgtccataatgaaagctaacttaaccttagttccacatccgtcagttcctgaaagtaatacaggctcttccatctccttaatcttagcgagtgaaaatgctcctgagaatccgcctattccgcctaacacttcttctctcatagtagacttaacagcctctttcattaactcaactgacttgtaacctgcttcaatatcaactccagatttcttgtaatccatgattctttctccttcaatattatgataaatgtaagttaatgtaactccagttactaattaataattcttataaccgacttcctgaagtctggcatccttcttctgaacactttccttaagattcttagtataatccttaagtctttcaagaagtgctgcatcagatgttgcaagaatcttggctgcaagaatacctgcattggcaccaccgttaatagcaacagttgcaacaggaatacctgtaggcatctgtactattgaatataatgaatctctaccgcctagtgatgttgtgtgcattggaataccaataacaggcattgggaaaatagctgcacacatacccggaagatgcgctgccatacctgcacctgcaataataaccttaaatcccttctcctctgcactcttagcgtattcaaagaatacgtcaggctctctgtgtgctgagataattgtcatctcatatgaaattcctaactgttcaagaatatctgctgcctttgccataacaggcatatcagagtcacttcccataacaattcctactaaagccatattaacctcctatgtccgatagatataatattaaaattagtgaaaacactaattatcattgtactttgttttaaactttgcgtcaagataaagcctgtttacagcttacaattatatatttatgattctgttaaaaatgcatcattaagtgcaagcgtgccatcaagcacgaatctgccgttcttaatcaagtctgttcttgttccatcctctgccacaacagtaatattaccaatctcatcatacggaatggtaatatcggtgtgacagttataataagccttgtccggctccgtcttacgaagaagtgaaacctcattatcccttgagataatctccttgccgtccggattagttacatacacatcttctgcccttgaatagcatgtgtcaccgactgcaaaatgtggtcccatcttttcaacaataagaatcggaagcttatacacaatatcatgcttattggcaaacacatatgctgtagtgttagttcctatagcaaactctccgagcggtaaagtttcatggtcatataacacatttgccttgaaaagctctctattcttagcttcatcatcaaagttagtgcatgtgtagtccttaacaaatccgtcctcaaaccataccgtaagattattgaacttaatatcattaagatatacactgctcacattaagcacacctgttgttttcttaagcacaggcgatgtaaatacttctccaagcggaatattaacgtccgcaagacagttctcaaatacagtctgcgtcttatgatcggttatcttcataatagaaaccttcatatctgtgctgtttccgttagtccccttaacctcaacatactgtgctgtatcaagtacatcaataagcgcctgctggatagctttatatttgttataatcaagggtattaatcttaacagtaccctcgaatatttcctcaaaattctcgccaatctcaggtatcggataagcaattattgtaaagcttctctcttcgcctttgatatactcattaacaatgcttcctgcgtcattgctgtatttcacagaaagcttctgctgctttgtatcaagcgttaatgcctcgctcttaatctgaggctcaaatggcacttcaccaaacacctccataacagcaggtccaccatgcaccgctgcaagctctttgttcttctcatatgcaagctttaatgcgcctgtctttctctcaacaaattcgccatccatataaagtgcattgtcaaaacgatggtcgaaatccatctgcttgttaggattagctccgtaatagccaaccttaatgttaagtcttttattaatcgtgttgaccgctgccctgtatattgtaggcttaagtccaagcttttcaaaattcttaatctcagccctcacaagtctttcaaatcccagacagtatcttatattaactgttttcttcttagacaaatccttgcctgtaagctcgaatccgattctgtatccttctgtaaatgtgtctgccatcttctggatttcttcttcactgagcgaactaagatactctgctgtcttaatctcattgtctgtgacatactcaccgaatctgtacagatatcttacatctgtaaggtcagactccataattatcttagttgcaaaatcaagttcagggtctaacagctctcttacccggtactccataaggtcatcactgtaatcactaacataccagtatacagactctttcatctgcttataatctggctttccacagtcttcctcagtcgatgcacacatgcagtacacttcaacaaaaagctccataagtgctgtcatttctgccattctgccttcatatgcatacacaatcattcctcttatctcaacgtaaaggaatgacaaaagccttccctctgatagccctaactttgaagctgcatatgccggattagcgtagcttgtctcgtaagcctttccaattacatcttcatacagacctgtattcagattcttatattcttcaagtgaataatctctgaaaacatcagcttttaagtcagccgcaagcttatccatcttaaggataaatgtggcaatacatttgaaataatctgcaaacccatccgtcttaagcccaggttcctctgctatctctttaattctttctattgcaagcccgtaacgttcttctacattatcattaaacaatttctttctccttctgccctgataaggattatattcccattaagaatactgctatcataaatactgctattaccccacacagcattgaaccaaatctcgaagttccgtagaacttattatcttctttgaagctgattagtccgattactgttccaattaccgctaagataaggcttaatattccaagacttcctactcttaagccgccttctcctgctgctttaaaagacagatacactccgtaaccaaaagaaagcaatgacagtattcccatcgcagtcgatatcaaacccccaagtgcctgacttttatcagagaacttgtatttattaaaaagtttcattttttcacctgtcctttttactaaacattttaactattctgtatgctatcgcatataccgcataaccgcacaatgctcccagtacattaagcacaaggtcatcaacatcaaagcagccgaccttacatataagctgtactgtttctattgtaagcgacagtgcgaatccatatgcaaatgtagcaaaaacattaattctgccattggaaagccacggcacgaatattccaaatggtatgaatgccagcacatttccaattatattaagaaatgctatccagccaagcgagtcaaaatgtccaagataacgccaatagcgcctgatttccgtgaacagtgtaagattgtatttgtaaccgctggctatctctgcccttcccattccttctgcgaaaaagactacataaaagagcagaatcatatatataacaaaaagcgcccattttataagcgttacataatgtttctttttcataacaaatctgcccggcaggcataattaacccaccaggcagttccccttcactagaataagctatctgatctgtgtgcaagaagtcttgcaccattaataatcatcataacacctgcaccgataccaaagagtattatcaggataccaaatacaagattagatgctcctactgactttaatttcttataaagattctcttccatagttaaccctccattaacatcagttttatgcgttcttaacaccatattctgcgtaatacttgtcaattgccgccttaagtgcatcatcaataactaccttaccctcacactctttattgtaaaggtgttctacaacatctgccatagatacaattgcgcttgttgggaaaccgtatctttccttaatctcctcaagcgcactcacctttccgccaaggcctacttccatacggttaagtgaaaccataagtcctacaatagtaacatctgctgcccctcttaccttaggaactgtctcttccatcgacttaccggatgttgttacatcttctatcataatgactctgtcgccatcctttaacttgcttccgagaaatccgcccttatcagcaccatggtccttctcttccttacggtctgagcagtatcttacttccttgccgtaaagctttgcatatgcaactgctgtaactacgctgattggaattcccttatatgctggtccgaacagtacatcaaaatcatcaccatatgtttcatgaatagcctttgcataatactcaccaagtcttgcaagctgtgttcctgtaacatacgcacctgcgttcatgaagaaaggtgactttcttccactctttaaagtaaaatctccaaactttaacacatcactctctaccataaaatctataaattcctgcttatactgctccattatatcctccttattcagccccgctgtccggcggtgctgcttcatattcaatattattttttattctatcataaatgttttcccgtttcaatgcgtctttggaacattacaaatacatattaaaatccgaatatcaacatactatgtatgccttttcctgattatccgatcgccagaaattcataaagcctactaaccattatcaagctcataatttagtaggttatttcaggcagcctcttttcattctcccgccagttcacctactaatctgttaaaatgtttctccttagtaggtctttttcctgctttccagaggaatgaacattcattttatacttataaaacctactaaaaaggcttcttcctgcctgattagtaggtcttgttactgtcaattatcttgaatatgtgttaatgctacctactatatttataataatcaacgaactagtaggttttctctctttttatcaaaactttatgtatatctctccccaatcgtttggaaaacaaaagttacaccttcaaacttaaaaacacgatttttatatttctaatcacatatgagatattccagcacataatcgcttctttcattttcttttaaatctcgattaacaaagttcaaaactccttcagcataatttcattgtcaatagtaattttatttttcataattttaaaccacacagcagaaccatgtatgtattccgaaagcatattacatatatcatttttatattcacaatctcttaaaaagcttaagtctatagtattgtattgtttcattttttccgtatttttgtcaaatcccgaattattatcaggatattcatattctgttccaaaattctcattaggtatctcgatatccatatatttatcaccatatatgagcatatatctttttttcccaatactagacgagcctgtttcttctatctgctgcctgagacaaagtgtatccggtgaattataccaaaataaaaaatattcatctttgcttttgacaaccttatcccctggaatgtctaaatatcccgtacgattatatgtatcaacaatattcatatctgctatttctttttttctttcttctgaaatataatcatatatataattcataattttaccccgcatctctttattaaagcacattaataattaatgccatatcaacgctacagctaatgaagcagctattattgctgtcatacattttttctctttataccgaacccatgatatattaattatcgtgttccatttctgctttttcttttattcttcttcacaaaatttcataaataattccatagcttccttagacattccaccccatgcactgtttctttcgaatatctggtcaataacctgagaaaaatcatttgttctatatgtaatatctccttcataatatcccatgaattcgccattatcattggagaagcatactacttctccatctcctgacatttctcctataaccgtcagattatctggcatgaaattatgattgaaatcatctgttccccaaaacattgcacttgatccatcaatcagacatttttctgtaaatctgagccattccttatatgtctctggaatctttacgccatttgcctcctcccatttatttaatttatcttcatctattggttcattaaaatatgtttttccaagctcatcatcattgtcccgcttgtcacaccactcatataattcttcaatcttgctctttaaactgttattttctggtatccctatctttgtatacatatttattatcctctctttccttgtccatgcgcacccaatatatgttcctctggtgtcaatgcctgtatatttttccattctcctatatactctggatgttcctgataactcatcatatgatgcccttcatatcttacaggtgttccattctcatctgtaagtttttctccatttttatattgaacaggttttccggcataaattcttttattgccagtgtctaaatttatattatatatagcttctatttcgtccccattccactgtcttgtacaacgcccattatttaataattcacgctcatgaatccaaaatccctgaattgcttttcttcttaacaaatcatttctaaaaacaaaacaaattttatcatttacagcttctaacattatttccaaatattctattgcccagttcagtatattagtaaagtcacccacttccctgatatagccatggtcgtaacggacaaattcacccatatttacatcgaagcacaatctctccccatctccaattacatttcctactactataaattcctctggaacaagctgaccataatatccattctttgatggcataaataattccaatactcctcctgcaatataactatatttgcttaaaagaagccattctttataattttcaggtaatacaacaccattctccttttgccataaatccaattcttccattgtggcagcattagaaaactctgaataatcagcattatctaatttttcacacagcattttaatcttctcatatgcatctttaacttgttcattcataaattattccctcacttccctccaaaaacaaaaaagcagacaacatcacattccatgacatcatctgcaactcaaccatcttatatcttcaatatatccaatactccccagactactgaatcaacttagacttgtagctttgtgtccctgcatttctgcaggtttacccctcttttgttttgaaaactactcgtttattatgttatcatggatcccaagggatttcaactgttcaaatatcaatttcttaacgctgtaatcggaacaacaaatactccatcaggtctttgatatgcagcattagataatccacaaataacacataatgaatctggtgcaattccaccatttgccttaatttcattttttatttttataagattctctgccgccatatctatttggtttgcacccaatttgatttcgaatccacaccattttccattaggcattgctataactgcatccatttcattgttattataatcctgataatgatacaattctgcatcaaatgactcagcatatattttcaaatctctttcacacaatgcttcgaataagaatcccaatgtatttaaatcattcagtaacatttcaggtgtcgcatttaacaatgcggctgctaatgatgggtctgacaaatgtctcttttctgcctgcttaatacggattgatgatctaagcttagcctcaaaaggtttctgattgtctgtgaggaaaagtctttggaaaacatctagataagcagaaactgtttccacatcaatatcttcatcatctatttccttaatgtcattttttaatttcttatttgttacagttgttgcctcatttcttgcaagtgaacgaagaagcagctccattttatgcttatctctttttacattatcaattctataaacatcatcgtctaatacagccctgatgtactgtataggaagatatgccgcctgttttaatgttgtctcctgattagcaggccagcctcctcttataatgaaatcaataagttttctcaagtcaacctcacctgatattttaggttctattctaccctcacatatatcttttaaagaaatatctccactagaatttccactttcaaataatgacattggtctcattctcaattttgcaattcttccagctccgctatgcaatattcctttatgatttggtgtcgcagagcctgtcaatataaactgccctttattaccgctttggtcaaccttatacctgacagcatcccataactgaggaacttcctgccattcatcaattaatcttggagtctctccctccaaaaccagcgatggactcatctgcgccaattgtctattctggaaattaccatctggattgccaagcataatttcacttttacaatgatatgatgatgtccaggtttttccacaccacttcggtccctccacacatactgcaccaaatgcctctaaataactatcaattatattgtcaatcagtcttggtctgtaatcctctctttccatattctctccattctattcttatatatcattaatattattggtttaagcttaatctatatacattttcttcttcatcattataattcaacccgattaatttttcaattacaacccgacagatttttgatttccaatccgattgttttcgtattttcaatccgattaattttcaactttcaatccgattgtttttgaaacattatttccttataacaaatattttatccttccattaaaaaagaatatagttatctatccaataacgcatgacataatgccattggatagataactgtattcaagctatgcacgaacccccacgagctacctcctcgtgggggtatacatttcaaatgtttgacatttcacttattatctttatattttaaaataatcaaaccaatcaaacatattaagagcagtaatagcataataatatttctgattgtcaccttatgatatgcaatcaatgtataaacattagacattatatatattaatgacataataaatagaacgatttttaaaattttatttttcaaatctcaactcctttatatcataacttaatttgtccaatataagtcatctaaataaaccgccatatacaaataacagcattatattattacacctaaaaatgcccaccagaaatacctgtattaccgccaacatctttatattttgatgctaaccaccaacctaaatcataaaaaatatcgcctttacccccaccttgaattaataatatttcactgtcattaatattttcaaattccataacaaataattcccctcaatttttatttataatcattccaaccattatataaatcgtaacagcactgtgcaatccccactatagtaagaaatactcctcctgcagccaataatcccgttaatatacctccaccatttatttcctgtaattcacttgtctttatttctgtaaaaccctttttcataataatcacctctaaatcttaatttattattttcattattaatcagtcaacattccaactgtattgttaatcatatgtatcattataaccattgtaatactatctgtatggtcatatataagtcctaatattaatcctaatattgaataataacttaattcaagaactgacaatccgctatgaatcataccaaacgaaattgatacaataactatggctattattccattgcacatcttcatcttactgaccaaccaattctgatatatatatctgaataaaatttcttctaccaatggccccataaagcacattgctataacactcaacacagttactatcccggaattatcgtatccacttataatctgttcattatgggtaatcatcagattattcagtaaatataataatctggtaagcaaaatatttataataagatatataatcgaaaacataatagtctgccaaatccacgaacccagggattttgtattaccaaaatctttatatataatgccccaatataactttattgtaatcattccagcaattatgtatatcacacagcttgttatatgcgtaagcatatccatgcttatatcttttcccagtaaaaatgttattgaaacaacagtagttgctactattattgtacctaaaatgtacagaatccctatccatttcagcattaatttatttcttgaattcattatttatttctctattaaagcatgaatttattctgtcatattctccaccctgaataacaaatatctcttgttcctctaattctctaaattgcgtattttgcatatgtttatctcctctcttgtattcaagataacatctggaaattataaatacaatgtccatatgctgtttggtattcaaacagtgctatttggtataaattgacttaaatttttaatcatgtataataaaaataatgttataaaaaggggatttttaatggatttttattcaatattttttcatataattggggatttatttggctttttaattataaatttatttattacatttaacacgaagaatcataaacttcaacatattcttatgcctttttttctactggcaacaatattatatgatatctctggattttattcttgctcatacataatagatgtcttaacctgtatgcagattcttatatgctgtgataagaaattatatcagcgtatgattgttcttgcagaatattatgtttattcttacatgtctgccattgcaattcttggtatccgcatggttatattaaaggattttcaccaattatataacaatcaactgtataataattacaataccatttcaagtataattgcttcttatatagttgcctgcatgtatttcaatactaaaaaagttaaagaatttaattcagctaaatcatttatttttctttattattctatatcaatagctacaattattgcgctttcgatatcacctgtccttattgagccttctttactcaatttagaacaggttcttcctgtgttttttgtattaattgcatttataataacattttgtctctctacttatagtaaaataatatttacacttgaagaaaatgctatcaacaaaattcagcttgaaaaatccgctttagaagccgaatacaccacacagattgataacaaattacaacagcttcatactttaagacacgatatgaaaaaccaccttctcatgatagacagcctttctgcggaatataaaaacgagcaaattcacgattacatatctaaaatatcagacgaactcagtcagactcaaactatttcatcttcatcttccactatatcttctctgcttaactctaaaaaacttatatgtgatgattcagatataacttttgacctccagcttgatttcaataatatttatataagtgactttacacttataacaattcttggcaatattcttgataatgccataactgctgcgtctaaaacttacaatggatacatcagactttcaatctcacaagctgatacttatctctcaatacattgcgaaaacaatcacaacgaaaaaatcaaaaaaagagaaggccgctttatttcaagcaagccttctactggtttgaattctaattcactacatggtctgggcataataagtataactaatgctgtagaaaaaagtggcggaacactggatatcaattataatgaatctgttttcagcattgatattcttattcctaattacatataataatagcttaattatttttatgtaaagtatgtcaattcatttttctttcttcaagtagctttcttatcttactcatatgtctttctttaactgatttatagtgacttctgctcaatggcacttctactccatctccaagaaatactgcattttctttaacctcttttattgcatcaaaatttactatataaccctgatgtatatatataaatatatttttatctagtttgccatacatctttttcaatgtttcataacatgttatctcagcatctgaacaatgaagtacacattgatttctccttttttcaatatactgaatatttcttacatctactattcttgtatttttagcaacctgaacttctatgtacctttcttctgcttctttatggtcaaaagcatactgaaccataacaacggcccttccaagtactctttttaattctggataagtaaccggtttgacaacataagcaagtgcttctaccccatacgctgctatggcatatttatcaaagctggtcacaaaacatattattacatcttctgaaactttacggatacctcttgctgtattcacaccatcaaaatccggcatctcaacatctagaaatataatatcatatttagatgtatctccctcaacagcttctaacaataactttccagaattgtattcggtcacattgatatcaatttcacactcttcagaatacactccaatatatttgacaattctctctacatgtatatattcatcatcgcatactgctatctctacttttttcatttaaatcctcattttcatattttataaggtaactttatcattttaacaatcagctttcaatattgatgtgacatttagtaattaatccatgctaatcagatataattgctatctttcagaatttacttctacaaactcccaacatatttctcttgacctaaacctgactttaggtgctatcatataaaatgtattaaattataagataaggagtatcagaaaatatgtatattgagaatattaacagtcccgctgatgtaaagaagctgaacattatgcagcttaatgtgcttgcagaagaaatgcgtcacgcactgcttacaagagcaagtaaacacggcggacatttcggtcctaacttcggtatggtagaagcaatcatcgccatgcattatgtatttgattcgcctaaagataaaatcgtatttgatgtatcacaccagtgctatcctcacaaaatgctcactggaagaaaagatgcatatctttatgaggagcattatgatgatgtgtcaggatacactaatccggacgaaagcgaacatgatttctttactgtaggtcatacttcaacttctataagtcttgcctgcggtcttgccaaagcaagagatttaaacggtgaagatggtaatgtaatcgctgttataggtgatggttctttaagcggcggcgaggctttggaaggtcttgatttcgcttctgaattaaatggcaacatgattattgttgctaacgataacgacatgtctattgctgagaatcacggtggtctttatgccaacttaaagcttcttcgtgaaacaaatggacaggctgaatgtaatcttttcaaagcaatgaaccttgattatatctatgttgataagggtaatgatatcgcttctttaattgaagcatttgaaaaagttaaagatactaaaaaggcggttgttgtccacattaatacgcttaaaggcaagggttatgcacctgctgaacagaataaggaagaatggcactggcatatgccttttgatattgcaaccggagaatctctttccaagggcggagagcctgatttcgctgacgcttctttagagtatcttttaaagaagatggacgaggacaagagtgttgttgcaatcacagccggaactcctactgttatgggatttactgctgacatgagagctaaagcaggaaaacagtttgttgatgttggtatcgcagaggaaactgctgttgcgttagcttccggtatcgctgctaacggcggaaagcctgtatttggtgtttacagctcatttatacagagagcctatgaccagattacacaagatgtatgtatcaatggcagtcctgtaacatttgcagtatttgcaggttctgtgtacgggatgaatgatgttacacatctcgggcttcaggatattcctatgcttaacagcattccgggacttatatatcttgcacctgttaccaaggaagattatattgcaatgcttgactggtccttaaaacagaatgagtatcctgttgctattaaagttccgggcggcagaatggtatccacaggcacacctgtaactaaagatttcaacaagcttggcacttatgaagttactaaaaaaggaagcagagttgctatcctcgggcttggaactttctatgaaactgctgtaaaagccgctaatattcttaagacttcacacggaattgacgcaactgttatcaatccttactatatctcaggtattgacgcagacactcttaatgaattaaagaaagaccacgcagtagttgcaactcttgaggacggctaccttgaaggcggcttcggagctaagattgcagcatactatggttcttctgatatgaaggtattaaacttcggtattaagaaagaatttatcgacagatacgatgcatcagaagtattaaaggacaaccaccttactcctgaacagattgcagaagatatcgcagcaacattataactatattgtttcattataatcgaaaagacatggcaatcatttttatcaatgactgtcatgtctttttagaatttatccctgtctttagtttccataatggctgtggcatgattaaatacatgcatatttgacgtgatacctatagatagtcgcattagtcaagttcttataggacaatttcagcaaaatgcctgctaaaccagccattttatctctcaatccacctatcaaaagcttcctcgtgccaaccttataggtaattccgcaccgaaaacactttttctgtctgaaaacagcctataaaacctctataaaaaacaatcttataggacgcgccagcctgagcgccacattacagttatctcaccaacagtctcaagcgccacgcctcagcacgcctcagcattcctttgcagcctccacaaactccacagcccagtgtttccacgaccacatatcttctgcatactgaacgcctcttgccgccttatccttcatagaacccacatcagccacaaggcttttaatcttctctccaacattttccagttcatcaagtgaataatattcaactcctgaatccataggaatctcacgccgcatataaatacttccgtctgtaatactaacgcagccattcattaacgcaagtggcgtcctgtcatgtattcctgccttaaaccacggaagctggttaatcgacagacgggcattattatatatatttggaagctctccatacattacctctccacagtccttaacaaactctttaataaatggcaaatcctctttcataagaacctctgccttcataagaaaagtatcccagttatgtccatacagcttcacaggcacatgatttcttataagttgaaccacaatctcctgtcttatggccgcctgaatataaacatccgccatgaaattctcctgcagcttctccgctgtctgaactccactaatacctggatacatctgccttatggcttcctcctgcgtaagctctggattatcaaacagtctttgtgtaaatgtattaaaaaaatcaacgttttcactatcctgcttctttgccttaaaatacaccatatcagggtcagtataggacgctgtgaatatcaggtcattatcacgcatatcatatggcttcagaccgccctctgcctgctttgcagcaagcggaagaacaatacagctgttaatatgaggataggtttcatcaacaaacttcttatgcatctcatcaagacatattacattcatgttttttaaaggcactttgagactgtcatgatgatagaacggatggtcaagaatataatgccataccgcttttccaagcctgtcaaagcagtatcttcccgaatcatcacatactgcgtccagctttgtattaatatcaaacacataatcaaaaggctgggagtcatactcatcagccagcacacacagcttatccttctgtgtggctttatctagtctgatatgcatgacttcccagcccatagcttttaattcttcacttatacagtcaataaagtaagttgttgagtcatagcatatagaaccattacttaagaaaagtattctatctgacacaaccaatcagctccttaatatctgctacattattcttttccatatattccctgattccatcaataaccttaatagttgtatatggatcattaaaattcgctgttccaacagcaactgcactcgcaccaaccataatcatttcaagtgcatcctctgctgttctgattcctcccattccgattataggaaggttaattgcattggcaacctgataaaccattcttactgcgattggatgaatagcaggtcctgacacacccgcagtcttgttagctactgcaaatgttcttctgttcacatcaatcttcatacctgtaagagtattgataagtgaaaccgcatcagcaccacccgcctctacagcctttgccatctccgtgatgtcagtaacattaggacttaacttcataataaccggctgctttgcgaccttcttaaccgccttagtaatagcctctgcagaagatggaacctgtccgaaagcaattcctccctctttgacattagggcatgatatattgatttcaagaaggtcaactggctgttcaccaagcttttcaacagcgtctacataatctgcctcagattttccacatacattaacaataatcttagtatcatactgcttaaggaatggaatgtctctttttacaaatgtatcaagtcccggattctgtaatccgatagcattcatcattccaccgtaagtctcagcaattcttggtgtaggattgcccggccatggaatattggcaacaccctttgttgtcactgcaccgagtctgttaagatcaacatattctccgtactccatgcctgaaccgaatgttccggaagcaactgtcacaggattctttaattcaactcctgcaatattgactgacatattaatatcgctcattacagttctacctccttaacattaaataccggaccttccttgcacactctcttattcttaacctgagaatggtcgtcaatctctgttgatttacatacacatgcaagacatgcaccaattccgcatgccatcttctcttctaatgaaacataacacggaatatcattctcaagtgcatatgccttaattgcacgaagcataggagttggtccacatgcaaatataacatctgcctcaaccttttcctgttttacagcatctaatacattaccctttgctccaacgcttccatcttcagttgcaatatacacatctgtatcagcaactgcttcaaaatcttccttaaggaaagtctggctgtttctgtaaccgactacaacattcttgtggcagtctaatcttcttgcaagctcaagcataggaggaacacctattccgccaccgaaaagaatagccttatcaaaacttctgccttctgccttaatctctgtagcaatttttcccagatcataaccattgccaagaggtccctgaatatcaagatattctcccgccttcatcttagaaaactcttctgttcccttgccggcaactctgaatacaattcttaaattattattctcaaccttacatatactgataggtcttggtaacattcttgaaccatcattagaatatactgatataaactgtcctgccttagcggccttagcaatattctttgtttcaaaccatatttcatagactccgtcagcaagacaatccgccttaagaatcttcgcattttctctgtacgccataataatctccattattaacctgtgtgtaaatatgtataattacttgccaagtgctccgttgatatcagcaatcatatcaagagcagcctgtcttgaagcttctccgaagttcttctcaccaaacttcgcatactgctccttagtatatgctgcaataattcctcttgagctgtttacaatagctccaagtccgtcaggattaaagaaatcaacaagatccttgccctgtccgccctgtgcaccatatcctggtacaaggatatacgccttaggcataacctttcttaatactcttcccatctctgggtaagtagctccaacaaccgcaccgacattgctgtaatctccgtccatgcttgaagctccccactcattaaccttctcaccaactaactcatataatggtcttccgttgataagctgatcctggaattctccgcttgaaggattagaagtcttaacaagtataaatatacctctgtcctgctcattacaaaccttaataaatggattgattccatcagagccaagatatggattaacagttgcaaaatcttcgtcaaaaggtgtaattgccttagatccaacatttacctttccaagatgtgctaccgcataagcctcagaagttgaaccaatatcacctctcttaacatcaccgataacaatcatgcctttctcgtgacagtaatcaactgttttcttgaatgccttaagtccttcaattccaaactgctcatacattgcaatctgtggtttaacagctggaacaatgtcatatatattatctataatacctttgttatactgccatatagcctctgctgctccctcaagtgtctcaccatactgctcaaatgcagcatctgcaagatgctttggaagatacttcatcatcggatcaagtcctacaactattggtgcattagtctctacaatcttatcaacaagcttcttaatcattaatctactttagcctccttaattcatacgcaaaatcactttattctacaactttggaacttctctttcaataagaatttctgttccattatggtctgaatacacaactcttccattaacaagcgtatataaaacctttccatacacatgcattccttcaaatggagtattctttccctttgaagcaaatctgttgctgtcaatatcatactcttctgtaggattaacaactgttatatcagcaacttttcccggtgcaagaactcctctgtcaattccaagtatcttagccggattataactcattttctcaaccatctgtaacggagtaagcactcctgttcttacaagctcagtaatagtaaccggaactgctgtttcaagacctactacaccaaacggtgcttcgtcaaaaggtctttccttctcagtaggatgatgtggagcatggtctgttgcaataacatcaataacccctgatgcaagcgcttctttaagagcctttacatcatctgcctttcttaaaggagggttaatcttaaagtttgcatcatccccgttcaccgcatcctctgtcagtgtgaaatgatgtggggcaacctctgctgtcactggaatcccctgttccttggcaatctttataataaatgctgattccttattagacacatgacttatatgcagctttgcacctgtattctttgcaagaagaatatctcttgcaacaataacatcctcaacggcatccattattccgaagagaccaagttccttggctctctctccggcattcataacacctcttgcggccaagttagtatcttcacaatgtgcaaataccggaatatcaacctctgctgcctgcctcatagcctgccttgcagttcttgcattcataatagttccgccattgtcactgactgcaacagcacctgcatccttaagagcctcaaaatcagtaagatattcaccctcctgacctgccgtcatggcagctattgtatacagattaatgtcagtaacctcttctgccttatctgttacatactgcagcatatcaacattatcaattacaggtttcgtattaggcatcatacagactgttgtatatccgcctcttgctgctgctcttgagcctgttctgattgtttccttatgctcaagtcccggttccctgaaatgtgcattaaggtcaaccagtccgggcataaccatacatcctgatgcatcaatcacttcatcagcctgtgactcatcaatattctcttccattacagcaataaatccgtccttaataagcacatccataactttgtctgttttacttgcagggtcaagcactctgccttctttaatcagtatgttcatttgcccaatctcccctctaagtttttctcttcaaaaatattggctggtacaggctttccaaaataatatccctgtatataatccacgccaagacttttaagcagttcaaactgctccttatgttcaacaccttcgacaacaatcttagtaccgatagtcttggaaaggtcaactataagcttaataaatgcctgtgcataatcatcttcaacaatatcatcaataaatgtcttatcaaccttaatgatatcaagaggaagttgctttatatagttaagtgaagaataacctgtaccaaaatcatcaagtgcaatcctaggtcctaacttcttaagtcctgtaataatatccataactctctgcatatcattaattgcaaatgattctgtaatctcaagtactatattcttaggattaacacctgtcttatcaagaattcttttaatattctcaaccacattcttctgtaaaagctgcactaccgacagattcacattaatatagaaatccggatgtccgttatcattccatagcttacatcttctgcatgcctcttctagaacatagtcaccaatcaaagtaataagtccaagatattctgccagcggtataaactcacctggtcccataaatcccagtgccttgctgtcccatcttacaagtgcctcacaggaagtacacatctgtgtattgacatttacaacaggctgatagaatactacgaattcgtcaattcctgtagaaactgcctgtctcatgttattctcgatatcaagcctcttggctgttgaattctcaacctcactgctgtaataagtatagccgttctttcctgacctctttgcctcatacatcgcaacatctgccattcttgttatttcatgaacatcaacactgttatccgggaacactgcaactcccatactcattgtacagaaatattcagtttccataagataccacggcttattaaacaaagcagttatattgccaataatattatttatgtctccaaatatttcaggttcaactattattacaaattcatctccacccattctgtaacaatgtccacgcaaacctggaattcccgtaagtcctgccgcaatctgctgaagaagtatatccccatactgatggccaagtccatcattaatatgcttgaaatcatcaagatcaataaacagtaccgctcctttaagtcctgccttttccgttcttcttataacttttcttaaatcgacttcacatttcatacggttatacagacctgtaagaaaatcattatgtgcctgatattcaatcttctgctgattctttttcttctgggtaatatctacggcggtcacaacaataacctcacttccgtcaatccactccaattcagaaaacctcacctcaaaccacaatcctgactctgtattatagcgttccatggatgctccgatgcttctatgtacatcttcgcatgtaaacacatcctccaaacattcccttattgtatcccgaacctcctgtacattagctgccatctcattctcaaacaatatattgccagaatacctgctgcacacaataattccagagcctatattatcaagaatcttctgtaaaacatcataagatgatataagtgaattattaattaccttgctctgtgctataccatgaagtaccagtgccatgtcgcttatgtattccttaatcttattatctgatactgcctgtacatcattactaagaactataagatacattgcttttacattattaattaaaatcggtactgttatgctcagttttactccaagtctgtccagaagccctttctgtgctgtatccgcatttccttcgtatgtaatcttaattgcatctgaacataatacaaactctgaccgtttaaccgtgcctgatttatctttaaaacaatttccggtttcagatatcacatgcatagtgtcactttccctgtctatctgcattacaacagcatcacatatatccatgctgtcagttatgcattcaagaacactatctgctgcctgagtaaatgtaacattattttcaagcatacgtataatctctgaaagccctatatttctgttattatcactactcaaaatattcctccagcaatacacaaatctaataatattatagcctattacaatctttttggaaactgatttttgcatgattttacaatcatttcaatatacatttttaatttaacagataattaattgttttatctttttgagggtgttattatatctctatatcaatttatttatgaggattattatggatattattaaattcaacacaacattaaaagcttctggaaaggattatttcaagattgtattttggaacagatttataagaaacccaattgaacttattctgtcatggcttcctgccgtaatttcactcgtacttttgtgcctgcattattattccagctttttactgattctttatgctgtatgctggttttacccaatatatatttttggataccagttcagatcaagtgttaactatcatttaaagcacagagatccatcagaagaagccccatgtacaattactcttatgaataatgctattatggcagatattccagagcataatcttgtatacacatatgagtggaatcagttcactaatgtttacaacaaattcggctattacatgttatttaataaaggacgtatgattgtcatgttaagtcagaaggacatgcctgatgatattaaagctgctgttcctgcgtatatcaagtcacatgttgacagaaacatttgcaaaatcaacttctaaaaactatacacaaaaggcgtttcaaacaattacatctgaaacgccttttatcatactcttttaagttatcttgcaagccatccgccatcaacagccagtgtaaatccattaacataatccgatgcagctgatgcaagaaacacaaccgctcccttcatatcatcaggagttccccagcgtcctgccggaattctgtctataatagcttcacttctgtcagaatcgctccttaactgtgccgtattattagtagccatatatcctggtgcaatagcattaacattaatgttatggcatgcccactcattacacatagcttttgtaagtcccataccagcactcttacttgctgtataagaaggaactcttatgcccccctgatatgaaagcatggaattgatattaataatcttaccaccatgtccctgcttaatatactgctttgcaaatgcctggcttaagaagaataccatcttctgattaacctgaataacactatcccattcatcttcagtgaaatcaatagcatcattcctcttaataagtcctgcattattaacaagaatgtcaacctttccaaaagctgcaagtgcaccattcacaataacctctatagctgacatatctgaaaggtctgctataacctcagcaaattctcctccatcagcttcaataagcttcttagtatcctcgcaggatcttcttgcaacacctacaaccttagcacctgcctgtgcaagtgcaacggacattccctgtccaaggcctgtattggcgcctgtaactactgcaacctttccatctagtctgaatgcatcaattatagacatatattcttctccttctaaatccatttaattaaaacctattatattattagctatcttgtacccctgcttagatatccatcttcctgcagatgtaggaatattaacagaccagcctaaaagactgtgtcgtaacttcttataaagcacttcatccttatcctttgcatactgccagagagcttttttcttcgcaagatgttcctttgtccctgatacaatcaggaatatagatgatacctccatcataattcttaaatagttaatcatatattttctacagttaatattcttaggattttctgaaagaaacgaatcaatcattctcttattaacagaaagctgctggtcaattcttgaaatcataacactctcattaacagactgatcttctcgtccaataaaatatctgtagaaattagtatttatgtaatacatattcttaacatacggaagtggctcgaacacaaatatgttatcaacataaaatgtatgcttaggaagctctaatccacaatcctttaaaagctgtgttctatatacaacagtatgcataagaatatactggtcaaccttaaaatcgcctatattaatatcatcccatgtaaacatctgctctacaggaaatacattctcgtagtggataactttctttctcttggctccgaccttttcatatacatagtttgcaataaccatatccggctcactgccctcttcaaagcttcttaatgtagcaagcattcttttgtaacttttgccatctacccagtcatcactgtcaacaaccttaaagaaccttcctgttgcatgcttaagacctgtatttacagcctcaccatgtccaccattctcctgatgtacagctttgacaatatccggatattccttctcatatcttttggctatttcatatgtattatcctttgttgaaccatcatcaactataataacctcaacttcatccccaccggcaagcactgtattaatacaatgttccatatactctgcggagttgtaacatggtattgcaaatgataataatttacccatcatatttctcctttacattctgtcaggacattcaattgcaagcaaatcaatacactgctccagaatgctcttcgtaaggcttataagtgcaatatagcttgctttcttagcctcatcaggttctgaaagtatcttattgttatgataaaagccgttaaatgcattagatacctcatatataaactggcatatcttatgtggtgcattatccttatatgctccatcaattatatctgcaaactttataagtgataaagaaagattcttctcactttcttctgtagcagccataatcttaaggttatctgtgcttccaccattttctgtatatttgttaagaatagacttaattcttacaattgtgtaaagaatatatggtcctgtattaccctcaaatgatgaaaatctctcaatatcaaacacatagtcctttgatgcctgattagaaagatccccatactttaatgcagcaagtcctactgtcttagctgtatctcttgcttctgtctcttcaacagttctgttagacataattttctcatatacagcttcatcaatatcagctataagatgctcaagtctcataacgccacctgaacgcgtcttgaatggcttaccatctttaccgttcatagtaccaaagcccacaaatctcatatctgcatcaggagctacaatcccagccttcttggccgttctgaacacctgcgtaaaatgaagttcctgcctcttatcagcaagataaatatatgtatcaggatgatataacttttctctttcaacaatagtagcaaggtcagatgttgcataaagtgctgcaccatcagattttcttacgatacatggtggaagctccttagtatcaccttcctgctgtatatctacaacagttgcgccctggctttcataagcaattccgtctgcaatcatcttattaaccatatcgtcaatatatggctgtgcatctgattcacctttccataaatcaaaatgtacattaagattatcataattcttcttaaggtcagccttagaaacattcatgatatgatgccatattgcacgacatgccttgtcaccgctctgtaacttaagtgtagcttcatgagctctttctgcaaatacagcatcttccttagactttgcagaagctgccggataaatctcttcaagctcagagattgtaaatggcgcttcctctggatactcaccagtaaaactgtcatcaaaatacggaagttctggttttctgtctcttaattcttcaatgataagtcccatctgcaagccccagtctccaagatgaacatcccctatagttttatttccggcaaatgtattgattctcttaacactttctccgataactgcagaacgtaaatgtccgacatgaagaggctttgcagcattagctccgccataatctacaataacagtcttttccttatcagcattaacatatccaaacttctctgtttcagacatctcattaagatatccagccagataatcctcacatagattaatattgataaatccaggcttaacactctctatcttagaaaacatcttgttatctgctaactttgcaactacctcatcagcaatcataaatggtgctttcttatatactttggctgctgccatagcaccgttacactgaaactcgcacaggtcaggtctgttagaaactgtaactttcgcatacgcctcatcatatccacattcagtgaatacatttttaatctcatcagtaataagttcaataatcgtcttcatattctccaccttttacaatatctaataaaccacctttacaagaaacagcccataactctctgccggtaatgacatctgtacgttctccccatcaagacacctcttcacatcttccggcttcttaataccattgcctgcatcaagcagcatcccaatcataaatcttgccatattatgaaggaaatcatcagcttcaatccttatgtaagctcttgttccttcatactgaatgtttatcctcttaatagttctctctgtgcttttgttcttctttgctgttgtaaatgccttaaaatcatgttttccttcaaaatatccggcagcctttctcatggcatcaaaatccggagtactgaatgtatgatacgcatattttcttctgaatacattagctacattacctgtatccagtctgtactcatatatcttggactttgcattaagctggctgtgaaatctttcatcaacctgtgaaacagacataaccgcaatatctctcggcagatatctgttaagataattcttaatatcaagtgccttaacttccttctcaagcttgaaattcgctgtctggcaaagtgcatgcacgcccttttctgttcttgatccaacatacatgtcaactgtctcaccagtcattcttgctattatctcacacagtctgctctctatagtattcgtgctggcatccttacccagtctttgccaaccatcatatcttccaccatcgtactctatctctatacggtaattatacattattcgtcttccaaaaccttttctattgtattaataattacagcactatcaaatggcttctgaataaaatcagcagcacctctctttaatgcctcaaccatattagtcttctgaccagcggcagttaccataataacttttgccccaggatcaatctcaataatctctcttactgcttctataccatccataacaggcattgtaatatccattgtaacaacatcaggcttatacaacctgaatttttctacgccttctaccccattaactgcctctgatacaatctcatgtcctgcatcttcaagcatatttcttaaaaattttcttgatgtcttagaatcatctactatcaaaatttttgccataactattctccttattaagctgaaagctggattttattatcagcagccattaaaatcttaaatacattatcttcaatattgaaagtcacaacataaaaaccagtatctgccgtaacttctgtatctttataaaaaactggcgggtgaagtgttacttcaatatctgcttccccaagtttagttgcatatgccccattcatcacattaataagttcacataatgcatcataagcatcttcatcgaattcttcaatatcttcctgtgcaaatgtcgatgccactttcaaaagttccctgttatcaccagctacgccaagaaacacatcaatatccccatccataacctgacagccaataaactgacccttatattctctttcgtaatctatctggttcagttcaatattacaattcatgaacattccaagacttttcaatgtacactgcatctgcgtcttgtaataatcattgtccatatgcagaaatgtttcaacaagtgtatccgtatctccctgctttatgacttgtaactctctgtcagtgaacacgttatctgagtgattctttgcaatatatctgccgagtattctgtccttcatagtttttctccttctcgttgatttagcgccccaaaatataccctgttcattcacattaatatataaatacttaatccattatacatcataccattgttcaatagcaataatttcagaagaaattacattttatcatgaaaaaaacacccggacaaaacaatctgtccgggttaaatactattattaattacttatcttccactgaatagttaggagcttcctttgtgatatgaatatcatgtggatgactctctcttaaagctgctgaagacatcttaataaactgagctgtttcctgaagtaccgggattgtaggtgctccacaatatcccatacctgaacgtaaaccacccataagctggaatatagtatcttcaacaagtcccttataagcaactcgtccttcaacaccctcaggaacaagcttcttggcacctgtctggaaatatctgtccttgcttccattctccattgcagcgatagaacccattcctctgtataccttatactttcttccctggaataactcaaatgttccaggagcttcgtcacatcctgcaagaaggcttcctaacatgcagacattaccacctgctgcaatagccttaacgatatctcctgaatacttgataccaccatcagcaattacaggaacaccatacttcttagcctctgcataagcatccataacggctgtaacctgtggtacaccaatacctgcaacaactcttgttgtacagatagaaccaggtccgataccaaccttaacagcatctacaccagcctcacagagagcctttgcagctgcacctgttgcaatattaccggcgataacctgaagatcagggaatgctgatttaatatctttaagagttgtaataatattcttagaatgaccatgagctgaatcaattacaatacagtcaacacttgaattaacaagtgcctgaactctgtccataacattagctgtgataccaacagcagcacctgctaaaagtctgccctgtgaatcatgtgctgaagacggatacttaacgctcttctcgatatccttaattgtaataagtcctcttaacttataatcatcatcaacgataggaagcttctcttttcttgccttgcctaatatcttcttagcctcttcaagagtagttccaactggagcagtgataagattctcgcttgtcatgcactccttgattggtctttcaaaatgctcctcaaacttaaggtctctgttagtaatgataccaacaagcttgccattatcatctgtgataggtactccggagattctgaacttgcccataaggtcattagcttcctgtaatgtattatctggatgtaagaaaaatgggtctgtgataacaccattctctgaacgcttaaccttgtctacttcttctgcctgagcttctactgacatattcttgtgaataataccaataccgccctgtctagccattgcgattgccattctgtgttctgtaactgtgtccatgcctgcactcattaaaggaatgttaagtttaatattcttagtgagctgtgttgagaggtcaatcatattaggtgttacttctgaatactgtggaactaaaagtacgtcgtcaaatgtaatgccttcaccaataattttacccattttgctaaaatcctcgctttctgttgtgttttaatatatagaaaaaatccgaataaataaattaatccggatgtttctacaagtatctgacagcttagtcagtttataaatatgttacaagtgaatataacaaaactgccgctaaaagtcaaacattttttataaatgtgcaactccgttaccaacagcacttataattgcttctttcattgaatcatccggaagcataaacagtcttatcatctcattgctgtcattgtcatatgtgtatattacaatatctccagggtcatctactcctgacgaacaattatatgttcttaactgctgtcttgctttgcctaaagcctcctgactgtttactttcgcaaccaaagttgctcttgtaagatcaaagcttccaacattttttcgcacagacttagccataattttatctatagtgaggcttccatcaacatatgaatattcatattcagcattataatattcaaatacaaataccgtaaagaatataaatataataagaactattacacccagccatcctgtctgcacaattgttgtcgctgcaagcagacatgcaatcacaagtattattctgtaaaaaattgaaatcttaggagcggtaactttaacaatctgctctactgttccttctatcataattcaataacctttctttaaagcaatatgcccggcgggaaattacccaccgggctataagttttaattatattgtggaattacatcattccgcccatgcctgcaccgcctgctggcatagctggagcatcttccttaatattagcaacaactgattctgttgtaagaagtgttgaagcaacgcttgtagcattctgtaatgcacttcttgtaaccttagccgggtcaaggataccagcatctatcatgttgacatactcttccttgtatgcatcaaatcctgtaccaacttcagactctcttaccttattgatgataacagcaccttcaagaccagcattgtatgcaatgtggaataatggagcttcaagggcctttaagataatctgggcaccaatcttctcatctccactgagtgtcttaacaagctctgcaaccttcttagaagcatggatgtaagcagaaccaccacctgatactacaccttcttcaacagcagctcttgttgcattaagagcatcttccatacgaagcttagcttccttcatctctgtctctgttgcagcaccaactctgataacagctacaccacctgcaagcttagcaagtctttcctgtaacttctctttatcaaattcagaagttgtctcctcaagctgtgccttaatctgtgcaactcttgcatcaatatcttccttagcaccttcgccatcaacgataactgtattttctttctgaaccttaacagacttagctctaccaagcatatccattgttgtatccttaagttcaagtccaagttcctcagaaataacctggccacctgtaagaattgcgatatccttaagcatctcttttcttctgtcaccatatccaggagctttaacagcaacaacattgaatgttcctcttaacttattaacaataagtgttgtaagagcctcaccctcaacatcctctgctataataagaagtttagaaccactctgaacaatctgctcaagaactggtaaaatttcctgaatattagaaatcttcttatctgtaataaggatatatggattatcaagaactgcttccatcttatccatatctgtagccatatatgctgaaatgtatcctctgtcgaactgcataccttctacaagatcaagttctgtcttcattgtcttagattcctcgattgtgataacaccatcgttagaaaccttctccatagcatcagctaccatctgtccaacttcttcatcacctgctgaaatagctgcaaccttagcaatctgatccttgcctgttaccttctcgctcatatgtgcgatagcgtcaacagcacaatcagtagccttcttcattccctttcttaatacgattgggttagcacctgctgcaaggttcttcataccttcattaatcatagcctgtgcaagaacagtagctgttgttgtaccatcacctgcaacatcattagtcttagctgctacttccttaacaagctgtgcgcccatattctcgaatgcatcttcaagttcaatatccttagcaatagtaacaccatcgttagtgataagtggtgcaccatatgacttatcaagaacaacattacgtcccttaggtccgatagttactcttactgtattagctaacttattaacaccttcctctaaagcctttctagcttcaattccgtacttgatttcctttgccataataatagcctcctaaataaatatacttcttatatgttcataccgccctcatctgcaactgacattgtcaattattcaatgatagcaagaatatcagactgctttacaatgatgagattctcatcttcatcaagtttaacctctgttccagaatacttagaataaataatcttatcaccaggcttaacctgcataacaacttccttaccatcaacaactccgccaggacctacagcaataacctctgcctgctgtggcttttccttagcctgtccaggaagtacgattcctgatttagtagtctcctctgcaactaatgctttaataacaactctgtctcctaatggtactaatttcattatatattcctccattccgctgtcttcacatgagagtgaacccttcatggcagcattcattttcttgttagcactcattcttttcgagtgctaaccactgcacataatgtaacacttcacgcttttatttgtcaacagctaattcaaatatattatattttttagattttattaataattattatttaacacccatttttattgattttccataataaaacagatactgctgtgcaaatccccccagttccccaaactgttcctttgcaaaagcagcaatcttatcctttggagtgtccacaccgccaaaatacattgtctccataattcttttaatccacacatcaacaggaaatgcttctttctttccaagtccgaaaaggcatacgcagttggcaaccttctctccgacgccttttattgccataagttccttaatacacgaatcataatccatgctcttaagttcatttctgtcaaactgacctgccatatttcttcttattgcatccataatatagggcgccctgaatcctgtctttaactctttaaagtcctcttcacttgcatcggcaagctgttcaagtgttggaaatgtatacatatctgttccgccatatgttcccttatatgtaccaaactttgcagatatatcggctactatcttcttaatatgaggtatctgcttattctgcgatataatgaatgatataagagtttcaaaaaaatcctgattaagaatcctcactccccacatactttcgattgcatccttcaacttatcatctttttccagcagtttattcttaattaccgaataatccctgtccatatcaaaataatctttccatacatttacatattcatcttcttccgtatcatagaatgtaacggtatcgtcctcctgtgaaacatgcagtacatgcccctttgcagccaatacataatcctcttcatcaagctttacaaaatgaaaacactgaccacattccaatgtctgtgccaggtcgaaatcacatacattttttaatttataatctgacataaaattcctccataaatatgctttacatttgcaattatctcgttatacaatcgtatatgattataacagaattttcaggagaccacacatgaaacatataaaatattgggcgtctcttttaaccggagccgtaattcttgcatccctatgcggatgcacattaccgtttacgcatgataacagctctgacagttctacagagatttcatatacagcatttgacaataaagcaactgacacagaagatataattaatttcattattgaagcaatgtcggataaccagactacatgtaatatatttgttcccgactctgaccttatagatgccaatgaatggctgacaagaataagcggaattgagcagataaaatgtgaataccgcagaattaaagatggttataatcttgttgtaacctttgaatgctgggataattatgcaattataaaagcttttaattcaggaaacacttcccagttaaacagccgtcaggttgagctctataacaaatacatagaggttcttgccgaagtaacctctcctgcaagaagcgattatgaaaatgaactggcaatccacgattatcttgtatcacatataacatacattgataatggtggttcgacttttaatgcctatgacgctatgattaatggtgaggctgtatgcagcggttatacagaaagtttcaaaacatttatggatatgttaggaatcgagaattatacaatatccggaaaggctggtaatgaacaacatatatggaatgttgttaagcttgataatgactggtatcaggtagatgtcacatgggatgacccggtaggcagctcacaggaatatattgaccacagttacttcaatatatctgattcagatatggcaattgatcatacatggacatctgattccaatgaaactaatccagctaacggatatatatatacatatcctgttcaggctaagcttcattcagcaggaacacaatatgaacttgaccgttatatattaaggtgtattaaaagccgttcccagcatatagaattcacaacaactaacgaacttgatattaaatccgctgtttccaatgccggtgtacagctttcgtactcatataaaacaaccatacgaaacaattatacaatgtattctgttacattttcgtattaacagatattattacatgtgcaaacagccctgcggtatctcacaccacagggctgttatttatcatcttgtattattcctttttcccggttcatctgctatataagaaccatcctttatcatagctcttaccaatgaatctttcgcattcttccatggctcatcaatatatttgtggtcaaacttattaataaaccattcaacatcatctcttacccgcttcatattctcaatatagagactgttagttgtcttaataaattcatctaacatatccccctttaaagaattagctgcctgctcaagcaatatgccataatgcttcgtacagaatcccttacatgctttatacttttccctgaaatcactatcatgcttatacatatgaaatatagtgtccagatatctctgaaatgtgttatcaatcctttcacatacaaagcatgtgccttcaagctgttcagtatacgttgtcacagccggtttatctgctttcttaaacatagactttcctgccacttttccatcttgcagactttcaatatcattaatcaccctgtcaagatgtgtcttcatgacaagtgcaaagccaagtctgttctcacagtcatacactttctttaaatgtttctgacagaaaccctttttatcagtcacagcccttatatcatcttccatataactaggtcccattgtatagcttactgcatcatcctccagtgccttatacattgaacaaatcggacattcacagtctgatgaaaatgcatcattaacaggtatagtatatatcttctctttcataagtactcctttaatcagtcttttataaatgtattctatcataatattttattaatatcattctatttattattttttaaattctgggttatatgcatagaagttcttagaatccagcttgctctgtataatcgacatagcttctccgaatctctgaaaatgcacaacttccctttctcttaaaaacttcagcggttcatacacatccggatcatcacggcagagtcttaacagattatcataagtactccttgctttctgctcggctgccatatcctctgcaatatcagttattgcatccccctttgactggaattcaattgcgcagaaaggtacacctcctgcagcctgcggccatactccaaccgtatgatcaacataatatgcctcaaacggagttccttttatctgttccattgtaagatttcttgtaagctgatgaaccattgtactgaccatttcaagatggccaagttcttccgtgcctatatcagtcagcaatccggcaacctccctgtatggcatggaatatctctgtgaaagatatctcattgatgctccaagctcaccatctggtccaccatacttcattaaggtatatcttcctattaatatatgcacatattaatattcattctatccttgtgctctttttaataaagcatcctgtaataccttggaaaaattaatattattcttttccccataagcattcagccatgctggtattgttatattctttcttactgctttatctccatacttttcagaataagagtccatatccagtacaagcatattaataaagctgttgtcatcatccagctttatatcttcccgtaacgatggctcaggtatattattaccattctctaattcatcaagtacccaaccacttgcagcatcgattcccatttcaattgcttctgctaaatcatcaccttctgtcacgcagcctttaagatctggaacttctactgtataaccaccttcgttctgttcgcacggtgtaaatactgcaggatatactaatttcataatcatcaaccttctttccgtctatatattattatataccacaacctacataagccatgcaggactatttaagtcctgcctgcttaagtatcgagttcgctgtctttatatcgacatctcccttgtggtttggtatcgtaacttttccagttttagttggatgcttatattgcatatgcgaaccaacttgttttacgaaataccaaccgtcgttttttataagcttatcaagctctctgacagtcattagcttttctccttccttggtatctcatctataattatattatacacattatacgcattttgtcaatactttttatgcgtataatgcgtatattttatatctagttgatgattatcattcacatttagagcaaataaaaaaggggggcatatcgcaaaagcaatatgcccccctttcagccttaattataaaattaattaggaagtttgagttccatgccagcatagagtggtgtactaatatccatatcgttaaactctgctagttcaagatatcttgtaccgtctcctaatgctctttctgcaacctgccagaaaccttctcctggttctactattgcatatgctgtcttttcttccgtatcctctgccatttcttctgattcattttctgttgtatcatcttctggctcattatggtatccagtaatacagttatcatcaacaaatcctgtaccatcaccgataagataaggatgtctgcttccttcatacacatctgtaattactccatctgtgtaataaggtgaagctccatccgtccaatcgcctgctgtgtagtagattctgttgtagcatacatgatctcctttgttgtacattgtgccaacatcttcaatttctctctccggaataggcacttccggttcatagtctggtgcagctgtttctgtaagttttgcaaagttgtcttcatttatataattattcatatcagtccttaacgatgaaccgtcaactgttccatctgagcagtactgccatatttcagcccattctacaggacaattatcaggtccccagatagcaagccacttcttgtctgtaagcgcttccctgtcaagtatattctcaaaccaattaagattagcatatgtgcctactgtctcaaaaccaactgcttttaaatcattcatgacaatctgacagaatcttgtgtaatcttctccatgttcataagggtttttattatttcttaccttataactatccgcatcttcctgatcaatgtaaatgcctaatttagggttaaatcctgctatcattcttaagatatgtgctgcttcgctgtgtgcttcatcttcatttaatgcataactgtaaagatatacgccataaggcttgcctattctctcaagctcctgcatgttccttatagcctgcttgtcatcctggctctcataattagatccgtagcctactcttactattgcaaagtcaatcaattccttgataacatcccaattgagtgttccgttattatcacttacatctattcctacgatactcatattatttatcctcctgattatcaattgttgttttctgttcaacctgactctttaaattcttaacaataggctgcaagaatggtggaagtgttacaccgatatcattgatgttttccaatatgcttataatttcgttgcaaatcagccatattgccacaacacaagccacaagaaatgtaaaaggtaatgttatacctacaactcctgcagaataagaaaggagctggtctactattacaccaactcctaccaaaagccacatacatattttctttgcaattccttttattcctttgtagctgtcaatttcctgcttcctgaattttgacgctgcaacacctgtgaaataatctattagattacatgttaccagtaataacactggaactgctaagattcccagagcacttaatataatgctccacaccgctgttacaatcacttttaatttttccataaatcaatatcctttctgttgcactggtgcaactttaactttttattcctgtctttcagttattgctttatatacttctgcttcaaatgttgcaacatctgcatcgcacgctttcttatttgcgatatagcctttaacattaacaactgtcttacttaccgttggctgtccctgctgtggtatgtttgcatacatattaacaacatttgtctcgctttcatctacctttgctgttatagatgcatttaatgttacatttttctgtatttccataatttacctctttctaccgctgtgcggatttattattgccctgtaccccatctaacatcattattaaatagtgcctgtacagagtacgttattgtcttttttccattctttgtgcttccacctattcccgatagcgtatgtgcttcgttgtcactaaaataccatacatatgtcgcccctgctgataattctattgcatttgtcgtctctaatctatgttgattttctgttacgcaatatccgtccaaatacaatccacattttattgtgccataatcacttgtatcatctgtccatatgcttacatttgcgattattaaacatggcccatggaatgttcttataaataacgttgtatttaagctgttttcatatgttgcccatctgtaattcggctgatacgttgtgtaaggcgttgaaaagcatctgcaatacaaatctccttcgcttgttacatagaatgtcgctattccatttttttgaactgaatatacccatgcattttctcttgtgtttcctacaacatagtctggattttgtagataagctgtatacactttgtctgctgtctcacaatatattgctttactatctacattccattcgccaagctttgcattgacagtttgaagatatccggtgttagaaatttttgtacccgaactatccagagaaaaagtattacctctgatattaacactcttgttgccactaatattaatagaaccgccagcagttaagttaatatcgtctgcaattgcttcaatgcagctctttaatgctcctgtatctgtttttgctatatatgcactcaggcttgccgttgttgcataattgttaaatttagcattaacatcttctggtgccggtgaatagtctgtagcttttgtacctttctctatttttagcttatctgtatctacatgtgcataactaaatctcatgtacgccgcgcctgttggaatcggtaatgaatgtcttgcagaagtattattgccagcaacaccactgataaatttcttattgctatcgtagaagcatgtggctggggcatttcctagattagtccatccacttgctatataatgtgtccactgtgatacatcaatgtagtccgttaaatcccagtaattcccaccagctgttattgtgccagtggctgttatatacttattaatggttgcagtactctttacgaacctattaactccaccgatttgaagattatttatatcgtttttagttgcataagttcctgatacttcaagcttaatactgttactttccgcactaacagcttgcgtaatcgcgttattcatctgtacagttgtagagtaatggtctgttatattgtcctctatggtttgacaccaatcctgggccgcactggctttatcatcaacattatttatgttgtctccaagccagtctatttcttttgcgtattctgttttagttacataggttgctgaaatagactgctttattccacttaaatctgccgttaatgttgttactctattattaatttcagtaactgtactattatccgcttttttgcttatggctgtcgtgttactgttaaccgtagctttaagacttgtaaacgattgattcagcgttgtgtactgattgcttactgttgttattttaccttctacagaagagatattcgcgtcaatatcctctggtgctggtgtccagtctgtagctatgttgcccgattctattttaatatcccagaagcttgtaactttactataaccgttgattcttatttcacaattctgagtcgctgatgtatgaacaaatgtccatgtatatcgtcccgatgttttaccatctccacaaaatactctgtgaaatccatctcctaaaccatgaagccatatcgttgctttcccagtttgaccaccatgccctgtagcccatacggaatcgctaactgcttgcaaagtatatgttttaccattttcaagatatacttttccaccaatatatgcatatgcatctgctgcatttgtactttttgctggattggctttagtccaacctgcggaaccagttaacaggtttcttccaccaatctgcagattatttacagctgtcgttatatcctgttgccacactttagaacttatctgtccctgtactgtagatagctgtgttccctgtgaagatactgtattagttaccgtctgcaatgaggaataaagattgttcaggtctgtcgcaagctgtggggcggatgctgtaacactgccatctgtccactgtatatagtctctcatccagtaatatcttcctgcaacccatgaaggtcttgtattactccacgaaccaccactttgagttgtgtttgaagtagacagataatattgcggagtaattgcagaaactccttttcctgttgctccagttgcgccttttaaatcttccttagccggacaccaatccgttgatttatttcctttttcaagttttaagccaacaatctgatatcgtatattagtctgatttgatttattaagctgaatatatgtgtatgtcgctttagtattatcgtcggctggcatatcattagctgtctgaaatctaagttcaaaaaaatgtgatttcccatcgtttaaaatttgaactgcatccgttgtaataatatctaatggatttgcataacttttaccatctattgaaaaagaaatgaaagtatgctttttcccattgtatataaaaaaattaatgcatgttttactgagaattgtgacatacccactcagaacatattgagtagatgactcataacaattaacagaatcgattttaatgccagcatttacattagttccttcgcatattactttgccattctttatatactcacttttatcaatttctgacgcaaatgcttcaatataatcatatttaatcagattccaattgaagttctttccatcagcgcctttaaattctccggcattagcacgatttataacactttgtgcttttgtgtctgctgaatttgctgtagaaagcgccatacctgcattttgttctgccttatttgcagctgtaactgccgtgtctgttttagtagttattgccttaaaagaaacatcgagcgtctgtttatcactatcaacatatatcttgctagatttaagcgtgtgacttccgtcgttattaataacatcaaaaaggctgccgatatcaagcttgcttgctgatatatcagcgtcttcttttatcatgtcgttgcggattatctctctcttaacacctttttcagtaagtccaagtgcatcaaacatcagattacctgctttatcccagacatacatgttataatcagcatttgcatcttttccaatctgaactcgtgtgcgtgttccatcgctgattgcaattgtgttgtctttccaacgtgacaatccgctttcactgtgtatattcacgcttgtagtgtttacatcaagtgatgttatcttttttgcatcaatgctttctatcattgcgctttttatctgtgcatcacctataaggcttataactgaattggaaaactctgtcgtaagacttccaccacttgcagaaccaaacataagagtatttactttctctaccccaacagttaggtcattaacctttcctgttattgcagtaaaatcatttgtcttgaactgctcaaattctccggaaacacctttaaggctttctatcgttgcgtatttaatctccgcaatattagatttcaaataattattccggatattctctagttcattatttatagctactaccgtttctgcctgtacagtattagccttaacccattctgcatctacctttttagcaaccagttccttagtaagcatcatttccgcatatattcgttctgcaagcttagtagatggtcctttataatctgtctctgtttcagtttctgttttgccataagctgtaatagtcatggcaagacctccatcatattcctgagttatattcataaccggaaccttataagtcttacctaattcttcaacagttacaatatcccatggatccagtcgaatatctcctagcgtctttaagcttgcgcctctatacgcaaatcctcttactttcttgtatacagagttaagcttttcttctgttgtaagtggattatcaaatgttattcccaaagttccacttcctactgtaaaagaagcattactgtcaacattacatgtaagataatctaaatggtaatcactctcattcttttcaaatgtcattattcgtgattcatttatcgtatagccattatcctcataccacttaataacaattgttccagttctgtctacgcaagcaaaacctccagctaaagaagcgatatatccgataacctcacgataggtatatcctaccggtgcagtatcaatagttattccattcaagccagatacattacagggaacgccacatccagtacttatctcttttaaaacagattctgcacttgcaggatatgtcaattcagatacatatacacctgtggtcttcatcattctgtcgtaagccgtaaatgttgtggttgcctggtcaagtgttggatgttctgcagtaaaaaagccaagtggaatatactcatactttccgcttggcagtttcaatcctatctctataggaatctctgtgttttcaaacaactcatttattctttttactgtcagttctatcttagctgcaacagccgaacctatctgtataccctcatcagatgtggaagcggtctcatagctcatctttttaaagccagcgtcaatccacttaccatttatctttaatcgcaggttaaatgtccgcgatggtgatctaatcgttgttgcaaactgctctgatacattattatacataggcttaatcctcgatcataaattcaatggctgcaatatcctctaatgtagttccatcgtatctgctgtcagaatcacatacagatatgtcttccatcttaatcatatgtacatcaacatccgtttccatgttgtacatctcatcaatctcttttacaacttcctgctctttaccttctgggaactggtaagaatctccatccatgacagcattcccattttcatctttaagcacattgttctgtattacttcagttctctgtgtaacaaaaatatctacttctcctaacaatgtcttaaggttctttgcaattgcataatttacttttacaggccaatgctttcttaagccctgtaattttttaagcattgttgcactattatcaatctgtttaatagtcattgtctttttcatgttctgctccttactgctgtattatagatacactggcacttctgtagtaatagttaccatcccctatatcacccagcacctctttactcaatgtacctctatagcttgttattgttatatcctgtccatcgtcatggaatgttattggaaagaatccggcgatgagtttgttcttaataagtgccatctcatcttccttcaatattccccaattaatagataaggtcttcttttcagcgacaacatcacccagcattgttccgtcaagcgctcgtcctgtagaagaagaccatacaatctcatcatccaccttgatggacacaggagccggaagctcctgtccgtcacatctcagtatcaattcatcacatccttgttaagttataatctcacattttcctgtctgctttgtatgctcgttaatcttatcaaccacatatttcttaagactctttccatcaagctgtatatcaaggtcccgtgtttcaagtatcttaagtatctgcttaagaatacttatagcctctgccaataactccgcactagatgtcatagctgctgccttctgtgccatatcaagaagcttaccttctggtgctacaacttcgccctgatgcctgttatcgccaatcatggcaagctgtggagtgtttggcttaacgtatccgccttgtgcaaggtatggaatactgccaaatccaacctgtggtaaatcaaacccgaaatggtcaccacctataccaggtacccagtttggaactttaaagcttagtttatttataccttttacaacagcattaattcccctctgcattcctgatagtaatccattaattaagccaatcaccatattaataggaccttttgcaatatcagcaattccgctaaatatgccatcaaaagccgtaactataccattccaggcaccttcccaatcgccagaaaaaacacccttaataaactgtataactcctttaaacacagtaattgtatcgttcattaaatcagctatggttccaacgacaactccaaccttattccctatagaatcaaatatagctataaatattggtcctaataattcagataagaatcccactacaggcgcaataaagttgttatatattgtcgtagcacatgtaaccacttcgccgacaaagtcaaggaaattagcaagtaatggctgtaaatgttcactccatactctatcaattacatctaaagcattctcccagactggctgaagcatattattccaaatgtctaagaatacatctccggtagtcttaacagccgtttttattccagtaaatatcggctctccccattcgttccatgcccctgccattgtattaaccaagccaatccatacatttgatatagattcaatggctggacttacaccttcgctccataaagaattccaagatgctttaaatgtatcaaatattgttccatttaaagataacgtctgggatgcaaaatccgtcagcattggtaatccaacagaaacaaaatttgcaagtataggatatgctgctttattccatacatccgaaaagactgtattaaagctatcaaataatccatttaatatactgccattagtgtcgacccatgttacaagataatttgtaaatggaccgttaaaataatttaacaacggcggtcctaatgcttttatatcattaaacgcatttgttaaatttttcttggctgtatctgtattctttgtaagtccatcccatatttttgacatagatggagaaaatgttgatacactccatttacgtagtttatctaattccttctttgccgtatttgcaaaatcgccaattgcagatgctgcatttgtggtatctgcctgtgtgctaggtgcaacacttattccacctgaagatgtgccacctccactagaactactgctgtccgtcggctctgaaagtttttctatctggtcaaatccggccagcgatttctctatctgctttgctgtagaagatgctgcatctcctattccacttacattatccgctgtgtctgacgctatatctccaagtcctgttatagcagaagccgaagaagagatatccgcaccagtaagcatctgtgtaaatgttgcaaatccatctgcaaccttctgcaagcctgcaagcacagtatttaagcctcgtaatataggtgtaaataatgctataaagccctttccaagagaagcctttaactgttcgaatctgagtgataatattcttgtctgattcgcccaggaatcctgtgtcttaacaaagtctcctgtggcattggatagtgcgcttgtaacatactgataacggagcattactttttcctgctctgtcatcttagccgtagtcttaccaaaaccattattaagtgcatactggtctaaattcgtctgagtcatgacaacacctaagtccttaagtgtctcggtctcaccggtccaaatagatttcagctttgtatatgcttcatttgtaccaagattgtaaaatgaagcaacatcacctgttaatccggtaacattttcagccatatcaagtgcagtctttccggtaatacccatagcatcattcatctgaccaaatacacccatatacttcttagcagacaactcagatagtccaaaatttgtcattgcattagacgcccactggtctgcctgtccacttaagtccttaaatgccgtatctacaacattctgtacttctgtaacattagagccaacttctaagcagtctttcgtaaacttagtaaaagctgctatacttaatccagcagctattttctttcccataccagaaaagatggatgttgcctgcttagccgccttattcgatgcgccagtaagctgttttgtaagctgtgagctgtcaatgccaagctccagagctatctgtcctactacatctgacatactacctcctttccggcattaaaaaaggacaccctttacttagaaaaggtatccttagcccatttttgaaatttgctccagtagtcattatactgttttggattctcaagcatttttctattgcgtctaagaatccattcgtttcttattcgtttctgttccttagtgaaattctttataatcttcggatctttctctgagcggatgcttacaatccttcccagaggtgtctccggcattattccgcacaataatgaacagaactcttcccatgacatatcattttctgtccggagtcttatgccatactgagacaggaagctgctttctatcagctcccagtcatcccatatatcataatatgtctcactctgagggtgtctctttctctccatatgttcccatagcaacctgcattattgcattgaatacttccttgtactcaggaagcggaagatccatttcttcaatcttatcagatgcatctttaccaaccaacatctcaagtcccttgatcataaatgccatctcatctttatcttctttatcttctgcttctttagccatagcctgtatacaaagaatattgttcttcctgttgtttactgtcactgtaagatcatctgttattctaatcataggaagctgattagtaattttcatcgatatatctatcactttaaaatctgtctttgccatattctatctccttatgctgcttcatgtgcaatatatgctggttttccgtcactctgtacctcccactcaagagcatctgctgccgtggaatctccgcccagacttgttacattcactacacatggtattataagctggtcaaggttagggaagattattgaaaaccaagtgttgcaatcctgcccattcttcataaacaatcctgctacataatcatttcctgcatctccataattacgcttacctccaagcgatacgctgagcgacttcgatgtcataagtcgccttacccagccttcctgatccatcggattccattcttctataccattgtcagccgaaatacttaagctctctgcatcttttacaaccgttgttgtgattgattctggtgtatcttcatcttttcttcccttaacacacacaccaaacttgattttattcacagggttgacacctttaagtgcagttgcctgtgcatcatatccagctaactttgtgttatctgtcatatagttacctgcctttcgtaataaatatctaactctataacatattcaaagataccgttgtcgtctgtatcaaccggtattggttcaggacacttcatatctgtgaataatatatgagtaccgttaattgttacatttattgtgtctctaagcatatcgaacgccgtgttcgatactctctctgtctctctgacagatttattccagtgtaccaatatgcttattctcttaatgctgtatgagctattctcgttgccccctacagcctgtatcgcatcgccttctctttccttcggatatactcctatgcttttgtcaagcttcccatccagcttaccacaatacacatgatcatttgcggctatgccaaggcttgcgatataatctcttacatcacctattcctaacatcacaaccccgcattctttttataaaactttccaaatgctttaggtgcaagattctgcttcttaccacctttcatgtagtcatcaagccatctgcctttagcattcgcatttccttcatgtttcttgcctttatcatcagtccacggtgtctgatgaaaattgtattctggatgataatacagccttctggcgtatggtgtactagacacaagatatgcttttccctgacctatatcagataaatcaacaaatgtgctttcattctgtaatgcacctgtatccctcggtataacctggctctgaacgacatctgtatgtattgcttctgctgtctgtactaatgacacctgtgctgttgccgtaagcttccttaccataggcatattaagcttaactgtagacttaacattcttcgccattacatcacatccaatcttacataattaaccgtaccatccggattacggcacttcgtacccttgtatatatgccttgttacaccgaacaccgttatatcacctttagtaataacaggaagatccggtgcaatatctcctggtatcaaagcacatccttcaagctttataagcaccttttctactgttaattctgtcttaccgctgtcctgatagttacataagccatcccatataacaggctcaagaggctctccatagacattcctgccttcttgcgttatctcaaggtgtatctctgtcttacacatgctctttaatattaaacatgggtacttcatactcacacccccagacttaaacaacacaaacctgtctgacaaagtatctggtatgtatcgcgttttacagcaattccattctgtacaagaacattccaactgctgccaaactgcatagatactccatttagagaataattctgtaagacacaattaatcatgtcctcattctcatattcaaaatcagccatctcacaacacacatctatcagtatgccctgctggaactctgtcaaattattaaatcctcttgatgttatacgattaaaagtaagcgagtcgatatgccgactcgcctgttttaatcttcgttctatctgctcatccgggataagtctatgttcactaaggtactgctctttacttgcatataccataagaccaccgcctattctgtcttatcttcctttggttcatctgctgttactttctcttcctttggcttatcttcctttgccttacctgttttctttgatctaataacctttggttcaaaggttaatccaattactgtatctgccataatgattcctccttaattatccttatgtgatacatatatcccagcggtcttattctcatatacatggccataaagattattattacgatacttgaatacatgactatcgccatcctggtcctgatctggactaaagtacttaatatactgatccatagctgttacagctgcagacttctctacacataagaagttaacattcttagccggcttagttgtcatctcgtaattttcaatctgtgttccacttggactactaacagccttataattgccctcactttcttttgtgtaataagtcttacccggctgtggtgatgtatcctttgataatgtataagctgccttagtcttttcatatccatatgaattcttaccatcatgaagggttattgatgtgtacatacgtgactgtggaactggtatgatctgagaaaatctcttaagtacttctcttgattttgttgtatccatatcgtccgcaagagaaattaatgtaggtgtgatgaataaaatacgcgattccataggaacttcatcctcatccatcttattagcacaagctcttaacgctgttattaattcagctcctgtttcaatattctcttcctttactgttatatccttagttccacagattttagcaatacgtgcggcatctgtttccggaataacctttgtttttaagaattcacttgataacttggcaaatggctgtgcaagtgtttcaccattatcaagacggtcaatccttaaatcctgtgaacgttccttatcatacttaaccgtttcccatgtaagtgaagttgaaccctttgtgtaacctgactttctgtcaaaatcaccaagtgcatccatatcaagcttcgcaatcttaatttcaccgttgttgccttttcttactgttgtttcatcaccatctaatactgaggtcttcgctccttccttatacacctcatcaagtattggaaggtatattgtagataattcgatattattcatataatcctattcctttctttactgctttggctttaatccgaataactttcttatcgcatcatcattacccggattgccatttccattgttaccaggagcaccaatctggaagccagcattgttctccatacttggcttaagtgctggtacatctttaagtacctgctcaagtgaagctttgatattatcttcagacacctttccatccacaccctttaccttgctgaaatcagccatcttaagcacatagtgaagtgtcttagcttctataccaagcgtcattgctacctttgtagctgcaagttcaatctgagcctgttcagcaaccttctgtgctgctgccacttcattctgaagattagcattagcgttctgctgctgttctgtctgctgctgcttattctgtttaaatgtcgcaatagcctgacttatctcatcttctgataatccctgctgctgaaaatagcttttaagcacagcattctctttcttggcagtcgcattatccagcattgcctgtatcttgtcataatcaacaccagccgcctgctgattattctgattaccctgctgtcctgcctgtccattgtctcttccagcgttctggtcgctgttaccatctccgccctctgcgaagagctgtaaattcataggtaatgtctttctcatcatctatctcctttcttccgtttaccgcccgtcggcatttccctaaagtttagtgccattaagttttaggcataaaaatagcacccacagcttatttgctatgcgtgcttattaactaatattaaattgtgttgcactggtgcaactttgtactattctactataatccaatcttcagcgagacaatcgttaatacttggaacccacattgaatgtgaagcatccacattttttatctgaaaatatgggttacatataaacaaatcgccttcgtttaacccccatgcttccgctgtttgcttattgcaggggattccattcggatatgctttctgatatacaacaaacattccttttccgttccaacctcttcttgctaccttattaccttttttcatggcctcaatagcaattccaaatgtcatattgtcacattttctatacgcttcattaaattgtttcttaggacaccaactttcatatccatcaggatatcttatatgatagccttcatcttctggattctcgtcacttggtatcttccatcctctgtattcattatattcgcccctactcattggctctgctgtaaccacttttactccaatataatctttcattttttagtcctctctttcttaaaattgggtataaaaataccaccaatctttcgactggtggctgttacttgttttcttttatttctgctttatcttcattattgctttctgcctttattggtcctttttccaataatgcaatcaattcatcaattgtcattcccggttttccatctaatataccatccattgaaacacctcctgcctcaatattaccctctctgtatgccaacagaatagcatttttttaaaaacaaatcaatacacttattaatattatcactatatttttcctgacactctctcatcaattcaactgctccattataatcaaaatgttcgccttttgaaatatatcgtacatctccttgatttgtcacaatggtcatagtttttattgtgtcgtgtctcataaatactccaatatcatttgctgaaaaatctgttaatccaggatggttgtgacataataccaaagacttatcttttgccgaatgcaataaatgaaacatatctgaatcagaatatacatctacctcatgccttccaccttttataaatttagtttttttatttgttattaaatctactacacatgcaacttcattactgttattttcatctctcgcaactttaagtaagtccttatgtacctcttttataaatttattattatcagaagtaaagcccttaggattaatttcatttactttatctattgcctgctccgttattataacctttttgcctctatttttctgttttaatacttcattttcccactgttcctttctagccgcatacatcttacagttgtccttatctaatgagtacttagccaacctgtcaaactgttcaaccattctgccagcatattgctgtttctggtcctgtctgtaatcttctttgaccttttccagttctttcttggtaaacttgctatccggctcttcgtcaagctctgggaagtatgttgtatgtatatctttacagtttggatgataaagccctgctgccatagcagatgacataagcggataaggaccatcagatgccttacctccactccatacatcatctataagcaccttcccaacaaatggaaggcacttaggacaggcattagcacgcttattcataataacagtgctaattccccacgactgtctcatttcaccctctccggttagatatgcacgcttattagctgtctgaatagccatcttagcataatcttttactgtgtgcctgctgccattcgcatattcaatacaattaataccagctttaagaaaatcctttgtagccatatcaactgccttctcatatgttcctgcacccgtattcgcatacacctgagcattgaatattatctgccggtatttatcctcagacattctaagcattgctttttctgccctgttaaaatctgatttcgtggctttaatcaaggcattaagttttctagtgtttagtctaaaaaaaactccctcagttcgccttctgacaaactttgggggcttatatcctctctttattgctcttaatattttctgttcctgtcgtgttccgccttcctgtctggctgcatatatcattgcatctatagaatcattaatatcactgaactctgacgaaaacgttttcttgttctgtgctttatatttctcaagagacttaagctgttctacctgccactgtgaccagttaaaccccatatctgtctcttctgctctgtggctcgcaagattgcgcatcatagaagcaatcagctcatcttctatggctctaaaggctttctctatgtcatattctgtattaagtgccataagctacctcacttgttatcaaaaactgtaaaatcgtttcaaaccccttaaaatcgtttcaaaaatcataaaatcgttatcaaaaaccataaaatcgttatcatagccatcaaactgtaaagccatctgcctgcatattaagggctggctctcccatatcggatattccctgttcggccttaagccttgcaacctcttcctgtttccattcatcatctttagtgtcaccatacaactcatcaacggatgcttcaacactcatgataccgccctgcttggctttgcttactgtctcaacctgactttcaaagctagggttcgcatattcaccaaatgtcacatcaacatcaatgtcctgtgttgttgaattattaagagtatctgtcgcctgcaatgtcatttttacaagcttcggaagaaccttctggagctgatttacaatattattcctactgtacagcgttgctttttccttctccctctgtgcttctgcattatcaagcttctttacatctattcccaatgtagaagggctcatgattccctgcaagcaaagatcaagtgccgtgatatatgtagcaagatacccttcatgtggtatttcactctgttctctttcaatcttataatttgcaccttctgccataggagacgaatactgtatataagcgttgtcaaatgaatttggcagcataacctttccatcataaggatttcgaggaagtaaattttctggtatatattcctttgttcggttatgtcttaaagcatccatccactgactccatgcttcgtccagtgcgtcaaatccatctatcttgctgtcatatatgcttttgcctctacccttgaactttgctgatttatagaacataagaggtattgacatcataaggcttttatcttcccatgttacaggtcttaaacctgcaagctccggcacagtgctgatatcacattctttgttatctcttgtgagcatatatgtaatataaccttttccatacgtctcaagcagaatgtattcttgattcttaactgtatatactgtcttaaacacaacctctttcactctgccgcgttctcttattatctctaccttgtcgccgggataaaactctattattggatactggcttaggtttgtatctatggatagtttaaatgcgccatctccaacaataagagtgtctgttattgcctgctttacaagttctgcaaaatcgttttcttctgctatcttatcccagtctgactgcctgctgccaacatctacttcgttcatatcagcaacaacaatactcgcaagcatatcaaccagcattgccggtaatcctacatgtatctttcttattgctaatccaggagagcattttgcagcccagaatcttgtcttatctccatcaatctgatcatacagctgtgacagctcctcacttacgcctctgtaccatatctgattcttaatggcattaccttcaaagtcgaagatttcctgtatattaattattcctctctgtgccggctgcacatgcaaccatgtccttattccatctcttatcttatcagccatagtattaaatatgctcacctctctcactctcctatctgttctctactccaactttgtccctgtatggtatccagccatattgcgtactgttaaccatatgatcatttccatcttccggctcacagtctttatcttccagccaactgtatacctgcagttcccctgtgtagttcgtgcatgtatctacaacataatagcttggctctttgcccttttcgtcgttaaaggacatccagccaagctgtaagttaattctatctgttatggttactttcttatacgcattgttaaatatatactggcagtcaatgtgttctctcttgtacttggcaaactctgttatcgttgcctgatcagcattatctataaacacattctttgacattccaccccattcttttctgttacgctccaggaagtctatgtaattccttactgtatcacttggagctattggtatatcaagagccgcattgttatataccttttcatccagtactatcaacttgcctttgttggttattcccataaaggacatagcaatagtatcaggactcttggttgaatatgccgtatcaagaccgcttgtatatattacaaaccattctgtctgcttgtcgtcatattctcgcttaataaatgccttagcctgttcctttgtaataacatgtctcttgcagaaattagaaaagacaagacctgtagccttgcctcttaatcccaatatcttgtttttatatatcttggtaccgggaggatagctcattttcttctgttctatcttctcaggtgtcatagatacgttatcttcaaatgtgaagaaccagtatacccagcctttaataggctcacagccattaaggtccttccatatctcttccggcacatctgccttgtacttatcgaccggtcttgcgtgattgatgtactctgaatatattggcagcgtaggcgcatccggattaagtgtacctacaaagtattcagaacgtccgaatatctctcgtatgaagtctatgttagctgtattgcactcatctacccacacacatccaaactgtgaacccaaggcattcttccacttgctggcattatcgtaaccaagaatatatattatctttgtactgctgccagttttgaatttaatatgtggaagtttattttctttatcgccattaccacagtatgccaaattagggaatatctgcagtagtcccatatctgcgttaatgatattcttctcgataacacctgtcgtattgccggctataacatgcagcttcatatctgattctgctacattcatgataaacttcacggcaactgttgttgtcttacctgatgcagtagaaccttcaaggaattctgctcttgctggtgtatctatgtaatcccaatacttatcacttagaagcatcaggctcaccccttgccttacgctgagcaagaagctctgcaagctcgttctttacagaatcattaacattagcatctattttctcaatcggattaaatcctgctctatccataatatctttagcagccatatgagccaccatatcattgtgagaatctagcaatctaatctgctttctaaatgcttttggtgcagcatactgcagattagaacgcatcatcttattgtactctctctgaaattcctcacagttctttttccactcacataatgtcttcggtgaaatgttaattgcctctgctatttttttgtccgtcatgtcccctctaaccagcaactgtaagcattttatctgttttggctttaacatattatcacctgccttttattaacatttattaacattttctgttcttgcatataaaaaggcaccagcattaagccagtgcctcatcaggggtatttaattaaggagaaattatgctttacctcatccatcttgtccagtttagatattaacacagacaaaacgaacagagcgaacaaactttaaatttttgctaaaaatctttctactgccattctgcagccatccgctgtgtggtgttttcccatctttcttgctacctgcacccaggataagccttctatgtatcttaatgttataagccgcctcattctactgttgtcaatttcatttacacacttttctatgaggttaatctgagtgtctattttctctttaatgtctatctgctgccgctgtcgcactagaagaagtgtcttcttgcgtgaatatgccggataagggaagccttctacaacaaaatgctgcttacctccatctccgcctgtaacactatccttttccgtatatccttcagcttccattttatccaattctctttgtatcttatcaatcgcggcctgtatttcctgtttctccttaactaagtcattgtactgcttaagaaggtctttaatattgttatttttcaagttgttcatcacctaccctcttctcatctgctgccagtttttccttatccaagatttccaaaatataatactgcttatctggttcagctccccactctggtctcccttttccaatccttaatctgcatattgcttttatttttttagaattctttgaatagccattacggaaaataatctcctgaatgccttcttttcttatctcttctggtactgcctctccttgcaataactcatattcgcttctatctaagaaattgtctggtggatataatggatgtatggttatggctccgaacaaattctgaaatcttgtctcatagtattcttttatatctcgatactcttctttcttttctccagaaagaatcatgtcaaaccaccttttcttgattggcaatattagcattatgaatcacctgcctttaatttatctaatgctttcatggctacttctaacattggtttgctagttccacaattcttgccagtatatgtacattctgtctctttgagatatccgcaccctatacatattgcctttgccacagcccttttcgaatcttctatagccttatttctttcctttcctttttcaagataatctgcagcttcattgacatcattattgactactttactatttaaaaatgctgttttaaacatttcagcaatctccttctcgtcaactccacataaactaggaacatttctactcatatccccaatgattcttataaagaaatcttcaaatttatcctgcataaaatgtatttcaaattcctctggcatttctattattaatttcatttttcatactccctcctaataaacatctctccatcgcaccagaagtattcttctgttggcatataattctctattatcgtctttctattgcatgtatatgttccgtctgctgccacgctgttagaacactgctcacagcatgtatattcattcaggtgcttatgtcgtcttctgctcatccggacacctctctatctttactatctcatcaagatctgattcgttgttaagctcatttatgtatactacaaggctgttgtctctggctatattaagactgctgccatctttctttgttactgtccacatatgtttattcctcctatatcatccctattgttcttagtaattcttttattagttcctctttcgacataaaggctctcttatataccgtctctattctttgtttagcataattctcgcctttcttttcagcgataatttcatatgttgcttttattaatgttgttaagtccgcttctatctctccaaagcttcttccctcaatttctacaattcctttgttacacttaatcatattgtttcctcactttctaatgactcttgattgttaaatttattgctgataacctcaacttcatgtgaccagtaattgtcaaaattaactgtatattcttcctcaaagttatgcatttgccattttgcttctgtatcagaccactcaataacaaatcgaccgtccttgctaagaatttcaacaatatcattttcccatatcagcgtgtcatccttatctgtcaatcctgtacattcgcaaattgtagattcatctacttcgattgcatatatgtttgcactccacatttcatcatcgagataatgaaatgtaagcagatttttctcgtcttcaataagcatcatacacttattctctatatacattatcgtaccagtaacccattgttcgtcttctagtaattcttgccagttcttcttttttgctttaaataaatatctactgttcatctattccacctgcctttgctatctctaacgcatttgtcacatctagttttgataatttctcaaaataaaatttaatcggccttttgttaggtattaccaaaccaaatctaacggcatttttgtatgtaacacaatctcgcattaatgtatcaggcatagcttcaagcatttgacgaaatccttctaatgttgatctacttttataatgattacagctcctacaagccggaagcatattgtcaatagtatctgaaccttgttcgctccatccgtttagtggaataacatggtctacctgcatgtttttatattccaaatcacagccgcaataagcacaatgaccgttgcatttcgcatacactaattctcttgtatgcttaggaattgcctttcgcatctatttcaccttccctttatactttttcttactcccatctctgttatacagtgcctctggcttatagaacagacaaggcttgtcctctattgtacaatacagcttatccagccctctacaatctgcctgcttttcgttaaacaatatacagtctctattcattagttgttcctccctgccttacaaaattccatcactattaatgtcgttgctactcctgctatataacatattattcctattgccatattcgacctcccattctgattttatgcggtttacagcgttttcaaatgctctaattcgttagctaatgttactgcatttatacggacagcttctattgccatgttgtcaggtgtcacatccattgtgctgtaatcctcgataaacagcgcaatcttgcggtttgcctcacatattgtttcccagcagttcataaagctttctatactctccgaagcgtcctcacattctgtatttatcgcatttgttgccattcttaatgatgttttttcagattcttctatatctttctcaaaatccggtgtttccccggaagtttttatcatttctgaggaatctgacggtttttccgtcgtatttcccataatagccgtattattctgtatattttcctgaaccgccggcatgttattgctgttttccggtaaatactccggatgattaagcacgctgtcctgccctggtatctgctcctcttccgtattctcttctaccggctggggcttaggtttctcaatcttggctttctgcaccttcttttctttcctctgcactggcttttcctgttgcactggtgcaacttctgcttttttcggatattcctctttatagatgctcgtccacgccttagccggatcttctgtatcagctctgctaagtatgtctaccacaaaatctgcaaggtcctctatgttccactctgtcttttccatgcttcgcacattagttatcgttattcttccggtattaaccttaatacttaacattagtcggccagttcccggaatacgcactgaatatatcatctctcctgatggagctaatacattcatcagctcttctgtttctatagaagactgtgcaatcttgataaatagttcaggcatatcatgcaaaagctgatacataacctgtccaagctcgttatatttttccgcctcttcctgtgtaccttccatccatacttcgatatcagatatcttattttcctcatcaatttcttttttgatatcttctatctcagacttggagaaatctgtgcttatctcttcattaatttcatcaggaagctgcagcatgattgtcagttttgcatatcccatacctttatatctatcctgcagttctgcactgtttccgcctttgctgaatctgtcgttaatatgtataaaccttgatacctgtgttttatcaagaccatagcgggcttttgcaaagtccacaacattcacatatccactatttacaagtatgtctgtatccctggcaaccttaagaagatatcctatctttacaaagctctctgcactctttacaagctctgtatctaattcctgctgccactcattaaatgtttttgtgtatagcacttcattcatgccgttttcctctctttcttagctatgtgttttttatattcttttaaaaattcctctataatctccttatccggcttagtatcatgttctccataccactgtattatcttgtcattctttaactctactgtaatatatggagtatcaggttcctttatatcccggattaccattatccagcctttccctgcattaaaatccttcagatagtgctggttatcactcccgacacagtggtgaagcattctcccttctaatactatttctttagcatctatggctggccttattactaatccttcatgcttaaatgtatatttcttaggtattttcattgatctgctctttatattcggatatttctgctgcatctcagtgatatacttctcattttttctctgctcggcttccagacgtattcgtgtatatgtttcatacaggtttcttggcttaagataaacagtattacttaagtcatctccattttcttcacgttctcgaagataatctttatattctgtaagtacctgcttgagattctcaaaatggtcatcttctaaatacttatgtgctatattccataattttgtaatgctctgaaatcttagcaaatattctagtgttgtctggctagagctcatatacattttaaataacatgtcataattctgttcttttattctgtatttatcagtaatctgtctgaacgtttcaagttcttgcaatccaatagtttccgttttcccactttcttttaagtactttaattgtgtcctagtcattcttaatatctcatgcagttcctttgcatgcttattgaccttgtttgtgctgcctctctgccatataattctcttacatatatttctaaaatcatttttaaataatgtctccagttgtggacatctcgcgaagctttccacagtctcataccgggccagatactttcgttctattctttctggtgtactgtatattgttttatacatatcttgtggaagatacttcatctggctgtcctttatgcagtcatagttgacctcaataaaatctgttacattgctaaatgccgcatttctgtctttacgccatttgtcttctgaattgtatctataatattctctacaatatccgggacgcataaatacacgctcatactctgttgttccgacatcccttgccccttctggtgttcttgttacaaacacatcatacattcttgtaatcagggttccgtctgctgccacttgatataaaaatgtcgtgaaattctggtatgtacacttggcatgccccattggataaagcaatgcactgtctccacatttaggacattcaaaagcttttaatctttccggcttgggatatgtcagtatcggttcaattccttcgtatggttctgttcttagcatataatcttctccacactggcaacaatgataatcagcatatattccatgtcttttgtaatatataatattcccctgattcactttgctttctatacgcatttgaagaattctagactcttccgggagtaattcaaataatttatctctttcctcattggcacggttcttttttcttacatcctgtaatccgtctattttatattcaatactttctaatatgtctgttggtttatcgttataacatttaacccccatctgttttgcatatttttttattgctcctgatgctttttctgttgtatacgcctcatgtatcattcttctatttggattgttccaatagctttttgtgtcggctttattttccctgtagtcataattgaacctgcctgtaccgcaatacgcttctcgatatatcagttcttttttactataaaggtctacaaccaggtaatcatcatcaagctttataatgtctgctataagagtaagcttatgtcttcctgtgggcttttctccctcgtagtctataatctgttttcttttcatttcgcgcctccaaggtaataagcctttatgatttcatacgctcttcccattccagggattcccatcttaacagaagcacctacgcctgctgccttaacaatatccttatccaccggataacaattcttaaaactccacttaagaagttctgcgatacagccctttatcgtctttccctttctgcgtaccgctacagccatatcaggatgctctgtaacctgtgcttttatataatttatccaatcctgtactatctcaaccggcttaagctcatcctcttcaaccttgatttttccaagcgccgccatgagtggattgcacaactctgatacttctccgtctatatagtcctctgcgtcagccggatcaaggccattctctcttgctatatcccttatagcctgtgtatctctctgtgcaagctgtcctgctgccgccttatttatttcttcagcactatcaaattctccaaatgtatcaaacataattacctcctattacttgcatgattcccgcatgcatttatacgaacagtaatacttactgcctttcttatatccccatgtagtcctatctatcgtaagtgtagaaatataactgccgcattttgcacaatagaatccattcttgtcattttgtttcttagctgggtgtcttcgcctttctgtccggcttatctgcttttgctgttacagtattacccaatgcagaaatacaggcttccagagacttacagtgttcatcaataacttctcctaagcggctcttaatatattcagctgcatcatctgctatatctttcatgcctgggagcttgtacagctctgtatatcctgcgtaatgacttctgtcttcgctcggttctcccttaaataaatctgctcctgtaagttcttccttgacgcggtacatatccagtaccatattcgcaccatcttcaattgcaagccctagtctgcctatctgtaacaatgtttcctttttcatattgcctcctacaaataatttttcataaataaattcatccactcctcgtggctgaataactgctcaaatctcttctgacctgctcttataagcttcaggtctgtttccctgcatttatgtaccgcctctttgcctgtcctgtgatgctcctcacaaagccataccttaagcccgtaatgctctgatatcttcctgttggccataccgtgcataatgtgatggcactctaaatcattcgatggaagcctcttaaaattattgtttttaatcattgcttctctacacaggaagcattctttaatgtcctgcattatactttccatcatttctcctttctcctcccggcatgaccgggaggactaaccatgccagataataaaactgtgatatatttttctgtgcgtgaataagtaccgtgtagatgtatttggagtaaaatgtcactcccattctgtatttatgcagctttgcaccgttatgagttatatattgtctacctctggatgctggcagatatacaattcccgctcaagctttgcgatctgccctccaagaagggtaagattagtaaccttgatgcttgtttcatccgctgttttacagggcggcatcatgtacgcggcttttcttaaccacttaagccgttccagctccttttttatctttatctcgtccatgttgcctccatcttcttaagctcatatttcatatatttgctgaactcatgctctttatcatccgaccagcttataacatgtccgcggctgacatttaagtactgctgccacaaatccgcattttttacctctttcccattagctttcgtccatccggcttttttccattgttgcggccaagcatttctacagctatttaatacatgctcgcaactagtatttatgcggatttcgcagttttcatggaagcgcattaatgcatgtattattgcctgcagtgttgcctgattctctgttacattttcaagcgtgcctttgccgtttctaatgaactctttgccattaattactatctttaagacatacatatattccgtatgtttctttattgccggacctttagctgtcgtctggatgaatacgtctaccttttgcatctctttttctccaatcccggagtcttgctgttatataaaacatgccatttactccgttgtaatacacctgtgattccagaagagaatattccggatgccaggcttgtatttctgcttcccttgcagccttatctcttacaaatgtgtctatatatttgcttacaggaacataccgcccatttccgccttttctcttagaacggaccttacgaactctgaactgtctaagccctgttgagcagttccaccgcttctcatttttctgccggtgcttgtcctttgttatgtactttgccattcctacaagaccataagcatcttcctcaagtcgctttgactgggaacgctctcccagcttccacaacttctcacatatatctctgtcaagaagcccgtccataatcacatgatgatgccagcgcacctttgcgtcaggatcatgttctgtaacatatatgtacttggctttaagcagacctaacttcttgcgtctgtaattaatccgtcggatgtaattagtcatattcttaatagcatcttcccagctagatggttcattcccctcagagtatgtaagcgtcatccatatatcttcatttgtgaagttctcaataatcagtcttgagcaatacttaatagcattcttatcgttcaggttcttctgggtttctttatcccttatccgtccttcctccggaatgtcctctttcctcgtgaactcaggatatatttctatctctaactgattacctgcacggatctccttacatgtatagacacacctgtatttggtcttcagcatgtactccatgaagacctcattcatatcttctacagatttatcaatagccgcttcataatcatagggaatgtaccttgtaccttttcttttcatgtacaccccttaattcagtttctattttcgcagacttgttaatattcattacaagcccaagaaaaaagacctttttattatttttttcttgatgtactcgaacatttctgatacaataatattgttatatttgcagagcattttatgttctaagtactagagccgctggtccaagcggctcttttttatatgcttcttagtctgaaacttcccgccggcaccttgttcttatgttccagcttatggagtctgcacatccactttgccgcgtcccttatgcgtctatcgtctaccgccgcattaatacgcttgttgtatgcaattatcaaacctatgtctctcatgttgcctccttactacggacataccccatagcacttagcccttgctcattgaggcgctgtccgtattctttcttcttattctcatccagggttgagaaatctattatcttctccccatctataatctttataactatattcactctctcacctcatggctctttatgttttatatgctacttacggtctttaggttcatgacataaagccaatactgttaaacaaataattactgttattgctactgatgtgtaattcattcaatcctccttcattttcacccaatcttctacatctttctgtgtcattctcataggagctagctttgcaccccagtattccgactctactgttacagtctcaatgttttcttcctgcatataccggagtaaatcttccggtctgccaaaattggcatattcagttcttataatcatctgcctgctcctttctttgttgtacttaataatgcaagttaaaaatctgcttgaaaccgaaaatggtaatcctgattttgaattaaaaaaatgtcgtaatgaattagacaatactttcaataaaatgtgttctcttcttttcagtgagtacagatgtatattaaagaaatgccatctgccaataccttcgatatagcaaaggccatgttgttatcttgtaaattggaatatattgcatatatgttcaataccaagactacaattattactaaatatcctatctctcacctcctcgaatagataattgcttgtgcaattgttcttttgctcctatactctaattacaggctattgccgtagccgagtaatcatgaaaggagattctttatggctgatttatcacaatccccagcagaaatttttacaccaaataatccaaatgttgtgctaacaaatataaatggttatgaagtgcctaccctagagctttctgataaaagaggctcttatatagcaattcctgctcttaataaagaactgtctgatatagccaagcaatttattaatggtcattacataactgaaattgactatgataaatttaatggcaaagttgccattattaaggcttattaccagcattagagctattagtaagaggttcttctgccattagatgaacctcttcacaataaacagatacttttatcattttttctgcctcattatgaatattaattaccttctgtcttaaccagccttctgttgattcatccgcaactcctataattgctgtattattaatctctttaccattaacaattagttttccattgtcataatcaactgtaatgctgtgtaccttattcactctctcacctcctcgaatagataatttgtgttataatcaaaacaaaaacaggaggtatttatgccaactccattcaacgaattagaactatcaacatatgaacatcttttgttaatacgaataagactcactggtatatcaaaggaatcagttcgtataaagcctagatgtaaatatctctataagttcggtcttatagataattccactaaaagcattaataaatatgttattagtgataagggtaaaatgtacctcagatacaaacgccgtagttcatttcgtttttggatacctgtcattatctcgattcttgctttgttaagcagttacgatatatacaccaatccacttatccagaaagcattgcaatcactagcacaactattgaaaaatatattgggaagttaggatgtctctctctgaatggtatccttataacttcataatgtttaatacctgataatttcattttctttatagctgatagtgcctgcataaatgtctttgttctctcttctataaatggttcataactgcgaattatatatttgtgggttttatgcttaattactctctcacctcctcgaatagataatcacttgtataaatgtctttttactcctatactctaatcactggtgttgcagcacctagttttaagaagggagttagtatcaatgaaatcttttgaacaatttctcgattctctttcacaggaagaaatttcaagaattaaagctgatgttttggctagtcacacacctgagcctgcaacagatgctattgttaatttgagctttgaaatttcacttaagctattagagaaataccatgactggctaaacaattaattggcttgtaccgtctcttattgttttcttattaattgctcttacaatgctattaggttgcattttgtaaatgcttatcgcaataaatattgcaagagcaattattactgcattttgtatgttatgcaccttctcacctccttgaatagataatgtcacatatcgtgtcattattaatcaaaaaaaatagactgaaccgactttccataatactgtgccagtttaatctttatagaatctcttgggattctttcgccacattcatacatagacaaagccgaatcacttatgcctattgctttcgcaacttcactctgtggcttatttcctcttaacactgttaacctgttgcctatttccttgggttgcaaattatcactcctttcatgccacactttgtggctcaactgtaatatatcacttgtcacacatcgtgtcaacacattttgtggaatttttcttgatttttccacaattcgtgttattatatatttaaagtaacataaggagttgaattatatgggtgattttcctaacatattcagaaaaataagagaacaaagtggacttactcaacagcaaatggctgataaacttggtgtatccagaagtgctattggaatgtatgaaaatggcgaaagagaaccaaattttgaaactttggaactaattgctgatacatttaatgttgatatgaactatttactaggtaaaaaacctactactgaggttattcccgataggtattaccttgatgatgatgccagagatatggctcagtttatgtatgagaatcctgaatacaaagttctctttgacgcttctcgcaaggtcaagaaagaagatatcgactttgttaaacagatgatagatagaatgtcaaataaaggggatgattaatattactactaatgttatttacgcagatatgcctcctacaataaaggcatacactgttaataataatgatgattcttttacaatcgtgcttaattctcggctaaaccgagaacaacatcttaaatcatatcatcatgaattaacacacattgaaaatggagattatgacagacagtgcaaagatgttaatttcgttgaaatctttgcacaccagaattaatggagaaaaattatggcattatttaaaaagcatcttaacagtgcttcaataactacatatgatgctatcatcaaagtatgcattaatgatactattgatggtaacccatcatattacgcacttcagcgaatggctacagcattcaagaaaaataagcaaatggacttagccattgcatgtttacgccgttctaacgaattatctgatgcatatgataaaccacctttattggaaaaggattatttgcgtttgattaaattcttgcaacaaaataatgaaaacgatgtggctgaattagaatttaaaaatatatgcaaacgccatcctgaatttgcagacaaacgaatttctaacttattaagaataaatgaagaattaaaaaaagctaggcaatggaaatgtgatactgtatttatatctactaacaatacttgtcctgtatgttccaaatacaataataaaaaattttctattaaaggcaacaaatatccaagacttccagcagaaattattaaaaatggagggtttgacaaaagctgcataattactttaacagtagatgttgcagattcgttataatatgtaaagagagaatataacattgacatatggaagatgtgaaatacttaactggcctgagtttaataatgaaatacatgctctgccagaacagataaaaaaacaagatgcagctatgacttacgctgggagtttctatatagataaaaagttggctacaggtcgctttgagaaatgcgaagcagatttaagacattgtacctgtcctagctttgtgaaagacgggcttccttgcaagcatatgtatctaatagcattttattctaaagctattaagataaatagattttttcactttactttataattgattgacatctgaacacgacaccagtaaactactcttgaacgtactctggtgtccttcgggtccagagtcttttttataccatggcggtattgttacctagatggttttataataaataaaagctcctgtgctggaacacaagagcctttacttgcgacttacaattaagctgtgctcaaatgatataatcgccctaagcaagccatattatatcattttgaacaccgctttttcaagtaggtgttatttttatacccatttttagagttgcaccggtgcaattcgcatatattttacagaaaggatggttaatatggctacagatattgcaaacatgaaagtagcatgtgcttatattcgtgtatctacagacaagcaagaagaactctctcctgatgcacagaagcggctcctgatagattatgctaaaaaacataatatgtctcttcttgctgaaaatatttatatagacaatggtatctctggaaaaaaagctgataaaagacctgaatttatgaaaatgattagtcttgctaaaagcaaggaacacccttttgatattattcttgtgtggaaattcagcagatttgcccgtaatcaggaagaatctattgtttataagtcattgttaaaaaagaacaatgtagaggtcgtaagtatatcagaaccactcattgacggtcctttcggaaacctcattgaaagaataattgaatggatggacgaatattattctatccgtctatctggagaagtccttagaggtatgacagaaaaagccctaagaggtggctaccaatcctctcttccacttggttaccgaatgaataaggatactggcataccttacatatatgaacctgaagctataattgtaagaaagatatataaagaatacgttgccggccacagttatttagaaattgccagagagcttaacgctcttggatataaaacaaaacgaggtgcagcctatgaaggcagaacagttgaatatatattgagcaatccattctattacggagctgtacgttggaacagacagaagcacgatgaccatactattaaggatgttggtgactggattattgttatgggtaaacacccagcaatcattgacaaagaaacatgggacgaggtacagcaccttatggctttaagaagccgtccttataaagcaagagcagctggacacatgaagcactggcttggtggaattgttaaatgctccgactgtggtgcttcacttattgccgggcttaatgctacccgctaccaatgtggtaattacaacaaaggaaaatgttctcatagtcactttatcaagactgctgcccttgaggaagctgtatatgaagcatttgaccgtgtaatgcaaaatccggatgaattgcactatgaactcaaaaaaccttcaaatgaagcgaatgcaaatgacaaggatatgattctgaatcagatctctaagcttagtgataaagaagcccggataaaacaggcttatagagatggtatagacaccatagatgagtataaagagaataaacagataatcgataatgagagaaaaaatctggaagcacagctttattctcttaaaacatctgaagctgattcctctgatgaaatgcttcagaatataacatctgttctaggcatcatcaaggatacttctaaagatacattaaccagggctaacgctattagaagcgttgtggatcattgtgtttacgataaggaaaatgacaagttagaagtgtatttctttttacaaaaatagaagggaataatcccttctatttttaattaatattatatatttcccacaatgtatctattaaaaagcaaaaattcttattcacattttttgcttgttctaatgctgttaattacaggtattgctatttcctgcattacctgttttagctcatcttgtgtagcttttctctcctgtgcttcaacaagatttactaccccgttaggaacagtgcaatcatattccatcgaatataaaataattgcctcatagaatttagagacgtccactgtttctactgcaaattggattttatgtagcaatgctacctcctttgcctgcccttcattaagcataatcattcctcctttttcatatattgtgtattattataccataattgctaattgctgcatagcttctattctctctgcagcaatttccttgccttcagctaacgtcatgcaagaacataatcttgtccacgcattataggctgcattgaatatcattatgtcatatttctgatttaatgaattaatttccattccgttagtacatctgtttacaatagatacctttgttccattaaccttaaaattcctcatcgcaattaccaccttcattttgatttttatattgtataccttaatgaagtatagtccaccatactgcgaaataatcattgctgccagcgtaggattacaattctttatattaatcggatactgaagtctcttctcataattccacatatcacatacctcccttgtattcccatggcataggtgttgccacccacatccagtaattgtcattcaccatatattccatgctgagaggtccataataatctgaatattttttcataaactgtacatatttatccttaatttctgcataatattcaatagcagctgcatcatccggatgggtatcaagataaagcatagtttcaacaagtgcaaagccaagttcataaatattcttcataatcatagctttttcatttctaatattattacaacaattcatgacctgcctcctgtaaatggtttatcaagtacaggaaacattgttccccgcataattgcccgcgaaggctcatataattcatcccaacgctgccacggtacatagcacatcgccggaacctgttgtgtcatcatcataaaataagctccatatacatgtatcactacagtatatggagcttttcacttattgttgtatgtcctgtcaggatatatgatgctgtgtttttatataacagcatctatcttaatatgacataacctcatatccatcctcagtcacatgcaccattatttcccactgtgctgagtacgaatcatcatccgtatatattgtccagttgttgccctcgtctatatatatgtctggaagtcccgcatttatcattggctcaattgtgaataccatgccaggtgccatgaccattcctgttcccttcttaattacataacttacaaatggggtttcgtgaaattcaagacctattccatgtccaccaacttctcttactactgaatatccattagcctttgcatgttcatttattgccgccgcaacatctccaagatgtccccatggcttaacctgtgcaagacctaactcaacacattcttttgcaacatccaccagcttcttatgttctggtgcaacattacctatgcagaacattcttgatgaatccgaaaaatatccgtttaatatcgttgaacagtcaacattaattatatcaccatcaagaagctggatattcttagatggtattccatgacatacctgctcattaattgaagtacacacactctttggaaatccttcgtaattaagtggtgcaggtattccacccatctcggttgttttctggtataccaaatcatctatatcctgagttgtcattcctgcatgaatattctctgcaacataatcaatcacagcaatattaatcttgctgctttctctcattcctgcaagctgttcttcattcttaataatatttcttggtggtaccttatgaaactttctcttgaaattatccaatttcctgtcaaattccatgtgacagtcacaatattttttcccactgttacaccagcaggaatcatcttttcgtaatgctttcatcactattctccattttctctattgctccatagcttccataatggctgggaggaactgtttctttcttgaaacaacattctttagtatatatgtatcctgctgtttgtcaactccaaatgccagcgacattattgtatccgcatttttacctgaacacagtacatatgagcattccgttgatatatctgtcataagaaaatatactacatcaagcccgccatcgcctgttactgtatctataaacggcacttcttttgcttttatcttctctatatcctctggtcccattgcattaacctgacccacacctacagtaacatcattaatcgcgaacttcttaaaatcctgatagaatatttctctgtctgtcttttcatcaagattacttccagctccaaacatttgtcttccgtacacttctgggtcaattcctgcaatatcagcaagctccattgccgcttctatatcatcaggtgtgcatgtaggagatttgaatattaatgtatctgatataattgctgaacacatcagtccggctatgacaggctctatattaattcctgcctcctgatacatcttataaataattgttcccgtacagccaagaggctgatttctgaaaaatacaggtgtgattgtctgtataggtcctaatctgtgatggtcaattatctcaagaatctctgtatcttcaattccattgactgcctggttcttctcattgtgatcaacaagaataaccttctttctgcctgaacgaaggagatttcttcttgaaatagttcctacataattaccattttcatcctctatagggaaatccctgaaccttttcttagtcataatctcctgaatatcttcaacataatctgttgtcttaaaacatacaattctgtctcttggtgtcataaagaatccaaccggaattgcctgattcataagcctagcaacagtatatgtatcataatcagtttcaataataatacagttatggctctttgcaatcttggcaattgtattggatacctttgcaccttcacatattataaggcattttgcctccatctctattgcacagagctgtgattcgtatctgttaccaagaattacaatatccccctcatcaatcatgctctccatcatatcaggattagccgctgcaataagcatctttcctttgtcaaatatctcgctttcatcacctgtaattactcttcccccaagtgtttcaacaatattagcaaaacttgtcttggcatttgacaatactctgttatcaaatgtttcaaaatacgatttggcaatgtcatcaattgaaacaagacctgtaagttttctgccttcagtaataggaagtgttacaacattaagtgaatccatcagtttccatgcattgcgcaccgaaatctcactgtttattccctctgtatgccttatctctatattcattacctgtggacgtacatctttaatatattccggtgcctctacaccgaatctgttcagtacaaaatgagtttcctcattaagatgccccgcccgcttaggcacataattatctgttccacttatcttattctttaaatccgcataacatattgccgaacatattgaatctgtgtcaggatttttatggcctataaccataatttccttcgctttttctttatatccttccatactctgtctgctatctccttataattatctaaacctgattgttcgttcttacattaaaataagtctcctatgttgtaccataggagaccatttacttcaattactttctgaatgttactgtttctgtttcatcagtatagccaattgttctcatatagctcttgaaatcctcaatcttattgctatatacgccatatgcatcatagcacttctggaagtattcaagtgcaagttctacattaccagactccttggcattccaagaatcaacagcatatttatgaatctgtctgtgtgctgcatcaagatccttaaactgtctgcttcctgtaatacgagtatcagtctgtgctttcatccacttaccaagcttacagccatctggattattaagctgtgtaaccttaagagattcaaatccaacagcattattatatactctccacataaggataaagtggtcaatctggaatattcttatcatatcctgagttgtaacattagagaatgatctgaacatatcacttcttgcagtatcaatatatctgccaatcttatagatatgagtacctgtagccatacagttatcagataacttatcatagctcgctgcaatactatctacctgcttggcaaattctgttgtaatagatgactgtgtatcaatatctgcgaatattccgttaacagcatcattaattgcaaccatctggttattcattctttcaatatctgaaagtgattcttcaacctttgaattaccttctgaaagcttaacagttgtctcatccatggatatcgcaagtcttccaatatcatcattgagttccctcacataattaacaatatcatcagcagattctgatgtactgcttgataactgtcttacctggtcagcaacgactgcaaaaccttttcctgcctctccagctcttgcagcctcaatagaagcattaagagctaacagattactctggcttgcaaccttcttcacaatatcaacaatctctccaatcttatgtatcttatcctggaattcctgtacctgtctgttaatatcagcaatcttttctgatgattcattaacaaccttaatactctcattcatattagctgtactgttctgtgtagcagcaagcatctcatgtgtattgtccttaatatcagccatggcaacattaatgtggttgatagattcttcaagattatgtcctgactctcccatagcaccaatagcctgagcctgtgactgcacctcatccatcatattcttgacatatgaattatcaccaatcgactccatagcttcattaagcctcattacgaaattattattaaatctcttataagtatcaacaacttcattaaacttattggccacctcaggattttcaaaaagtgttgtatcagccggtgattcacctgtatgcgatatctcaccagatattatcttatcaaatacatcaagcaatgtattcaaatcattacctgacgctgctttagctgttgttttattctttctaaacataagcgcctccatatatagatattaaattatccacactataattttctattataataccataatttctcattaaatgacaatctttttattacttttgtggaacaaaaatacagaaaaataatactataacaataaaagcagctacgacggagaatttcattgaaacatatcaaaaaatatatatcattattaattaccatgaccatcatattaatcgcaacatttccaatgacagcctgtaacaaaaataaaactgacaattccgttaaaaaaattacactgtgtgaagtaacacattcgatattctacgctccgcaatatgttgccattgaaaatggatattttgccgacgaagggcttgagcttaccgtaactaatggttttggtgctgacaaagtaatgacagccttaatatccggtgatgcagatattggattcatgggttctgaatcatcaatctatgtatatgccgaaggctctgatgactatgctgtcaactttgccggacttacacagcgtgccggcaatttccttgtcggaagagaagccaataataattttgactggtctgaacttaaaggaaaaactgtaatcggcggcagggccggtggtatgccccagatgttatttgaatatattctcaaaaagaataatattaaccctgaaacggatctcgaaatccttcagaatgttgatttcggttcaacttctgccgcatttacatctggcataggtgattacacagttgaatttgagccttctgcaactttacttgaacagcagggtgaaggccacgttatcgcctcgctcggtgtagaaagcggctatgttccttacacagcatattgtgcaaagaaaagctatatcaagaagaatcctgatgtaatccagaaattcactaacgctacacagaaggggcttgattatgtcaatacacattcatcagcagaaattgcggccatcattgcacctcagtttaaagaaaccgatattgcaacaataaccgcaattgttgaaagatataaatcacaggatacatggaaaacctctactgtattcaccgaagacagttttaatcttttacaggacattcttacgcaggctggtgagcttaaatctccagttccttacagcagccttgtaacaactgaattctctgaaaaagctctaaataagcagtaatacatttttaatatatcagcctttaagcaggtgtctgaaatgacggttatggttctcaaggaaatctatcagccatgccgtcatcctgcatacatatctgtacagaggcagcgacagaaccatcatcataacagtaagattaagtgccagtccctttaatacaaccattgcaaataatgagcgtaaaaatatcattgaaaatacaattccgcatgccattgcaacgcatacacatactcttattatatcgaatggcttacatactcttaccagtgctgccatgcccaccgtaagaagcacaagtgttgctgcagtcgctgtctgctcatgtggtgcacctgtgcaattgccatatattgttataatcgtaactacaataaaatccgtcagacctgtaggcaacgcctttagtactacatttagcaggaaatcaccctttataaggctcttattaggctgtaatgccagaaagaaagccggtacacctattgtaaatattcctaagaatgataactgggtcggatataaaggatacagattaactgatataagtgtaaatatcgtaagcagcatcgagaatatattctttgcaagaaacagcgatgctgaacgcttaatattattgacaacccttcttccttctccaacaacatccggcatctttgaaaaatcagaatccagaagaactatctgtgctgcattgctggcagcctcacttcctgatgccattgcaacactacagtcagcacattttaatgcaagtacatcattgaccccgtcacctgtcattgcgacaacattgcctgccatcttaaatgcttctataatctttttcttctgttccggaataactcttccaaaaacagtatatttctgaaccgcatctgctatatccttatccgttttaagcgtagtcgcatctatgtaatgtgtggcatcatctatccctgcccgtattgcaacctttgatgcagtcagcggattatctccagatataactttaattgcgactccctgctttttaaaatattcaaatgtttcttttgccgtttctcttatctcattctcaagtattataaaagccataggagttatcgcctttgttacagcctctcctgttatctgctcatttgccagcccaaacacgacaattctctctccattgcatgaatacttatcaataatattcctataatcaggatatgaatcaagaagcagatattcaggtgctcctaacagatatacatcttttccatatcttgcgccactgtatttattctgagaagaaaatggaaatacctggtcacactcacattcttcttcaattccataatacgaatgtattgcttccatcgttgcattgtcagagctgattgccgccactacattttttataattctctctgtttcatggtaatcagtatgctttccgtaaccatctgtgtaatccaatatttcaacatgagtaactgacatatctggtctggttattgttccagttttatcaacacacaatacattaactctcgccagtgtttctacacagttcatctcatgtacaataacattcttctttccaagtctcataacactgacaaccagtgcaacacttgcaagcagatacagtccttctggaatcattccaacaagagaggctaccattgaatctatgctgctctttattgagcccccgactgcgaatctgctctgtaaaaacagtcctgctcctataggtattataaggacaccgattgtcttaacaagcttatcaagagattgcatcatatctgttttgtgcttctttcgtcctgcctttgcttctattgcaagctttgctgcatatgcgtcaagaccaacatttgtaagcacagccttacattctcctgacacaataaaactgccggagagtaatatatccccggcattcttgacaacctcgtcagactccccagtaactaatgattcattgacacgaacaaacccatcaacaagaattgcatctgcactcagctggtttccagctgaaaatacgcacaaatctcccttaaccagagtctccgaagctacagtatgtaattgtccatctcttataaccgatgtcttaggtgcattaaccaccgtaagtttatcaagaaccttcttagctcttatctcctgaattattccaataaacatattagaaataattactggaagaaatgtcatattattatatgacctcacaaaagccagaagaacagcaaatacagcaaatatcaggttgaaatatgtaaatacattgcccgcaacaatctggccaatggtcttggattgttttccaactgacacattgaccatgccatcatttgttaactgctctacttcatctgctgttagtccttttttcacatcagtcatttgagtattttatctccttcataatgaattgcttgataaataaagctattcctcccacaatcacaagcttaacaataaacaaaacaataatattagtaagtgaaaatgcattatataactggaacattatattagaaacaaactgtgcaattatcgcataatatgcatacatataattaacctgtttctttactacgccatatacaaccataaacagcattatattaagtgcaatatcaagaaccgcagatacagccattaaaaaccacaaaatcgcaggcgaatcaatcagctgtgatacatttgaagtatataatgtaattacatcactctcagccattccgctgttaaacatatccgagatgaatttttctaatccattagctgatattgcctgtgcatatacaaaaaatgtaaacattgacaatgcataagtaataacggtatctccaattgcaagacccgttcctgccataagcacgtcccctgttctgttatatctgtcagtcatcatctttgccgtaaaccatcttgcaataccaaaccctgctgcaagcagaatattatatataaccacatatgcattggtattatacgtaaatgactgatcaacattaggtataagcgaaagaacactcatcaaaagctgtgaaaacataaacccaaatacaacatacgaaagaacacctaatgccaaaggtataaatcttcccttccatctcttaattaccaacacaagaagaactatcagaacagatataacaagtattgcgcctgctgatatcatactgacagttgcattactcactgtcttgtcataattaatatttaaattctccataaaacctccagattatattatcaaaaaaaggcggtccaatattaattgtgaccgcccccataatcctattgtgttacaatatatctttctatatataatataaaaaaggcacactgaaaaacaaccgattataattttgttacgttagtagcctgaggaccctttgcgccatctgttacatcaaactcaacctgagcgccttcctctaaagacttgaagccttccatgttaagtccagagtaatgtacaaatacatcctttcctgactcatcactgataaagccgtaacccttctggttgttgaaccatttaactgtacccttcatttcaagtacctccaaaaaaaatcttgatgtttgaaacaccttactaatattaccatttcaggtacccgctgtcaattaaagatagcacatttactgttgttgtgcgtttttcttactctgttgctttactgtaaaagttgtacggctgagttcaactttatcatcgcccttctgtgcaacaacaactacatcgtccttctttacattaataccattaactcttaaaagacggtcactcaccttttccgtggtatattctttcccgttaatcagaacacaactgtaatcgttaaaactgctgccctcaataaacaccgtatcattataattatagacatctgttatctcaatatcatcaatacccatcttaagatttgtagcctcatatggtgtttctccaccataaatttcctttttaccatacagaatgtcatattccagaattttgagattcttcaaatactcatcttctggaagtttctgctttgactgatgatatttcatgatatatccctcagatataccaagtctttgcattacatacgcagacaactgatatgcctgaatattcttttcctgtctgtccatatcaaagttactccagattacatactgtgtctggaatttatctccattagtaagcatttcatctgtaaaatcaaatgtaggtaaatgatctccataaagcacaagtacagtttcttcatctctctctgataaagactgtataagctcacctatgaacttatccatctcatgaatctggtttacataatattcaaatgatgtctgctgttctgcaactggaaagttagtcactttaatctctggtgtgtatccttccattggtgtagatggataatcaccatgtccctgtacagatattgtaaacacatagtcagttccagctgttgaatcaagtgccttagtaatctctcctgtaagaatataatccttagcccatcccataggcgtttcttcaaacccatccatatattcaattgaagtaaatgtttcatatcccagatgtgaaaacaccagatttctatcatagaatgttccatcattattgtgtattgcatgagttgaataaccaagtttcttaaggtcataggccatagactcacataccttggatttcataattgttctatacgggtattcacctggtccaaaatcatcaatattaattcctgtctgtacttcaaactctgtattacatgttcctgctccaaaacatggaaccgagagatatcctgaagaacattctgatataagtttttgataattaggcagcggattctctgataaagttattccttttacatgtgtaggatcaaaaaaagactccagttggacaaatataatattaggagtcttttcactcgcttcaacatcaacattatcaagatcattcttaagtgaatccatatattcttcagaataatctcctgatttcttaattccccggtcaagcacactgctaacaaagcagtgactgaatccatatttcttatatgcctgggcgagattaccaaagtgaccttcaacagctcctgtaaacagaagggtaattcccattccatatgctgcaagaaatacaagtatcatctgtactgctgcatatgcaacaaactttgttttcttaattgtcacctcaagctttggagctttccgccacaaaaaaacaagtcctgcaataaccgctataaccagcaatgcaataagaataatctgtataacactcacatataatcccgcaacctttatagcatcttttataagataaaaatccatcgccgtaaatggcgtttttcttgaagaaagtattataaaattagtaagtgccaatccaatccaaaaagcagaaaccacactatacacaaacattcttctcctaaaaaataatgcaagtgccatgcttgtcattattataagtgtattgtatataaaaataattggatgcataaatggaaatgcaagtcccattattcctcttctgttaaagcattcaactattagttcaagaacaatagaataaactgctgtgtgaaccagatcataggtccatatcttctgtacaaaagctttaaccctgttcataatgattatacgcccctttagtgctaattctttttaatagtctccaatacatctcttgttttattttttaatttcatgctggctgttctggatataagcaaagcagaaccatatcttctggcctcatctatctttccacaatggattccaatgcttgtgagcagatatgttatcgtattctcgtccattcccgctattggaggatattcagtctctcttgcctgtttaaaacctctgtatgcatcttccagatactctttttcatatctctcatacatacttatacgttcttgtgctgctccattagcctttgcctcttgtatctccccacgatatatccacgccagctttaagcaaagatatgcactctcacttatcttgccacctgtcaccatctctgtaagcatcgccatcttgcatcgtttcacagctctctcgtagctgtaagtttctgtttccggctcctttgcagtaaaccttgaagatacattgtcccttacagcctgcctctgttttgcagtatgatgtccaaacagacgtatactcgctgcatagccacaatgcggacacattattatatcatatttacatgtatcaatcccttcatatagaggctttaatatatcatctgtcccaataaatcttgcttttccggttcttatctgctttgttttaaattccttgccacacacatcacatttgattgtcttatcgaaaatataatctgtttccttcttttgtccaataccttccataaggataacctcactatttctgtaatttgaatgaactcttaagtgaaactatcctgttaaatataggcttacccggttctgaatctttattatcaacacagaaatagccatttcttacaaactggaacttatcttcacttacagatttcataagctctggttcaagatagcactctgtaagaacagtcttagagttcggattgatattcatagaaccatcttcttcgttgtaaacacccttttcttcatctacaatattctcgtataatctgacttctgccttgcagccttctgtagcagaaacccagtgtattgttcccttaaccttacggcctgtgaaatttccacccttagtctcaggatcataagtacaatgtacttctataaccttcccattctcatccttgacaaagtcagtacatgtaacaaaatatgcattcataagacgtacctcgttgccagggaaaagtctgaaatatttcttaggaggctcttccatgaaatcctctctctcaatataaagttcctttgtaaatggaacttttcttgttcccatctctggattttcctgattattagccacttccatatattcaacctggccttcaggataattatcaatgacaagcttaacaggatcaagaacagccatcattctcttaaccttaagctttaaatcttctcttatacaatattcaagcattggatattcaactgaaccctgtgccttagtaacaccaacaagctcaacgaacatcttaatagcttcaggagtaaatcctcttcttcttaaagctgcaatagatacaagtcttggatcatcccatccgtcaacaattccatcttctacaagcttcttaatatatctcttacctgttacaacattagtaagatataactttgcaaattcaatctgcttaggattctcctctggagatgtcttatatcctgtctcaatcacaacccagtcataaagaggtctgtggtcctcaaactcaagtgtacatatagaatgtgtaattccctctactgcatcctcaataggatgtgcaaaatcatacataggatatatgcaccactggtctcctgttctgtggtgtgtcatatgtgcaactctgtaaataacaggatctctcatattaatattaggagatgccatatcaatcttagctcttaaaaccttcgttccgtctgcatattttccttccttcatctcctcaaaaagctgaagattctcttctacagaacggtttctgtaaggactttccttacccggttcagtaagagttcctctgtactgtctaatctcctcagcagataaatcatctacataagcttttcccttcttgataagctttacagctgcttcatacatctgtgggaaataatctgatgcaaaaagaacatctccgttccactctgctccaagccattcaacatctgccttaatagagtctacgaattcaaccttttccttagtaggattagtatcatcaaatctcatattaaactgtccgccatattcctttgcaagcccataatttaataatatagacttggcatgtccaatatgaagatatccattaggttctggcggaaatcttgtaatgaccttcttgcaatggccactctcaatatccttatctataatctgctcaataaagttcttagaaagagcttcgttttccatggtattcctccttgttttcgtatttaaaaggtaaagattattgtaccctaaattcttacatagttcaaccagttgtttaattatactggtctttattcattataatatcatacagcatctccacagtttctcttatctgctttccctgctcattaagcgtaatgtctgcatatttcttataaagtgcggccctgtcagcatatatctcttccacagttgtctttccattagacacaaccccacgttctttaagacttccaagtctctcctcaagtgattctggtggaagttcaagataaaccacagtaccaatatccttaaaatgttccattgcctcttttccatatacagcactcccacctgttgcaataaccgtgtggtgtggactgatggaacaattcacttcattttcaatctgtatgaatcctgcatctccgtgcttttcaattatcctttcaagagtcattccctctctttgctgaataacaagatctgaatcaatgaatccaaatcctatcttcttggcaagcactactccaagtgaactttttccgcttcccggcatgcctataagtataatattattcatgtgtacctccatacgcctgagatttatcttgtacagcagtcatacatttccttaagctcatcaactgtaaatgtataatgtgaattacagaagtgacagttaacctcaattggctcaccatcatcaatcatcttctgtatttctttttttcctacactgataacagctttgctcactctgtccttagaacagttacagtaaaactttgttggaatagtgtcaagaatctcaagctccatatccccaagaatatgttccagaatctgttcaggagtcattccttcctccagcatggctgtaacagacttaatctccttaattctagcctcaagcttatctataaattcatccgttgctcccggcataagctggataataaatcctccagcctgctcaacagtattatccttattcataagaacgccaagtcctacagaagatggaacctgctcactgttagcaaaataatacgtaaggtcatctgcaatctcacttgtaataagaatagtatcaccgacatatggctctttaagtccaatatccttaattacacttaatacaccaattcctaccgcatctgcaatatcaagctttccatccttaagtggaagcataacctgtggattgccaacaaatcccttaacctcccccttaggattagctgtaacagtcatacttccgattggaccattgcccttaatctgtacagtaagaatatccgcatcattcttcatcattgcgcccatcatcgcaccacctgtaagaagtcttccaagtgcaacagttgcgataggactcatgttatgtctctcttttgcttcttcaacaagccctttcgttgtagcagcaaatgctcttacctgtccacctgctgctgtggctctaacaatataatcacccataattatctccttattatttctcaatcacaaaatataatctttccgacttatcatcaggtatatccttagtaaatgcattatacacatttttcacggtaagtccagccttattaactgcacctgtaacctcatctatagtaaagccatgctgatagtgctgttcttcaaatctgtcaaatgtaccatcctcattcttaacaaacacagcaagctcatattcattattgcgttctttctcatcataatagttgtcccatataaatgcggaatcttccctgttctcagcatatgtattctcagcaagtatatccctgaagaaatgtattgtctttaaatcaaatataaatacaccgccttttttaaggttctcactaacacatgcaaatacactttcaaggtcaggaacagatgtaatataattcatggaatcccctatacttatcataccgtctacttcataaggcacttcaaaatccctcatatcctgacatgtatatataacctgcgaaccctcttcaaatgttttctcagaagctatagacagcatatcctcagacatatcaagtccaacacagtcatagccttccttagcaagcattcttgtaacagttcctgttccacagcccaattcaagcactgatgaatcacctgacacaccattttccttaaggagagcaatcatgtactgcccccattcctcatatggaatattatccatatactcatcataaacatatgcaaagcctgtatatgcatccattataattacctcttatcattcctgtacttaacattaaaatgacctgccattatctggcaggtcttagtgtttaaaagctatgcattctttccacagcactgcttatatttctttccgcttccgcatgggcatggatcatttcttccgattttcttgcccttaacaacagttccagaaagcttctgcttcttgtaaaggtcttttcttgtctgctcatcaagaaggttatcccactgtggcaattcataaagccagtcagccttgcagcctaccatgttgtaataaagtttttccttgtcataatcaagactaacttctgtattctcatccatagtttcaattggattaggagtctttaagctgtcattgataccatcaaggaatcctgtcataagaagtacttctactccaaacttctctgctaattccttaacagttcctttaactactgtatcagaatctgcgagaatctgctcataaatagccttctcctgattaaaatatgaaccccagaattctgaagcgttcttctgatccatctctgtctcgtatgcgagttttctccatgtttctaataatgccatgtctgattgttacctttcaaaatatttattaattatgtgtactggttgtatgtataaccagatgagtatgaatacagtccattagatgtataagaattcttagtagataattctgataactgtgatactgcattaccatatatagttgaagccttggcagatattgtctgtccaaatgagccggaatccttgaataccgacttaaccacagccatatctgaagcctttaacttatcctcgtctaccgtcagcttattatctgagccgacagatataccaatcttcttaagaagatcagcattagcccttgtataattcaccatattaaatgcactgttaagcacatatctgcttgaagaatctgctgtagatgatactaaagaattataatccttaacaaatgaagatactgcctttgcaatcttatcagtatcatattctttagctgtattgccatctttatctgtcttatcaactttagaccacagagagtacttcttaagttctgatgctgaatccacaagtgatgctgcgttgtctctatttaccgtcgcattattcttctgtatatcaatactgtgtaccttaccggtattcttattggcagtcgcaccattcgttgattcagaagcctgattgctgtaatacttcctcatcagtttgctataagagccattctttattgaattataagttgtaaaatcaatgccatatgacaatgatgttccactagacgaattattaagtcctgcgaacaatgctgatattgtactggcattataagcattaattgacatatgcatacctccttgtctattgattctgttttctaatagttacatcggcctccatgcctcatttaattataacattttttatctgttacgcaacatttttataaataacttgagcggcatgccaatgtaatgtatattattaagtatctgacattggaggtcttattcatgaaacgattaaaacgatttgctgcattaactgcagtcatactctggggcataatgataatcgccactttaatacttgcattcatagacaatgaggcatgtcataaagtatttacaggtctgctcttcacagacattgtatttcctgttgtaatatatgcaatgacacttgtatacaagattctttcaggaaggaataagcagtaattttactgccttccttccataatcttaattgtagcgcttgttccaagcctgtcagctccggcatctatcatggcagctgctgtgttgtaatctcttattccgcctgccgctttaaccttacactttccttccacatgggctttcataagtgcaacatcacttattgttgcacctcctgtagagaatcctgttgaagtcttgacataatcagctcctgccttaacagacagttcgcacgccttaatcttctcctcatcagtcagaagacagttctcgaatataacctttaaaacttttcctgcacatgcatcccttactgccttaatatcctcatacacagcatcatattgacctgctttaagaagtcctacaggaataaccatatcaatttcatccgcaccatcttctacggctttcttagtctcataagcctttacgtctgtactcatagctcccagcggaaatccaacaacaacacatgtcttaacattacttccagaaagacattcctttgcaaatgctgtatacattccattaacacatactgatgcaaaatcatacttttttgcttcttcacataatgtacggatatcatccttagtcgcttccggctttaagttagtgtggtcaaaatatttattaaacttcatatattcctccttgttttgcgaaacaaaatccatgtgcttattgtaagcacattcccctcaggtgaagagagggatttacctccaattacctataaaaagaccgtatctgcaaaactgttgtactgcagatacggtaatgttaaatgttattatttagaaaatttactctttctgtggataatctcatgtcttccaggaccattagataccattgtgataggggcttcaatttcctgctcaatagcctcaatatagttacggcactcgacaggaagctcttcatagttagtaattcctctgatatctgacttccagcctggcatagtctttaataccggcttagccttctcaagctgtggagtagttgggaaatccttagtaatctttccatctatctcatatccaacgcacattggaatctcatcaagatatccaagtacatcaagaactgtaagagcaacctctgttgttccctgcattcttacaccataacgtgtagcaactgcatcgaaccatcccattcttctaggacgtcctgtagtagctccgaattcaccaccgtctccacctctgcgtctgagttcatctgcctcatcaccaaagatttcgcttacaaatgctccggcaccaactgctgaagaatatgccttaacaactgtaacaacatctgtaattgatgcagccggaataccagcaccaatagcaccataaggagctaatgttgatgatgaagttaccattggatatataccatggtcagtatccttaagagaacctaactgaccctcaagtaaaatcttctttccgtctttaagtgcctgatgtaaaaatgctgatgtatcacatacatatggttcaaccatctctttatattccataagagtattaaatatctcttcttcattaagaagtggctgatgatagagatgctcaagcataacattctttaatgtacatacattggcaatcttttccttaagttcctgctcgtctccgaataattcattaacctgaaaaccaatctttgcatacttatctgaatagaatggagcaatacctgacttggtagaaccaaatgatttaccagcaagtcttgcttcttcatatgtatcaaatgcaacatgatatggcataagaatctgtgccctgtctgatacaagaatcttaggcattggtacattacggtctgtaaggctctttaattccttaacaagatatggaatattaagagctacgccgttgccaatgacacttgttgtatggttatagaaaactcccgaaggtaaaagatgaagcgcgaactttccataatcattaataatagtatgtcccgcattagctcctccctggaatcttacgatgatgtctgattcttcggcaagcatatcagtaatcttaccctttccttcatcaccccagttagcacctacaatagcttttaccatagcgtcctccaatctgttttaaaaaacacaaacattaaattaagctattgacgggaattgaacccgtgacctcttcattaccaatgaagtgctctacccctgagctacaatagcatgtgtcttaacacacctattcataatattataggttggttattttgtcaactttattccttatcctttgtatagcattatctatagattttggcggcttatcaagcatctgcgcaatagctatataatctttgccagacatatataattccagcacatttttctcaaaatcacttaacacactgtataatttatcttctaaactttcagcattttcctgatcaataaaaagtctttccggattctgttccttatcagactttagtacatccaccagctttacctgagaatcatcttctggattgaccggctcatcaaaagaaacatatgtattaagtggtgtattcttctttctgttagaagctgtaaccgcattaagaatctgcctgtttatgcacattcctgcaaatgtcatgaaagatgcatcctttttcttatcatagtcacggacagccttatagaggcctatcattccctcctggattaaatcatcactgtctcctccggcaagaaacatggcttttgctttctttcgcactatatacttatatctttcaaatatgtactcaattgcctgctcatcacctgccctgtacatatcaataagctcttcatcaggatactcttccatatgtttcataaaaaactccctaattaagtctctgacggactatttcgtatgcaagaacacctgctgcaactgaggcatttaaggaatcaatatcacccttcataggaattgatgcgatgaaatcacatttgtccttaacaagacggcttactccattgccctcattacctataacaaggccgataggtcctttgagattaagattatacattgtctccccgcccatatcagcgcatacaaaccagagtccctgcttcttaagttcctcgattgtctgtgaaatattagtaaccttagctacaggtgtgtaattaatcgcgcctgctgatgtcttggctacagttgctgtaagtccgacagctcttctcttaggaataataactccatgtgcacctgcaaggttggcagttcttataatagcaccaagattgtgaggatcctctatctcatcaagaatgaatataaatggatcttctcccttttccttagctgctgcaagtatatcctcaacctctgcatattcataagctgcgccaatggcaacaactccctgatgatgtcctgttcctgcaagtctgtcgagtctttccttatcaacataattgataattgcatctgttttctttgcttctctgacaatactctttattggtccatcctgacagccgtcaagaataaaaagcttatcaatagttttaccagagcggaatgcctctaatacagcatttcttccctgaaatgttaattcattgtatctcatatatttctccttaatattaacaaagcagaatccagttatccattacagatatggattctgctttgccggctctactttaactcaaggctttccagtcctgctttaaccagttccatcatccgctcatactgcccgctaagatacagatatcccataagagcctcaaaacccgttgctcttctgtaatctccaatgcttgcattcttggcagatgtgtatgactttgcattacgtcctctcttatacacagcttcctcatgttcactgagcattggctctattacacctatcatggcagattgggattcagccttaacaatactgctcgttttcttattaagcttattaacctgcatatttccctgttctataacccatgtcttaatgacaaggtcatatatgctgtccccgatatatgcaagaacaaggggtgataactgcgaaggctctgtatgcttcatatccagaccttcatatatgcattttacaaggtctttatctaggctctgctccatcttacgccctctcttgtatccttaagaacaattccctttgctaataactcatctcgaatttcatcagctctcgcaaaattcttatcttttctcgcctgctgtctctcggcaataagtgcctcgatatcctcatcaagcatttcttccttcttgtctgtcttaagtccaagaatatctgtgagagttgtaatcttcttcataagagtatcgatgtattccttggaattatctgagcttgaattagagttagcaagctttacaagttcaaatatagctgatattgcgtctgctgtattgaaatcatcgtccattgaatcttcgaatttcttataaatgtcatctatagaagttattatcttcttctcatcctctgtcattggaacatctttggcattctctgacagatgtcttaaattatcaactgcagttaagattctgtctaatccgttctttgctgattccataaggtcatggctgaaattaacaggattgcggtaatgtgcgcttaacatgaagaatcttaacacttcaaggtcatattccctgcttatatctcttactgtaaagaaattgcctaaagacttagacatcttcttgttatcaatattaagaaatgcattgtgcatccagtacttagagaatggtactccattagctgcctctgactgtgcaatctcattctcatggtgagggaatattaaatcctctccacctgcatggatatcgatttcgtcagcaaggtacttcttagacataacagagcattcaatatgccaacccggtcttccatcgctccaaggtgatggccaagatggctctccttctttcttaggcttccagagaacgaaatcaagtgggtcttccttctcatcctcacctgtaaccttaaggctgtgtgcctcatctctgtgtcctgcctccaagtcgtcaatattcttcttagataactttccgtattctgcgaactttcttgttctgtagtatacagttccattgacttcataagcataacccttgtcaataagagtctgtatcatatcaatcattccgccgatttcctgagttgcaagaggatgtgttgttgcaggcttaatattcatgccctccatatccttcttacattcagcaatgtatcttgttgaaatctcctcagcagatacaccttcttcattagctttcttaataatcttgtcgtctacatctgtaaagttagatacataattaacatcatatcccttatactcaagatatcttcttactgtatcaaatacaatcataggtcttgcgttaccaatatgaataaggttgtatacagtaggtccgcagacatacattttaaccttaccttcttctaatggcttaaactcttcttttcttctggataaagtattataaatcctcatgtcagatttcctttcataatcacactttagttatcatcatacgagctgcggctttcattgacgctgttctcaaggtgtgcaagtctcttcttaagtcttgcgttctcctgctttaagttctcgatatcctgcataacaggatctggaagatgtatctggtctaaatcatcaaacagtcttacgctgtcctgaataacaactcttcctggaacaccaaccactgtagaattcgctggcacatcctttaatacaacagaaccagcaccaatcttgcagttatcacctatggtaactgagccaagaatctttgctcctgctcctaccataatattatttcccagagtaggatgtctcttcccctgttccttgcctgttcctccaagtgtaacgccctgataaagtgttacattgttaccgataatagctgtctctccgataacaactccatgtccatggtcaataaaaagtccttcgccaatctgcgctcccggatgtatctcaattccagtctgtcttgcagttttctgtgaaatctttctcgccttgtaatattcgcccttaagatataacttatgggcttttctatatttaagtattgccttaaaactaggataaagatatacctctttatccgacttaatagcagggtctctgtcctttattaccgctatttcctgctttacataatctctatatttcataatctgttaatcctgacttttctattcttaattatattatatgaattaaagctgcgaatgtattgtcagttctatttgttctgacatcccatgcagccaccacagtcagatctacagtttgtcatatcagccgcaccgtatatataattagaaacagaattaagtgagcatattgcctgtgaagaaataccctctccacttccggtaaatccaagtccttcttctgtagtagccttaacattgactctgtcaacatcaatctttaaagcatctgcgatattctttctcatatcatcaatatatgggcgcatcttaggcttttgtgcaataatagtagcatcaatattttctataatataattagcctcatctatcttctttccaacctcttccagaagcttgatacttgatatccccttgtatctgtcatctgtatccgggaaatgctttcctatatctccaagtgcagccgcacccagtaatgcatccataatggcatgaagaagcacatctgcatcagagtgtccaagcagacctaattcatatggaatctcaactccgcccatgataagcttacggtctttaaccagtttatgaacatcatatcccattccaactctcatatagctcctccttaatcttgattgcaacattaattgtttacctagtccatataagtaaagcacattttagctggattatcaagtgaaattgacaccagctcattttaccttcttatatccaccagccgcctcaatatccaccacttcaaacacagtcagcacatccccatgcaccttgaatctgatatcatagccagcaaatgttaccccataagcccttgtttcgtctgtatcataagctggtcttgggtcctgctctaatattttaaccgctgctgtctgtttgttttccggcattattgcaagcaggtctgatggaaatatcactttaagatttctgttataagtgactgccgtaaatccttcttttgcctctgggtgtgagtctgtgaattttacatacggcttgatatcgtatatcggcgtgccatcaaccatatccacccctgaaacgaatagtaccggtcctttatctgccgtatattctatgtgttctaatttcacacatgacagcccaatatcattcggtctgaacggcgaccttgttgcaaacactcccattcgtactttccctccaagtcttggaggagttaccgttgccgctatagttttcttctgcgacttggaaaactgccataaaacccatatatgtgaaaaatcctccaatcccctgaaagcatctggctgtctgtattccggttcaaatgttatgacaccttttaattcctctatcaatccactctgtcttggaatcccaaattttgttggaaaatctgttgaaatgtgacctattatgttcattttacacctccggattatcactttttttattgacctgccccataaaaagaactaatattattttattatagaaaaatatgaggtctttagtcacaatgaaaatcaataatcttattgttaaaatatttttgggtatatatcttgtaataattatatctggaattgtcatctttgaaaacattggtttcgctggcggcggtcttgaaaaaagcattcacactgccagcaattctgaaacccagccagtaactgttaaagatgtaagttcagaaactgtgtctaagacaacgcctgctgtaacagttaaagaaactgcttcttctcaggatgtaacaaaacaggaatccaccgtcgtgactgaaactgaggcaacaactgtagcatctgaaacatcctgtgaatcctccgagccagaaaccgttcagactgaagtccaaagcacacagcctgaaacagccgcccagccatcgtatacatttgcaaatggacgcataaccaatacatctgctcttaaaagttaccgtgtgacaggtgcttcctatgtcaatatgcataaagacaaaaacggcagccactcctttgcagttgtgccaggagggactaccggttctatattatctgttggtgcttattacacccttattgattataatggtacaagcggttatgtatacaattcataccttgaagtgtattaaaattaaaacaatacaaagctgagtgcaataactgctataccaagaattattctgtacacaccgaacaccttgaaatcatgcttcttgatgtatcccataaggaacttgattacgaatactgatacaaagaacgcaacaaggcagcctacaatgaggacaacccactctgttcctgtcatagccattcccacagcagcatatttagcaatctttaaaagacttgctccgaacattacaggtactgcaaggaaaaatgtaaattcagccgcaacgcttcttgatactccgattatgagtgctccgataattgttgcacctgatcttgatgtacctggaaatactgctgctataagctggaacagacctattattattgctgccttataagttatctcacctatacttctgattaccggtctgcagcctttctttgcattctccacaattatgaaaactataccgactacgataagtgcaatagcaacagggagtggatgatagaataattcatctatcttatcatcgaaaatcaatccgacaatcgctgccggaatacaagctattataatcttaatccacattgcaagtgcgccatctttccaggctgctttcttaccactattagtcttcttcatatagaaaggccacaatttattccagaataatataactacggccattattgctccaagctggattactacctggaacatcttataaaaatctgcggatacattaagtttgactacctggtcaagcagaatcatatgccctgtactgcttataggcagccattctgtaattccttcgactataccgaaaagaattgcctttaaaatctctagtaacatgactatctccttaatatttaattattatgcttcattcttaccagtcgcctctgcaagttctctcttatatcttgcaagctgcccctcagtattcattatccttctgctctgttcagatattgtctggttaagctgttctattgtttctgtctggtcatctttctttcctgcaacaacaaccattccaagacacacaataacaaaaagccctacaccagccatggtacatatactctgtcctatgaatataaatattccggttccaataagaataagtaatccagttattccaagaatagctatctttagtctgtctgatttcttcaaagcatttcccttctttcctgaagcatttgctttgtattatataccacttatacctttctgccaagactaatacctaagctttcagactgtcttataagttcattatctgcattaaccatctttgttttacctgcatcctcatctgatattgcaccctcagccattgcaattatagtaaatttcttaccctgctttttacgctttctgattgtattcaacacctcatcaacattatatggaatttcaggtataagtatgatatctgccccttttaaccacatcttttctttggcaataattttattgtcacaccggtgtgtaaaatccactatcggagttatgtaaaatataagtaaagcaaaggtaaatgtaattgacacattttctacataaaggtacaatcaagcaggcagtaaggaatatggtcagaatccataacagctcactctactgtatgccgacacgttttttatattatgccactgtaatcagcagcagctttagtcttgaatacgctatacattcatccttaacttaagtatggcactgtgcacgggaaggcttaagaaatggtttaagcggcaagtcaggatatttactgcactataaattttcacatcacctggtgagaggtggtcaaggaggaaaacatgaaacaattaaaaagaaagatatttgcatttctggttgctgcatgcttaatctgcatgaatatcgtaccagctttcgcagatacaacaacagacgctacagctcctgctgcagccgatgtaagacaggaagcccagcttactgcttcttaccttatgaacagtattgatttctctacatatgctgataccggcgtattctatggagtttcaagagacctgttccttgcaatccgttcaggatatgactgctctaaccagcttgctgcatatcttgaattcgttaagaataacattagcgaagatggaactttaaacatcaataacggatacaatgctaagaattattatatttcaagctatacatatcttataatgattctttctgcatcaggaattgatgctacggatttcaacggaatcaatgttgtcagtaaatttgataaaattatcaacacattttcagttgatgacttaagcaataacagcatgaatatctatcacattggttcagtatattcagtagttaatgcttacagagacaccatcagtaactcagacaaagtattagctgatatcaaatcagctctccttgcagcttgtactgctgatggcaatggtattgacaactggggaaactcaactgatagtaatggatttgtatttccattctttgcatcattatatgatacagattctgatgtaaagaaagctgttgacagtgctgcagactattctaagcagactatattaacagatggcacatcaggatatagtgttcaatatccaacacctggcaacactaattcgtctggtatgaaccttgcattctttgctcagtacaacaatccggatgttaatactgctgttttatataattcaattgttaataagttcaaatcagcttcaggtaatggtgcttatattaatacatacactggtcaggaagacttcaaatcagcaacacctgatgcattacagggtatcatcacttacctctatgctcttgagggtaaaactaacccatttgatataaccgctgatgttaaggctattgcagacgcaaagaacgctcctgtagaagagccttctactgagccttctactgagccttctactgagccagccacagaaccttctaccggcaatgaagtatcacctgcaactggtgatgttaatgtttacatgtacctgctcttagctgcttgtgctgctacattcgcatgtgtaactgtttacaataaaaaaagtgcccgctaataactgcagacacacagctctgccgccggaatcctcgcgatatccggcggcagtttttatatattggtaatccacaccatagtataagcttttttgaagtggtaatctaaaagtagacaccaacccaattattgtagacattatttatatataagagtaccattttttataaggtagtcacttatacaataatggaatcatggaggtgtcacatgaagcacagtttagaggaaagaatggatataggacgacgtatgtatttacacgagattacttataaagaggctatggagatttatggtcttagtgaatcctgtgcacataaatacatgacagattataagtatcagatcagtatgctcataagctatgtaaaatagcgggcatagcaagtgtttccaagcattatcgatacaaaaagccaggagatccttatcgcatttatccaaatcttctgctgacaggattagatataacaggacctttacagtgtgttgtaagtgatatgaccgcatttcatttaaagggaagttattatgaactaacactttttatggatttatggaacaatgaaatactttcatattcactttcatcacgaaaaggtgatcgtatgacatatattcacaggttagcataatatatatgtctattttaaaaaataagttaaaaaaagctgtgttacaatcattaacacagcttcaatactcccaattattttaattgtctttgtggtaatctaatagaaataccaaaccatatcacattacattggcgttctgacctctattaagttaccatctaaatcatagaatctaaccactttttgcccccagctgtaaatcataagttggttaacatattcaacttttggatatagcttctctagcttctcgacaaaagcttctatgtctttctcttcaaaatataactcaattgaattatttttgtgaacaatatctttattcacaaattcacaccatattttttcatcctgcagcacaagcccttctgtcataattacatttccatcactatcaagtaatacttcaagtccaaacaaatcatgataaaattttttggctaattctatatcattaacaacaatcaaaatatttttcagtttcatagcttatacctcaaatagttatcactctcaattcgacaaacagaaatttgtctttctatacataatctgatatttcaaatacacattcagaagctccattgacaattgtatcaacaatagtaactgttacactcttttcaaaaacctcagagaacaatcgcatataccaaccagcagaacattcacaatactttttattcatattctcaacttttttaggtatattacaataacattttttgtatatagcaataatctttccatcaaaaatatgtaagttccttccgccaatatctgcttcattcagaagattcaaaaattctgctatatcgttagatttagcgtataatttttttgctatttttatagcattggttgacaagcagcacccaccacattttcgcatagtatcagtcatatatatcttcatactctcagtggtatttaaaagctcattaatatatcttgcctgcttaagcggtgttgcattttcatcaataattccaatctccgaacaaaccgcaaatgcattttcagaatccatattatctactattcttttggccttattcatatcatatcctcgcaagaatttaactaattattctaaaatctactgttcttttgatttcaccggcatccaaatttcgcaataataattctcatcctgatttcctttcggataatcacaaggtgcggtgtagtattctatattatacattcctgcaatttcataatcactattcccaggaagccattccttaaaaatctctgtattcactttttgtaacgcttccggcatagatcctttacatggaaatactgcccatgtattttcaggaataactaccgtttcaaattcttccggtatgtcttttgaagggatataatcatcagcaatcatgtacttgaagaatccttccggtgctccatcatctaaacagattccatacataccacaaatatacttaccgtttcccttttcataatgctctgtccaaaattgtgggcattctttatacccttcttcatttttaataattttggcacttccgacaacagtaaatgccggttttttaacaattttacattccatttcaaatccacctttcatagatacatgtatttttagaggaaggtagtttttgagttcaccgtctccggacttcgcctgtgcaggcgtaataccgtgaaatctggtgaaggctttcgtaaagctgtctggagaatcatagccatatttcattgctacatctataaccttaacaccatctgtttgcaaatctctgccggcaagtgataatcttctatttcttatatattcggataccgtaattccacaaagaatcgaaaaccctttttgaaaataaaatggcgaaagattaatctttgcagcaattttttccagagtaagttcatctgtaagatgtccttcaatatatttgattgatgaagtgatatcttccaaccagctcatgcttatttactccttcctacaaaacacatcttatctccaaagcatatttttgtcccgacatattttgctctcttttgtccaattacacaactatctcagatataatcacaaggcattcctttacataaacaattagtaaaaatcaaattcgtctctcggttaaacacaccagcttactgaaagtttctttttcttgataaatggggattaattttccttttttccaatcagcaataaccacctatggtcaaagcatatttgtccctccttgatatagggattaaaacctgttttatctccaccattcaaatcgtattccattttatcaataatatctttttgaatatcctctggtgtacttgtcaaatccatccaactttgtagatttacaggaacaagtgtcgtttcttcaagctgaagctcaaaagcatcctcaaacaatgcttcaaattcttctctgctaagtattcttgtatgtgagttatcacgcatcgtttcaatagcgtcattagtttcacgcaattcttctgtagtcgctaccatatcccaaataacaagttttccaccttttttcaaaactcgttgcatctcccgaaaaggcttttcaggctcaacaaaatggtgcaatgaaagtcttgtaatcacaaggtcaaatgtttcatcttcaaaaggtaagcattccgcattccccgatacaaatgatatgttctgaataccttcttgctttgc

SEQ ID NO: 8540 - DNA, 1046 bp, Unknown
  gut microbiota DNA sequence
gatttctcctctctcaaagggcaagttggcaaacttgaatttgcgttacagaaattccttccaaaaatcataaattatgtgtgcaagttcctttggattatcaacattaacctcatgggaagaatctttaactattttgaattcactttttcttatactctgactaatttgtttagcacttttcatattcgctttatctttacttccgcacaatattaggcttttgcaattaattttatccaaaccgttttttatattgtgattgctcattgagtttactaaagtaataaaatctttttttgaacagcccatatcattaaattgtgagtctggcatgaagtgaaatatcatactttgtattttgaaaagaactttgggtatatcataaggagttccaatgataataatagagtttactttttctggatacttttttacataatccaatgccaatattccacctaatgaaagtccacataaattaagttttccttcctgattgttacagaaatcagagaaagaagaaaatatgttttgataatcattgctattgccacttgacattttaaaaagtgcaggacaaagaacatctatattatctatctctaaaaatttgatggtttcattccaacttttatgattttgccctagcccatgaattaaaatattcttcataatgctccacctttacaacttagaattatcatcttagttcatccaacatttgaaacatttcatttccactatccatattaatttttattatacgccatcgtatacagtgaaatgccatttttcaattttttctcgccacatagttccattccacatcgagtatatttttttacttttaacggtgtatcagtatccagaatacagggaatatcctttgtgtccgcctcggcaaaaggttgctccaaaattttgcgcatatatcctttcccctgaaattctcgcaggacaacaaccatggatactgcaatatagtcatgctcttttttgaaaatcttcgcatactgttcgtctccgctttgtgccatagctat

SEQ ID NO: 8541 - DNA, 198 bp, Unknown
  gut microbiota DNA sequence
acagcatctgcaagtgtcgttgcgcatgttaatgcaaagcttgttcttattgatgttgaaaaggacacatatcaccttgattatgacgcgcttgaagctgcaattaatgagagtaccaaggctgtaatacctgtagatataggtggtgttatggttgactatgacaggataagaaagattgtcgagagtaaaaagaat

SEQ ID NO: 8542 - DNA, 591 bp, Unknown
  gut microbiota DNA sequence
gtacattcggcaggaagcggaaggcttcggcttgcgttgcacagactgtttattatcgcaggctctggcgtggttataacagcggggctgtattttacaacatttgcagcagcgctgctgttatacggcggagcaggtgcgctcaatgcgtcggttcagtccatacaggcatttgaaagatttgctatgccgatgagccagattgggttcgtgctatacaattatgtatacagtgcgctggcggtagtggttcttagcgtggcattatgggctgtattcgttgtaaacaggaagcggaatcatgcgcttattctgaccggagtagttgtggggctggaagtgcttatgtattacaggatagggcttcacagcatctacagtgcatttaaacagattaatattgtgcgtcttatgaaggtcaacgagatcatcagcacatatgcgaaccgcggaaggggaagctttgtcatatctgagtcggctattatgttctgggcgcttatgatgattcttgttgtgtccgtggctgttgcggtaatgggaactgtgcttatgcgtccgagtcagggtaaaaatgtgctgacacggctt

SEQ ID NO: 8543 - DNA, 660 bp, Unknown
  gut microbiota DNA sequence
tatatattaatttatatcacctgtaaactgctattattgagattgatttgtatctctactgaattttatcttatttcttgctaaaagcctactcactcacttaaatttctatcttgcgtaggtcttttctctaccctctacctgtcctcgcacagctttccggcttaaaaaacctactcagatgcctgaatttcctgcctgcgtaggtcttttctctgccctctacctgtcctcacacagctttccggcttaaaaaacctactcaaccgcctgaatttcctgcctgtgtaggtcttttccctgccctctacctgtcctcgcactgctttccagcttaaaaaacctactcaaccgactgaatttcctgcttgcgtaggtttttctctaccctctacctatcctcacacagctttccggcttaaaagacctactcaaccgcctgaatttcctgcctgcgtaggtcttttccctgccctctacctgtcctcacacagctttccggcttaaaaaacctactcatccacctgaatttcctgcttgcgtaggtcttttctctaccctctacctgtcctcgcacagctttccggcttaaaagacctactcaaccgcctgaatttcctgcctgcgtaggtcttttccctgccctctacctgtcctcac

SEQ ID NO: 8544 - DNA, 5985 bp, Unknown
  gut microbiota DNA sequence
tgttatccattcatcaagaaatttcatttgttcatccgtatgaaaccaatgctctccatttttcataatagaaagtgttgaattagtcctctgtacaaattcaaatatcgttccataagcggtaagatcatctttttcgccatacaaaatgtgcgttgggatttcccatataataggattttctcttgcatagcaaagataatcccatgaaagagtctctccaaaggttgtctgaatttcttttttctctttgagttcatcctctgtaacatttgcccaaatcatcatatcagcaataagcctttccatatctacaacgggcgaaataaaatatgctttctctatttgctgatttgataaggcattgatagcaaaatacgctccaatgctattggcaattacttcaaccgtcttgtagtttctataaattgaattaaaaagtaatggaaattcttcttttgcttcccatggaaactgtgcagtatagtcgagaccaatcacatcacaattactaaagagcggtttgtaatgaatagcttcttcagcattaccaccttttccatgtatataaataactgctttatccacaatagttatcctccacaaattataagttatttacttctcttcatactttttaacgataactaaactataagcagccataattacaattgtttccaccatcacaccaataaccgacaacagaacgtatggtgtattttgaccttctaatagcggaattcctaatataacaaaaatgattccatagattataaacaatagtccgctcgcacgattgtaacctttcacatcttttacttttattgtttcggtattagcccagaatccaacgggattcttagaaaacatatcttttattcctaatccaattataaacactccaaaaagtgaccatataacaaacccaatcatattgtttctccttacaaaccgcattaaaaccataatgagacacattcttgtatttcccaaaatcgagatttactaattctacaaattccgatttgttttacccattttaacataaaactcacccaaattaaaactacaattctcaatcattccactccccctgacaccaagtgccacaaaagtgcccaactttatatcaaacattcccagcatttatgcggtttctcaaaaacacaataattaccacttggaaataataaagaattcatttcttcgcaagacgaccgttcccctcctagtcactaggcacgaaaagaaaaaagggaacggtttttcaaccattccctttgcaatgagcccaccggggttcgaacccgggacacctagattaaaagtctagtgctctaccaactgagctatgagccctcaatgtatacaattatgagtaacaatctatatcaaacatccagcctcggattataactaccgagctgggctagctggattcgaaccagcgtaatgcagggatcaaaaccctgtgccttaccgcttggcgatagcccaagaaataaaaaaagggtgggtacagggattcgaaccctggaccttcagagccacaatctgacgcgctgaccagctgtgctatacccaccataatgcaaaagtcataagctactggccatgactcataaaaaaaagtgtgcccggggggattcgaaccctcgacccacggcttagaaggccgttgctctatccagctgagctacgaacacacaaagcgggtgatgggaatcgaacccacgtatctagcttggaaggctagtgttctaccattgaactacacccgcataattattaagttgtaaagtcggggtgacaggattcgaacctgcgacctcttgatcccaaatcaagcgctctagccaagctgagccacaccccgtttttgtttcttgcgtttgctctgttccgcaacgcaagaatgattatattataaggtataccatctgtcaacactttttttgaatttttttcaaaattttttttacaagtctgtaaacccgcatatttactggatttatacatactttaaattaaaagacatttcaccattatcatcaatttcaagcataatatatgtacatcttttatctgcctgacgaggatatgatatgcttccaggattaatgaatgtaagttcatcttctatctgtatcaatggtctgtgagtatgtccaaacataactatatctattcctcttgctatacactcttccctgagagtctgcaaatcgagagaaacataataataatgaccgtgtgtcaaaagtacttttttccctgcaagttctatctcacgttctcttggaagaggtgaaaagaaatcattattacccggtaccattattgtttcacccccggcaagctcctgtattatatcttcttccccttcgatatcaccaagatggataagtaaatcgaatggctgctcattatatattgcctctgccagattaccgtgtcttctatgtgaatcgctaacaatcattatcctctgcataaaacctccagaatgagccaattagaggcactcatccagttctttctttataagttcaagtgccttacctctgtggcttatcttattcttctcttcaggatcaagctgtgctgatgttttaccatattcaggcagataaactatagggtcatagccaaaaccattgtctccaacgatttccttgcttataagcccctccattgtgcctctcttaacaatttcccttccatcaggaaaacacactgctatagcacatacaaacctgccgcttctgtcctgcccttcaacaccctcaagtcgtttaataagagaagcatttttaatatcatatgatgtatcatgtcccatatatctggcagaatacacgccaggctctttattaagataatcaatctccagtcctgaatcatctgccattgtaagctgtcctgtaagtttgcatacagctcttgccttaatcaacgcattttcttcaaatgtagtgccattttcctctacatcaaggtcaattccagcatccttaagagagataacattataccctttaagaatctctttaacttccttaaccttgtccttattattagacgctaaaataatagtagtcataattatctttcctgtcccttctctttcttaggcggctttggtccctggaatgagtaaaaatatgtctttaacattccattatatatctttctattcttatccggctttctgccaaaatatttgacagcatcctcatatgaagtaatcatataggctgaccatgaatctaattttgcaaactgtcgtccaaatgcagaatatattcctggaagtgtctccttgtcctcaagtctttcaccataaggcggattagttataataaaaccgtatttcttatgatggcttaggtctgccacgcttctttcctgaaaatgtattaacttctctactccggcattctccgcattacttcttgctttccttataacatctgcatcaatatcaaatccctggatatccgtttcaacatcaagattaatcatatcctcagcttcatcaacagcatcataccacaactgtttgtcaattatgttagtccacttctgtgctgtaaacttacggttcattcctggtgcaatattagctgctatcatagctgcttcaattggaaatgtgccacttccgcagaatggatcaacaagaattctgtcgcctctccacggcgtaagcataataagcgccgctgcaagtgtctccgatataggagcttttccagctgccggtctatatcctctcttatgaagtgaatcacctgatgtgtcaagtgcaatagtgacaatatctttcataatagttactcttataggataagaatcaccatcttcctcaaaccatccaattctataatgctctttaagtctctctacaattgctttcttaacaattgactggatatcagaactgctgaacaatttactgttaacagaattagcttttgttacccagaatttgccattcttaggtatataattctcccactcaagagctttagtattatcaaatagctctgtaaatgtctcagccttaaattgacccactttaatcaaaatacgctctgtagtccttaaatttatattagcacggcatatggcttcagaatcacctacaaaagtgacctttccatcctctaccgatgatatatcatatccaagatcatatatttccctttttaatactgattccagaccaaaatggcagggagcaattaattcatatgtattcatatatcctccaaatgtacatttatatatatattaatgcctacgcaaatgagtgtcaatccgttaattgattacacacattcctttatatgcctcaaatcctcctacaactgtcttgcatatatatccaagcccagacatcttttcgcatataactagactcatagcacctttatcacaataaaatatgtatattttatctttattactgaatatttttctaaattcataggaaatctttccgcgtttatatatattatttatatcatcaaccaacctattatattcataatgtattgctccttttatcctcgaatgtaaaaatttttctttcaatcttatatcaattattgttacatatggatcatttacataataatctatttttcttgaacttatcatttcacatgacatagtttacccacataatatagaatttaatatattatactttaattagttttttttattaccattttgttatgtaaggccgcatatgcgacctatattctgactaatagcagtcagactcatcagaacctgatgtcttattcttggaattcttagatgactgattcttgctgtttgttgaatcagtttcattataagaatttcttgagtttgttgaattgctggaattagtagaattctttgaatttgttgagtttttagatgtgttctttgacataatatcaacctccataaatatttttacattaatgtagtattgctattttgtcttattttattcatagatgaaaatgctttcaattattgtttcgtgaaactaaaaaaaccttgcaactatgcaaggttaataaatgtacgtgacaagattcgaactcgcgaccttctggtccgtagccagacgctctatccagctgagctacacgtacttcctaaacactttcgtgtttagtgccggcaacgggaatcgaacccgtatgggagtataagtcccgcaggattttaagtcctgtgcgtctgccagttccgccacaccggcttggtgtattattaattattgccatcataatgatagcagcgacccggatggggttcgaacccacgacctccgccgtgacagggcggcgctctaaccagctgagccaccaggccataacgagtagaacaagtggaccttcggggactcgaacccaggaccgaccggttatgagccggttgctctaaccaactgagctaaaggtccaaaaagccgactgtcggagtcgaaccaacaacctgctgattacaaatcagctgctctgccattgagccaagtcggcaatttgaattcccttttatgttctactctatgactccaaggggatttgaacccctgataccaccgtgaaagggtggtgtcttaaccgcttgaccatggagccgtataaaaaaatataagaatgaattggaacaattatcctattgtcctatatccattcttataactccccgagtagggctcgaacctacaacaactcggttaacagccgagtgctctaccattgagctatcgaggattataaaattgaaagattgctctttcaaaactgcacattaaaattctttcatccgattactcttaagaataactctctttgttctatccaaaccgtcttaaccttttcttttggttaagccctcgacctattagtacagatcagctccatatgtcaccacacttccaccttctgcctatctacctcgtcgtcttca

SEQ ID NO: 8545 - DNA, 93640 bp, Unknown
  gut microbiota DNA sequence
gtatgagtatgcaaggaggtgaagagatggaattcgggaaacaaataaaaaagcttcgtcaggaagcacaattatctcaagaggagttagccgaacgaatttatgtatcaaggcaaacaatatcaaattgggaaaatgataaaagctatccagatgtgaacagtttggtattactgagtgaaacctttcagatttctcttgacaaattaatcaaaggagatattgaagttatgaaagatgtaattcaaaaagaagaaattgaaaaaatgaaccgctatggcggaatatacactatgatgttgattgcctctgctgtttcagcggttccgttattcatgttacttggtgtttgggcactcattccttggggtattatctggggaatcgcaatgtatttcgcttttatgcttgaaaaaataaaaaaagacaatgatgttcaaacgtataaagaaattgttgcattttctgaggggcaactactggatgatatacaaaaacagagagaaataggtaaacgtcagtttaggttaatgaatgtccttaaggacaccgcctatcctgtggatcagacaggataggcatttttattttcgcttgtttctcttatcgagaaaggcaagcaacgctacaatcaagctaccaaaggacatcagcaatgctaatatcccaatgaaaatcgaaataatctcataagctgtcatcggtgccacgtctacactccgtttcggtcggtgctaagcaggtgccactggcacctagcaccccttcctatgtattccggttgcccggtatcataaaactctggaggctacctctacgctccgctccggtcggcgctaaacaagcgtcccccggacgcttaacgccctgtcatggatactatgcttcagcaaggataactatgtttttttcaatttcttttattttttcccaattatgacaacatgattacttgctcctaaaattgattgttcccgacatacactatagtgatagtcgcaccatgttttgaactgattttcatcccatttgtcaaccttttgcgataaaagaggagctaaaccatcttgagcgaaatggtctacaatttttaatccatatcttcgataaattgattccatttcatcttttgatgagtaataagtatctgtccaaaagcatttctcatcatcatgcttcagcacaccagtttcaataagttgcttcgccaagtgttcatccaaatatttttcattgctcgtagcaatatattgaaaaacatagtatcttggaatgtacgcagtaaccaaaagcccgcctttccttaacactcttagacattccttcatgcatttttctctctgctcttctgtaatcaaatgataaaatggtcccatattgagaacaatatcaaatgaatcatctgcgaaacaggacatatctgtagcatccaaaacagaagtattcatatgataatttttattggtaagagttcgattaataatgtctatatgccttggtgtaatatctgtagcagttacatcatgccccttatctgcaaaccagaaagcataaattcctgttcctgctgcacaatctaatattttactcttggtgtcgataatctcatccaaaactcttgtagttgttacaaattcaattcttcttgcattatttgtagtcaaacgattttcctctttgtaattctcgtaactgtcaacaacataattcatcattaattcctccgattctattatttttatgtattaaaaaagctaccctccttaaatttactttaaggacgatagctgatagcttcgtgttaccaccttaattcatctatatctcgcaatatagaccttagcaagtacggaaatctctttcgatactctgacgctataatgggcgttcccagtgtagcctaataaatatctcactcggtacacggctccaagactggttcaatatttcttcaatagagttttccaccaagcaactcctctctgtaatttccaaaatatttactatctctcttcatcgctttttaacatagtagattcataattattttttgtcaagacatacaaaataaaaattattaattattgagaataatatctattatatctttctttcctttagtgtacaatcccctattatcagcatacttactttccagttcttccttcaccctctgatactgcaaagccatattctcattatcatttagataatctctgaaatgaatataatttttccactcagttccgttccatttcacaatatgaatatggtgtgtcctgatatccttttccatatcacccattacataaagaatctgatcttccacatccgaaccacgataaaagattccatccttctgtaactgctcattatatgacattattttctcaaaatcagttaccccaacgacaatatcaataatcggttttgctttaattgccggtattgctgtacttccaatatgttgtatatcaacagcatcatcacctaatatagatttaaggtttttgattgtttgaatggcagcctcatcccactgtttatcgtgtggttcaagctgcactgttcctctttttaatcctaatgacatagcaatctccttaatattacatcacaatttcactgtcgaaatattgttcctgaaaatgaatctgtctcctcatttcttcctttgaaaaagttactccttcaggcacaactacccacttttcttctatatcatcttttctataaacaatggcaataattttacctgtaaacttacctactggctcatttacacctaatatataggcatcctgctcctctccatctggtgccataactccttcaatgtaaccataatttattggataatacatatccttatattcaggatgataacttcctaatggtctatcgaccgtgacagttactgttgctccgattatagaattattttttacccgtaaatacttttctatcaatttcggctgtatcgacggatatgtccagttctcaggcaactcatccataagcacaactttctccatctcgctatgtaattctttcgcaaactctgttatctctgcaaaacaaagcagtccaaatgtttcttcaccagtatcatttactctagtcttacctgtcaccgaatatacgcatattggttttatctcaaatttgatagctcctgtttcttcctgcaactctcttttagcagtttcaagaatattttccccagcttctctatgccctcccggcacttcatatgtatctctttctttatgcttgcaaaatacccacttgccgttactctgtgaaattattactgcaaacttcagtaatgaatcatctactgtatcataaaatttaacttctaacatacttcttctccatcgacacctataatctcatcttctaaatttgctttgaaacaaaatgtacaatttccttcttgggttcaagaatataaggtaccaactcctgcggatatacctttacatcattctttaaatcctcaagtggaacccagcaaaaatctaaatcaatccttttgtcatccagaccatcataaccatgaaatactccatctaaaggaatatcataattaacgagatgtacattataatataaacatatctgatgacatggtcttttacaccatggaaaatatatttcaccaatcgccagcagattatctacctctattttagtgtgaagttcttcttcaaattcccgcttcaaagtttctatacttgtttccattgctgctacatgtccacctataatggaataatcatcattcttaggacgctgtaatagaatttttccattgcgtatcaatattccaccaactctgtatgaaaatacaaaatcatcattcttaaataaaatatccacttcaaactcctttgcatttatttaaactatttcaactcttctatccattttccattttcttcaaaaaagaaatattcactaatattgtcatttaaaaatacttccaacatcttatccattccataagcaagttttctctgcttcatttcatctaatgctagccagaatacatccccttcttcagacgaagtaactattccttcaaacttatctgtcttatataataacactatatatcttgtttcctcatccttcatccagtcttttatcccacaaagctttggttctgaaattttcaatccagtttcttcccacacttcgcgtatcacagcatctgtaaatgattctcctctttccacatgtcctcccggaaatgttattccagagtaatcatcatccctcttatcttggacaagtaccctgttttcactaaacaccatacacatattcgtcattatcactttttctgttcttgccattcgtaatacccttatccttcatttgctgaatctctatatatcatttcaacaatactgtctgcatcaatatcaggtgtaataattttttcattaaaaactgatgaaaaatccttttctctccaccatctacgcatatctttttcaccaaattcctgttttttatctcgtgtattatgtcgcctgaccgtctcttcaaatgatatatcaaaatagtacgcatatacattcattccatacaattcatttgccgttttgaacaaaggcctataccactcatcatacatgatgccctctaaaataaccacatcacaatgctcatacccatattttataagttctatcataagtggtaatgccttagtatcaacgccatctttaacccacaaaacatttctcctaatctcatcttgtgaaatcatcattgtattgtatccaaatttcttttgcaatgctctagctactgttgtttttccacttccagagttacctcttaatataattatctttttcataatttctccttaatcttgctattactctccccacaaatagagccaaactagagccatttgataaaacaaatgccggaagcccgcataaatacaggctttcggcattttaatccgttattcaaactcaatcgttccaggtggtttgctagtcagatcatagaatactctgttaactccccttacctcattaataattctgctcatgactgtctggagaacctcaaatggaatctctgcgctctctgctgtcatgaaatcaattgtgttgactgcacgaagtgcaaccgcataatcgtaagttctttcgtcacccataacaccaacggaacgcatgttagtgagggctgcgaaatactggtttggcatccatgctggagccttgccgttagctttcttgtactcagctacggccttgtcaacctctgaacggtagataaagtcagcatcctgaacgatacgaaccttatcagctgttacctcgccgataattctgattccaagtcccggacctgggaatggctgacggaatacaagatgttctggtattccaagctcaagaccagccttacgaacctcatccttgaaaaggttgcggagtggctcaatgatttccttgaagtcaacgaaatcaggaagtcctcctacattgtggtgagacttgattacggctgattcaccgccaagtccgctttctacaacgtctggatatatagttccctgtgcaaggaagtcaactgcaccaatcttcttggcttcttcctcaaatacacggataaactcttcaccaataatctttctcttagcttctggctctgtaacgcctgcaagcttagagtaatatctctcctgtgcattaactcttataaagttaaggtcgaactgtccttctggtccaaatacgctctcaacttcatcgccttcatctttacgaagaagaccgtggtctacgaatacacatgtaagctgctttccaatagctcttgaaagaagtccggctgcaacagatgaatcaacaccacctgaaagagcaagtaaaaccttgccactgccaaccttctcacggatttccttaattgtattctcaacaaatgcatccatcttccatgttccggcacatccgcatactccacgaacaaagttgtgaagcatcttggttccttcctgagtatgaagaacctctgggtggaactgaattgcataaagattcttctctgtacactctgctgctgcaactgggcagtctgctgtgtgggcaacaatcttgaatcctggtgcaatctgtgagatgtaatcaaaatggctcatccacacaatagttttctctgagacatctgagaataaagcgctgctcttatctacaaatgtttctgtctttccatactctcttactggtgccttctcaaccttgccaccaagcacatgctgcataagctgtgcgccatagcaaagaccaagtacaggtacaccaagttcgaaaagttctttagtacatgttggcgcgccatcttcataacagctgttaggaccacccgtaaggataattcctttagggttcatggccttaatctgcgccaggtctgtcttgtaagaatagatctcacaatatacattacattcacggacacggcgcgcaaccagctggttgtactgaccaccgaagtcaatgacaataactttctcctgatccatgatcaatctccaatcttgtgtatttatatatacattatagttaaacttgccacttatgacaagccttaattctccccaattcttatcttgctaattctcttcagacaatccttatctatgcatctttcttccaattctcttcttcacataagaatccatcttctctctgaccatcgccatctttctgttggtctcctcattatcagaatgaaaatgcataagctttgcaagatagccctgttccacagtaatccgcacactctcatcatacacaagctcataagcaagtgatacatgaccaataacagtatcagccggtgtgcgtcttattgctttgagtatacagtgttcctcatcaaacgcttctaacacttcatctgtaatatcactcttcatgagttcttcagtcgtagtgttatatatttcttcaagcggagtatcaatattaaccttaaatatatcaaccttatcagcgtcacgaagcacattgcagaatgcctgctcgcggcgattaagtccctgcggaattctgtacatattgtgacaccttattgcaagctcaagcatttcaatgtccgatttattcaatctgtcatacagaaatactccatcagaactatatcgatcctctaatgctcctgacttgtaacctgtacatttgaccatacctttaagaaaagtactgataagaccatctttgaacaacaggtctgcaccgaattttgcatggtcaacagagtccgcatctgaaaatgtgttataacgctttatctgttcaaatcttccaacatcatgaagcattccggataaccatgccagctcaacatcataggcacacattccagctgcctttgcaattctttcgcacaaagctgcaactctgtaagtgtggtcaatttttaatttaatcttagggtcatctgcattataagctgctgtgtattctgcaaatgctttcttaacatgcactctgtcaacatacacacggtttatcttggcattttcataataaccttcaacatcagcaacctttccctcattccatgtgtctataatatcaagcacatcagataaagaatggcacacaactgaagtcagtcttcggatgtcatcgttaatctcaatagtatcaggtatatgaatcaccttcatgcctgctgcatatcctgctttaatgccattaatactgtcctcaatgactacacattctgacggttcacatccgataaagcctgctgcccttaagaatatatccggctcaggctttccatgctcaacctcatctccatatacaacaccagaaagataatcccatgctcctattctgtgaagactcttttcagcacttgatttctgtgttgaagttgcaacagcacatttgagtccattatccttaatataatcaagcagcatatgaagccccggcttaaccggaacttcctctgtctccctgattttgtaaacatggtctgtgcgcattgtccgcatttcccagtaatcctgctctccatgataataatcatcaaaaaagctctgactaagctttgctggtgcacctttaaaactgtcgataagccataatggcatctctacatttttctgggaagctgcccacagccagccaagattagactgattttccgtatcaatcataactccgtccatatcaaagataatcccttttatcataactgcctccattctactccccaaaatatcaaaccgacatcccttgcatacacttgccagatatacgttcattcacttcttaatcttacttctcttccagatacttcttaacatactgtccggtataagacttcttaaccttaacaatctcctcaggcgttcccttggcaataacagttccgccgcggtcgcccccctctggtcccatatctataatataatctgctgtcttaataacatcaagattatgttcaataacaactacagtgttgccaccctctgcaagcctgtgaaggatattgacaagcttgtggacatcggcaaaatgcagaccggttgtaggctcatcaagaatatatatagtctttcctgtgcttcttcttgaaagctctgttgcaagcttgattctctgtgcctcaccacctgaaagctcagttgatggctgtccaagcttgacgtaagacaagccaacctcgttgagagtctcaatctttcttcttatacttggtacattttcaaagaaatcaactgcatcctcaatagtcatgtcaagaacatcatatatgctcttatccttgtattttacttcaagagtttctctgttgtaacgcttaccctcacaaacttcacaaggtacatacacatccggcaggaaatgcatctctatcttgataataccgtcgcctgaacatgcctcacatcttccacctttaacattaaagctgaatctgcccttcgtatatcctcgttccttggcgtccttagtcgttgcaaacaggtctcttatcatgtcaaatacacctgtataggttgccggattagaccttggtgttcgtccaattggtgactgatcaatattaatgaccttatcaagctgctctattccgtcaattccatcatggtcgcccgcaatacatctcgccctgttaagcgactttgcaaggtgcttgtaaagaatctcattaacaagtgaactcttgcctgagcctgacacacctgttacgcatgtgacaactccaagcggaatatctacatcaatattcttaagattattctcccttgcgcctcttaccttaatccagccagcaggctttctacgctctgccggtacaggtatcttgattcttcctgacagatatgcacctgtaagtgagtccttgcacgccataatgtccgcagcagttcctgttgcgacaacttctccaccatttcttcctgcgcctggtccgatatccacaatataatcggctgcaaacatagtatcctcatcatgttcaacgacaataactgagttaccaagatctcgcaaatgtgtcagagttcctagtagcttgtcattatccctctggtgaagtccgatacttggctcatcaagaatataagcaactcctacaagacctgaaccaatctgtgtagcaagcctgattctctgcgcttcaccgcctgacagagttcctgtggcacgcgaaagtgccagataatcaagtcctacatctacaaggaacttaattctcgccttgatttccttaagaatctctgcaccaataaacagctgtctctctgaaagcttcatattctcaaggaattcctgaagcttaataatcgacatattagtaatctcatatatgttcttatctgcgatagtaacagcaagtgaagacggcttaagtctctgtccgtggcaggccgaacaaggcctgattctcataaattcctcatactgctgcttggtattatcagaatatgtttctctgtatcttctctccatattcttgataagaccttcaaatgcgacatcatatacaccctctccgcgctggcctttatatttaacctttacagaatgtcccttagtaccattgataataatatccttaatatcatcaggataatccttgaatggtgtctttaatgaaaatccatattcctctgcaagtgcatcaagaaccgccctgctaaagctgccctcatccttagatgactgccatcccattccgacaatagcaccttcatcaatgctgagactcccatccggtataagcagctctgcatcaaacttcattgtataaccaagtccgaaacagtccgggcatgcgccaaatggattgttgaacgaaaagcttcttggctcaacctcatcaatacttatgccgcagtctggacatgaaaagctctggctgaaattaagcgtctcgccatcaataacatctactgtcataagaccttcggcaagcttaagagctgtctcaatagaatctgtaagtcgtttctggattccgtctcttacagaaagcctgtctacaacaatctcaatattatgcttcttattcttatcaagcttaatctcatctgtcagctcatacatgcttccatcagcaataacacgcacaaatccgctcttctttgcctgctcaaacagctttacatgctcaccctttcgtccacggacaacaggtgcaagaatctgaatcttagttctctcaggaagcgccataataacatcaaccatctggtcaactgtctgtttgttgatttcccgtccgcattttgggcagtgaggaataccaattcttgcatagagaagtcggaaataatcatatatctctgtaacagttcctactgtagaacgtggattcctgttagttgacttctggtctatagaaatagccggtgaaagtccttcaatactgtcaacatcaggcttttccatctgtcccaggaactgtcttgcatatgaagacagtgattccatataccttctttgaccttctgcatatattgtatcaaatgccagactcgactttcccgaacctgaaagtccggtaagcacaacaagcttgtctcttggaatatcaacgtctattcccttaagattatgctctctggcaccctttatccttatacagttcttataactgcctctttcaatctctttctttaacttactatcagccatgtttctttccttcataaatatatttattaatctcaatcatcttgtcacgaagctgtgcagcctcctcaaagttaagctctgctgctgccttacgcatgttcttctcaacctgcgtcttaaccttctcaagctctttgatgctcatagattcataatcaaccttaagctttcctgaagcgtcacccggctccgctgccttgcttatgcttataagatctcttactgccttcttaattgtctgtggagtaattccatgctcatcattataatcctgctgaatctttcttcttcgttcagtctctgaaatagccttttccatagattcagtaatcttgtctgcatacatgataacatgtccctctgcatttctcgcagcccggccaatcgtctgtataagcgatgtctctgttcttaagaagccttccttatcagcatcaagtattgcaacaaggctgatttcaggaatatcaagaccttctcgcagcaggttgattccaacaagaacatcaaaaccatcaagacgcatatctcttataatcttctgacgctcaagcgtatcaatatctgcatgaagatatttaacccggattcctgcctctttaagataatcagtaaggtcctccgccattctcttggtaagtgtagtaacaagcaccttgttcttcttggcagtttccttgttaatctcagatataaggtcatcaatctgtccttcaatcggcttaacagttatctccgggtcgagaagtccggtaggtctgataacctgctcagttctcataagctcatgctctgcttcgtatgtgcttggtgttgctgatacgaaaagcatctgtgaaatcttgctttcaaactcactgaaattaagcggtctgttgtccttcgcagatggcagtctgaagccataatccacaagcgtagtctttcttgactggtcgccggcatacatgccgcgaatctgcggaatagtaatatgcgactcatccacaataataagaaaatcatctgggaaataatccatcagagtatacggaggacaccctgccggaagtcctgccagatgtcttgaataattctctattcctgaacaaaagcctgtctcctgcatcatctctatatcaaaattcgttctctcttcaattctctgtgcctctaaaagcttatcctcactcttgaaatacttcactctctcggcaagctctgccctgatattctcaatcgcagcgtccatcttctccttctcaacaacataatgtgagttagggaatatcgcaatatgttcaagaacgcctttaacttcgcctgtaagggaatctatctcacttattctgtccacttcatcaccaaagaattcaactcttatggcatcacctgatgatgatgaaggatacacttcaacaacatcgcctcttaccctgaaggttcctcgcttaaaatcctggtcgttccttacatactggatatcaataagctttcttatgcaatcatccctgtccttctccattcccggacgaagcgaaataaccatgttcttataatcaaccggcgcacctaatccatatatacatgaaaccgaagcaacgataataacatcatttctttcagaaagtgccgctgttgccgaatgtcttaatttatcaatttcatcattaatagatgaatccttcgcaatataagtgtcactctgaggtacataggcctctggctggtaataatcataataggagacaaagtactcaaccgcattctctggaaagaactccttcatctccccatacaactgcgctgccagtgtcttattatggcttataataagtgtaggtttctgaacattctgtataatgttcgccattgtaaatgttttaccagaaccagttacaccaactagagtctcaaactgattgccttcctcaaagccctttgtaagtgcttcaatagcctgcggctggtcgcccatcggcttaaaatccgaatgtaatacaaatctgtccataaagccctccctattttgcgaagcaaaatccgaaccccttggtgaggagagggattttgccctccttgttttctgaaagaaaatgcatttccctcattatacaatataacagccaaaaagtacagaacaaacattcgatttgtcctgtactttattccatacttctataatctttattctgccgctctgacactcattttgccattgagatactctacggctgccttcaactgcacatcttcagtcgcatcatccggaagctccacaatactgtctggtgtcactcccttgccgtgaatatcctgtcccttaggagtaaaatatttggcaattgtatacttaactgcacttccatcagtaagcggacggattgtctgtacaatacccttaccaaacgtctgtgttcctattatctgtgccttatcataatcctgcattgcaccggcaaatatctcagatgcacttgcactattgccatttaccaaaactgccatcggaatattaagctcatgattatcagaacctgaatattcctgtctcttaccagacttagtctctgtatacacgataagtccgttcggaagaatataatctagcatatcagccacagtcttaagaactccgccaggattatttcttatatcaattacaagtcctgtaattccctgcttctgaaggtcatcaacagccgatttaaactgctctgttgtaacatcatcaaactgtgaaatataaatataacctatattattctcaagcacctctgatgaaacagtcttaatatcaatcttgtctcttgtaactgtgaaactcagcttctcgccatttctcataacagtaaggttaacatctgtacccttctcgcccttaataagggcaactgctacagaaaggtccattcctgtaatatcctcaccattaacctctgttaccttatctccatttctgataccagccttatatgccggtgcatcctcatatgcctctgatataagtattgaaccgtcgtcagtcttctggcatacagcaccaattccatagaaagaacctgatgttgactccatcattgacttatattcttcaggcgtataataaacagtatatttatcaccatatgcagccagatatgccttaaaaatgttatctgcagccttttcatcatctacattgtcaaaatagaatccatctccaagcagtgaatccagagcattcaacttaccttcaaccttagttccgattccttcattatcacttgttccaacatcctggacatatatgcgtccatcaattccaatatggatattaccacttcttataagtcccatgaatacgcatgacaacgccagtatcacaaccagtagtgttgccacaacaccaataataacgcctttgcctaaagcatgttttctctttcgttcctgtgcggccccttccgaagaaaaaggtctgttattatcatattccattgagtcctcctgttaagttgaattatttatttaaaatatggcataggattaacatatgaatcatttagccttacatcaaaatgcagatgtgcgccaaatgaattacccgtattacccataacaccaatcttctgtcccttagtaacctgggctcctaatgatacatttaaactatcaagatgcaggtatctcgtatacagtccattaccatgataaatcatcacataattacccgctgttgagtatttctcgctctgtctgtgtgcaataacaactttaccgtcataagccgcatatacaggatcacctgaaacgcctgctctgactgctccaatatccacacctttatgtggtgaagttctgtcagatgtatctccatatggagaagttattcttgtacttgttgttggccatttgaaagttccgccatcatatctgttagacggagtaactccgcttgcctcctcagccttaatcttggctgttatagaagcaatctctgcatccagcttcttctcgtcagcttcgagctgtttcttataagctacctgatcagctgtattcttactcaaagcattcagctgggcagtcttctcattctgaacaacctccagtgcatcaacctgtgcctgaagtgcctcctgactggcagtcagagtctctttatcttcttcaagctttactttagaagatgatatcagattaatcgttgactgatattcctcaagcatctgtctgtcatactctgatatcttattaatatactcaaatttattaagcatatccgccatactctgtgatgataaaagcacctcaacatatgtataatcattatgctcatacataaactggattcgcagcttcatagcctcatactggctttccttatcagcctcagcctgctcaagctttgcctgtgtctcctcaatctcagcttcaagctctgcaatctgggtattaatgtcatctaatgacgctgacaattctcccatctgtgcatcaagaccctgaataagagatgtaagatctgaactctgtgccttaagctgagcaatcttgtcttctgtttctttctttttattctgtatatcattctgctggttctgggcattcttcagatccgatttattatctccaaatgtaacctgtgcaaaacaatacggtataagcagcattacaatcatgagtgccgctgttattttctttattaaattgttccgaaacagtgctttctccatacagccactcctttaccataattaaaatgttttctaaaaacaaacagggacttctgcatccgtttgcaaaagcccccaaaaactatccgaaactatacatcggcatgctttcttacagcgaagaaacttcctataagaccaataccaattccaagaataacagctactggaataagtacctcaaatacttctgatgctggcataaatgctaatatattctgtaaaacagagaattttccaagaacaaaattaacaactccaccataaatatatctcaatattgctaccggaataatagcacctataagtcctataacgataccttctacgaagaatggtgcattaacaaatgcatccgtagctcctatatatttcatgattgatatctcatcttttcgtactgtaataccaatgacgattgtattagtaataaggaatatagataccgcaagaagaacaacgattactgcaactgcaacataacttacaagtcttgctgcactggcaagtccgcttgctgtaacctctgaacggttaacctgtcttattccatccttattctcaaggtacttaaccagtgtaccctgattacttgcatccttaagatacacttcataagaagctgaatttgctaaagggttatcatcctgaaatccatatgcaagctctggataatccttgaaataatcccccttaaaattttcccatgcctgttctgcagatacatactcaactcttgatacttcttctcttttgcttatatcatctccaagcttcttaatatctgtctcactgagattttcgtcaaagaaaactgttacacagacctctgtctcagccttcttaatcatatactgaaaattaaccactatagaatagaatactccaaaaaggaatatacatgccgtaatcgttgctattgatgccagtgagaacatcttattacgatggatgttcttaaatccatctttaatatgatatgctaatgacctaatcttcatagaaataaccacccttttcctgatcgctgataatctttccttcactcatagtaatagttctcttcttcatctgctgaactatctccatattatgggtaactacaagtactgttgttccctgcttattaacctgattaagaatcttcatgatttcattagaattagcaggatcaaggttacctgttggctcatcgcacaacaatatagctggcttattaaccagcgctcttgcaattgcaattctctgctgctcaccacctgataactcattaggaaaagccttatatttgtcaagaagtcctaccattgaaagcatcgccagtactcttgacttaatctttctattcggagcttctactactttctgtgcaaatgcgatattctcatatacatttctgtctggtaacagacggaaatcctggaatactacaccaatatctcttctaagatacggaagcttctttcttgttatcttattgagatatttcttattaacatatatcttacctgatgtaggatctaattccttaagtaatagtttgataagagtcgacttacctgaaccactcttacctactataaatacgaattcacctttctggatgtgaagattaattccattaagcgcagcaacgccagtggaatatgtcttcgtaacatcttccatgattatcatgtatcatttcctccaaaaatcactaaaatgtatctttactttccatatacttcatgtacttaactaccataagagcaatcttaaatgttattgcatcatcaaacactctgaggtcaagcccggttatcttctgtattttatcaagtctgtaaacaagtgtatttctatgaatgtaaagctgtcttgatgtttctgaaacattaaggctgttctcaaagaacttgttaattgttgacagagtctcatcatcaaaatcatcaggagcctttccttcaaatatctccttaatgaacatctgacataatggtataggaagctgatatataagacggcctattcctaatctgttgtaagcaacaacattcttattgctgtagaaaatctttcccacatcaagtgccatcttagcttccttgtaagatcttgaaacctctcttatgtcattaacaattgtaccataagcaacatgtgccgcactcatcgcctcagtgcttaacatatcaattataacatcagctgtcttgtcaagttcatcatatgactcattgcctttaacttccttaacaagaattatactcttctcgtcaactgctgtaatgaaatctcttgtcttattagcaaaaagtgttcttactgtctctaaagcattagtatccttctcgtgcttagtctcaatgatatatacgactctcttaacatctgtttcaatatgaagcttctctgctcttgtatacatatcaacgcgaagaagattatcaagaagaagattcttaataaagttatccttatcgaatctctccttatatgctacaagcagattctgtatctggaatgcagcaagctttccaaccatatatacatcatcacttgttcctcttgccatgattatatattcaaggttgccttcatcttcaaccttaaaaaactgaaaaccattaactgcctgactctctgctggcgaatcaataaaactaatcgcatccgcaaggcattctgaaacattatcaaaagtcttggctgcaacattcttatctgcatccacaatgcacaaatccactcgtgaaatagccttaagtccctctacagttgtctgtaaaattctattagatatcattattatccctttctgtctaccacttaccttttattcgtacatattctatcttattgtaaagcaaaacggcaaaaaaaaaaaggggaaatgcaaatttattgcatttccccttcataattaagattcatttaataattagtgtgtgataacgatttctgtttccttatcgaatacatgaagtctttcaacatccatagcaaatgttacttcatcaccaggtcttgctgttgtacgaggatttaccttagctgtacatgttacatcaccgatttcatagtgaaggttaacttctgcaccaagtaactcgtaaaccttaactgtagctgtaaacttagaatctgcattcttagcgatgaattctgcatcatccttaacatcttctggacggataccaactacaactgtcttaccaacatagttgccatcgataagcttcttgctcttctcagctggaagagtaattgtaactgtatcagaaagtacaaggtcaacctgtgaaccattagccttaacttctgcatcgataaggttcatctgaggtgatccgatgaatccagcaacgaagatgttgttaggtgtattgtaaaggttctgaggtgtatctacctgctgaataataccatccttaagaactacgattcttgtaccaagtgtcatagcctctgtctggtcatgtgttacatagatgatagttgtctgtaatctctggtgaagcttagaaatctcaacacgcatctgtactcttaacttagcatcaaggtttgaaagaggctcatccataaggaataccttagggctacgaacgatagcacgtcccatagcaactctctgtctctgaccacctgaaagagcctttggcttacgatcaagaaggtgctcgatatcaagaatcttagcagcttcatgtacagccttgtcgatctctgccttaggaacttttcttaacttaagaccgaaagccatgttatcatatactgacatatgtggataaagagcatagttctggaataccatagcgatatctctgtccttaggctctacatcattaaccatcttatcaccgatccataactcacctgagctgatttcctcaagacctgcgatcatacgaagtgtagtagacttaccacatcctgaaggtcctacgaaaatgatgaactcctgatcagcaatttcaagattaaaatccttaacagctacaaaaccgttaggatatactttacaaacattcttaagcgataaacttgccattattaaatatcctcctaatataaatgcgcctttgcgcttttgatgtgattataatacactaaacaggacttttttaccacattacatttttacaaatcttttccttgttttttttgcaaatttaccatagttagtcctcttatgtataaattgtacaaatttaccgcctgtttatctgcaaacatcactaatgctgtttatgtttttaattgtatcttgaaataaaaactttttaaatatataataaaaaagaacaaaaaggtatttactttattataatattattcatgcacatctgttatatatgtacacgattggaggaatgattatgactatagctggtttatctactaacataagtacatctggcataactaatgatatccagattgcaatgctaaagaagaatcttgatacagttgaaacggctggtgccgatatcactaagatgatggaagcatccgttacaccagaacttggtcagaatattgacataagaatctgattcagttttccctatgcatatctttagaaatacaaagcccatgtacacagttttctatgtacatgggctttatatttttctaaagagttcctgaaaattcaagcattatcatatacattacgcacacaacaataccaacaataaccggagctgtaaaataattctttatatgtgataatttaactttctgaatcttcattttttcaagatttccatgacgttttgccattgttcttatacataatacagcaagcatcatgaatactgctgctataacagcaatcatcgcaatctgcacaaccgtaactgctgtgctctgacctgccacactctctgcattttcaaatgtttcagatacactgccatcctgcgcatatattcccgccatcttaagaatctgtacaattcctattgaatatgtatttactgcaaaatgtgcaataactgacgaccacagggaacctgtagcctcaaccatatatgcaaacacaattcccgtaacaaatgcgtacaacgcctgattaatattaagatgaaagcagccgaataataatccgctcattagtgcagcacctgtcattccggctttcctgtaggagccaaagaatatcccacggaatataagctcttctacaagcggtggaataactgccagcaatataacctgcattgcaaatggatacgtaagcagtgttgttgttccctcctcaagataattagttgaaaacaacatgctaagattacttattaataatactgccggaataaggcagtatcctgcaacaagtgaaagaattacatcaactatgcctattcttttgtagggaatctccctgataggatcaatcttctgaactatcatatatataattgcaataagcagcattatcccttctgacataacatactgaatccagtcaggcacagcaatacctgaattctgtgcataagccataattgatgcacacacaacagataatccaatataacctattacaaatataataaagaaaccattaacttttcttacttccatgcaattgcttccacttcaagaagaacatccttaggaagtcttgcaacttctacgcatgaacgtgctggaaatggctccttaaaatatttcttgtagatttcattaatcttaccgaaatcattcatttctttaataaatactgttgtcttaacaatattctctaccttagagcctgaagcctccacaagattgcagagattctggaatgcctgctcagcctgagcctcaactccgccttctgctatctcccctgtagctggtattacaggaataactcctgatgtatataccatattgttaatctcgatagcctgtgaatatggtccgattgcacttggtgctttgtctgtactgattactttctgcataataatctccttatttcaacatattttacgtttcaaacgcattaaacatattgtaccgcaatcattatattcattcaagaagctatttcttaagaactattgaattctgtgttatctcaattttgccttctttaagcagtcttcctacagctctcttgaaagcatttttactcatattaaaatgtttcttaataatctcaggatctgctttgtcagtaaatccaaggcttccacccttctttactatagcatcatatatctggactgaatcctcgtccatctggatataagccttctgcttaaggcttataacaagctttccatcttctcttactcttgaaacacgtccatgaataacctcacctacactaagtggctcaaacacttctgacataggtataaatgcgtcatacttatcttcaacagcaacatatgccctgtaatcaggggttattcctattatagtacctgtaactgcactgtcttttacaagtgtctctgacttttcaagatatttgttaattctcatagtggctgcaagtcttccgctcttatctatatagagagcaacaaggtactctgaaccttctgatacatgtgttgtctgttccttgtatggcatgagcaggtctttttcaagtccccagtcaagaaatgcgccaatacctgtaacctgtgatactttaagtctcttaagttctccaagctgaatctttggcttattagtagttgcaataagtctgtcacttgaatccctgtaaacaaatactgtgagagcatctcccacttcaacatcatctggaacctgttttttaggaagaaggactttatcttcttctgttccaagatatactccgaaatctgttacctttacaatgttaagacactgtgtttttcctaactctatcataacaacacctatgctggcagcttcaccagccctttcataatatttcagtgcaagtatggctgttgcctttctacgtctattctcatcgctactcgcacaaaaaaacctctcgtatgactacgagaggtttctagctgggcttgagggattcgaacccccgaagtgctggaatcagaatccagtgccttaccacttggcgaaagcccaatatcgtgacgacatgctgtattatacatgaatgttttcaggaatgcaagcacttttttaaaaatttttcaaaagtgttataatccctgtctactccgtcatcttaagggttactgtaccatctgcatcagtaccaagattaggcatcttctgcatcttttgtacagttcctataaagaacttgtattggtcaagtacctgatccttctccatatcagatacagctttcttaatgtcaacatcttccatactgcttgttgcagcaacaagattgaatctgtttctgttctcaaaatcaaatgcaaattctttaggatcagaatgtacaggtgctttgttaatttccttgtcagtctgattctgactgccagtctcctgtgagccagctcctgtctgttctatctgaacatcttctgtattctgcagattattattatgtttactgcctattgtatagttatcataaaatgaatgaatattaattcttcctactcccatagctgactcctttctgcatagattacatccttgttttatatttatcggcatgtttatctgataatttaccatcttattcaacaagtttctacataattttacatatatctataaatactgctataaaatttttataaacacttgctttttacgttgaccttaccgcaatattaacttaatattaagatacatttttataaggagtacattaataatatgaacaaaaagaattcaatattcgtaattataggaaccttccttatctgcacaagattctgggtttcctttggcacagtaaacattgatataagcaatgatatcgtcggatacatccttatattcctcggtatcaataatatgaaagaacttaattcccgctttaagaaaggaatgattctttctcttgccggacttgccggtgcaatactctcacaatatcttattgcaagagactggcctgtgccagagactatgtattctatagcaataggtatcagtgtcgtatttgctatttattttacctattattatacagaagcccttgtcatggaagcaagaatacaagaaaaaactgctgttacaagaaattatcagataacatggcttcttatgtctgccggaatatttatccactattttgcattcaagtctacaataacaatgtggtctatacttgttgaagcactgattgccgtgattaccatatattattgtttcttagtattttcaaccagcagacagctttacgaagactgattgctttatattttttaacaaatgcaatttggttatttacattattcgtttatacggtaattgagttgacttttgccagtttcagtgttttaatgatgtcgtcagcacgaaaggatattaattatgaaaaagttagagattattatcagacctgaaagacttgatgatcttaagaccatccttaatagcaatggtgcgcatggacttatgatttctaatataatgggatatggaagccagcgtggacataagcaggtttacaatggtgttgatttcggtggtaatcttcttccaaaggttaaggttgaatcaattgtatcagatgagacttacgagacaattattgatcagataattgagcagattaataccggagaatatggtgatggcaagatatttgtttatgacgtatatgatgctataagaatccgtacaggagagcgtgggacagacgctttataatttcatattaattattggttatcaacggggataacagtcagaattactatctgaccgttatctcttttttgtacataactttcgctatctgtatcccataaccgtacagatatataaaatggggtcacaggaaactacccagcctgtgaccccgcccctttttaggatttattcttctttattatctgttgtatcttcgattaaatcttctgattcctcattctcaataacctctggttcatctttcttaaccatgtctttttccagcttcttgaatatacttgagaaaatatatgaatcaacatacagtatcaatggtattgttactataaatgctgtgaaatatatgcacgagaaatatatcagtccaacagttgctataagcataattattgtctgtggaagatgatgcatacatataataagtgaattcttaagtgtacctataagcttattgtcatatcttgaaagcattgcaaatgagtaaagcattattccaacccatattgccatgactcctattacaacaaatataaacaaagttcctatctgtgaaccctgaacaagtccccactgtacgcttgctcttaaatcaataaaaagaagaaagcctataactccatgtacaatctctaacaaaagtccctgtacaaaattcatcttgaacgacttccagaaatctttgtatacataactttcctcatctcgtactaattttattcccgaataaaatgctgctgtaagcgatgctcctattgttacaaccggcagacagaatacaactgtaataactgccagtattataaaatcacctgccttggtgagtcctctaaaaagttttccatctaatccaaatccattcataattatatacccctttgcttaaacactatgattatacaagacctgccataaaaatcaaagaatttttcgtatatatttcttaaatgtttataaaagctgtttttttgccacagcttttgtgataaactgttaaacaataacgattattaaggagtgtttatggctaaaggaaacaacattcacgacgaaattaaagaacagcgtaaaaagcttaaagatttgtctttttcagataaaatcaaatacatatggagctattactggattccgatagttggagttatccttgcagttatattcgcagtttctcttgtttcatccatagttaagaataattatgatactgtatgttttgttgctgtacttgatggcaagatgacaggttatgaaaatgatactgatattctcacaaccgggcttacagactatcttggaattgacggcaagaaagaacaggttgatttctcatatacattttcactgaaagaagttgcaatggatgaagaagcttttgtttctgccaacaagctgtatacatatgcttcaaccggctctctggacggatatctttctgaacgtgagtatattgattacttctgtactgacaaggatatattcttctgtgatttacgtgacatattctctgatgaggaattagagcagttagatgattatattgtgtatttcactaacactgccggagagacatatcctattgctgtagatatctcagaagctcctgtaattaaagacagcgacctgaatatgaaagacccttgctacggtgttgtgtcatcatcaaagtatcagaccaatgctgctgattttataagatatgtatttaatatgaagtcagcctgatataattacagcttttttctatatatattcatcccgtctgtatcgcctgcatacaatgtgaaacccagtttcaatgcaagctgtatggacgggttatttgttttctctgtgcatatatacaattcttctaagccgaatctgtccttagcaatatccactatatggttcataacttcccatgccacatgctttccctgccagctttttttcacaaggtacccgagctcctgacaattctgcccgtctatactgcggttttcaatgcctgcccttgccacaagctcacctgttttcttatcaaacacaagccaaagaccgtacccgaagaagccatacatattctcaatgtattttattgtaaatgctttttcatcctcatattcatataatggttcaacatacgggcagtctgaaagtgtctgatataattcgtataaatgtggtaaatccccaactgtcatctcccgtataataaacttccccgtctctgcaatcacaagcggctcattgtattttctggcgcatacaagttctaacatgtcgtcatcaatatcttcctcatcatatacaacatatgaagcttttccccgatacgcttccccaagccctatgtccggaatctccagtattccatccggttttaacatatctttgtcattaattattatttctctgccctcgcccatatcaatacattttctcatatatgcctctttataattgtttctaaagttttaatttgactttttatactgtagtatttagaattaattacatcacattttgcttatgcagacaagcaggcaatttaatgaatttcaggaggaataatatggctaatccaatagttacatttacaatggaaaacggcgatgtgatgaaagctgagctttatccggaaatcgcacctacatcagttaataatttcgtcaatcttgttcagaaaggattctatgacggacttatattccacagagtaatcgcaggatttatgattcagggtggtgaccctgaaggaactggtatgggtggtcctggctactctatcaagggcgaattcgcatctaacggattcaagaacgatttaaagcatacaagaggtgttctttcaatggcacgttctatgagacctgattctgcaggttcacagttctttatcatgcaccagaacgctcctcatcttgatggagattacgctgcattcggtaagcttatcgagggtgaagatattcttgacaagattgccggcgtagacacagactacagcgacagacctagaaagccacaggttatgaaaactgttactgttgagacatttggcgaggaatatccagaaccagagaagttataattagaattcatccatttacattaaaaaggcggatacagttaattgctgtacccgcctttattatcttttattatctagaaatgtccgccggagccactgtttccaccgcctccgccgctgcttccgctgctattgttgtgctcaatatgtcttgtaacaactgttgtattaatgaacacgtctcttctgtcattaaccttaaagttatggtctttcgtatattctgtactgctaactgtcattcttgccttggcattatgcatcattgtaagaacagcagcaactgcaactcctgatgcaataagaagctttatccacattttgtatgtaagttttttgactatgcttgtagtcatacacacattcatattcttgatatacttagaaaatgctttgtaataatccttatccgaaagcttctcctcacacgcttctcttatatcatcaattgtctcctgtgaaatatcagttcctgccttgccctgtgtatacattctatcagctcttgactgcatatcaacgccatatattactgcatcctttgaatatccgttatcatcaaggaatttcttaagataactgtccatcgtactgccatcatgtcctatattagttgtgataataactatatcacactctgaatcctcagatgctttcttacactggctctttagcttacttatctcatcagcagtaagaattcctgcattgtcatatacatattcctttgatgaatctgcatacacatcagtcttaatacttaacaacactcccacacacataaaacatgccataattatgctcatgaaagcctttatcttcttattaatcttcatcatatgaacaaaagccctccaaacatagtaataataagtgtaacaatgaatattcccgctccgaagccaaatgctttctttccacttatcggtctgtcagcaactatcttgcctgtctgtccgttaagcatgaactggaaattcttcttgttaaacctgtaattaagtacccataccggaaataatgcatactggcttcctgtcggacgcattgttatgtcattgttgattatattaacagatgaataaccggtaattgttgacattgcaatatctgttatatatttgtcagctcttctcgtagccctctcctgtatctggtctgccgtataattatatctttctgaaagatatcctgaaagatatggcattgaaaatgcagttaattcattatagttaaatggctccagcttatccatcgcatcatcaggcattttctcagatgcatccgccggaatcttctcaaactttgcagatatatttctgaacacctgaaaatgatctgtgtatatatactctgtatctccttttcttgttgtcctgaccctttctgcattagcatgcatatcagtctgtgccgaataatcatacagccagtaaggtacatacagtccgcttattttctcaattgttgaatttcttgatagagcagatggcgtgagtggtcctttcttacaccagtttttgtaaatctctactgctttatccttgttaatcttaaatggtataattgttgatggcttgaattcacctttaagtctgtcctccacaagtgtcggattaccacagaacgaacaaaatgttgccgatgtatactcatctgctacaagctctgcaccacatgtattacaatggtacatcttcatctctttgtcatattctccctgtgtactgttctgtgaatatttctcttcatattcccgcacatcaatctgcattccacatgacggacagcctaatttctgtgttgtactgtcaaactccatagcagcaccacacccgggacatttgtaaattgttggcatattcccctccttaatccacacttgttcataaattattcatatctaattcaataagatttaacactatgcacattgtttcttcacttttgttcaatataattcaatcataagaacaagacattttctactatatgtttttcataaatcgagttgttaataaacagctctcctccctctttcaccgtctgctactccggcagacggtgttttttatcctgcatataattataatacgacgaatgaagctataactaaaaccactcctattataattattatctttcccttcttcttatctttagcaagtttttcattattaagtctggctttttcatcatcaggcataatctgttcatcatatgtcattctgacatctcttgcatcaaagaatatgttaaaattatgttttgccgtaagatatgttgcaagtccgacaataattacaacaattcctgcaagaaaaagcatgaacccaataaatggcagatagcttgtgccggcatgctcttcactattatagaaatccattgcggcactggtatcagcttcaagtgctatcctgttgataaaaaatgttaaataacccatacaggtctcctctctttagatattttcttaggacatacatgattatacatcatatttctttgtattaacacataaatatcatataaatattccttttcatttttaatgatatgagatataatgttgtcatacgaaatcgtgcaatggaggtaaagaaatatgttagtttcagctaaagaaatgttagacaaagctcttgccggcaaatatgctgtcggtcagttcaacatcaataaccttgaatggactaagtctattctccttactgcacaggagatgaatgctcctgtaatccttggtgtatctgagggtgccggtaagtatatgacaggtttcgagacagttgcagccatggttaaggctatggacaagtcccttggaatcacagttcctgttgctcttcatcttgaccacggaacttatgaaggctgctacaaatgtatcaaagcaggcttcacatctattatgtttgacggttctcattatccaattgatgagaacattaagaagacaaccgagcttgttaatgtagctcataatcttggtctttctattgaagcagaagttggttcaataggtggcgaggaagatggtgttatcggaatgggtgaatgtgcagatcctaatgaatgtaaatctattgcagaccttggtgtggacatgcttgctgcaggtattggtaatattcacggaaagtatcctgctaactggccaggattaagctttgaaacacttgcggctgttaaggaaaagattggtgatatgccattagttcttcacggcggtacaggaattccagctgatatgattcagaaagccatttctcttggtgtatctaagattaatgttaatacagaatgccagctttcatttgctgatgcaacaagaaaatatgtagaagcaggcaaagatcttgaaggaaagggctttgatcctagaaagcttctggctccaggctgtgaagcaattaaagaaactgtccgcgagaagattaatctttttggttcagcaggaaaagcttgatgacgattggagatatttatgagtaacttaaagacagatgaagatgatgattttataacatctgcttcacccgaaacagaaccagacgaagcggatttcgcttttgacgctaaagaaaaaaagaaaaaacgctcgagcataataagccgtattattttaattatatgtgcctgcgtttttgtttttgcagcagtcaggcttgtatccattcttcttgaatacaagaagggtaatgatatttatgataatattgaaggtaatgtccttgatgatacacctgttaatattacaataggcgaagataatcaggatgtaacaatcccttttgtctataatcatcaggctctgcttgatattaatcctgatggtcttggttttctttatgtaccatcggtagatataaggcttcctattgcccagacaaccgataatgatttttatcttactcatacatttgataaaacttacaaccgcaacggatgccttttcgttgattatcgaattaaagatggtcttaatgccagccatgttattatatatggacataacatgggttctggtgctatgtttggtactcttgccagatataagaattctggtttctaccagacggaaggtaatgatgttttttatatatatacagaggatgtaatccgtgagtacaagatttttacagtatatataactgatccaataagtgatacatttacattcaatttcagcaatctgtcaggccttcgcgaatacgcaaagaatgttcaggctgaatcactgtacaataccggagtcgatatttctaacgcaacacaggtagttacattttcaacctgcacagacgattctaagcagcgtgttattgtatcaggtacatatgtcggagaatcaaagttagataatggaacatcttctgaagcatctgtatccgcttcagaataagcattttaacactcatatttcatgcggggttaatttttttaatattttcaaaaaagcacttgcaaattcatacaatatgagttattttatttaaagacagtaggctgtcgctaattaaataaggtagaacaaaggcgttccatttatatatttgtataagtatatacttggacgccattttttagttttactaataaaaagataagaaaaggaaggatgaggaagttatgagtgaaagattcaatgtagctgacatcttcggcgagaatgtgtttaatgacacagttatgaaagaacgtttaccaaagaacgtttacaaaaaccttaaattaacaatggaaggtgtgcaggagttatctttagcagatgctgatgttatcgctaatgctatgaaagactgggctatcgagaaaggtgcaactcattacacacattggttccagcctttaacaggaactactgctgagaaacatgattcatttatatcagcacctaagtcagacggaaaggtgcttatggaattctcaggtaaagaattgattaagggcgaacctgatgcttcatcattcccttcaggtggtcttcgtgcaacattcgaggccagaggatatacagcatgggattgtacatctcctgcatttgtacgcgaaggtgctcagggtgctactctttgtattcctacagcattctgctcttacacaggtgaagctcttgaccagaaaactccattacttcgttcaatggatgccatcaacgagcaggctcttcgtattttaaggcttatgggtaatacaacatctaagaaagttactccttctgtaggtgctgaacaggaatacttcattgtagacagagagaaatatttacagagaaaggatcttatcttctctggccgtactttattcggagctatgcctcctaagggtcaggaacttgatgatcactactttggttctatccgtgaaagaattgccgctttcatgaaagatattaatgaagaattatggaaacttggtgtatctgctaagacacagcataatgaagttgctcctgcacagcatgagttagctcctatctatgcacagtgcaatattgctacagataacaaccagcttatgatggaagttatgaagaaggttgcttacagacatggtcttgtatgccttctccatgagaagccatttgcaggtgttaatggttctggtaagcataacaactggtctatcacaactgatgacggcattaacatgcttgacccaggtaagacaccacatgaaaacttccagttccttcttgtacttggtgcaattatgagggctgttgataagcatgctgaccttcttcgtgagtctgcatctgatgtgggtaacgatcacagacttggagctaacgaagctcctccagctatcatctctatgttccttggtgagcagcttgaagatgtagttatgcagttaattgataagggtgatgctacaagctctatccagaagggtaagttaaagactggtgcttctactcttccagaccttaacaaggatgctacagatagaaacagaacatctccattcgcattcacaggtaacaagtttgagttccgtatggttggttcttcagattctatcgctcctgcaaatgttgttcttaatacaatcgttgcagaaagctttaaggaaattgctgatgaattagagggttctgaggatatgcagatggctgtccatgatatgattaagaagcttttcacagaccatcacagagttgtatttaacggtaatggttactcagatgaatgggtagcggaagctgaaagaagaggacttccaaatatcaaatctatggttgaggctgttggttcacttgttaaacctgaaacagttaagatgtttgaaggatttggtgtattcacagaagctgaattaaagtcaagagctgagattaagtacgaagcttactctaaggcaatcaacatcgaagctaagacaatgatagatatggctggcaaggaaatcattcctgctgttatctcatacacaacagagcttgctaactcagtactctcagttaaagaagccggcgcagacgcttcagttcaggcagacatccttacagaagtatctggttacttaaaggaaatgaaggcagcttcagctaagcttgcagagacagttgctacagcagctacatttgaaggaaaagcacaggctgaatacttcagagatacagtaaaggttgcaatggacgaattaagagctccagtagataaagccgagatgatagtagataaggaattctggccattcccaagctacagcgaattattattcgaggtataatacataactaattgttataaatcactctcataaaaatctccagcattagaccggcaaagccaaatctaatgctggagatttttcaccccttgaaacatccactatgtagattgccagtctgggggtatcgggctgtggcttgatttattacgagctgtgcaggagttaatgccgccatagacaaaagttcagcgtgcaaaagctcgttcaaacgaagtgcgtttgcttttgcacgctgtaaaaagctctgtatatggcggcatttactcctgctaagcgcagtaatccatgaaagccacagcccgatacccccagactggccacaaacctacacaggataactcaacctctcctcaaccggattatccagaacctcctccttaaacttcttcatatatatcttcgcaagcttaagattgttatccagataattaccacagtctcttggtgaatatccaggaattggtgtattatcgtcataattaagaacataatcggcagcttctcttaataccccgataatatcctcagactttaaatctcctgcaaatataacataaaaacctgttctgcagcccataggtccgaaatatatagttttctcagcccattctgcatgattccttaaaaatgtagcaacaagatgttcaattgaatgaatccccggagtatccataggtggctcttcattaggtcttgtaaatcttaaatcaaatgttgtaagacatacatctccgatataatcctttcttgatacatatacacctgtcagtaaatcaagatgattcaccgtaaaacttgctatcttgttcattatgactccttctttcttataaatactattcttttgttatctgttgtttctattagcagttcttttatgcttgatacaaattttgtcagagttgaatatccatattcctttgccttgaatttcggatactgactatgtattctctgtccaagtattgcaagctcaactcctgttgccttgcttgctctgacattatctattgcgtatttaacaacctgttctttaatattgtcatcttctttgagctttaccagtactgcattattaaccttatatgtcttgaacccatccatctcattgataaatgtggataatgagctatacccataattacgaacatcaaaatcagaatattttttctgcaaacggcttcctatctctcctaaatccgtctgctttcccttattatcattttcctggataatctcaataatagcattttcgattttggaaattcgtataatattgtgtgatctgttaggcctctgcttattattaacagctgtaatttcttcatcctcctgatcctgtaaaagttccagatcagtaaatactgaacatgctgccctgaatgaccttggtgttttgttctcacccattccaataacttccatgccagattcacgcagcctgcttgccagtcttgtaaaatctccatcacttgatacaatacagaatccatccacatttttcgtatacagaatatccatagcgtcaattataagtgttgaatcagtagcattcttgcctactgtgttgcgaaactgctgtattggtgtaattgaattctccatcaattctttcttccatttgcccgcctgcggacttgtccagtccccatatattcgcttgtacgttataactccatacttagtcatttcatctaatatattagaaatatattttgatgaaatattgtccgaatcaataagaaccgcatacctcttatcgtccatagattcccccttaatataaacattacatctgatgacgcactatcttatattcatcattgctctgataatatggacactgcttatatgaagaacttaaaagtcttgcgtaatcgtcctcatccatatcaacatcacatacatatccttcaatctcctcgtcatatacaaggttgttgcagtaatcgcaattatattgtgatgacatatctattccatctccttatcatctgctgtctggctacctgatgcgccattgagtcttcccatttcatcatatctttcaaggaaattatgcttaacaccgtactgcttatacgcaataactgtatcaagattaacattttcaacacttctgaatatgttcttctcaatgtaagggcttaccttagtcaaatctttaataagctgcttaatctcgccccgcttagatcctttttctgtgccgccacatgaagcacagctctctgtaagcctgcatgcacactgtataaatgcaagattattataatctctccaatgtattatatcagcttctcttataaggtaaagtggtcttataagttccatgccctcaaaattagtgctgtgaagctttggcatcatagtctgaatctgcgcaccgtataacattcccataagaattgtttcaataacatcatcataatgatgacctaatgcaatcttattgcagccaagttctttagccttgctgtacagatatcctcttctcatgcgggcgcacagataacatggcgactcctctatatctgcaaccgtatcgaatatctctgatttgaacacagttataggaatatcaagtatcttcgcattattaagaataacctgataattaatatcattgtatcccggattcataactaagaatacaagttcaaaattattcttcccatgtctcttaagctcctgaaaaagcttcgccataagcatagaatccttaccgcctgatatacagacagcaatcttatctccgtcctgtataaggtcatattcattaagtgcctgtgtgaactttctccatataggctttctgaacttctttactatactacgctctatttccttaactctgtcttcacccgaaatctcattctctgcctgtgcttccttgacataattctcgaacttccacttcatataagcaccccagccgccatacaggctgtagacctcatatcccatgtcctcaagaatgtctgccagatcatcactgtgcagacctgtatagcacagaagatatataggaacactcttatcaaactgctgtatgaattcctccggtgtttcttcaagcaccttaatcagttcctcccagtaccaatttcttgctccgggatatgtttccttctcgaattcctgcttgtctcttacatcaagcagaaccttttctctttcatcattctggtaatcaattattgttttcatcatcaacctcttcatcctgcgaatcctcaagaatacgcagtcctgccgtacttgtaacaggaagtgagaacacaatagttcctgccttgctgtctacgccggctttgtccattatagcacgcataatagcatttttctgtgatgactttgcaacaataagaattacttccttctctgaaacaagcgaaactccaaggaactgctctgcccgtttcattccaacaccctttccatgaagcaccgttccacctgttgcaccgccttcttccgctgctctcatcacctgtgtattatatccataattagctattgcaacaataagttcatgtttagtatccttcaatgtgctctcatctcctttcttatattcctgcccgtcaattaagaatcccagctctctcttgccaccaatactgcttagcgacactataaatgcgattccggttcctggcacatctattcttaacttactctgaagccccttcttaacattcttccatgtattctctgtaacaagtgacatatggatacccttctcgtcatcctcaagtcccagtaaatcaagtacatcacttgatgctgttcccctgcctaacgatatattagctgcttcaacattataatccttatagcaatcaacaaaacgcggcatattcttcctgctgcatattgttaccattacatatacttcactcatatccatctacctctacaattcaataatcgcatcatctgaaagctctgcaaacatatccacaacaggtgtaacagtctgtggcacatttgctttcctgctgtccttgattctgtatataacaccaagtatctgcaaagttataagaggtgtcatggcaaccatggcaacaacaccgaatgcgtcagttacaatattaccgcctactgcgagacatgctccctgtgccagtggcagtaaaaatgtagctgtcatcggacctgacgcaactcctccggagtcaaatgctatggcagtgaatatcttaggaacaaaaagcgtaagtatcagtgctattccataaccagggataagaaaatataatattgagatgcctgtcagcactcttatcattgaaaggccaacagatactgcaacacctacagaaagacttatctgcattgatttgcctgatatgcttcctgatgtcagttcttctacctgatgcataagcacatatacggcaggctctgccttaacaatgaaatatcctattatcatgccaatagggacgataatccatctgaatgataatgaagcaagcactgaaccaagataattaccggctggaataaatccaacattagcacctgtaagaaaaagtacaagtccaatatatgtatacacaagtccaacacatatcttcataagtgacttcttattcatctttggagcaaatatctgaaacactccgaaaaatacaattatcggaagaagtgacaatgctatttctttcagatattttggtatctcataccagaacagcttgccaagttcaacagaatcgctcacttcagtaattgctgttgttgtataattaccctctgtactataaaccattccaagaataagaacagcaagtattgggccgattgaacataatgatacaagaccaaaactatcatttccggcatgtttatcgtttcggatagaagaaatacccacaccaagagccattataaatggtacagtcatcggaccggttgttactccccctgaatcaaatgcaactgcaagaaagcctttaggaacaaacatcgcaagtgcaaaaacaattgcataaaacactagcagaagcggtgctaacggtattccaaaaagtattcttaaaagtgcagcaacaagaaatacccctactccaactgctacagataatataagcaccatattaggaactgctgccacctgccctgcaagcacctgcaaatccggctcagaaatcgtaattataactccaagaataaatccaattgctacaatcatccataatttcttagtccttaacatacttccgccaactctttcacccattggcgtcatggacaattctgcccctaaagaaaaaaacaccatgccaataataaccagcacggctccaacaatgaattcaaccagtatactaggtgaaagaggtgctattgtaaagccaagaagcaacactataagcattatcggtactaccgcactaacagactcctttgtcttttccttcatcttctctcttaccactgtattctggtaactaaattgtgtccttaataatccagccttcaataaaatctcccttcgctcttaaatatcagtttcgggttacatagtaatatattaacatctaataattgtactggctacttaaaattttataaaaagtgcccggatcagaacactttttataaattaaaactcaattataaattgtcattttctttctctctgagcagttcctcatactttaactggtatgcaatcagccgtggaatgtattctggtggagttcttcttgatgcctcccagtcctctaatgtacgcacaggaatacctgtatgctgtgaaaattcttttcttgtcattccaacgctttctctgagctgctttattgtctctgctatagtcataatatatcacctcttaatgcatttttattattgtaacatggttttgtatattacgcaatgcgttattttgtcgtatgctttatttcaatcacatacttcttttttaattttgagcatctattctgtgcaatgataccttcatgctgcaacattaatcaattgccggctgttctttcaaaatcagtgccacactctccacatgcaccgtatgcgagaactggtccacaggctgcaccttaactgtcttgtagcccttagccgcaaggaggcctaagtcacgggcgagtgttgccgaatcgcagcttacatatacgatacgctcaggcgacatcttgacaatcgtgtcaagaagcgactcatcacagccctttctaggcgggtcaacgactacgacatcaggagtaatgctctttcttgcttcctcacgctgagcttcggttgcagatgtgtctgctgccagccgcgccatttcttcataaaaatgcggtacgacctcctcagcctttccgacaaagaattcagcattatcaatgccgttaattgccgcattgttcttagcgtcctctatagcctgaggaacaatctcaacgccatatacctttcttgcattcttggcaagaaacagagatattgttcctattccgcaatataaatcccatacagtctcattacctgtaaggcttgcgtattcaagggcttttccatacaacttctcagtctgtcttggattaacctgaaagaacgaaagcggtgatatctgatacttaatgtcacctatataatcttcaatatagctttttccccacagagtctcgcactgtctgccaagaatgacattagtgttctccatgttgtaattaagcataattgatttgatgcatttgtcagtacttatatctgaatcaagcgacacttctgtaaggcgtcctacaagcgattcctttaacttatcagacatcttagtaccgttaataacaagacagaccattatctcgtccgtgtgaaagcctgttcttataaggacatgacgcacaagccctcttcctgtctgctcatcatatggtgcaacaccgttgagctccatccagctctttatcacagcaagaatatactggttctcgacagcaccaatcttacagtctgtacatgagataatagaatgagttcttcctgcatagaagcccatcacaatgcttccatctttggcagttccaaccggatactgcgctttatttctgtatctgaaaggctcttccattccgattgccggaaaaaactcataaccttctatcttaccgattcgcttgagattatcgtcaaccagcttttccttaaatctaagctgtgcctgataactcatctgctgaatctgacagccaccgcactgtcttgcgacaggacaggcaggagtcactctgtcagatgaagcctcaataatcttttcaagccttgcatagccgtaatttttcttagctttaataatctttgcctcaatcttgtcgccgattatcgcatctttaacaaagagggtatatccgtcaaccttgccgataccctctcctccggttcctatatcttctattacaaatgttactttatcatctttcttaaaactcattagttgtccttcttatattagaatcaagccatctgttataaccaagccagtcgttggtatccttggcttcaagtgcttctcttagtgtctcaagctttgcgtccatattatctgccatagataatgcgacagcttctgctattgacggcttcttaggtgagccgtactcaagctctccgtgatgtgaaagtatgcagtgtccaatctgcattgcaagcatatcaggaaatccgtctatctgcttaaccttctccataaccatctcatatccaataacgatatgtcctaagaaattaccctcgtcagtgtaatcattcttaggaaattcagataattccttaaccttgccgacatcatgcagcattgcacatgttataagcagatccctgttaagaaaatcatagttgctgctcatcttgtcacataatcttgtaacacttaagctgtgctctaacaatccgccagcgaaaccgtgatgtactgtcttggctgctgatacacatttgaacttctttgcaaatgtttcatctttaaagaaagaatataacagctgcttcatatatgtactcttaacactgtctacatacttcatcagttctgcaaacatattatcaatattatatcttgaagatggtacataatctgctgcaacatattcattctctgatgcaattcttgctctctctatcttaaactgtaatgctccgttatagcttgttacctgtcctgttaccgcaacataatcattaacatcaaattcagcaattccgcctgaattaagatcccatatcttagagtcaatctgtcctgtcttatcagcaagcattacattggcatattccttgcctgtcttagtaagtgctattgattttgatttgcacagatatacctctgaaattctctcaccatctttaagagtctctatataacgcataaatccttctgcctccgttaattaagttgttttaactgtacacttactgaaaatgctacatctgaatagccatcttttccctgcctcatagctgtcacatacatagcttctccatcagcgcactgatatagtttctcactaaactgctgaattgtcaaaatactttgtccattaattgcactaattacatctcctgcctgcaatcctgcataatatgccggcgaatcaatatccacattagatatgtatacacctctcggaagtccgtatttggctgcaagctcctctgttacattctgtcctgtaattccgcagtacatgattccatgctcgttaatcatagtctcaatctgtgccttaaggtcagatattccaatgaatttcgaacttgtatctgttgaagccttagatacaccaactacatttccttcagaattaaacaatatggcaaaaccgccagccgtaatacttacacttgtctcaaaaacctcataaccgctgtctttactatactcaaccttagaacctgcaattgttccgtatgacacgcctttcgaagtctcataaagctttcctgatgcaatcacaagatctccctgctttaccatataagaattatccagctgcgcaactgcgatactgttacgttgttcagctgtaagcttagatgcattaatactcacaattcctattcctgaagctgtatttctgcatacaaatgcagcttctgtctggacttcatcagaaaaccttactatataattcattccaggttctaaaaggcttgaacttgtaagcacaagatatgttgaattaacattggcaaccacaagtcctgccacctctgtctgactgctttcaattgtcggaacatcagaaaatggctgttcaacgtcaacagcaaccacacatttattaacatcctcaacttttgcgcgaagtgctgccatagcagcctcataattatctttcaggtccttctctgtcaatatatctgaatattctgcagtctggttatctgcaagtatgtaattatccttctggatatatatgacattcttgtccttattcttttcttcaatccttttctgtaataccggatataaaaataccataaacaaacttgccgctattatgacagaaacagcaaaaagcagcagcttgcctattcttataagccacttgtacttcttagccggatgaagaactacctgttctgtatacaggtcatacttttccctatcatcttcattagttcccatttcggactccttatgtaattttcgtctcttatgaatacaatcatatcatagtttatattacgattatgaacaatttatgacttacatgtaaatatttataagcaaaatatagtttttttaccttaaatgctgtaaacttataaagtatgaaaagattgtttttagtttttggaggtctttcgtgaataagaaatctttatccactttggaattttataaaattaccgaccagcttgtttcatatgcatgctgtgacggagctaagaaaatacttcgtaacttaaagcctatgactgatataacagacatcaacttacgtctcgatgagactaatgatgcactttcaagaatttttcagaaaggtactgttgatttcagccagactaaggatatacgtgcttctgttgcgagacttaaggttggaagctcccttaatatatcagagcttcttaacataagtgccatcctttcatgtgcaaagcatgttaaggattactatgagcatcgtgaggattctatatcaggaatgcttgaaaaccttgcaactgttgatgctctcaattcccagattaaaaaatgtattatctctgaagatgagataagtgatgacgcaagttccaacttaagaagtatcagaagaagcaaatcaatagccaatgacagaatacattctgaacttaacaaattgcttaattctcctacttacaggacttatcttcaggattatgttattaccacaagacaggggcgttactgtctgccagttaaagctgaatataagtcagcatttcctggtatgatacatgaccagtcatctactggttctactctctttattgagcctgcagcagttgtaaagctcaataatgatatccgtgagttagagcttaaggaagcggcagagattgaagttattcttgctgacttaagtgtgaaagccggtgaacatactgaggagcttctgtgtaattatgaaatacttgtcgaacttgactgtatatttgcaaaggcgcagcttgccagacatatgcatgcaagccgtccggtcatgaatacatcaggaattatcaatatcaaaaaaggacgtcacccacttatcgagccacatactgttgttcctattgacatctatcttggaacagattttaagcttctaatcatcactggtcctaacacaggtggtaagactgtttctttaaagactgtaggacttcttacacttatggcacagtcgggtttattcattccggctcttgaccattcagacattgccgtatttaagaatatatatgctgatatcggtgatgagcagagtattgaacagagtttaagtacattttcatcacacatgaccaacactgttaagattcttaaagaagctgatgaaaactgccttgtactttttgatgagattggtgctggaactgaccctacagaaggtgctgcccttgctatcgcaatccttaatgaccttaagatgcgcggtgttacaaccatggcaacaactcactacagtgaaatcaagctttatgcgctttctactgaaggtgttgaaaatgcaagctgtgagttcgatgttgaatcgctccgtcctacttacagactgcttataggcattccgggaaaaagtaacgcatttgcaatctctaagaaactcggacttcctgattatattctctctgacgcatcagaaagacttaacgcggaagatgtacattttgaagatatcgtatctgaccttgagcatgcaagaatttctcttgagaaggagcaggctgaggttgaaagctataaggctgagattgcctctcttaaagaaaagcttcaggctaagaatgaaaggcttgatgaaagaactgacaacattatccgtaaggccaatgaacaggctgctgccatcttaaaagatgccaaggatttcgcagatgaaactatcaaagccatgaacaagcacggaatgacagttgctgagcttgaaaagcaccgtactgctgtccgtgagaagatgaataagaatcaggcaaagttaaaggtagagcctgccaaggttaaagcacacaaggcacatgatatatctgaattcaagacaggcatgcatgtaagagttcttactatgaatgtttccggtactgtttctgcaattcatcctgccaagaagcaggttactgttcaagtaggtgcattaagcactaagattgatatcaagaatcttgaaattctttcagactataaagagccaaaggaagctccatctaaggctgctggcggttccggtaagattaagatgagcaagtcagcaggaatatcaactgagattaatcttctcggctgtacagttgacgaggctgttgcccgccttgataaatatcttgatgacgcttacattgccaggattccacaggtccgtatcgttcacggtaaaggaaccggcgcattaagaaacggtgtaaccgcttatcttcgcggtgttccatatataaagagcttccgcctcggcgaaatcggcgagggtgatgctggtgtaactattgttgatttcaaataattattattgggggatattattatggcatctaaacagcgaatacttattgtagatgatgatgaaaatattgcagaacttatatctttgtatcttacaaaagaatgttacgaaacaaagattgtgtatgatggagaaagtgctctttctgagctttctgtattcaagcccaatctcattcttttagacctcatgcttcccggtattgacggctatcaggtatgccgtgaaataagaaagaacaacaacgttcctataattatgctctctgccaagggcgaaacatttgacaaggtactaggacttgagcttggtgcagatgactatattatcaaaccttttgaaactaaagagatggttgcccgtgtaaaggctgtgcttagaagataccatatgcctcagagtatcggtgttgattcttctaatgccaaatgtgtcaattaccccgacctctctatcaacctcgataattattcggttaattatatgggcaaaaatgtcgagatgccgcctaaggaacttgaactcttatatttcttagcatctgctcctaatcaggtgtttacaagagaacagcttcttgacaatatatggggatatgaatatatcggagatacaagaaccgttgatgtacacattaagagaatccgtgagaaaatcaaagatcatgcccactggaatattgaaacagtatggggaattggttacaagttcgtaactaaataaaaagggcagaacaagggaggcagactaacattgaaaggattcagtacactcagcaaacacattttcatatatatagctatatgtgtaatcagttttattcttgtatcaacaatatgctataaagcagattataagcacatatacaattattattctgacagactgtatcttcaggctaatgaaatagcaaacgaatatgctcttgattatcttgcagaatccaagctgagacgaatagaacttgaaatgaaatcattatccacatttaacgacaccagaattatgttcattactccttctggtgatgttattcttgatactaacaacagttccacggacaagagtaatgaggacaggattttattctcaatcaatgattttgactatggtgacctcaaaggaaaacacgatattttatgggatttttacggactgttttccgaacctgcattaagtgttttttcgcctatctcgaactccttcgagattaagggttatgttgttattaatatacctgaatctgccatcgttgaacgcgtttatgacacatttaacacaaattatcttacacttgcaattgtacttattctgtcatctgcattccttgttctatatttctttcaggttcacagacctattaaagaaatcacaatggcaactaacgaatacagtaaaggtaatctttcctaccacgttaaacctatgcttaatgatgagattggacgtcttggaatgtctcttgattacatggcttcacagcttaatgaatcagataaattccagcagaagttcctgtctaatatatctcacgatttcagatctccgcttacttctatcaagggatatctggaagctatccaggatggaactattccacctgaaatgcttgataaatatataggtataatgctttttgagaccgaaagactcactaagctgacaagtaatattcttactcttaatgaactcgatcctaagtcagtaagacttgatatatcaacatttgaccttaattcaataatcagacacactgttgagacattcgagggaacatgcaagaagaagggcattaaattcaatattacatatgctaacagtgtacagaatgttaaggcagacaagggcagaatccagcaggttatatataatcttatagacaacgccattaagttcagtaaagaaaattcttacatatacataacagtcaaggaaaaaggcgagaaagcgcagatatccattaaggatacaggctgcggaattgccaaagaagatattgataaaatctgggatagattctataaatcagactcctcacgaggccgtgacaagaaaggctccggtcttggtctttcaataaccaaggaagttattcaggcacatggtgagaatatcgatgttgtaagtactgtaggtgtcggtacagaattcatattcacacttgaacttgcaaaataaaaacacacggacatgcgtaacttgtatgtccgtgtgttttattattattccttccagttaagtctgtgaagatgtccttcacaattcatgtgtgaaaaattatgctgtcggagtgcttcataaagaacgattgccactgaattagaaagattaagtgatcttatatctcctatcataggaattctgatacatgtatcctcattatcgacaagtatctcttctggtattcctgcactttcctttccaaacattatataacagtcttcttcataattaacttctgtatatatcttatgtgccttggttgtagccatatacaccttagcacccggattcttagcaagaaaatccttataatcatcatactcagtaacatcaagcttatcccagtaatcaagtccggctctttttaacatcttatcattaatctgaaatcctaatggtcctataagatgcagccttacgcctgttgccacacatgttcttcctatattacctgtattagccggcatctccggctcatgtaaaactatattaatcatatccttatcagtcaccttttaatgcaatatcaagttccagaaccatgctgccatcactagacatcggtatacatatattcttggcatatgtctgcgaaatcttcatatctccacggcataatgtaggtggggtaatatcaataccaattcccttagttgaaagaatagtcgctgcattacccattatcatattaccaagttcgcttattgcactcattgccatctcatcaagctctggaaccggcatccccatcatcatctttgatgcaatctcacatgccttggtagtcttcatggctatcatgacctgacctctcatctcacctgtaatacctatcataattataactgaatcctctccaaattcagttgttttaacatatggttttcctatactcatctccatctgacaggcatcacgcaatattgtgcctgctgccatcagaaatggattaatatggttgacattaatctctgccatattcattcatctccctacttcagtgtattaataaacttttctattctttcaagaccttgtttaaggttgtcaattgaataagcatatgatattcgtaaaaaaccttcaccacagtcaccaaatgctgttccaggaacaacagccagcttctgctccctgagtaatctgtttgcaaattcttccgaagataagccaaacttcttaattgaaggaaatacataaaatgcaccaaatggctcaaagcagtcaagtcccatctccttaaatgcatgcatgagatatcttcttctctggtcataagcttcaaccatcttattaacttccatatcacagtttttaagagcttctattgcagcaaactggctgttagtaggtgcacacataattgcaaactgatgaagtttagtcatctggcttataatttcctttggaccacacgcatatccaagtctccaccctgtcattgcaaatgctttagaaaaaccattaataacaatagttctctccttcatccctggaagacttcctattgagcaatgctctccattatatgtaagcgctgaatatatctcatctgatataacatatatatccttctcaattatgacaggtacaagctcttcaagctcctcccttgtcataacagcacctgttggattattaggaaatggcataacaagtaccttagtcttatctgttatactggcaagcagctcttccttagtaagcttgaactcattctcttcctttagttctattatcactggctttgcatcagccataattgcacatggaagataagatacatagcttggctgtggtataagcacttcatcccctgggtcacacatgcatcttaatgcaacatcaattgcctcacttccacctactgttataagtacttccttcataggatcataatgaaggttcatctttcttgcaaggtaattacatatctcttctcgtaattccttaagacctgcattagatgtgtaaaatgttcttcccttctcaagggcatatattccttcttctcttacattccatggagtatcaaaatctggttcgcctactcctaacgaaattgcatcaggcatctcacttacaatatcaaagaattttcttattcctgatggttgtatgcctgttattttctgtgataatgggtttctcatggtgtaatcagcatcctttcgtctttagcctcgtcctctattattgttccatagtccttatacttcttaagcacaaaatgtgtagatgtgctaaggactgaatctaatggtgcgagcttcgccgcgacgaactgagccactgacttcattgatttgccttctataataacagtaaagtcaaagcctcctgacatgagataaactgatgttacttcatcatatttgtacaggcgctctgcaatactgtcaaaacctaatcctctctgtggagtaaccttaacctcaataagtgctgttactttctcttcactagtcttatcccagttaatgaccgcattatatccgcagataatatgttccttctccatatccgctatttcattggcaacctctgcttcagaatagccaagcataatagccatctccttaaggtctatccttccattcttttcaagaacatcaagaatcttctctctcataacgcaatcctcctgctaattatataaatctgtatatttcatcctgttcaggaagccctaaatatctgtcttcctctgtattgtgaataatccggttgttaccatcagttatcttaccaatgacagcggcctcaattccattctgcttcattatatttactatatcacatccattttcacatgtcattaacaaacatcccatagaatccaatatatatggattgatattaaataattcacatatttcaattatttcctgttttacggaaatatgcctcaaatctatatccagacctgtacctgaatattcggccatatcccacagtgctgcaaatatgccgccttccgatgcatcatgcattgccccgtcaatattctgctttataaatatctgtgcctctttagctataatgagttcttcatcagcagcaaatgccttattaataacgtcctctggcaaaacattaagtatctcatcccttttgtgtgatataacagttctaataccactcattcctatatgctttgtcataacaatatcctgccctgcaacagctttctgatgtgttctgagcttatgcccaattgcagtaacagaaacaaccggactgttaacattcggacatactgtagtatgacctcctgcaattcctacaccaacaacctgacactgtctgtcaagttcctttattatctccttaagacgtatttcccttgatttctcatctattataattgtattcataatacaatcagccgcaccacctgcggcacttatgttattaactgccctatatacagccagacttcctgttgcagcagctgcaagcgtatcccatccctgactatgtatatgcgccgcatcctgtccatatgccggttttgaagtatttcctctcctgccaagcagtttgaaaacagacctgtcaagaattgtatcagacacttttcctcttttcatatcacttatctctccaaaaatgttgcataaaattgttaataattctatactcttatatagcttcttcagtgaagcaattcaatattaaggtataagatatgcaaccataggaacaaccattgctacaatcagtatcaatataagtattccggtaaagcatctttttgttttcttattattgaaattaatcataattacctccacacaattaagcagcggggctacacgaaaaggaatatattcatgcattttatactgccatattttatcatactcataatcatccttcagtttgccataaaaagaagctccaagaatcacaaatcaagaaatcagcaattccttgaacgtgaatcaagagccaaccaggtacgccgtaaggacattagcaatcttaattatatatcaattccggataatcttccactgattaattccggtaatgaaacatttaaccagttactttccaataattctggcatgatgcgttcatacaacacaattacaggacttaaagataagaaaatacttaaccttaccggaataagcaacactgaacttaagctgtcatatggagctgctaatcttacagagctcactgaatatgatgacaatttcaccacactcataaaagccatcgcttcattaggccatgcgcttattgataacaacgacacagctgatgccctttcattccttgagtacggaatcagcattggttcagatatatcctcaaactacattgaccttgcaataatatatgctgcaacagacagatttgacgatatcagaaaactaaaagaaaaagctggaatgcttaaaagtctcagccgtgataatattattgagcagcttaacaatatgctaaaatagcacagtacgaattattttccatactgtgctattattgtatcaatctgtcttgatgccatgcttttcgtcatctcttcaaccggaatctccagattaatattgtgcttttctacaagagctgcaagatatcttctctgcggcggcgttataggtgaatccttctttacaacatataccagcttcgtagtattgctgaaactattatcttctggctttaatttttctaatttcccataaagtatactcgcacttactgcatcatcataagccctgtgtgaccttcccgggtcaatattaaaatactggcacaaaaaagacagattcttatgttccagctctggaagaagccttctggcaatctttaatgtatcaattccatcatcagtaatagtatatccattattgactgctgctctcttaagaaaactgaagtcaaatgtaacattatgcccaagtattggccagtcacctataaaacgtgttatgtctcctataatttcttcaattctcggcttacctgccagctcttcattatgtatgcctgtaagctctgttatgcgctcacttacacttattcccggatacacaagcgtagaatacttctgtgttatctgaccatcttccactcttgccattccaacttcaataattctgtcaacagccggattaagacctgtagtctcaatatccagtgcaacatatctgttaatcatgttttctctctttcaggaatattcttcctatgtaatcacctataatagcaagaaaattcatgtcactctctgcccatttcttatcaagcttaaatcttccatatgaaataatattgttattcttcttaatatctccaccgataatgtactggacagcctgaacaattccgtattcagaatacactttatatactgccggagcctttgtttcaaaaaagttgatgttatctattacaaatatgccatcttccctaaagttaggaatataattatcttccttgaaaaagcttccgtcatcatctgtcatacgctggtcaccatacagaatatgctttgtcagctcagttctgtcatatattgcaatagtattaatattaaatgctactgccacaatatctatcagttcctttcttcttgcgtcatcagcttccttatattctctgataatggtattaacaatctccatcttatggtacttgtaaaacactttatcattaaggtcaacaatccttcccattccatatacatattccctatgaatatcctcatggtaaatgatatatctgtccttacccttttctttagcaaggtaaagaaccttatctgctatcttaaataattcatcatatctcttggcatcattaggataagttgccgaaccaattgaacatgtaatcttaatattacgcggatcatcatgatacagccattttgtattattgcgtatcgttcttaaaacattccttattccctcgttatcattaagtccttccataatgataaacatctcatctccgccaattcttccacacaatcctctgcttccaactgcatctcttaagatatctgcaaccttacaaagaacttcgtcaccaaacatatgtccatatgtatcattaatagtcttaaaatcatcaatatcaataatagcaattgttacagtgtgtcccggctgtgaatctataagctttcttacataatcagtaatagcacgcttgttaagcaggtctgtacccggatccttcatatcagatattatgttgagttcctcaactacatgattatctgaactctcaagtattataatagtacctataacaattctgtttccatatgcatcaacaatagtattacctcttgcaagacatttatccagtcttccaggcttattaagtatattgatagtaatctcccgcttgaataacttctcaccattagcaagtgccttgcagaatccatcaagttcttttacctcattcagcccaagtgcatcagtctttatcttatcttcttcccatgcatttaacgtgccatggtaaaaagacaaagtctggtgtccatctgacgtcataaatatattaaagtcatcgttaagtatatcataagaaaacagaacattttcacacatgccaagataacttgaatatctctcaatctgtgaattaaggttatctatctgtgtagtaattaatgcggcatccataatattaatgtcatacatatgacctcttgtctcagataccccgccatctgtaattcttgtaagcatccagtgatattcacctgtctgatataacattcttacaacaatatacttaccggattcagcgtaatcctttaatgcttctgtgaatctgctgacatcatcaggatgtatatatcttgtatatatgaaaagtgcattattgcctgaaattgcttcaaaattttcatctgctgttacaattgacattgtctcatcgataagaatgtccgaattaacagtatcattaacagtctcagttttaaacaaatctaccatagcttaaacctctgctttataattgatagtgccctctccctaattcacctgaattcatcaggatgttcctttacatatgtttcatacagatctggtctgtatttcttagttctctccagtgacttttcatgtcgccacttttcaatattagcatgatgacctgataaaagcacctctggaacagctttcccgttataatctgctggtcttgtgtattgcggatactcaagcagaccatctgaaaaactttctgtttcagcagattcttcattattaagaactcctggaacaagtcttgaaactgtatcaatgacaaccattgccggcagctcgcctcccgtaagaacataatcacctatagatacaaaatctgtaactatattctccaatgctctttcatcaattccttcataatgtccacaaagaataaccagattatcctctttggcaaactcctctgccatgctttgtgtaaatgtatagccctgaggagtcatataaacaactcttggcctttttccaatgttccttacaatatcctcatagcaatcacacacaggagcagctctcataaccattccagcgccacctccataagggtaatcatccacttttaaatgcttgtcattagaatactctctgatatcataagctttaacggacataactcccgctttaattgcacgtccggttatacttgtattaagtccatccataatcatatcaggaaacaatgtcattacatgaaaatccattacttcactcctgcaattccattaagtaaaaatgcataatatccactcttaagattgtatccactgtctgtataagatgatccaaaatatcctgagccatccttgtaaacagatgcaacatcaatataagttatcccaagtgaagccgcattctctgaaaacttattgttaagtgaatcaatattagcctgtttaaccttgcttgaagattcaaatctctggcttaccggaagtacagaaagaacatatacatcagcagccggcactgcactcttgactgcttcaataaattccttctcatacttatatatatcatctacagatctgcttccataattaaggtcattaataccaaccataatatacactgaatcaggtgactgggatacgatactgtcaagatatcctgtaagcttgtcacttgtcattgaattagatgctataacctgtgcatcaggaagaaaaccaaactgtgaaataccacttacaacaaaatcaccaataaatacagccttgctgtatgccgatgaagatgtataatccactgtctccggtgtacctgaaacagataaagtcctgcctgaagcagctgctgttgtctgcccggttacgttctcagcaggctccttagattcctgtattaccggtgctgtactctcctgctgtacaggagaagttgttactttagtatcatcctgcctgtcgctgttcttattactacagctctttaaaactattgcaactataataactgccacgactaacactgccagtccggcaatataatttctgtatctgttccacattcttttcttgcggttaagactaatctttggtttatcattattagaattatatgattccattataatattcctttctgtttcgattctgtctcattgcattataacattagtcctgcccttgtgcaaatacaacatacagcatcaccacttcatcttatgaagaaccacagctgaagtctttcttaatccaatatcaagccagccattctgaagatgataaccaagcccgtctgtactgtatccaccttcaaatgtaaccaacagctgctcaacatcatcatcaaaaccaagaccaacttcccacgcaggaattctggctctcacctcatcatcgttattattaacaataatgattgcagcgtcatcacttgtaaaccttccatatgcaacaacattatatgctgaatacagtgacttatatgagccttttcttaatacatcattctctttatgcatctttattgcagccctatggaaatcaatcagttctgtatcctcatgtccccatggataagttcttctgttatcaggatcagtgaatccacacacacctgcttcatcgccataatatacagtaggcgcgcctggtaatgtcatctgcataacaacagcctctttaaacactgccttgttgacattattattggcagcctcaggtcccagtgtattagttcttccaactgtcctgttagttcttgttaaaaaccttgaatgatcatgattagacagttcattcatagatattgcaacactctgtccgcccattcttgccatattatgatgcattgcaccaaaaaaatagtctggattaccatatgaatcaggtcttgcctcatcactgtgcttttccattcctgtaagaaaccatgtaacaggctccataaaagcatcataattcatgatggtatcccattgatcaccctgcagccattcatatgaatcgccataatgttctgcaagaataatagcatcaggattagccttcttaacctcttcccggaatctcctccagaaataatggttatattcaggactatatcctaagtcagccgccacatcaagtctccagccatcaacattgtatggcgcagaaacccattttcttccaatagaaagaatatactcctcaagttccttagatccttcataattaagcttaggaagagtatcatgtccccaccagccatcatatgagttattatcaggccactggttagaataaaatttaaagaaattatgatatgggctttcatacctttcgaaagctcccggagcatattcatcagtactgtctctgtaaatgtgttccttatccagccacttattgaacgaaccacagtggttaaacacaccatctataataaccttcatgcctcttgcatgaatctcctgcacaacctttgcaaaaaattcattgctggcttcaaggtttgattttcttgtaactctgttaatatatcttgtagcatgggtattatccgtgtcaccttctttaagcacttcaccctcatcatcgacaataactccaaaatgtgggtcaatataatcgtaatcctgtatatcatacttatgattagatggcgatacaaataacgggttaaaatatataacttctattcctaatccctcaagataatccagtttgtcaagtacacccttgaggtctcctccgtaaaactcccttattcccatctgggcaggatacttattccagtccttaacctgacagacatgctctccaatataattatattcatcatcaagcacatcattactcttgtcgccattatagaatctgtctacaaatatctggtacataactgcaccctttgcccactcaggtgtcttaaatcctggtgtaatctggaaattataatacggattaagatctttaatcgccccaatctgattgtaataacacactgttctgccaagctctaccttaaaataataatatattttgtcggttccgacattaatcttagcctcataataatcaaacatgctctctgatcttactcttgtcataacatgttcaacattatccacaaccagatatgctttatctacattatatcttccagtacgcagccttatggtcacctcatcacctggcactggctctgccggacttctgtaatcacttgtaacatccgaaaacaacgctcttgggtgtagcgttggtcttgcactgcacatataaaaaagtcttttttcccaggcagctaagtttcccatttccccggttattctcatagagaatcctccttagcatatactattctgattttatatctaaaagtacattttagcaagtgaaaaggatttttaaacagcaaaaaaggcagccatggggtgactgcctttttcagagaaggtatttcttttcgataagcattactgctttatctataatgtattgggggtttttacattaattataatatcttatttccctcaataagtgttcacaaacatcactaaatttattcaaaaaatttgtgcatatttactatacaattgttgttcccataataccatcatcatctgtaccgcttccattatcaaaaagcgcttcaaattcttctcttgttaccttttctttctcaagaagaagttctgaactcttctctaatacatccatatgctcagatattatcttcttagcctgtgcataacagtcatcaataatattcttaacctcttcatcaatggctgtagcaatatcctcgccatatggtcttgtatgtgcaaggtctcttccgatgaatacctcatcctcatcactgcttgcataattaataagtccaagtctgtcagagaagccatacttggtaaccatatctcttgctgtcgcagttgcctgcttgatatcctgtgacgcacctgttgtaatatcatcaaatatcagctcctcagcaactcgtccaccaagacttacaatgatattctgtaacatcttgcccttggtattaaacatctcatccttctcaggaagtggcattgtgtatcccgctgctcccattccggttggaataatagatatagtgtgtacaggtccgacatcagggagtacatggaaaagaattgcatgtcctgattcatgatatgcagtaatcttcttttctttctctgatataatcttgcttctcttctcaacaccgataccaacttttacaaatgcatagttgacatccgcattagtaatgaactttctcttgctcttagccgcattaatggcagcttcattaagaatattctcaaggtctgcacctgtaaagcctgctgtagttcttgcaaggctatcaaggtcaacatcatcacctaaaggcttcttggctgcatgaacattaagaatctcaagacgtcctcttacatcaggtcttcctactactacctttctgtcgaaacgacccggtcttaatatagcaggatcaagaatatcaactctgttagtagccgccataacgataattccttcattaactccgaaaccatccatctctacgagcatctggttaagagtctgctctctctcatcatgtccgccacccataccggttcctcttcgtcttgcaacagcatcaatctcatcaataaatatgatacaaggggcattcttcttagcttcctcaaacatatcccttactcttgatgcgccgacaccaacgaacatctcaacaaaatcagaacctgatatactaaagaaaggtactcctgcttcaccggctacagcctttgcaagtaaagtcttaccagttcccggagggcctgtaagtataactccctttggaatccttgcaccaaggttagtgtattttacaggatctttaaggaaatcaacgatttcttcaagttcctctttctcttcattaagtcctgccacatccttgaacgtaaccttattggcatcaccacttatcattcttgcacggctcttaccaaaattcatcatcttggcattaccgccaccgccagcctgtcttgtcatcatcagcataagtgcaacaacaacgataagacacataccaaatggcagaatagttgtcatccatacactgtctcttttaacatcccttacagtatatgtaatatttttatcatcaagcttttcctgtacagaaacaacatcagatacattaagagtatccctgcttccatcagtgaatgtaattgtaagtgtacctgttgggacttctgcattctgacttataacaacatctgtaatcctgccgctctttaaatcagattcaaaatccttatacttataattacttgttctctggctcatctgtgcgataacagcccagacaataccaattataataatcatgaagaaaatgcttccaaatcctccagacctttttttcttagtatccatcacttcctccttattaattatgcctcttcgtcaaggtgtaaaactcctacaaaaggaaggtttctatagctctggtcataatcaagcccataaccgacaacgaattcatcaggaatgttaaagccattatacttaacatccacctcaacctctcttctttccggcttatcaagcagagtacatatacatatatctgccggctttctctcctctaacataggcataagtcttgcaagagtattacctgaatcgataatatcctcaataacaattacatgctctccctcaatgctctcatcaaggtccttcttaatcttaatctgaccgcttgatgatgtcccgcttccataacttgacacctgcataaaatcaaacttaacaggtacagtaattctcttggcaagctcgcatgtaaatataatacttcccttaagaatacagataagtttaacctccttaccctcatagtctttacttatctgctctccaagctgtgcaattctttcattcagcttttcctcagatataagcacactgataaatggttctttcatcgtttctctcctttgtcaatcttaatattcactctattgtatagttatatccagcacattccttgtttcatcatcgatcagggcgcactcacttcttcttaccccgacagcccataaaactcccgaatcatcagaaacaacaagcacattatctctcatatcggcaggtactttacggtcaatgaattcttttttcagcttgcgccatgttcccgccctgttcacaacaatcctgtcaccgtcagtacggtgtcttatgcagagctttccttgtattttatcataatcaaaggatttcgcatagcaactattagcgtaatttctgtttttttcataattagaataaagtgaaattacaatatgcacctttcttaattccgtcttgccatcattattataataaatgttttcttctattgtaatattttcacctgaattaagtctttcaagctcctgcgatgtaagtacatgtatgaggtccgaagaaacctgtgttccagattcctcatttttcctgcttattgtgatatcctcatacccttttaccgcacacagtccataacatatatctgcactgctgccaaccttttttcctataagctcatctacagcattcacatgaaccttatatatatcctttgcagtctgtgtaagtgcatgcactgccttgtagataactctctttcttatgacctcatgaagtcctgcaaactcctctccataaagccttaaaacaaccgcatctcccacatatacatgcttatcataagccttattggcctctgcctcaataaaatcaaaattcttctgcagctcctctgctgcatcagcaatattttcaacagtgtgtgcattaaccttttctgtcatgtacggaataacaacatttcttaaagaattacgcgtataatcattgcacagattcgttgcatcagtaacatatggctggttaagacctttaagcacttcttcaacctctgctctcgtcactgaaagcagcggtcttataatattatcccttaccggtctgattccacctattcctttaagtgaagttccccgggaaagattcataagaactgtttctgcctggtcattcatatggtgtgcaaccgcaatccttgcattacgccctttacatgcctcattgaatatacggtaccgttctttccttcctgcctcctcaacactcattccaagctgctttgcaagcccggcggcatctatatgatacgccatgaattcaacacccatgcgttcacacaaggctctggcaaactcctcatcatctcctgcctcctgccttatgccatgattgacatgcacagcacataattctgtctgtagacgcctcctctcaatataccccttaagcaccataagcagacatacagaatccgcgccacctgaaagaccgacaaccactctttcgcagtccgtaagcatattattctgttcaatatatctgtaaatcttatctataatttcattcatgcgagaattatattatacgttcacataagtgtcaaacactcccagtaccataactgtacagtcatcaaaagcctccatattattattcttcagggactcctcaagaatctttttcgcaatgcctgccggcttctttacatttatattattaataatctccaccatctgttcctccttattaattccagacagattatcaagcacaccatcacttatcattataatataattaccatcataaagctttttagtcgtacaatcgtagtccacctgttctaacactcccatcggaagcgttgttgacttaataatctcaacccagttatctctttttataaatgtggatacagctccaagtttaatacagttaataactcccgcctgacagtcaataatactcatatccatagttacaggattgttaaatgtagttcccgcaatatacgcagaattaataagatcaatcgctgtcttttcctcgaatcctgcttcaatgcagttttccataagttcaatcaccatacggctctctgcaaatgcccttttaccacttccacagccatctgcaattgctgcaaccatttttccacagttcagcttctttaacaggaagttatccccacttgtattctcttcctctttacattttctcgccatacctgaaagaatcctgaaacgattctcctgatagaacatatactggtccggttcttcatttataatcactctgttgtcctgattagaaaagaattttgccttaaatacactgctcactgtttctcttaatacacgctcagacacacaccccttcataaatgttttcgcagttacaagtatctcacgcctctttccgtcaaccagttttatatccttaacagatatccccattgccatacatttacgctcaaattccctgcgttcctgtttatccggcgctttagcatcaagattcattgcaacacattcctctaatatatctgcagccagaatcaattgtcttttaaaacccgtctgcttctgattagtttctccatatgcatctccaagatttctgaatgttctggctgtttcctgcagacggttaatagtataagtatatccggcatctttatatgtatttttcattcatatccacttcctttccggcactacaccaatgtgaagtatatatgactgcttataaataaaatgtcgaagcatgaaagattcaaaaaaatcttccagctccgacataatatttggtatgaattttacttgttattaggcttaaacaccagttcgtcaggatatataagcccgaatttattcttggcaatctcctcaacgaacttctttgtcttgacatacttctcatattcagacaattcatcacttcttttattctcgtcatcaatctgggattgtaactctgtaatctgagcctgataatcagcattcttttcttccagtcctgccttgcctctccacagaacaacgccaagtgccacgacaacaataattgcaataatcattcctgccagcgttgaccttctctgcttcttaagcctttctgcacgctctcttctagattctaatttcatatattcctcacccttgtgcttccttcttacccatatctttcctgcgtttcatatacattttaaggcttcttactggtattgtaataatacgcaccacatttttcaatataaaacatgccggttttagtaaaatttttataattcttactgaccaccttatataaaaactgcttaaaaacttaaaatacagaaatgcccccacagcaatccccataattatgaatccgcggataattccgtctgcaaccttaaagcacatcacaaatacacttaatccggcatatattccatatataatatcttccacactcataaaagcaactgttttatgccgtacaattcgtctgaaagcccttatattatcgtatatccatgcaagcagaacaccattaaagaagcttaccacaagtgcataaagctcccaatatataatctcattaatcatcggagaagcctgctcatgaacgaatcctgcttattcttcataccagcctccgaataacatacagaatccactctgccgtcaaggtctaattcacccttctcgacagaaagcctgttaacatgcagtccttcccctttgattgtaatatgcccataatcagattcaagtacaaccttaaccggatcaaatgacactacatctgttattcctgtaaaatcaattcttttcctgtcctccatattcagcctgtgtggacgcttcacccttaccttttcctccatataccctccttatagacattccgttatatgagaatatatgcatgaccacaatatatgattacaggtactttgaattaaaggtattcaaacatttcctttgcttcttctttcttaacagtatccttgacatctgtaacccttgctcttacattcttgttgccaaactggatttcaataatatctccgactttaacatcataagatgccttcacaaccttgtcattaaccattactcttcctgcatcacacgcatcgttggcaacagtccttctctttataagtcttgatacttttaaatatttatctaatctcatgttcttctccttaatcttctctttctataaaaacatagcacataatcaattccaactcaacaggatagtcagattgatcttctaccgtcctgctgagctacaattaattcacagttcatccgcttcgatacacttacacttttccgtccttaaactggcaaaaacctactaaaactgctaaacaacacaatctagtaggtcgcacatacatttttagtgcaatatctattctgacattgccaaatagaacgcatattctacgattccatgtgctttcctaaaaagttagctgccgtctttaccattttcttttcattatctgtaaactttggcttcatgtcaatagacatcataagcacagtacctaaaacatctccctgacatattatcggatacataatttcctgcttaaactgcgcctcatcagtaaccttaacaaaaccgtcctcaccttcgcctgcagcaatggtacatctgccttccattgcctgattaagttccttagtaacaggcttgttcatcaggttcttcttatcatcccccgacgcagcaataacctgttccctgtcagttatacatactgtcattccggtcgcatccgacagtgattctgcatattttcctgcaaatgtgctaatatcccctatcggtgaatattttttcagaataatctgcccctcagcatccgtaaatatctccatcgggtcagtttcccttatatgaagtgtccttcttatctcctttggaatgacaattctgcctaaatcatctatccttcttacaattcctgtggctttcatattaataattcctcctgattcttacatactttccataatttataatgtatgggtagtatgtggaaaacaggaagaattatgcatctcttgtaatgatcttcatatggcctccagtttcaaaaatgtaaaattttttattttttgaaaccgtacaaaaagagtctgtccagttccaattaatgaataaacgctcagcaaactacaacatttttccataaaaatattgtgatttatccgcgatacctttatcatattaatatgaagttatattggaggttcatttatgaatggggtaaatgattatgataattttgatggaccaacatcggcatatgttaaaagaaaccggaaaaccagttttgcatataagtttaagaaaatgctttatgaaagaaaaaaagctgaggtagaaaaaagcatttcttttgacgataatcatgcaattgaggaagtatgtcagtatgttcaggaacaatggggatttaaggaagctgacagaaattctgctgaatataaattcatgtataagcagataaagcatgacatgaatagcgaaattaacctgtttctgtatgtgcgtgaggataatgacgcacatatggatattgaaatagaaactactactggttatattacaggcggcgttactggaaagaagtcttcaattaaggaatttaacaaaattctgcgtgatgtattcatatattatggtgtcatgcaggacgacataatcgagaaaaccaagagatacaagaatcttgtgagtattctgatgcaggaagcataaaagtaatacaatttttctaacaattaaaaacggagttataaatatggacactatacattcagacattttcccagacggaactcccgttgatggctggtttcacaataccagcattccagaactcaccaaactgggaaagcagtatattattacagattatggtatacatgatgacggcagaatatacactgaaaatttccagaaactgatagaccttgtatacaatgctggaggcggtgtaatcgttattccgcgtggtacatacatgactggagctttatttttcagacagggagtcaacctgtatattgaagacggtgcaacacttatgggaagtgacgacatcagcgattatccggtctgtgaaacaagaatagaaggtgaaacctgtcagtattttactgcacttatcaacgcttctggaattgatggctttacattgtgcggtaatggaacgatagacggtaacggcttacgaagctggaaagccttctggcagcgaagaacctggaatcccgactgcaccaacaaagacgaacagcgtgcaaggcttatctatatgtcaggctgtaccaatgttactgttgccggattgcacatttgtaattcgcagttctggactaatcacctatatagatgttctcatgtacgttaccttaactgccgcattacaagcccctctgcgcctgtcaaagcacctagcactgacgcaatagacattgacgcctgcactgatattcttattaaaggctgcacaattaatgttaatgatgacgcagttgctttaaaaggcggcaaaggaccatttgctgacaacgacccagacaatggtactaatgaacgcataattattgaggactgcacatttgaattctgccatggatgccttacatgtggctcagaatccatacacaataagaatataataatgcgtcacatcaaggtcgactcaggttacaacctgctctggctgaaaatgcgtcccgacacgccacagcattacgaatatatcactatagaatatgttcagggaaagatatttaatttcatcaacatcaatccgtggacacagttttttgacctgaaaggaagaactgacattcctccatcttccacagaacacattataataagaaagagtacctgcacctgtaacgttttccgcaacataaaagaagcaccagaacaatacactctcgcagatatccagattgacgacaatataatagaagaaatcggaacaccttccgataagacaaaacataccggagcagaataactgccccggtatgttttattttattggtattgaatatgatatcagcaggatatgttagtggcgcgggcttgatttattcctgtactgtgcggaagttaatgccactatatacaaaagttcagggcttgaaatctcgttcaagcgaagcgcgtttgatttcaagccctgtaaaaaactttgtatatagcggcatttactaccactaagctcaggaatcatgaaagcctgtaccactaacatatcctgcgtcatacatatttaatgactaattaagctgctgccttctcagagttcttctcgctctttgcatagctctttactgagttaactacgatgattacaccgagtacaataaggagtatagcaattataagctgaagtccgttagcgatgaatacgcttccccaagatgtctgtccagcaggaattgtaacagatgctgctaacttgatagccttaaccattgcaattgttctctgtacaagtgctgtaaatgttacacaaagcatgatgataagaggagggaaaagcattttgttgcttcgtcctgtaacctttaagaatacgcagagtgtaagaattacaagagcacttaataactggttagctgaaccgaataatggccagatatttgcatatccaatcttagtaaggatgaatccacataccaatgttacaattgttgagaagtatgtattacagaataactttctccatccttctgcatgttccatatcatctacgctgaagagttcctggaaactcatacgaccgatacgggcaactgcatcaagtgatgtaagagcaagagcagatacacacattgtcatgaatactgttgcaaaatgtactggaacaccaaacatttcaaagaatcctgctacaccactgctgaagattgcgaatggtgtcttagctggaagtgctccgttagtagcagctgcaccagcaacacaaagggcaagtactgcaagtaaactctcaagtaccattgcgccgtaaccaaccttaagcatatccttctcgttattaactgtcttagaagatgtaccagaagatacaaggctgtggaaaccagaaacagcaccacatgcaacagttacgaaaagaattgggaacattgttccaagctttgcattgttgaatcccgtatatacaggaagattcattgaaggatgtgcaactacaagaccaactgctgcacctacaatcatgcagataaacatgaatgttgtcatatagtcacgaggctgcttcattaaccacattggcataactgcagcgaagaagatatatacaaatgtgatataactccatacatctttgttgaactcaagtgggaaaaacataccaacagcaaatgctgcgataataaacacaataccaagcactgcttctttccagcctgaaagctttaaattcttctgaataagaccaaatacaacggcaaacaccatgaacatgatagataccataccggctgaaccatttgtcttagcaactgctgataaaacagtagcaccatcagcatttactgtataagcattaaatgtacctgcaaccatatctgcaaatgctgcgataacgataagtgtaaataaccagcagaaaagtaagaaaatcttacggccaaacttaccgatgtacttctcaataatcatacccattgacttaccttcattcttaactgaggcataaagtgcaccaaagtctgtaactgctccgaagaatacaccaccgatgaggatccagagtaaaactggtaaccatccaaatgctgctgcctgaatagcacctgttacaggacctgctcctgcaattgatgagaactgatgactgaaaacagtccagccattagttggaacgaaatctttaccgtcgttatatttaacggctggtgtctctgccttagggtcgataccccatttctttgctaaccaacgaccataaaccatgtatgcaccaaaaagtacaactgccgcgataagcacgattactaatgtgttcataatgtcactctcctataaaaatatatttcaccagtcaaacgcagtggaagcggtgctcacacaaaaaaaccttcgtcgatgcactaatccattactggattatgtgcaaagacgaaggtatattatttctacttccgcgttaccactttgcttgccggatactccgaccactctactgccactcggtatattcatatcttatggcatgcccttttaacgatgggtaccggttccaactactagacatctgcctgtctttcaccagaactgcttgcaggtgagggcttaatcattccttgctgccgtctctcatcaactgacggctttctgtgagcggtgatatgaagaagtcatttcctgttcttcgcatttgactgttgatttgtacattaaaatattcctttgcggataatttgtcaataagaaaattaaatatttcttaagaattcttaaatttcttaataaaattaatttcttttgctttatttctgtttatgcacagccagaccgctttaatattattaagtaaatctaccttttgattattatgtaaaaccgcctgagtaaatataaccagctaattatatttctctgtttaatcagaaatttataatcagcccacctgtattttatcagcccttcctatatattcatagaaatcaatcatcctataggtaaattttgcttcttttactgtctgagactatcctttcgtcccgctcttagcagaaatttcctataaacttgcataatattctgctttgataggttgattttcattctagcattatagtcatatctattttctacctataagatgtttcaaaatgcgactacctataggtatcacattctccctatattttcccccatatttaagatattcttgttgaaaatagtaaatatttgctataaaatagagatagtttattttcgtgataaaatacttcactaacttaacaattttatattttataggagattattctatgaactacgatgctaatgtttttaaagccaaggctaatattaaagcccgtcggatatggcttgttttctcactccttttgaccgccaattatggtactgatgcagctaacggaatctatccaaaaagcagttacataatatttgttgcgctttgctggatacctttctttgttggagaattatttttcagaatcaaaggaaaagcaactgatgcgtacagattatgtcttgttattggttatggtattttctatacatttgtaatatgcacaactgattctccgatttcattcacatatattctcccggttatgagtcttctcgttctatataagaacaagaaattcatgattaactgcggtattgctaatgtactttctgttattgtcagtgatgtgtacagatatgttgttctcggatgcaggtctgatgcagatatgaagaattaccagttacaggttgcatgtcttcttttatgctacatctgctatgttatgtctatcagacaccttaatgaatccgatggtgctttgaatggaagcattaaagctgatcttgacagagttgtttcaaccgttgagaaggttaagacttcaagtaattctattatgagtggaattactgttgtacgcgaactggcttcagagaataagcatggttctgatgttatcatgcttggcatgaatgaactttcaagcaataatgaagatttaaaaagccatactgcttcttccactgatatgacaaccgacataagctcacaggttgaacatgttgcccagcttattgatgatatggtaagccttacttccgaatcacaggagcatgcatacacaagctcaagcgaccttgaaaaccttattgcaacagcaactaccatgtctgagctttcttcagaggttgagcatatcctgcatgattttgaatcagaattcaagaccgttaaagaccagaccagtgctatcgacaatatatccagccagaccaatcttcttgccctcaatgcttctattgaagctgcaagagccggagaagcaggcaagggcttcgctgttgttgctgaacagatccgtgcattaagtacagatacaaagacttcatcaagtgaaatccagagtgcattagaccgtcttgctgtaatctctgataaaatgctttcttctattggtgagactttatcacttattcaggttactcttgaaaagattacacagacaagcgaaagtatcaatcttatcacatctgattctactcagattgaagaccacattcatattattgatacagccatcaaggatgttgaatctgctaacagacagcttgtaagcaacatgtcacaggtatcagacatcgttaatacaatgacagaatgtatcacaagttcaaaagatataagtagcagaatcgttagtaaatacgatgaaagtgctaccaacatcaacaatatggagaatacaatacaggctcttatgtgtgagcttggtgttggcggattcatgggtattgaggatatcaagacaggcatgaaggcttctgcaatccttaaaggtactcatggtgaaaatgttgaattccacggaacaatcaaggctcacgatgataaaggacttacacttgaacttgagaaagcattacctgccgttaatggtgcaattgaatgtgacatgttagtaaccgtcggcaatgtaatataccgctgggagaatgccaagattgcagctgacaaaaaaggctctgcaacaacaggtgttgttacactcatgacaagacctcagattcttaaccgccgcaaatatcctagaattgatatgaacaatcactgtataattacagtaaagggtacagatgaaacatttgaaggaaaacttgataatctgagtgccaatggttttgcattcctctcgaaagacagatttttctcaaataacaaaggcaaaatcgttactgtttcaattgataattttgatttgcctgcacattctgtattagagggtcagattataagatgctctgataatgacggcgtctacatagtaggctgccagatgccagaggataactactacattatggaatatgtagagcaaatgatacggactcaaaaaaataataactaaaatcataaaatggagaaaagcatattaatcagcttttctccattttgtatatactagataaccatccagtcttcaaacttatttgcattttcaacaatgttgacaattccatctgcgccgtaagtaaatgccctgtgaataaatacatttacttcctcgcccttctttatcggagcttcctcaacgtttcttgttccgacaacctctataccgttgacattgacagttatctcgacttccttgcccatgaaaagcttgtctacaaccacgcccttctcaacagaagcgactgaatcaatcttctcatcaagccttgtaatgttgacattctcaggtcttaataccgccttaacagaatcgtcaagctggttaaaacctttaatcttattaatctggtcaacatgtaccggatgtcccatgaattccgccataaatgctgtctcaggctctctgtatatctgtcttggcgttccaatctgctctatatgtcccttgtttgtgacaataatttcatcagcaacctcaattgcctcatcctgatcatgtgtaacgaatatacttgtgattccaacctttgtaatcatatcacgaagccagcttcttaattcctgtcttactttcgcatcaattgctgcaaatggttcatcaagaagcagaagctccggattaggtgctaatgcccttgcaaatgctactctctgcctctgtccgcctgataactggctagggtatcttttcgccatgcctgaaagtccgacaagctcaataagctcatcaacacgtttcttaatgtccgattttttccatttattgacctttaatccaaatgcaatgttatcatacactgtcatgtatctgaaaagtgcgtagttctggaaaacaaaacctattccacgcttacttgccggcacatcattaacaaccttaccatcaataataatatcacctgaatccgcagtctcaaggcctgctatcattcttaagatggtagttttgccgcttccgctaggtccaagcagtgcaataagcttacccttcccaattccgagattaatattattcgaggctttaaatgtgccatatgtcttattgatattacgaagctctacatatttttctgtatcctgctgtaattctgccataatctgttccgcctttctgttgtagtgcgtttctatccttcctgctgccctttctctgccttagctgcctgctgccccttgtattcaagcacactccgaagcaccagtataataaccgccatcagcacaagaattgctgatactgcaaatgctcccgtaaaatcatatccctgatacagaagttcaatatacagcggcatcgtgttagttcttccgcgcaaatgtcctgaaagaacggacaccgcgccaaactcccccattgctctcgctgtacacagtacaataccgtagagaagcgaccatttgatatgcgggaatgtaaccttccagaatatagtccagccatttgcacccataagcgctgcggcctcctcctcgtcagttccctgcgatgtaagaaccggtatcagctcccttgatatgaatggaaaagttacaaatatagttgcaagcacaattcccggaactgcaaatataattcttattcccatagccttaagatatggatatataaaactctgtcttccgaatgtaagcacatatataagacccgctataatcggcgaaacagtgagtggtaaatctattaaagtagatataattttctttcccttaaactggaattttgtaataagccatgaggcaaatattccaaaaaatgtgttacacacaaccgcaataagcgaaacctctattgtcagcttaattgaatgaagtgcgtatttgtcggtaacagctgccagaaacacctttatgcccttagaaaatgctgtgtacattacataactcaaaggcagaataagcatcacaaataaaaacaacacacttatacctattagagtccattttaacggacctgaatcttttctgatgttcatacgctaacccctttctacgaaattccacttacaatcttagatgtcctgctctgtaacactgcatttataaagaggattacaaatgcgatgaataacatcacaagtgctatcgatgttgcacttgcatagtcatattcctgtaattttgacataatcataagcggtgctatctctgtttcatatggtgtatttccagctatgaaaactacgcttccatactctcccaatcctcttgcgaacgacattgtgaatccaccgataagtgccggaagtatctctggaagtattaccctgaatactgtctgtctgttggttgcgccaagcatgttggctgcctcctcatactggatatcgactttttcaagcactggctggaccgccctcactacgaatggaattccaacgaatataagtgcaaatatgattcccagccttgtgtatgcaatctttattccgaattttgcaaagaatgcaccaagccagccgttagttgttgtcagatgtgtgagtgctatacctgcaacggctgtcggcagcgcaaatggaagttctattattccattcataatctgcttccccggaaagttgtatcttacaagaacccacgcaagaatcgttcccataactgcgtctataagtgccgcgattaacgctgtctgaagacttactctgtagcttgaaagcactctcggccttgtaactgtcgttataaattccgtaaacgacagctttgccgagaatatcacaagggtacataaagggataacaacaatgaatcctaacattgcaattgttattccaaatgaaagaccaaagcccggtattactctttttttctttcttttcttctctttcattctgtcgtttccccttcccttaattacttctatatattttataattacttcttttcatatatcttgtcgaacactccaccgtccttgaaatgcttgttgtttttttaattcctactaattttatatgttactatgttgcagattatatacctactaggtttatatgtcaatagtgttttagaatttctagttgtttcctgatgcctgtttccttcggaacgcttttttctccgtaaacctactaaacatcttgttttcttagcttgcgtaggtctttttcctcctagtttctcttttattccctctcatccctctcgaaagacctactatattgccaatttcccctccttgcgtaggtctttctccttctagtttctcttttattccctctcatccctctcaaaagacctactatactgccaatttcccctccttgcgtaggtctttctctgccaatatcctcttttattccctctcatccctctcgaaagacctactatattgccaattttccctccttgcgtaggtttttctctgtcaatattctcttttaccacttcgcattctcctcaacagacctactaatctacataattaccataattgtgtaggcattttccaaatattatctcatgcctatgattatcctcaccctgccctcttgacttcttgtttcatctgtattactatatataatacaaataagacaaaaatcacctctctttacagaaaggagcccgatatggttattgaacttgattttgcgagcgacacacccatatatgtgcagttaaggaatcagattgttaaaggaattggcaagggagaacttaaggctggcgagaaactgccgactgtcagacagcttgcttctgacgcaggcgttaatacaatgaccgtcaataaaacttaccagattcttaaagctgagggctttattaaaactgatagaaggcttggtgcatttgtcgctgagaatattaatatggatattgaattcagggaaaagcttgaatcggagctggagctgctgtcagcagaagcaagcattaccggaatggacaaggaagaattcttaaaaatgtgcgaaaacatttattccaaaatgaatccctgcacaatgtaacacgcctgtattcacacatgcattaacacacacagacccactatacaaggaggtttccttatgaaaattgcaatgtttatgctattcttcgtatgcaacatgttcacaatcctgatcatgagatttgcatatgaatccaactaccgatacaacaatggaatgcttatcggagtccacattccaggcgaccatgttaacgatgacgatgtcacccgacttatgacacgctttaagaaaagcatgaaatattttcagaatatcaatgcagtactctcaatagccatatgctttcttaattttgtgaacataatcattttcgttattatgtatacaatctggattttcgtgttcattttgggaattatgtatatccagctttcagcgcatcggaaaatgtatctgttaaagaaacagaatggctggtttgttgaatcccagaaacagaaggtctttattgatacgcgtgcctgtgcaaatgctgacacaacccccatcagcttcagataccacatcatcataattgccgcagaactactggcactgattccattctattcatggacagacagagcgtatttttctatgattattgtatttgcaatatgtactgtcatagtttcagtattcgggtttgtgttccatatttatatgaacagacgacagaatcaggcatacagccttaattcggacattaacaacattgttaatctgactatgaaaaaatacattgcttcagcaatgcttataatgtcacttcttaacttcgtggcatggataacatttgtattaatgtgtattattcaggacactgttggaaacttaagtttctggatgtacattattctacaattgttaagcggctgcacgctcactgttattcttattcttgcacgcaacagaaagaacgaaatgcttaaagctgacacacagccggtatttgttgatgatgatgactactggaagactggattttactacaatcctaatgacccgcaccttttcgtacccgacaggctgtgttcgaccaactactcgcttaactacgccagaaccggtgcgaaggtgttcactggtacaatcacagcaattctgctaggaaccttaatatggacaattgttgtacttgcgccgttcctgcatgtcactattgatattaagactactgaaagcactgtaaatgtgtcttcatgcggttacacaagcagtattaacattgacgacatcatagaacttaagcttatggataagcttccagacgaccattttttcaagtccaatggcggtgccacagaaagttatcttgtcggaagattcaagggcaatacttatggaaaatgcagtctctatatttttaaagatgtctctcctgtgctccttataaagaccgacagtcagacagtattcatcaattctaaggatgatagtgagattgttaatctgtataattcacttaaaaacgactaaaacaaatgcgcattataaggcggcgtatacactgccccataatgtgcatttactatttcctgtgcttctttacgatatactcttcatacgccacactcactttcttaccactgaatgcaactccgaacatgccaatcccagacacgccatgcttttcaagattggctgtgtaacttttctgctgaatctgtctgactgcactgccggccatcttctcaagctcagcttccttacatgctttgaattctatgatatatccgtgtccgccacggctcttcggttgcagctctatgtcaaatcgtccctcacctgactccctgttagacgagatataataattgtctgacaataccgcaagcattccaaataccaccccatgatagaaatcctcatgtgccgtatcaaacacgcttgcagactgcaaaagatactgctgcaaggtttctgttaataaatgtgcatttcccgtacggattgattccgcaaagtttcttagcagcgcacctgtaaatatgccgttatatctgtcaataatctccttctggaacacgctctttatctcataattaggtatcgacagcgcgcatatcggattgtcgtacagagagccaatatgctctgacacacgcagatatccggcaaccagaaggaagctgtatattgtatcaatgtctccattaatctcaggatatatgatatctgtgtcaacaattgcctgaacagtactgccctgcagcaatcttaataagttatctgcaaatgtggtatcagcactattaaacagctcgccgattatctcattgccacttgttcttgaccagaaggctttgggaacacatttgttattgaagtaattaataaccgaccacggattatatattccggttctgccaaacatatagccgtcataccattccttaatctcacccagccggtcagacacgccgtagtactgcgccatagcagaaacttcctcttccgtgaatccaaaatattgcgagtattcatcatcaagaattgtattaaccacaagattgttaagcccgctgaacaggctttccttagctatgcggagaattcccgtgagaatccccagttccagacttggattgtcctttaagacagccgacaaaagatttctcataaagccaatcacttcatcatagtatccaaatatatgtccttgctggattggcgtatcgtactcgtcaattatcacgattacattcctgccataatgctttgaaagcattgccgacagcttccccagtgcaaactgataacctattatcgttgcctcatcatcaagtattgacttgagatacttcttatcatagtcacttaatctggcgcttgtcgtcagttcaatatgtcgcaaaaattcattccttaatgtaaagcagagacttgcgtacatgtcctgccatgttgactggtgggcatctttaaatgtaagaaaaatcaccgggtactgcccctgcttctccttatacagcgcgccctcccgccatatcttcttattcttaaaatacactgatgtatccgtatcagtcttttcaaaaaatgtgcgaaccatgtccatagtaagtgtctttccgaatcttctcggtcttgtaaataaatacaccttactgtgattatctataatgtccctgataagcaatgttttgtctacataataacattcattcgacacttctttataagatgttattccaaccgggcagggacgcttcctgttgtatacaacgctgtcttccctgacataaagattcctattctcccttaaacaatccggtctatccacatcgtcaggtatcatccagaacttgccttccttataagctcccggcagctttccctctgtacacaactggttaattcttctcggcgtcacgccccatcttgcggataattccttcgccttaatatatctaatatccataaagcccctcttttctgtgcattactgcacatgctgaaatccgtgtcatgtacacagattccacaccgcctcttacttaattcacaacatttatatacatctatattatattctacgcaattttccggaaatatcaaggcattttcaggaaatattattttaattttcggaaattatatatttttctttaaatattatatatttcctcatttacatttgacaaccccgccccaaagtattataaatatcaaagggaatgaagtactcccttgggaaacctaaactgcttattcaggctgatgacttctacgattttatgtcgcaggaagcatcagctttttttgcgttcataaatgcatttactatatttttaaggaggcttactatgcttacatctttatcacttatctttctggttgggctcgtcatgggcgcaatctgccagaagttgaaactgccaagaattataggaatgcttgttaccggtattgttcttggaccatatgtccttgatttccttgacccgtcaatcctttcaatatcggctgacctgcgaaaaatggctcttatcattattcttatcaaagccggtctgtcgcttgacttaaaagacctgaaaaaagccggacgaagtgcaattctcatgtccttcattccggcttcctgcgaaatcatcagttatattctgcttgcccctgtaattcttggaattaaccacgccgaagctgcagtaatgggtgcagttctcgccgccgtttctcctgcggttgtcgttccccggatggtaatgctgattgagaaacgctacggaactgacaaggcaattccacagatgatactgtctggtgcttcgtgcgatgacatatttgtaatagtgttattcacaacatttttaaatgtggcacagggtggcaaggcaaatgttatggatttcgtaaatattcctgtgtctattatactcggcataattcttggcatagtaaccggattgggactgtatctgttctttgaaacatcatacgcccgcaagcataccgtaagaaacagcatgaaggttatcatcgtgcttggcttctctttccttcttattgcaattgaaggctggctcgaaggaaaagtgtctgtttcaggacttcttgctgttgtcgcaatggcatgtacgcttaagtttaaatgtgttcctgacgtatcagcccgtctatccgagaaattcggcaagctgtggctcgctgctgaagtaatattgttcgtgcttgtcggcgcggctgtcgatatccgctacacacttaaagccgggcttccagccttactcatgattcttgcagcacttgtcttcagggcagccggagttcttctctgcaccgtaaagacaaatcttacatggaaggaacggcttttctgcataattgcctatcttcctaaagcaaccgtccaggcagccatcggctctgttcctttagccgccggacttgcctgcggtcagatagtgctttctgtagctgtgcttgcaataatagtgactgctccgctcggcgcgcttggcatcgactgtacttataagagactgctgaaagaggacaaaacccactaaaagccattatacactcaatatagtaggtcatttccgtagtttattcatatactttccggcttgcgacctactatattgttaaattagcatattttcgtaggtctttttcccacatttcactaacaactgtaagcaatttgcgagcgaaagacctactaaacatatcttccttgattgattagtaggtcttatcacttaaacaacttataatattctccgcagaaacctactaaaccaacaacttgctctatattagtaggcttcgtgtacctgtgcatagtcagattcgcgcagcatattcaacaaaacattttaattaatcatatatcttatcaaatattccgccgtcagagaaaaacttctgtgtagccgcttcccagccgccaaaatacccgatatccgccatgtcaatgtctttgacaatccatttaccatcggaaggtatttccttaatattccttgaatcgctggaagactcgtattcattctggatgtctttgtttacaggtcggtagaaattctgtgcctcaagcctctgtgcgtcatcggtgtacaggaaagaaagataggcgtctgccaacccttctgttccattcatctgtgtgacctcgtcaaccttcgcaaccgttggctggcacaatacagatgcggacggaacgacaatctcatactcgcccggatattcctgtaatgcgaaaaatgcttcattttcccatgcaatcagaacatccccctgtccgttctctgcaaatgttgtagaagaacctcttgcacctgaatcaagcactgccacattcttgtaaagcttggtaacacttgcctgaacctgttcctcagtctgtccctgcttcttaaaataataccatgctgcaaggaaattccatctggctcctccggaagtcttaggattaggggtaataaccttaaccccatcattaagaagatcatcccagtccttaatattcttaggattgccctttcttacaagaaagacaatcgtagaagtgtaaggcgagctgtcatcagaataatcattgatatatccgtcatcaatcagcccttcgtcccttataacattaacatctccctcaagagcaagcgtgacaacatcagcaccaagaccgttagcaacctctagcgcctgctttccagaaccgccatgagactggataacctcaaccttctcaccagtcctgccataccagtaatcctcaaaaagcctgttatactccttataaaactctcttgtggcatcataagaaacattaacaagttccgtcttcttctgcccacagccagaaagtccaataaaagtcaggctgaaaatcatacctaaagatattaactttttaaaaaaatgtgtattcataattataacctaactcctacaaaatatattccaaaaccaggcaaagcagcgaagcgccctttaccgcacatctgccaacacttccacccctgaagtaaccccacgcagcgggaaagaaccccagcagcactaaacttataaagcaacgcaggtgctttggagccgccggcacttagctcgtcaggacagcctcacaaagtgaggcaaatcctgacaagcttagtaccgctgcgagcgacaagcagcgaaagcgtgcctgcgttgctttataagttctagtgcagcgtccgttcttcccccagcctacgcattcttcttaataaactcagccacatccacagtagtggcgtcaacctcagactcccagcctgcaagcacttctgcgccatcaatcttaatatcagctgccgtactaagtgcaagaataacaacaatacctgcatttacaaggtgagtcacaacatttgtataatcctcgccctctgctggaacatacagatatacatgcttgctgtcaagaagaagctccttctcaactttctttaagaaatcaacattaatcttgtctgaaagaactgtctctacaacaacaggcttctggttgttaagctcagctctgaaagctgcgtcaacttccttaacatcatttgctgcctcattaacttcacggacaacgccgcaggcactagtcatattagtaacacggtctatgaggataagctcgcccatagtcttgtgaaggtcaaattcatcaacaacaattacatcagcaagagaaatcttgcatactgcgatttcatttttcttaaggagagctgccggcttctcctcacctgtattaacatcaatagtattgacaatctcagtaacaacgcccggaataagtcttgttccaagctttacaaagaagttcttgttattagtaagaacatcatcatccatccagaggattgtagctgttatctctgttgcaagcttaaggtctgctcctgctgcaagaactgaacctcttgagacatcaacctcacggtctaactggatagtaacaggctgtccgatagatgcgctctgggcttccttatcaccaacatggatgctcttgacatgaacatgctccttagttggaagagtgataatctcgtcaccaacagatacgcttcctgcctcaatctgtccctggaaaccacggaattcatgatttggacggcatactctctgaacaggcatgtagaagcctttttcttcctcagtatcatcaacatcaacctgctcaagataaggaagaagtgcctgacccttataccaaggaatattttcagacttagttgttacattgtcaccctcagttgctgaaacagggataacaactacatctgacaaagaaagctcctttgtaagctctgctatctgtgcatttatctcgttgaaacgctcctcactgtaaccaacaaggtccatcttattaactgcaaatacaaaatgcttaattcccatgagcgcacagattcttgcgtgtctcttagtctggataagcacgccttgctttgcatcaacaaggattaccgcaaggtctgcaaatgaagcaccaaccgccatgtttcttgtgtactcctcatgtcccggagtatcagcaacgataaagcttctgttgtcagttgtaaaatatctgtaagcaacatcaatagtgattccctgctctcgctcagccataagaccatcaagaagaagtgaataatcaatcttaccttcgcggcttccaaccttggaatcaagctctaacgccttctcctggtcagcatacaataactttgaatcatataaaatgtgtccgataagtgtagattttccatcatcaacactaccgcatgtaataaatttaagtaaacctttcattctagaagtacccctctttctttcttctttccatgcttcctgcttcctcatggtcgataacacggcttgttctctctgattcaaccgcacttaaagtctcttcgataatctcgtcaagagtttctgcgtctgactcaacaccgcctgtaagtggataacagccaagagttctgaatcttaccttcttcatctgtggcttttcgcctggaagaagtctcattctgttatcatcaaccatgatgatattgccgtcacggtatacaacaggtctttctgctgcaaaataaagaggtacaatatcaatcttttctctctggatgtactgccagatatccttctcagtccagttagagatagggaaaactctcatgctctcgcccttgtgaatcttagtgttgtaaagcttccacatttccggacgctggttcttagggtcccatgcctgtgctgtatttctgaaagaaaaaattctctccttagctcttgatttctcctcgtctcttcgtccaccgccaaatgctgctgtaaagccgtatttgttaagtgcctgcttaagagcctgagtcttcatgatatcagtgtaagctgaaccgtggtcaaatgggttgattccctgctttacaccctcttcgttagtgtatgtaagcatctcgattccaagctttttcgctgtctcatccctgaacttaatcatttccttgaacttccatgttgtgtcaatgtgaagaaatggaaatggcggtttctcaggatagaatgctttcattgcaagatgaagcataactgagctgtcctttcctatagaatacagcattaccggcttttcgcattctgctgcaacttccctaataatgtatatcgcctctgcttcgagtgcgtccaaatgtgataaattacccatgatattcctccctaatatttattagcttcctgtctgttgacctcaagcgtcttaactgttccgtccggtgccgtcaccgtccatgtattgatgcttccattctgtctgaacgaaagagtgcttcccttgccacctacatcggcaccaaggaagaaattaatcgcctcaaaacgacattccttaagacaagatgtacagccccagcagtccttgacatgctttataaatgcttttccatctgtatctttcttgataaggttgccgggacaggcttcaacacacttcccgcagccaacgcattttaacttatttatctgaatgctcatagctgtcgcctcccctcacaaggtctcttatgattatcttaatctcgccattctccttgcgggagttgacatattttaaccagtcatcactcttagccggataatccatattctctgcaaagctgtgccagcgtgtttcttttcttgccttcaaatgtgctataacactcctgcacaccgtaagtctctctcttatctcatagattctaagcaagtcgtccgcatcctgtgccgcaagattatcaatgctcttctctaagaactttatcttctcgtccgcaagctcaagtcttgcttcattgtactgataatcagtgcttatgccgcctgcgtactggtccataatcttctgcattgcttcctcagtctgctcgatatcgaccagcccctgcttattattaaggaagctctcatattcatgcttcttttccagtgcttcctgtgacagctcctcatccgaagcttccctgacaacaaatccttttccagaaccagtaagtctctctgctatcgcctgtgctgcaatctcgccctcggcaagtgcgcctgtcacatatttctgtggacatccgcctgcaacatcgcctgctgcaaaaagcccgtgaattgtagtctctcggttattatcaacccagtaaccactcgctgtatggcctccgactatgtatggctcagttccttctatctcaacattttcttcagaaggaccgcccgccgcctcaagccacttaagtgtctggctcggtgccatgttaagatatgctttgtaaaggtcttcttcctgctccctgcttattcccttagttccaagataacaaggacctctgccctcacggttttccgtaactgttccgtaaagtctctgtgaagttgtaagaccatatttgttctcatacacttcaccgttggaattaagctgctttgccggaactccctgtgcgatagttcctgtcggagcaatcgtatctttacatcttaaagcaatgaatctcatttcaaatgtggtcatctccgcacctgcattgattcccattgcatatccggctcctgtattgaacggtggataccacattttatgtcttgaaaatccaggattgttaggtctgtaaagacctgccgctccgccagtagccacaagaactgccttcgcatttatctcatagaactctgcattgttgacatcaaatccgtatgcacctttaatcttgttattctctactatgaaatctgtaatattaaggtgattgattaccgctacattgtcctgcttcttaactgcatctgccagtatcggcttgatattctcaccatttatcttaatattgcggtttcctctcgcaacataatctccattctcatctttaaggattacaagtcctaagtcctccattatcttagtgacatgattaagcctctcagacattgaaagaagcagatcctctcttacaattccatgtgcatctttcttacaataatcaacataatcctgtggcaccctgcctttagtgatgtaggcattaattgcattaacacctgcagcaagacatccgcttcgtacaatgttagctttctcaacaatcagtacatcaaggtctttcttccctccaagtgtgataccggcaaaacaccctgccgttccaccacctataataagtacatctgtgtcaataattctattcttcaaccttcatgtacctccttgcaaaatctaattccatataaacatagtatcttggtatgtaaatcattatattctcaatttcctatttgtcaatagggtttttgcagattcttgtattcttgttatcttgttatttgaattgtggggaagctgggtaatggctcggtattagctgagtatttggtggtatgtgctggttattcgtcatggtattagatgggtgttggctgtgtgcctactaatccgccacttgcttcaactttagtaggtctttcacggatgttatcctctctcctgctctttatcttgcttaattttgcctactaatcttccattttcctcaactttagtaggtctttcacaactattttcttcccatccgctcatcttcttgcttgatttcgcctactaatcttccacttacgctctctttagtaggtctttcccagctgttatcctctctcctgttctttatcttgcttgatttcacctactaatctgctgcttacgctctttttagtaggtctttcccggctgttatcctccctactgctctttatattgcttgatttcacctactaatcttccacttcccttagctttagtatgtcatcccccaaaaaagaacttgattttatacgaaaaatatatacataataaagcagagcaaatataacacttaaacaattgtatacaccatgtcaaaatggttattatatatgtaatgactaatatacggctgtcacctacacaacagcagatgacagccgtatatacctaatctcaaggaggttttatgataatagattttcatacacatacatttccagatgaacttgctgacagagcagttggtacattagcccacagcggaggaatacacaattatcttgacggcagagtacattctcttacagattcaatgaagaaagctggaattgattactccgtactgcttcccgtggcaaccaagcctaatcagtgcgacacaatcaatacacttgctttaaagactaatgaaacaagtgagacaaccggattaatttcatttggggcaatacatccggcttgtgagaatttcagagaaatattgaactggctttccaacaatggtttcaaaggcatcaagcttcacccggttttccagaaaaccaatatagatgatatgcagtcattaaggcttatcgaatatgcatcagcactcgggcttataatacttatacatgcaggcttcgatgtaagctttccgagctgcgacgagtcaagcgtcgacagacttaccacaatgattcaggaagtaaagcctgaaaaactcgtccttgcacatatgggtggctggggacaatggaacgaagtcgcctgcatattagaagacgattacatgaaaaatgtatatcttgatacctcatcatgcatcaagaagctcaatcacaacgcaagccttacaatagaaaaattcaagaaaatggtcaacattcacggtgcagaccacatattattcggctctgacagcccgtgggacgaccagaaagacgcagtagatttaataaaagagtgtggattttcagaaaaagataccgatgcaatactcggtaaaaatgcggttacactccttaatctataattcaatcagaaagttttgcggttataacctaaaaattttttacagtttattttttcgacaacgcacatattcaccaaacataaatcaagcaggctgtcccacataacagcctgcttacaatttaaccaccaataaaatcatccccaccacatgcacaacaagcatagcaggaaccgtatacttaaaataccacttttttgtcttatgtctgaacatctgcattgcaataaaagctccaagcgaaccgccgattagcgctgtaataagaagagtcgcctcccttattcgccatctgttgtgtatcgctttccacttatcaattccatacaaagcaaatgttactacattaataatcaataaatatattcctataatcttaagcattacttttctttaaatgcataatcccaagtcttagcgttgcctgacttattctgcacaatcgtcatctgccactttgcattatctttatccgtgctgtccttaacagtataatatggcgactttccgctatccgacatatagattatgacgctgtctcctttcgcatctggtgtatccattgtaccatagaatacgtaagatgcatacgaatattccgtatcaatgctcttgctgctaatatactgcgtattctcctgcggcttatgctctttaacatacatttcgcgcttctcaatcacaacttccggatacttagtcttaagaaattcttccgcttcctgtgccgtttcctgcgacacctttgctgtgcgattctcctgaaccttagacattactggcttgataagcagtattactgcaattgccacaacaatgaatactgcaaatgcaatagcaagagtcacccttttcttaacaacatttttatcatccataaatctcgccctcctttttcaatgtctcttattaaaaatgtgcttctttatttaccacaattatataacacgaaacttacatccagcttacattcacatataatatacatttgtacttgccaatctcatgataatctgctaaactacacaggctgtgttatgatacagtaacaaatcgtgtgttcgagaccttccacacgcaaaacaaaactaaaggagataattgaatatgaagaaaaaaggaatgagtgtgaaattcatcacacaggccgctgtaattgcagcaatctatgtcgtacttgtagtaatctttaactacatcagtttcggaccagtgcagttcagaattgcggaggcactcacaatactgccttactttacacctgcagcaatccctggattatttgttggctgtataattgctaacatccttggtggcgcaattgtatgggatgtagtatttggaagcattgcaacacttatcggtgcaatcggaacatacctgttaagaaagcataagtggcttgcaccagttccaccaattgttgctaacacaatcattgtaccattcgtacttaagtttgcttacggctcagagggcatgtttgcaatgttcttcgttacagttggcgctggcgagataatcgtatgcggaatcatcggaatgatactattatatgcacttacaccagtaagacatgtaatattcggtgatgcggaataattcacacaacaatatatagaactttatacagtcaaaggcagaagaactacctaggataattcgggtaaatcttctgcctttttttaatatccttcagatattatccgccacttgccgccatcgctccgtgcaagagtccatccataatgtatgtactctgtattcgcttcccattcaggattgttaatatctgactcttttatcggtgtatgaaaatctgtctgaaaataaacaacctgcgtaaatttttctgtccatccctgtttcttaccttttgcatttactgcctgcaaagtactttcggagaattcgtcatctacaaaatagactttatgaagttcaaatcccttcatatgcttaaactttctttttataactttaacagcatcttccatatctttctgtgtatatatggaagaagtaccatagtcaacttcatttgttgatgaaatctgtcatcataatcatcgaaatcgtcaaagtcatcatcaaaattctcatcattatattttaactcagccatatcagcctccttcaccatatgctgacatttcccgttacaaccacaagcacaatcaccgctactatgatcagtacactgacagcccttccacgcacttcagaaaaacggctgctaaacacatatgtgactgcaaatacagcaaacatcataaccagccttacaatcaatcgtattacaataaatgttccaatagaaatatttagtccgcagtc

SEQ ID NO: 8546 - DNA, 591 bp, Unknown
  gut microbiota DNA sequence
gtacattcggcaggaagcggaaggcttcggcttgcgttgcacagactgtttattatcgcaggctctggcgtggttataacagcgggtctgtattttacaacatttgcagcagcactgctgttatacggcggagcaggggcgctcaatgcgccggttcagtccatacaggcatttgaaagatttgctatgccgatgagccagattgggttcgtgctgtacaattatgaatatagtgtgctggcggtagtggttcttagtgtggcgttatgggctgtattcgttgtcaacaggaagcggaatcatgcgcttattctgaccggagtagttgtggggttggaagtgcttatgtattacagaatagggcttcacagcatttacagtgcatttaaacagattaatattgtgcgtcttatgaaggtcaacgcggtcatcagcacatatgcgaaccgcggaaggggaagctttgttatatctgagtcggctattatgttctgggcgcttatggtgattcttgttgtgtccgtggctgttgcggtaatgggaactgtgcttatgcgtccgagtcagggtaaaaatgtgctgacacggctt

SEQ ID NO: 8547 - DNA, 2247 bp, Unknown
  gut microbiota DNA sequence
gcttatttaaagtatacaggaagctttcatatttgttaattccatatatgtaatttttttaagatatcagaagtgatttcaaatgcttttttgccagttgcattagaatcactttggatattggttgcaaaataatagctgttatcggaagtttctacatatccgataaaccagccgttgatatcctgtccgttgacacgaccggttccagtttttccgtagaaattaccattaggtgtactggcaatttttatagcatttttaacagaaaatacattttgggaatttagatggaattcatttgtgttaaattttttcaataatgttacttgctctaaaggcgagatttttaatgaaaaatcggaccagtataaatccagatttgaactggttgtctggtttccatattctattttattcaaaaattcctggactctgttaattccgagctgcgaatcaattgcctggaaataccagttaacggaattttgcatagcagagtttaaatcctgatcagcttcccaggatggaaaaggaaaggcatcaccattccatgtcatggaagagtgttctggtgtgatgattccggattccaaccctaataatgcatcgtatattttgtaggtagactctggcggaatacgtttggtggcttcttcaagatcgtatattttccaggaatccaaattattgtcatacaaaacaaatgatccatcatatgttccaaatgtttcggatatatctaacagggagatatttttgtctgtatcactaaaatgatatacgctttgagtagaggcatcaatggataaaatgggtgtacatccaataaaaacagcactaatgaccagataaattatcaatgctctcattttttgataaagagtttctttcctaaaaacggcgatgttgagaatacgtcgtttcatctgcctgaaatttccggacattccaactgccagtggagaggaaaaagaggatattttttctgcaaaattaatcagtgtagttccataagcttggtattcatcagcagaaatcatctgcaatacagcagaatcacaggctatttcacggtcacagagaatttcttttaaagtgtaccaaacaaaagggttaaaccagtagagtatattacttatgaccatgaggaagccaataaatgtatctttgtgacggtaatgctgtaattcgtgtagcagcataaaacgcatatcatcaggattcagttcggaaattaaatggatgggaatgtaaattctgggatgtattattccgattaaaactggtgattttaaaaatgcagtactgtagactgatactgggtgagagattttaagttcctttaaacaattgtaataaatagtttttacctgctgattttgaagcgggagagcagatctttttatggaacgtacatagtttaatgaatgaagggtgaggactgacataatcataacacccgttatccatattagaaagagtatggtattcaagcctccagaaaattgactactgatggaaactgaaaaatcattcacctggtttaacaaaatattttgtgtattactggtaagttcggatagcgtgtcggtaccagagttaagtcctgagtcagtttgaaaaaaatgtaaccatgaaaaaagttgtgagccatgaatctgtacaggaaaaaatggcacggcaagtaataaaaataaaagaaaacagagatggtactgtgtagtcgcagataaatattttttcagaagtttttttgttccgattattacaagtgtaaaaatacatatgaagatattactgattaaaaagtggatgatccagttgctcattcaaaacctcctatttctgatgttttgataataaatggcgtaagttatcaatttctgttgaagagagcttatcgtcttcaaggtaagaagccagcatagaagaaagatttccattataatatcgctttaaaaaagaattgctttcctggcgtatatattcatcttcttggactaatggagtatagacaaatacccggctttgtttttcgtaggaaagagcttttttggaaacaagtctcttgataagagtttgaattgtttttggactccagctgatagttagagtaagtttttctgtaatttcatttgtattgatgggagcatatttccatacaattttcataacttcaaattcggcttctgaaatctggggtagtgacataataaaatcctcctgctaaatcctacatatgta

SEQ ID NO: 8548 - DNA, 2987 bp, Unknown
  gut microbiota DNA sequence
gttctgtgcgatggcagtggcacttgcgatggtgacatctatgttaaaggtttattctttcccatttggcggttctattacattgttcagcatgttgttcatctgctttgtaggttatgtgtatggtccagcaacaggaattttgacaggagcttcatatggtgtactacaatttattattgagccgtatatttattttccactgcaggtattggttgactatccgctcgcattcggggcacttggattgtctggagtatttgcagagtccaagcatggactggtaaaaggctatctgctcggtgtgtttggaagatatgtatttgcagtcatttctggatggattttctttggagaatatgcctgggatggatggggagcgctcccatattccttggtatataatggatgctacatatttgctgaggcggtgattacagttattataatctctattccggcagtgtcaaaggcattgaaaaaagtaaaaatatcggcagtaaatgtatagcttttcaagctgtcaaatatctgctataatacattttgcgtttataaaatcagagcagtgatctgctctggactggttcgaaaacttcccagaataaaaaactaaggattgaaaagcaaaaaggaaaagagtccgggcagccggactttttagagtgagccgtatccttggagatgcggctcttttttacgcgaaaggagattggagaatgaatgcaaaaagaaaaattatcattgattgtgacacgggcattgatgatgccttggcactgatgctggcacttgcatcaccggacttggaagttatcggaatcacagcagtctgtggaaatgtgccggtggatatcggtgtggaaaatatccgaaaggtattaaatgtcatgaatcgacttgacattccggtataccgaggggaggaaaaaccgttaaggcgggaatatatcagcgctcaggatacacatggaatggatggtcttggggaaagtggatacgagaatgtgccggggagcgcgcaagaaaaagatgcagtgagttacattacagacactttaagagagaaacaaggtgtttcaattatcgccattggtcccctgacaaatattgcgaaagcactgcagaaagatccggaggcatttgaacaactggacgaatttgtctcaatgggaggctcttataaaagtcacggaaattgttcgccggtggcagagtacaattactggtgtgatccgcacgctgcaaaatatgtgtatgaaaatctgagaacgaagattcatatggttggattagatgtgacaagaaaaatcgtattgacaccgaatattttggaatacatgcaaattctggatacagagaaaggtgaatttatcaaaaatattatccggttttattatgattttcactgggaatatgagcgggtaatcggttgtgttatcaacgatccgcttgcggttgcgtattttcttaatcgggaattgtgcagtggctttgaagcctatacaactgtggagacagagggaatcagtatcgggcaatctgtggtggatgcaatgaatttctggaagaaagaggaaaacagcattgtgctcaccgaggtggatgagaaggaatttatggtaatgtttttacatagagtttttgggaaatcagagcaggagatcagaacaatcctgcagcagattatggcttaggaggagaaggaaaatgaaaaaattgacagtggtacaggtttgttttattgcattgagtgcggtgattaatattattggaggaaatcttgcgcttgttctgcggcttccgatttatttggacagtatcgggacatttctggcatcggcgctgcttggtccagttggaggagttcttgccggggtggtcagcggtgtgatttctggcatcacgacagatatttattcgctctattttatcccggtgcagatagtgaccggagtggctgctggaattctttttcgaacaacattgttaaaaaaatggaatatttttcttggggcattttgtgtgtcaattgcgggaacaattatcagtgcgtgcatcacagcgtatgtgtttggcggagtgacatcttccggttcatcgattcttgtgacacttttgcataaactgggattgaatatggttgcgagtgcgtttgtcgtacagattgtgacagactatgcagaccgcttgatctcaattgcaattgttgtggcggttcttgcagtactgtcaaattcgatgaaacagcagattcgagagggaaaaacgaatggacaggtatagcaaaattacaaataaaaatcagagggagatcgtgcttttaaaggcatttccatgtatatgggggaaatgtagattttgcgattatatagaggataattcaaatcaaaaagatgagatgattcggttaaaccacgagattttgtcgcaggtaacaggagaattcggtgtcttggaagtcatcaattcggggagctgctttgaactgccaaaagagacattggaggaaatccgaatcttaatacaaaccaaaaagattaagaaactattttttgaaagccactggatgtatcgtaaaaaattgcaggaaatgcgagattatatggggattcctattgtgttcaaaataggggtggaaacgtttgacaatgaatttcgccagcagtatttgaataaaaacgcaggatttacaacaccggaggaggtggcggaactgttcgattcgccgtgtctgatggtcggaatcaaaggacaaacaaaggaaatgatcgattatgacattcggatgctgaaagagcattttagactggggacggtcaatgtgtttacaaacaatacgacggatgtcgttcgggatgaagaactggtgcgctggtttttggaaaaatatgcgtatttggaagaagatccgacagtagaagtgctctatgagaataccgattttggagtaggggattagaaaggtataagttcagccatgtggg

SEQ ID NO: 8549 - DNA, 638 bp, Unknown
  gut microbiota DNA sequence
cgttttcgagcgagagttccagaacctgttcgccgatctctgatcgaaggcttcgacgaagcttgccggtccctccttcgcctgctgttcctgcgctccgcttctcgcgcccgtgctcgcgcctcccccgcgttcgatcccgctcccgcgctcccgcacccgcttcctcgcgctcgcgcaccctgcgttcgacccggccacccgcacccccgctccccacgcccgcgtccaattcctctgggttcgcgttttgcgctcgattccgcgggatctgcgttcgagtccgctgcccgggtctgcctcgccgttcagttctcctgcgtcgcccggctcgtgggacggcgcgcatcccggtcagccggaatgtttcacgtgaaacatccgtacgcgttggaggggggcgcaggatgggacccgtgccggcgagcgccctgcgacggatcgtttccctgcgcatggaagaaaatgcgcgctatgcacgattcttctccctcgctatttcttccgacctggtgtttttctcctcgcctccgtcggcaggccccgataatcgtgcatagcgtgcgttctctgccgccccgcttcccggccttctgcgggcgatgccggcgcgagcccgttcgggccgaacgcggcgg

SEQ ID NO: 8550 - DNA, 337 bp, Unknown
  gut microbiota DNA sequence
ccagtagtccatgcccgcgtgcatgaggacggcggggtctaccggggctttcaccggatcgaggttgaggccagtgtgcagcagacccaccgcgaacggggcttccgcagcgtgcggatgctggacggcgagcgcctgctcggccgcttcgcgcgtgacgccttcggcgatgcactcgtccatcggccacgtctggttgtagtagccgcggccgccgatcaggcacagcggttggccgtcgcgctccaccagcgcgaagccggggcggtcgcccggcagcatggtggcgttgggcggcagcgagaagaagtcgtgctgccacgaggtgtacggatcg

SEQ ID NO: 8551 - DNA, 671 bp, Unknown
  gut microbiota DNA sequence
gcggtggagatgcgcggcaagaagcgcccgatgctgtccgaccttcgcgaatcgggctccatcgagcaggacgccgacatcgtcatgttcatcgaccgaagcatggacgagatcgaggccgagagcgaagaccgccccgacctgggctcggccgagctgatcgtcgcgaagcaccgtaacggccccacgcgcgacatcccgctggccttcaacgccgagtacacccgcttcatggatttcatcgacgattcgcgcgtgggcggctatatgtaaagcccctgttgagccgtttcgcggtacactgggctcatgtcgaaacgcgtcacattcatccatgcatcggacctccatctgggggcgccgttccgcgggttgcgcgcgctttcgtccaaatgggcgaaccgcctgctcagcgccatcccggaatcgtacgaccgcatggtcgacgcggccattgcccgcgacgtggacttcgtggtggtgtcgggcgacatattcgactccgcgcgcccctcgtacggcgactatctgcacttcttcgaagggttggaacgcctaggcgaggcgggcattccggtgtacctgatcacgggcaaccacgatccgtacacctcgtggcagcacgacttcttctcgctgccgcccaacgccaccatgctgccgggcgaccg

SEQ ID NO: 8552 - DNA, 1886 bp, Unknown
  gut microbiota DNA sequence
cccaccaccttgtcgatgaggtcgcctgcggcgccggcgctcgtgggcttgcccgagccgcacaggtgcacgtgcaggttcaccaggccgggagccagatacgctccggcaaggtcgatctcgcgagcgtcgaacggccccacggtggtggccgccggacccaccttctcgatgatgccctcgttcaccacgacggtcatgttgggctgcggctccatgccctcggtgccgtcgagcacggttgcatgggtgaacacgtaggaggtcatggcgatcctttcggttgaggcaaaggcgccgccgcgctcgccgaagcggcgcgtcgcgcttagcgtcagtatacgccgtcgcaagccgcgcgcgaagcccggcacgcacccgccgcgtgccccggaacgagcgacggctagccctcgcgctccacgatgcgcgcgagcaaaggggcgaagccttcgtcgatccttcgacgaagcagaagcttgtgggaggctcgaacggcctcggacatgataggccgtccgtatgcctccgccggaacggagtcgatgagcgcgtctatccggtccatgtcgacggagcccatgaaccgcttgatcgccgcatcgagatcgggattgactgtttgcgccatgtaggagaaggggtgaatggacgctcccctcccatcgcccgaaggcaggcgatagcatgacacgttcgtcccgaacgcatcctgatctatatccgactcgtcgagcatcctccgccgtgcaagcgaatcgccgcgcttgccgaacagcgaactgcccagatcgtacaccggcgcgagctcgtaggagaacgacgcgtccatcaacacgccccagttaccgttgctccggccggggttcttgatgaacgcgtccaccacgaacatatcccagaaacgctcgagcaccccgggcacgctgcgcaggaggtcggatgtctctatcgtggcgagcacgtcgccaaggaagacgctctcgccgtccgagggagccgaatcgaatcccccgtcatcgtcggaaagggcgttcttgatatccttgaactcgaataggcgctttccgggaaacgtgaagtccttgcacgcgcagacgatcttgccgtttcggtagcctagcatcgtctcatgaacgggaatgccgagcgacgcgtagattcgcgcgccgagatgctcggatacagggctcgacgtgtacggcggaagatttttgccctggaggtcgcgcgtcgtacgcggatacttcgctatccacgggacgccgtccacgagaatgccctctttctgtccggcgcgcccaccgtagaaaaggccgctggcgggacaatctcgcaaatccacgatcttcattctgcaggctctccttcgccgacgattgatgtcgaatcatcgtagcacgctcgaccagcgcggctgcagcctacgacgaatcgtcaaccggcgcgtcgcgcttacgggcgcttcccacccgtcacgcccaggcgttcggccgtctcggcaagcgcctgggcggtgacggggcgtcccgcgcccacgtgcacggcgatgcacgagaagctgggcttgtcggccgtgaacaggcccagctcgcgcgacgcggcgcgcacgtcgtctttcgtcatgcccgcgcggcgcagcggcgacaccacgcccagctcggcgagcgcctggaagccggggcggttcgccggatcgtccgtgacgttcgtgccgtcggccagcacctcgaagccgtcctcggccatgcgcgcgaggatggtggagaagatgaacgtcttgcagcggtagcacctatcgggcccgttcgcgcagatctcgccctgcgccagcacgtcggcgtcgaccagctcgaagtccgcccccagctcggcggcgaggcgct

SEQ ID NO: 8553 - DNA, 172 bp, Unknown
  gut microbiota DNA sequence
cgagcttgagcgcttgccgggcgtggggccgaagtcggcgcagcgtatcgcgtactggatcctcaacgccgataaggctacggcgctgcgcttgtcggatgccatcgccgaggtgaaggaaacggtgcgcttctgctcgcgctgcttcaactacgccgaggacgacctgtgc

SEQ ID NO: 8554 - DNA, 21348 bp, Unknown
  gut microbiota DNA sequence
ggcgatggcgtgcgcgtcgaagaagtgagagaatagcgcgacagctagttcgccgcacgtatgcggcttgttcgaaacgaccatgacagataggagacgacgatgtcgaaacgaggcggttttcccggcggcggcggtaacatgggcgccatgatgaagcaggcgcagaagatgcaggccgagttggcgcgcgcccaagaggagatcaaggacatgacgttcgaggccaccgccggcggcggcatggtgaaggtggttgcgaacggcgacatgaccgtggacagcatcgtcatcgaccccgaggccgtggatcccgaggatgtcgagatgctgcaggacatggtggccgccgcggtgaacgaggcgctgcgcggcgtgtccgagatcagctcccagcggttgaacgccgcgaccggcggcttgaacattccgggccttatgtaacctggttcggatagaatcgcgatcatgtacgctgcgccgtccattcagaaactgctcgacgagcttgagcgcttgccgggcgtggggccgaagtcggcgcagcgtatcgcgtactggatcctcaacgccgacaaggcgacggcgctgcgcctgtcggaggccatcgccgaggtgaaggaaacggtgcgcttctgctcgcgctgcttcaactacgccgaggacgacctgtgcgagatctgccagtcgtccaagcgcgacgcaggcatcatctgcgtggtcagcgagccgcgcgacatcccgcccatcgagcgcaccgcggtgtacaacggcgtgtaccatgtgctgggcggcgccctttccccgatggagggcatcggccccgacgagctgcgcatcgcccagcttatgaagcgcctcgcatccgacgaggtgcgcgaagtggtgctggccacgaaccccaacgttgagggggagaccacggcgacctacctcgcccgactcatcaagccgctcggcatcgccgtcacccgtcccgccagcggcctgcccgtcggcggcgacctcgagttcgccgatgaggttaccctcggccgcgctatcgaagccagacggccgctgtaggggaggcgggcaggggagtttactcctctcgcttgcgagtttaatcttgccgcgaacgtatcgaagcgagcgtatgaagtactatgggacgtatggcgacggcattgacgggtgatgtcgggtgccgaaggggcgagggggacgtatgagggcttggccggcggcgaaatacctgacgtactgtttctggcgttcgtggatcctcgtggtgtatacggcgccgatctggagctacgtagcgaacgggacagggtccgcatcgtgctcgttctccatgtatgcttggtcgaccgttgcattcgcgctggtcgcggctctgttggcgttgttccatgaaaaggcttctctcgttttggcgcgcaagggcgttatgtgccttgcgggcgtaatctcgtcggtcggcatgttgatggaatatgcgggcgcgtttctgttctttgacggagccaacctgctgttcgtgtcgggagcgctcctaacgggcgtcggcaccgcgttcattgccgtacgcgccggtcagatctacgcggcgacgcgtccggtggtggccgtgacgaacacggcgctgtccgagttggcctccgggctcgtcttcttcttcgtggtgggcactgtgccgcagatcgcgctgttggtggcggcgctattgccgttggccgccgcgttgatgacgctgttcgagtccgacgcggacgcgacgcgcggacttgtgcgtcgccgcgcggccgacatcgatgcggccacgcgtcgtgcaagcgtcttcgcgttcgcgcgcttcctcgtagtggtgttcctgctcacgttcatggcgaacctgtcgaagggcgctttcgccctgcaagatgccgaggcgtcgttagcgagcggcacgataggcgtgtcgctggtcattttggtcagcttcgtgttggtgctggtgagcagcttgctcaaatcgttcgatttcggcgtggcgtattacccgctcgtgctcatgctcgtgctggccgtggtggtggtgttctcgtcggatgcgggcaatatggccgctgcggcggtgatcgtgctggtgtactgcttgttctctctgttcatgtggtgcttgctgacgtatttggctcgcagcgattattggagttcgattcaggtgttcgggtacggacgctcggttttcgcgctcggttcgttggcagggctcgtcgtggggcagggttacccgcttgccgagatggatggctctgagtcgttcatcgtcggcttggtgttggcgtttttgctggtggcagcatccatgctgattttcagggaaagcgatgtgcgcaagatcaccagcgcgggatggctggcggtcgaagcggtggccccgaaatcgtcggtatcggacgggctcgatgtcgttcgcgatgccgtcgtcgcagatgactctcgcgacatgttttccgaggaggtgatcgccgagatggggtccggggtcgatgccgatgggttcgcggccgatcacaacctcactgcacgcgagcgcgaagtgttcgagcttatgctgcgcggccgcgatgcgaagtccatcggcgaggcgctggtcatctccgacaacactgcgaaggcgcatatccgcagcatctacgccaagacgggcgtgcacacgcgtcaggagttcatcgacgccaccgagcatgtgatgcgctgagccgttaacgatctcgcctcccctcgatggccgcctctgcggccattgctttgtctaagggttgtttctcctgatgaaaagacagtttactcctgcagtcagccggtttagcccttccaggcgataggcgagcgccttcgtcgcgcgcacaatctctctcgtgaaggtcgcaggaacgttctacccctgcggccgtaaggagacgagagagaaaggcgatgtgtatgagtcagctcaacatgtcgaggcgcgggttcgtgaaagccgcagccgccaccggagcgcttgccgcattcggcgcgacggcggtcgacggcgcgacgttccgcgaagcgcatgccgacgagacgacctcccaaacaaagaaggtctacacctcgtgccaagcgtgcatctgcagctgcgccgtcatcgcgacggtgcgcgacgggcgcgtcattcggctcgaaggcaatccggaaagccccatcagccgcggcggcctgtgcgcgaagggcctttcgggcatccaagcgctgtacaacccctgtcgcaacaagtaccccatgaagcgcgtgggggagcgcggcacgaacagcttcgagcgcatcagctgggatcaggctatcgaggagatcgcgcagaagctcacgcaggacttcttcaagtacggcggcgagtcgttggtgacctctacgggcggcggcgggaacccgcacttcagctcgccgtgccgcttcacgcaggcgctgggatcgccgaacatcttcgagccgggctgcgcgcagtgcttcctgccgcgcatggccacgttctcgctcatgtacggcggcagcaagtcgggcaccacgtcgatggccgattccaagtacggcggctgctcgtcgctgtacttcccggaggacaatcctatccagacgctggtcatgtggggcacctgcaccagctaccacgcgcccagcggttcggggcgcgccattgccgagctgcgcgcacgcgagcaggggctcaacatggtagtggtggaccctcgcttcacgcccgatgcggctatggccgacgtgtggctgcccattcgtcccggcaccgacgtggcgcttatgatgacgtggatccgctacatcatcgagaacaagctgtacgacgaagatttctgcaagcgttggacgaacctgccgtacctcatcgacaccgatacgaagaagatgctgcgcgcctacgaagtgggcctgggcgaggccgatgcggaagatgcggaaaagacgttcgtggtgtgggatcagaagacgaactccgcgaaggcgctgccatggccgtacgacgaagcgctggaccccgcgttcttcggcacgtacgagatcgacggcgtcgaataccccacggcgttcacgctgctgcaggagcgcgtggacgaatggacgctcgaaaagggctgcgaggtatgctgccttgagaaggaccaggtggagaaggccatccgcatctacgcggagaacgcgccgtccggcctggttctgggcgtggccaccgacatgagccctcagtcggcccagggtacggaaggcgcctgcatcctggagttcttgctgggcaacgtggagaagccgggcgcgctgctgcagcgtttccccgacccgccgaacaaggtggatctcggcactatgaacacgctggtcacaggcgatatgctggagaagcgcctagggtatcgcgagcacaagggcctgggcatctggtcgcatgcgcacatccccacggtgttcaaggccatcaccacaggcgagccgtaccagccgcgcaactggatggaacgctctggcaacaagcatgcgatgatcggcaacgcggggcagctgtccgagatcatcgacaagatggagatgatctgccatctgtacatgtaccccacggccttcaccatcgaagcggccgattacgttctgcccacgcaggagtggctggagagctatttcaccatcgcccatgcgaacaagatcatcatccgccagccggtggtgcacttgtacgaaacggtgaacgagggcgtcatttggtcggagatcgcgcatcgttgcgccgagctgggcaatccgttcgctcagaaggccttcgacaaggaatacctggcaacgctgggcaccgatctggtgtactggcgcggccagcaggaaatgatggacttccatatgggctcgctgcctatgagctgggacgaactggccgagatgggcgcgtacgagtggatctccaaggaagactacctgacgtattacacctacaagaccatcgatccgaagacgggcaaggagaagggctggaacacgccgtccaagaaggtcgagccgtattcggaaggcacgctcatgctaggccgcacgggcgagccgtgggcgagcgccgagggcaaatcctacgtcatgccgccggccgacgaagattacgatcctttgatctactatctggagcccgaggagacgaacctcaccgatacggaatatcccatcatgctgacccagggacgcattccgcactaccatcacggcacgttgcgcaacattccgtatctgcgcgagctgtatccggtgccgctggtcagcatccatcccgagaccgccgagaagtacggcgtggaggacgagcagtgggtgtgggtggaaagccgtcgcggcaaggtgcgcgggaaggcgcatgtgacggcgggcatcgcaaaagacgccgtgcacatggaacgcttctggaatcccgagtacctggacaccgacacgccgagcaaggcctggactgagatgaacgtgaacatcctcaccaagaccgacgggcgttacagccccgagcacggcacgtacacgctgcgcggcttcacggtgaaggtgtacccggctcccgaaggcgcgcctgaaggcgcatggatcaacccgaccgatttcgaaccgtggatgcctgaattcagcgaatccactgaggtggtgttcaaataatggctcattacgctatcgtcgtcgatctcgaccgctgcatcggctgccacggctgcgagatcgcctgcaagaacgagaacaatatcgcattgggcgagtactggaacaaggtggtggaacgcgggcctttcggcgaatatcccgatttggagatgtatttcctgcccaccatgtgccagcagtgccaggatgcgccctgcgtgaacgtgtgtcccaccggggccagctatcgcgacgccgacggcatggtgctggtggacaaggagaagtgcatcggctgcaaatactgcatgatggcctgcccgtacggcgtgcgttcatggaacgcggccgagagcgtggtggagaagtgcacgctgtgcgcgcatttgtccaagaacggcgagcttcccatgtgcgtgcgcacgtgctcggccggcgcccggttctacggcgatatcgacgacccctcgtccgatgcgtcgaaggctcttgccgcggccgatcccgccagcatccacaccctgcaagatgtggggaaccatccggcgacgcactacattctgtcgccgaaacgcgccgcttggaaggaaggtgagtagccatgacgatccagtggtctttggttctgttcacggtgctgtcgggatgcggtgccggactgttcgcctgcacggccctcgatgaatttcgcggaggcgcggcgtcgaaggtgcgcttgccggcatgcgcggtggcggtggcgctgctggtggtgggcggcatcgcgtcggctacgcacctgtcgcacgtcgatcgcatgatggcggtgctggctcatcctacggcgggcatcttcctggaagctttgctgctgggcctgctggcggtttgcatcgcggtatacgcgctgctggtgaagcgcgaggcatcatccggagcccgcaaggcgctcgccgcgacgggtatcgtgctggccgtggcgttcgcgttcgcctgcggcgtgtcgtacatgatgacgtcgcgcccggtctggaacaccgtcgcgcttccgttggcctacttgggaacggcgctggcgacaggtgcggcgttgtacctggtgatgtgtgcggcgctcaaggttgacgagggcgacgtgaagaaagccggcgtgtacgcggcggcgggcggtgcgctgtcgctggtgttgacggtggcgttcggccttgtcagcggtaccgccttcggcgatcaggccgcgctcttctgggtggccgtggtgctgtgcggttctgcggcgccggcggtttgcggcgtgctggtcgcgcgtaaatccggcggcgcgctttcgttgggcgtggtggcgctggcgggcgccctggtgggctccgtcgccgttcgcgcggtgatgtggctggtaggcacggcagtggcgaactacttcgggttcgcgttgtaaccggagatcccccgagcgccgtatcgcgcggcgcccgggttcgaggatgaaagcaaggcgagagtatggctgactacacaaggcgagcctttctgggattcaccgccgccacggccgcgctcgcgggcgtgggcgcctcggcgatcgccttcgcgggcgagggcgggctgctgcgaccgccgggcggccaggacgaaggcgcgttggtggctgcatgcgtgaagtgcgaccgctgtcgctcggcatgcccgacgaacgtggtgggggtagcgcatgtggaggatgggctgctgcaagctcgcacccccgtgctcgacttccacaaagggtactgcgatttctgcggaaagtgccagacggcctgcccgaccggggcgttggggtcgttcgatccccagcgcgacaagctgggcgtggcggtggtgcagaaggaccgctgcatcgcgtacttcgaaggatgcgtcgaatgcgagaaggcgtgcccgtacgaggcgatcgcgttggacgatgtcgggcatccggtgatcgatgcagcgaagtgcaacggttgcggcgtgtgcgagaacgtgtgccccgcgctcgtgtaccgttcgttcgcgggcgggtctcggcggggcgttgtcgtggtggcgcccgagcgctacgagcgtttggggaggacgacggttgagggcgagagcgagatgatcgtatgaaacgggaagggaagcggcgcgtgagggcgtcgacgttgcgcgtgctgagcgcgctcggcgtcgcggctctcgtgtgcttggggctggcgttgcacaccggcaccggaacgcccagctcgttcggcatcgcggacattgcggcgctctgcccgctcggcggtgtcgaggcggccattgcttcgagaacggttgtccctcccctgctcatcgggctggcgatggtcatagtgctgacgctgctgttgggccgggccttctgcgcctggggctgccccgtcccgttgttgaggcgggtgtttcgaggaaagaaggcctcgaagcgcgatgcttcttcacgggattccgggcctctcgatgtcccggcgtccgagcgcgggggtttgcacgattcgcgcaactgggtgctgggcggggccatcctctcgacggctgcgttcgggttcccggtgttctgccttgtgtgcccggtcggtttgacgttcggaacgctcgtcgtggtgtggagggtgttccagttcaacgaggtcacctggtcgcttctggtgtttccggccatgctcgtgctggagttggcagtgctgcggaaatggtgccatcggttctgtccgctgggagcgctgctgtcgttggtgtcgcgcggcaaccgcacgttccggccgcaggcgaacgtcgggacgtgcttgcatgcggctcacggcgagcgctgccatcggtgcgccgacgcgtgcccggaaggcatcgacttgcatgatcgggcggcttccgctccgctcaacgagtgcgtgaagtgccgcgagtgcgccgacgcgtgtcccgtgcacgctatcacgtttccattcctgtccaagaaacccctgctcgagccttctgcggccgagcgcgatacgaaggaggagcaatgagcgtcgaagaggtgttcaaggctgcaccgggatgccagaaggtgctgatggccgcgttggaagcgtgtcgtacgccgcgcacgcccagcgagctggactcgatcatggacgaggtgctccgatgtaaccgttcggtctatcgtccggcggagctgcgcgcgctgctggagcgctacggcgcgctggcatacgaacccagcgaggaagagcaagcggcgcaagctgcccttgaaacgggaggggaacctgaacttgttgtagacgaggacggcaacttcgtgacgactgcgccgaccgagggcgtatgggcgatcaccgaagccggcgctgcgtatctcgattccgatcctatcggcgcgaaggcgcaggcgctgctggccaaggacgcggtctacctgccggtgtatcgcgccttgctggagttcgccgccgaatgcccacgcgacaaaagcgccatcgacgcggtgatcgaccctcatccgctcgtgcagaatccgcgcttgttcgccggatatttcctgggcgagctggagcgcatagatgcaatggagtgggccgatgcctggcatgtcacggagcgcggtctcgacttgctggaagcgctgcgcgatggagaagacgacgaaagcggcgttgccgcgaaggaggcatgatgattgacgagggaatgcgcgccttggccgaggcgctccggcagcagagtgcggcgtacgggttcgtggcgcgtttgttgcgcaccgaggtggatgacgaggctctcgggaggctgcgcgcgatgaggtttcctgccgcgagcggcaacgatcatctcgatgcgggctatcgagggttgtgcgcttatctgaacgcaggcggagagcgccagcacggcgatttggccgtggacttcctgcatacgttcatcggcgtgacgcaggatcgagagcaggtggcttttccgtacgagtcggtatacacctcgcctgagcatctgctgatgcaggatgcacgcgacgaagtgctggcggcgtaccgtgcggcgaaggtggtgttggtggacgaagcgtgcgagcccgaggatcatctggcgttcgagttggagttcatgcagctgttgggagagcgcgccgccgaggcgctggaagcgggggacgatggatcgtgcgcgaaccttttggaggctcgccgtgcgtttctcgaggagcatctgctgaactgggttcccgatttcgccgacggcgtgcaacgcgttgcacgcacgggattctatcgggcgttggccgacatcgtgttaggggtgcttgaaacggatcaagcgttcctggaagacgtgctggacgatgccgcgtagcgcgagctgcaggcataaaaaaatgggacgcgaacgtcccaaagaaagacaaagggttctgccccctccaaaaaacagaacccttatctttaccgaagcatcaaagcctctgtaaatgcacggattattataccacccctcttcacgaaatcacaacatatattttcggcgagcaacgagcggggaactgagctggggcgacgatgccgacgagctcgtattcggcttggtgtgaccgagatcaacccttcgtcaggcgcaggatgtcctcgcgcgaggagacgtcgagcttgcgatagatgttgtggatgtgggtgcgcaccgtgttcggcgagatgaacagcacgtcggagatgtaggcgccgctgtggccttcggcgaggtaggcgaggatttcctgctcgcgcgccgtgaggttgtgcgcgtccgccagctgggcgcagcggtcgggcgagcttgcgggcgtcgcctcgtcctcggcgtgctcggcggcgcgctgttcgtcgtgcgcatcgcgggtgcggcgcatgtacgacgagagcaccatgacgaacgcgtacagcgtggtggtgaccgtcaccgccacatggacgaggtcgtcgtcgagcacgctcgcgaagctctggccggcgaacgaggctgcgcagaacagcagcacggcggtggagaacacgaggtcggccgagaactcgcccgcgttcgcgatggcgcatagcgtggccagcgtgaggatggccgccagcgcgtacagcgcgtaggtcagaaacgacacgagtcccgacccgctgcccaccgatgccgagatgctggtggccgccagcagcaccatggccatgagcggcaggaacgtctggtgcatgccgcctcgcagcgcgaagcgctttttgcgaagggtcgtgtacgccagcagcgtcgcggcatcgagcgcgagcgcggccaggtaggcgttctggctctcgttgaacgcggtgcgcatgacggccatcgcgaacgcgaacacgagcagccccagcccgggcgcgacgaccacgtcggccagcgaggccagggtggcgcccgtcgtgcggccctcggcgcgttcgggggcggtctgctcggtgctgtccgccgttcccgagaacgcgagagggacgatgacggccgcgatggagctgagcacgaacagcaccgtcacgcccggcaggggcagcacggcgtacagaaagcagatcccggccgacagcatgctggcaagggaaacggcgacgagcgcgcgcttgattttgaaacgcgcgcagatgcgcccccacgtgagcgccaagcacacgtcgccgagggcggcggccacggcaagcgcgatgagcagcgccgtacccaagctgccgaaccaggagaagtacgcgaacgcgagcgcgcagcacaggtacagcatgccgcccccggcgcccagcagcatggacggcaggcgctttcccgccagcgacaagccgaggaacagcgcgccgaacagcgtggccgccaacagggtggtttcggcgaaggtgcccacgaacagcaacgtatgctcgaagcgcagaaacgagatgaccgttcccgaatagatgagcagcgtggagaacaggcaggcgacgccaacgatgagcgctgtcatcgcaggcaaggagagcccttcgcccgctcgcccgcgttcgagcttgcccgttgtttcgcgttgcgtctcgatagccgcctccttccctcgccgtgcgtcgcattatagcattcgcgcgtctcacctgcgtaaacaatcgacgttgaggcgtctacgtaaaatcgttgagaagcattcgccatctgcggaaacgcaaatcaacgttttttcggatggaagcgtgcgtcggttcgggcaaagatggggtcgcagggtacgaagcacaacgcaaaggagatggggaacatggaactttctcgcaggaacttcttggtgggcgccgccagcgccggcgtcctcggcgcgatggccgggctgaccggatgcgcgccgcaggcgtcgtccgcgtcggctaagaacggcgacgcgtcgtccgccgacgcggcggtcgcgcgtccgacctattacatgtgcgacgaggattggctgggaagcgcgcccgagatcgccgacgccgacatcaaagagacgaagagcttcgacgtcgtggtggtgggcggcggccatgccggcacgcaggcggcgcttgcggcggcgcaggagggcgcgaaggtcgccgtcatcgagaagcacaacgacggcgagatcgtttaccgcggcgacgacatctgctcgtacaactccaagatgctggaggcgtggggcttcggcccgtacgacctcgacgagatcgtcaacgagtacgtgcgccgcgccaacggccgctgcaacaccgaagtcatccgctcgttcgtgtacaactccggcgagatgatggacaacctggcctcgctgatccccgacacgtcggacgtgttcgactacgagggcggccagtgcatcgtgcagatcgcctacgacaagcccagcggtgccgattaccccgtggaggtttcgggctacaagatgtgggcgtccacggtgcagacggtgggcacgaagaacgagcagcccgtgggcaagaagcagaagacgggcatctcgcgcctgtccgaaatcgaggaatactgccgcgacgcggccgaggatctgggcgccgaatggttctgcgggcagaccgcggcgcgctgcgtgcaggatgccgacggcgctgttaagggcatcatcgccgaggacgccgacggtaactacgtgaagttcgaggcggccaagggcgtcatcctggccacgggcgacttcggtggcaacaccgacatggtgtgggagctgtgctccgaatgcgccgagaacgccgagcgccacggcgtggaccgcgccgagctcatgggcatgaccgactgcgacggatccggtcataagatcgggtgctgggcgggcggcgccatcgagagccatccccgcccggttgcgggcgacgcgccctccatctcgttcggcccttggggctccacgccgtgtctgtggatgaactgcaacggccagcgcttcatgaacgaatcgttcgcgggcctcgtgctggcgcagtcgtgccgccagcctatcaacccggaggccaagatggtgggcaacttcgccatcatggacagcaagtacatgagctacatccaggcgggcggcctcgatcacggcgctcccaactggggcttccccgagggcattgaggagttccaggcgcagatggcggcggcggatcccgctgccggcacggtggaagtgcgcggtttggagatcgcgaaccgcacgagcccgttcgtgaacgagatattcgtgggagccacgctcgaagacgcgctgaagaacgccggtctcgaaggcgaggcgctcgagaacgccaaggccagcgtcgagcgctacaacgagctgtgcgccgcaggcaaggacaccgacttcggcaagccggagaacctgctgatccccatcgacgaaggtccgttcttcgttgccacgcagggcacgaacaagctgtacggccccggcctgaacaccctggcgggcttgtgcgtgaacggcgattaccaggtgctgaccgcttcgaagaacgaggtgatcaagggtctgtatgccgtgggcaacacgatgggcgagcgctacggcaacgcctacaactgcccctcggccggcaacaacatgggcaacgctatgaccagcggccgcgtggccggcaagcacgccgcaaccgcgtagctcttcaacctgccataccctccctccctcggaagccgcgccttttggcgcggcttccggcgtgtttgcgtgcgggggttcagtggcagtcgccgtcgagctcgatcatgtcgaggagcgcctgctgggagtgcacgccgaacttgcggtagatacgcttgatgtgggttttcgccgtttcctccgagatgaccagctgggtgctgatgaagctgcagttgcgtcctttcgccagcagttcgagcacctcggtctcgcgcggcgacagtcctctcatctcggccagcttcttgagcgagcgcctgaaccgcggggctggtccatcctggccaagcggatcgaacatgctccatcccgattcggggaaagggctttcgaaggcgaacagcgacacgagcaggatcacgaacaccgagcatgcggccacgacggccatcgtgtaggggtcgtcggcaagcagcacgagctgggcgcctgcaatagagccggccagctggccggccatgagcatcatcatcgacaacgatgcgaaacgggccaccggcttgtccagcttgcgcgccagcagcgcccatagcgcccagatgatgatgtagaagtactggtagcccatctgatgcagcgcgaacccgatgaggtcgagcggataagtgagcgagaagaagatgaagcccgccgccatgagcggcaaggcgacctggtaagtcatgtgccggaaatccattcggaacacgctggtggtgacgaggatggcggtagcccccaggatgagcgccacgatgttgaggtagtctcgcacggtgataaggttgtcgctgctcagcgcgaagaagcctttcatgagtccgtatgaaaggccgaagaacagcgatatgcccgcgatctccagcagcgccttgcgcgtcgtggtgaggcggggcttgcggccggatgggggcgcgtcgggaccggcgacttcgtcggagggctggcgcgcggtccgcacgatgctctgcttgcgcgtgaacagccacatttccgcagcgggaagtcctaccgtcagaaagcgcgcaacctgatcgggcagaaacgacagcagcaggtagaacgcgctgccgatgacggttgccagcatgctgtacacgatggtctggcgtgcgccgagtatggtgagaagctcgccccagaggatcacctcgacggcgcttccgactccggtgatcagcgctccgaacaagtaggcgaacgagctcgcttcgttgaacgaagcggccgacggatacgaaacgagcagcgtccccataagcgtaagggctccggctacgagggggacggccgagctgcgtccgaataccggccgcttgcggctcatgacgaacagggcgccgtagcctagcacgttcgttaaaagcgaaagcagccagagcggttcgaggggcacgcctaccgtggccggccctggcgcgggcgagatggagtagaaggtcgagctccaaaacgttacccaaacccacgtccagtgcagcgcgaaacctaacgcgatggtcggctggacgtcgaagctgaacacggagagcttgatgcgcttgcccagcgcagcaaagccgaactttcccatgcttcccccttcccccgttctctattgtatcgggtttgccggggaaaggctgcaagcgcagggggcgatccccgcaaaacgtatccccctgacaggggtattttcgggttgcccccgttccgtcgcggtgaaacgggtgtaagggctgctagatttcgaccagagccaacggggaggccggccgcgcgaaacggcggccgccaggggacgggggaagttatggaacgtatgcatgcagatgagagctcagcgcatggaggcgctgaagtttatttggacaacgcggcgaccgcgcctatgcatccgcgcgtgatcgaggcggtttccgccgtcatgcgcgatgcgtacggaaatccgtcgtcccagcatgcgaaagggcgtgcagcaagggcgttgctcgacgagagccgcgcggtcgtggctgaggcggtgggcgcgtttcccgacgagatctatttcacctcgggcggcacggaggcgaacaacctcgccatcacgggatcgtgctctgcgtacgctcgcgatcatggccgtgcgggggcggtggtcacgtccgcgctcgaacacccttcggtcacgaaaacggtgcgcggcctcaagcgcgacggctggacggtgttttacttggacgctcgcgacggcgagctcgatctttccggacttgatcgcatattggacgaggttcccgacgtagtgttggccacggtgatgagcgtgcagagcgaattggggtaccgcttcccgatcgaagacgtcgtccggcgttgccgcgccgtcggctgcgcgagaaaaacgcgcgggccgctcgtgcacaccgatgcggtgcaggcgttcgggaagctgcccctcgacgtgcacgagctggacgccgacctgctgtcgttctgcgcgcacaaggtgggcggtccgaagggcgtcggcgcgttgtacgtgcggcgcggcacccggctgttcaccacggcgttcggcggcggacaggagcgcgggctgcgctcgggcaccgaggcgctgccccttatcgccggcttcgccgaggccgcgcgcatcgcgcatgccgagcaagcggcagcattcgagcgcgcttcgaccttgcgcgcgcatgtggtcggcgcgctgcgccaccgctacgccgacgtcatcgtgaactcgcgcgacggcgggtctcccttcatcgtgaacttctcgctgccgggcaccgacaaccgcgcggtgcttgcggatctgagcgacgcgggcgtgtttctctcggcatccatggcgtgcagctccaaccacaccacggtgcctcccggcacctggcgcgagaagcatccgctggcattgcagctggcgggcgtgcccgcctcgctcactcggtgcacctatcgcctcagcttcagcgaccgaaccacggttgccgaggtcgatcggttcctggaagaactcgaggaggtggtgcccgccgatcaggttgcacgttctgcatagtcatcgtacgaggaggaggaaaccaatggagaaccgctccaatatcgctgcaccgggcggcatcacccgccgcagcttcgtcaaggggggtgcggcggcagccgctataggcgcgaccggcgcgctcgtcgggtgcgccccgcagggggacggcaaggcgtcggacgccgcggcgccggccgaggacgagggcgtgtggctgccctcgcaatgcaacatgtgcttcaacgcttgcagcatcctgggccatgtggtggacggaaagcttgtggagatcaagggcgacgaccgcagtcctgccggctggggccatctgtgcggcaagggcacggcgggcatcatgcagctctacgacgagaaccgcatcacgaagcccatgaagcgcacgaacccgaagaagggcgtcggcatcgacccggggtgggaggagatcagctgggatgaggcgtacgatctcatcttggagaagctggacgagcagaagcagaagaacaagcccgtcatcgtgttcgcgctgatcacgagcatcatctcgtggatcgactccatgaactggctgggcagcaacggcaacattcctatcccgttcaaggccgatatctgcggagcgcccacgcatcccatttcggctctgctgaccggttgcggcaacgcgcttcccgactacgcgcactgcaagtacctcatgcagttcggcacgcaagcgggcgtggccacgcgtcatggcaccagcatcacggcgaaggtgttcgccgacgcgcgcgcgaacggctgcaagctggtgaacttcgacccgcatatgtcgggcgcggccgagaaggccgacgagtgggtgcccattcgccccggaaccgatgccgcggtggcgctcgccatggcgaacctgctggtgaacgagtacgacctatacgacaaggagttccttgccgcgcgcacgaacgggccgtcgctggttgatccggccacgcagcgcatcgtgcgcgacgcgtcgaagggcaacaaggcgctgtactgggatctgtccgacaacacggcaaagccctacgacgaagtcaaagagcccgcgctcgaaggcgatttcgaggtggacggcattccggtgcgcacggcgttcagcatcttcaaggactccgtcgcgaagtacacgcccgaatacgctgaagaggtcacgacgatccctgccgacaccacgcgccgcctggccaaggagttcggcgaagcggcctatatcggccagaccgtcgaggtggacgggctcacggtgccctaccgccccgtggccgtggacacgttctctggcattgcgcggcacaagcatggcttcatcacgcactgggccatcctgcagctgaacacgctcgtgggctcgacgttctcgcgcggcggctacctgggcttctacacgcgtaacaagtacgggttctacgagggcgacaaggatcacgcctgggagttcaccatttgggaagaggacggcctcatcgaggacctcaacatggcgcacggctggccgtcgaacggctcgcattacaagcatatccgcgaggccagctacacgcccacgtccgaggcgatggaggagctgcagcccctcacgatggatcagcatttcggctacatcgcccaggtgcagccggaggtgtacggcaccgagccgtccgaggtggcgttctgcatggcgtcgaacccgctgaagaactggtgcaaccacgactaccaggccaaggtgctggaatcgttcgactggatcttcggcatggacatctatctgaacgattcctcctactactacgacctcatcatccccgagccgtgctacctcgagcgctttgacccgctgccgttgtcgttcaacaaccaccgcgtgcccggcctgcccgaggtgccctatatcgttgccggtcgcatgcccatcgttgaggccaaggacaactgcccgtcggcgctggacacgttcggcgcgctcgcggcgaaggcaggcaagaccgccgagtactctgcagcgctcaacgactactacaagcttgccgacgagtacaagcttgacggcaaggagcagatcacggctgagcgcgtgtgcgacgccgcgctcaagtcgttggcgggcaaggatcgcggcatcgactggttccgcgagaacggcgtgctgacgcgcgagcgcaaggccgacgaggtgtacgtgttcgcggcgggcatggaagggcgcatcccgctgtacttcgacttcatgcttgaagcgaaggagaagatcgaggccgaggttgacaagctgggcatctactgggagacggacgattacatcccgctgcccgaattcatgccgtgcctcgaccacgaggtggaggaggaaggcttcgacctgttccccgtgtactggacgaacgccatcaacaccgatacctggcaggtggagaacgcctggatcaacgagatcaacgagctggacgataccacgtacttcttggagatcaacgcggcgaccggtgccgccaagggcatcaaatcgggtgacaaggtgcgcctgtcgaaccgcgacggcgatgtggtggaaggcgtggccgtgctcaccgagttcgtgcatcccgaatgcgtggcgtcggtgggcggccatctgaacgcgaaatccgactaccagcccatcggcaagacgaagggcacggcggtgaaccacttggtgcccgcaggcgatccgaagcgcatggagtacgtcggatccggcgtggaccagtgcgtgcgctgcaagctcgagaagatttcctaatccccggaaaggaggatgagtttcatggcctatgggttcgttatcgaccttgagaaatgcgttggctgccacggatgctcggtggcgtgcaagggcgcgaacggcacgcccccgacggtgactcgctcgcgcgtggaccgcggcaccgaaggctcctatccgaacgcggtgcgcaccatccgccccatgctgtgcatgatgtgcgagaacccgccgtgcgtggcggtgtgcccgcagggcgccaccaccatccgcgacgaggacggcatcgtggtcatcgacaaggagaagtgcatcggctgcaagagctgcatggaggcttgcccttacggcgcgcgttacctcgttcagagcgaggatggctatttcggctccgagttgaacgaatacgagagcgtcgcctatgagaacatgccgaagatgacggtggacaagtgcgacttctgcatcgagcattccggcgacggaaagcccgatcccgtatgcgtgaaggcgtgcatggcggaggcgcgcttgttcggcgacctcgacgagatgaagaagctcgtggccgagcgcggcggcgaggcgtacctgcccgaagagggcacggagccccgtgtgttctacctgccgacgatcactgcgtaagcgtttcgcgtttccctccctcccttggaagccgcgccttttggcgcggcttccggcatgtttcgttatgcaacgcaaacggtttcgttgtgttgctaaaaacaacgattgcgggatcggcgcggctctgcgcagcgttttatcgacctggcgcttctgcgtgcgtcctgcctctccttcccggtgcgggcggcgcttcgtgctatactgtgcgccgaacgaacgggggagcgcatggtcaacataccgagccccgccctggctatcgtcgggcggcataattcaggcaagacgacgctcatcgagcagctcatcgccgagctggtgcgacgcgggcgcgacgtgggcagcgtgaagcatcacagccacgtgggtttcgacatcgactatcccgggaaggattcgtaccgccaccgcgccgctggcgcgcgcgagacggtgatcgccgcgcccgggcagatcgcccgcatcaagtccgtggagggcgagatcgagtgctcggacatcgtgcgcagcatgcccggccacgacatcgtggtggtggaggggtaccgcaaaagcgggctgcccaccatcgagatcatgcgctcgggcaacgacgccgacgcgcgggtggccgacgtgttcgccgagggcgcgcgctgcggctggccgttgggcaccgacttcacccagttcacccgcggcaccgtgcctccggccgacgacgatgcggcgcgcgaggagctgagccgtgccgcgcagcgggtcgagagggcttcaggagaccatttcaagacgcagcatcccgactacgccgacatatcgaacaagctgccgacgtcggacacggtggccgtcgtcaccgacatcgaggaggcgcgccatgccgccgagctgtaccacgtgccggcgttcgcgctcgacgacattgctggcctcgccgacttcgtggagcagcgtttcgtgcggccgcgcgtgaccgtggtcatccaggcgggcggcgagagcaggcgcatggggcagagcaaggcgaccgtgccgttcgcgggccgcccgctgatctgccggctggtggagcgtctgggcccggttgccgacgacctcgtgatcaccacgaacgagccg

SEQ ID NO: 8555 - DNA, 1170 bp, Unknown
  gut microbiota DNA sequence
cggcctcgccgacttcgtggagcagcgtttcgtgcggccgcgcgtgaccatggtcatccaggcgggcggcgagagcaggcgcatggggcagagcaaggcgaccgtgccgttcgcgggccggccgctgatctgccggctggtggagcgtctgggcccggttgccgacgacctcgtgatcaccacgaacgagccggagcgcctggacttcctgcacgctgagttcccgcagtatcgcatccagctggtgcgcgacgcgttcaacgtgcgcggggcgctgccgggtctgtacacggcgctggaggctgcgcgcaacccgtatgtggccgtggttgcctgcgacatggtgttcgcttccccgtcgctcgtggtggccgaggcgctggccatgaacgagacgggcgccgacgtggtggtgccggtgaacaagcacgggttcgagccgttccatgcgatgtaccgccgcgcgggctgcctgccggccgtgagcgccgcgctcgaccgcggcgagaagcgcgctcaagggttcttcgcggacgtagaggtgtgcgagttcccgcaggagcgcgtgctggaggccgagcccatgggcggctgcttcatcaacgcgaacacgcccgaggagctacgcgccatcgaggagacgtttctcgagaagtagcggaagacgagacgaggaattggcatgccgaacctggtagacatcgtggaagtggccgaggcgctggagtcgaaggccgtgtacctggcgagcgatcgctgcgtggtggtgcgcaaccgccatgcgtcgtgcgcgaaatgcgcggacgcctgtccgacgggctcggtgttcgcggccaacaacgtgttggagcttgacggcgagggatgcgtggcgtgcggcgcctgcaccacggtatgcccggtggaggcgctcatcccgttgcgcccgctggacgaggacctcgcctccagcgtggcgtccgccgtggcggcgaccggcgggaaggccgtgttcgcatgcgcgcgcatagcgtcgaagcgcctggccgacccggcgaagtacgccgaagtgccctgcctcgcgcgcatggaggaaagcgtgatgctgggtcttgcggcgcgcggcgtggaggatatcgtgctggtggacggcacgtgcgccacgtgcaagttccgctcgaacgtgccggg

SEQ ID NO: 8556 - DNA, 248 bp, Unknown
  gut microbiota DNA sequence
gccgcggcttcttcaccagcgctcgcacgcgggcgaaggacgccgcgggcaagacggccgaggtgatggtgttcaagaacgacaacgccgcgccgtcgctgcgcgagcggctgcgcatgtccgacgctggcacgctgccgcagttcaacccgcagcgacgcatgctggtgctggatgcgatggaccggttgggcgcgccgacggttcccgagatcgacacgcggctgttcggctcggtatccatcgac

SEQ ID NO: 8557 - DNA, 131 bp, Unknown
  gut microbiota DNA sequence
tatcgacgccacggtggcttcggcgaacgagctcatggctgcgcagggctcggacgtccgcgtgcggcgcgcgtcggcgtttcccgacgaggtgctgctcgaagacaagcgcacgctgctgggcgagtcgc

SEQ ID NO: 8558 - DNA, 131 bp, Unknown
  gut microbiota DNA sequence
catcgacgccacggtggcttcggcgaacgagctcatggccgcgcagggctcggacgtctgcgtgcggcgcgcgtcggcgtttcccgacgaggtgctgctcgaagacaagcgcacgctgctgggcgagtcgc

SEQ ID NO: 8559 - DNA, 1960 bp, Unknown
  gut microbiota DNA sequence
tgcgccgtcgctgcgcgagcggctgcgcatgtccaacgctggcacgctgccgcagttcaacccgcagcgacgcatgctggtgctggacgcgatggaccggttgggcgcgccgacggttcccgagatcgacacgcggctgttcggctcggtatccatcgacacgcaggcgtgcagctcgtgcaacatgtgcacggtgttctgcccgacgggcgcgctgcgcaaaagcgagctggtgcctgaggagggggagggcagcttcctggagttctcggcggccgactgcgtgcagtgcaacctgtgcgccgacgcgtgcttgaagagctgcctgacggtgagctcgacggtgtccaccgaggagctgttcgacttcgaaccgcggctgatccatctgccgaacccgcccgcgcggcccggaatattgtcgagcttgaggcgatagcggtcggaagggctcatcatcgggccgcgtcccgaatcgtggtgtatcagggccatcgccggagaatcgccggcacccttgcgaggtgaatcttagccttcgtcctccttcgggtcaatggcgctccctatgatcttgcgcgccgcctcgcgggcggcgagcacctcggcctcgccgggggcctcgcgctcctgggccttccaggcgtgcgcgagcgagggcctggagatgacgcagcgcgccgaccactcctcgtcggcctcgatgagcgccgctcccaccaggcggatgagcgactcgcgcgaggggaacccctgcacgacgcgcgtcctgcgcttgatctcgcggttggccctctcctggacgttgttggtgcggatcttggtgcggtgcgtggccgggaacgccaggtaggcgagcgccgcctcctcggcctccaagagcacgtttccggccgccctcgagatcttcagcacctcctcggtcgcctcttggtagcacgcccgcacgaggacggggctcttctgcgcgaagacggccttcatggcctcgcgcgcctttctctggtcgtccttcctgtggatgcggcccgccacgttgcgcatgaggtgcgtgacgcagcgctgccaggccgctccttggaacgtctcggctatcgccttcgcgagcccttcgtgggcgtccgagacgacgaggcgcacgccgtcgacgccgcgcgccctcaggccggagaggaacgccttccacccggcgtggctctccgtgtccacgcagtccacgccgacgaagcgcttgtggcccgtgtcgtcgagcccgatcgcggtcacgacggcctgggacgccgagcgcccctccacgcggcacttcacgtaggtggcgtcgagccacaggtaggcgaagcgcaccccgtcgaagcgctgcctcctgaacgcgtccacctcggcgtccaggcactcgcacaggcgcgacacctgcgacttcgacatcgacctcacgccgagctcgcccgcgacggcctccaccttgcgcgtcgatatccccatgacgtacatctcggccaccgccgcgacgagcgcccggtccaccctgcagtagcgctcgatcaggtcctcggggaagaacgagcctcggcgcagcttcggaatcttgagggtgacgtcgcccgcggcggtcgagagcccccgctcccggtagccgttgcgcgagttgacgcgcccctcgtcgcgctccccgtagggggcgttgcacgcctcgtcggccttcgccgacatcgcggcgttcgccaggagctcgagcatcctgcgcccgaaggcctgcaggtcggtgcattcctcgaggatcgcgaacgcgagccccttcacttcggggtcgttgaatagtagagtgtccatagcgggcatcgccttccttcgaatctgtcttttgtggtgattgacgattctagacgatgtccgtttttctcgggcaggcttcgcccgccctccagaaacggattgatacaccaactttcgggacgctacc

SEQ ID NO: 8560 - DNA, 3028 bp, Unknown
  gut microbiota DNA sequence
gcctcgctcgacgtagccgtcgttcgtgacgttctggacgttgccttcgatgaggaagtcggccgtctgcccctcgaacatgcgcgcgctgccggggcggatggactcgttggccttcacgcggcacttgaaggagccgcggtcgttgaacacttccaccgcatctcccgtggccaggccgcgcttctccatttcagaggggttcagctcgatgcgcggctcggcgaactgctggatccacttggcatcgttgaactggttgtgaatgcggtagcgcgtgcgcacgttcgccagctgcagcgggtaggtttcggccagcttgttgccggcgtgcgcctcaagcggcggctcgtaggcgggaagcgcctgaccgtattccacaagagcgtcgtagtagacgtccatgcgcgtggagggggtggcgaacacgcggtccatgaactctcggcgcggctcctcgatgccctcgaggggatacacgccgttcgcagcgttgatcttgtcgatggtgagcgcggagacgtacgggtcctcggaggaggacagcaccttcgccacccattcctcggacgtggcgggcaggtactggtctttgccgaaacgcttggcgatttccttgccgatccagaagtcggtgcgagcctcgaacaacggctcgatgatcttgttctgcagcacgatgttgctgtagccgatcttcacgctccccacctccgcgtcgttctcgaagcgcgtggtggcgggcaggatgacgtcggcccacttcgcgccctcggtgaagtacgggtcgatggtgacgatgaagtcgaggccgcgcgcgaactcggcggtcttgttcatgttgccgatgtgctgctggagcacgtcgccgcagaagatgcaggcgcgcaccttggcgttaccctcgcgggcatcgtacagcggcatctccagcgtgccggccgtcatgtcctcgggaagctcccaggcgcccagcgtgcccgcatggccgttgtagctgccgcccacgaacacgcccacgccggcgcccaccttgcccacgttgcccgtgagggccacgagcgttgcggcagcgtggccggcgatgtcggcgttgcccatcttgtcgttgccgccccagcccagcgccaggcaggcaggaccctcggcgtactcgcgggcaagttggcggatggtggcggcgggcacgccgcttacgctttcagcccactcgggcgtgtactcgacctgcttctgcttgaggagcgagaacaccgtggtgcaggatgcgccgtccacgtcgaaggcgccctcgagagcgggcttcacggtcgcgacgtcgtagaccgccttcgcgttcgtcgccgtgtcccacacgaagaaggggttctgctcgccggtctcgggctcttcggcgtcaggatcctccgcgtggtcgcgcacgagcttgcccgtcgcgacgtccacgaggaacggaagcgaggtgtggttcagcacgaagtcctcgtcgtagagctgctcgtcgaggatgacgctggccatgccgaggaagaatgcggcatcggtgcccggcgtgatgggcacccactgatccgatttgccggccgtcgtggagaagtggggatccaccgtcaccatgcgggtgccggcctccttcgcctcgaagaacaggcgcacgttgggcaggctggactccaggaagttgctgcccacgttgagcacgagcttggaattcacccagtcgcgagcctcgcaggtggccatcgcgtagccgccgccgaaaccgatggcaggatccaaaccgttgccgatgcccacgtcgatgccggagctggcatccacctgcgcgcccagcacggcggccagccacgggaagttcgcttcggcgcccgtcgagatgaccacgcagtcgtttccgtacttgccctggagctccttgagcttgtcgcacacctcgtcgagcgcttcgtcccacgagataggctcgaactcgcccgcgccgcgctctccggtgcgtcgaagcggggtctgcacgcgatggtcgccgtagatgtgctggacctcggaaatgcccttcacgcagatggtttcgtaccggtcgtcgcagcagtggttcggctgaaccgacaccatgcgcccgtcgcgcaccgtgcacgccagcgggcacatgccgccgcagtgggactggtggtaggtgaacgccgtgtactcctcggcggtctcggcatgcgccggaaccagccatccgtcagcggaggtcatcgcccccgccgcgcccaacatcgccaggccggcgcccgcgacggcggttcccttgacgaaaccccgacgcgtcacgctcatctcgtctgtggtcattgcatcccctttctcagtgactcatgaccgtttcctcgacctctaattaactgttttcatagtaatatagttaaataggaaattgaatatgttcatttcaagaataatttagacgtctgcgaacggtgcggaaaacgcggcgaaggtcgcgagagcgggatgcccttgcgaccttcgccttgcgaaaacgacgccttgtcgacatcgtatgcccatgtcagttatcatatattaccttttggaaaatgttttaccgagcgcagccacgccgtcatcggaagcgtccgctcccctatcgcaccatagcagaatccgccgccgcgtagctggcctttccgatcccgcaaccaaccgttcgcgaacgagcggccgacggtgtcggacaagcggagacgcccgatcgggctatcggcgagatacggatcaggagagcagcggcgcctgcggcgggcagaggcgggctgtcagcaagccggcgacccgcatccgacggccctgatgtttcacgtgaaacatttgtttgcgcgaacgattgtttcacgtgaaacatttgtacgtttacgggcgctgccgagaggatggcgcccttgcttgccgcaggaggggctacttcttccctttgagggcggaggctatgtcgcctgtgaagccctgggcgtaggggctcggcaccaccaccatgttgccgccc

SEQ ID NO: 8561 - DNA, 4890 bp, Unknown
  gut microbiota DNA sequence
actgccgagaggatggcgcccttgcttgccgcagaaggggctacttcttccccttgagggcggaggctatgtcgcctgtgaagccctgggcgtaggggctcggcaccaccaccatgttgccgccctccttcacgctctcgttcacgaggctcatcatgcgcagctgcagcgccaggtcgtcctcgcgataggcgtgcgcggcctcgatgaacatgtcggagatgtccttctcaacctcggccagcacgacgcgggcgttgcgctcctgctgtgcctgggcttcggcgctcatggcgttctgcagctcctggggcatgcggatgtcgcggatctccacgtcgatgatcgtgacgccccactgctcggtcttctcctcgatgttcttctttagctggcgatcgatatgcgcgcgctgcatggacagttcggcgatctccacctggccgatggcgtcgcgcagcgccgtctgcgccacgagcgacgccgagtgctcgtagtcttccacagccaggcacgccttcttcggatcccacaccatccagaacacgacggcgtcgagatccaccggcacgagatcggccgtgagcacctgctcggccgaacacgagatggacgagatgcgctggtcgatgacgatggtcaccgaatccaccacggggacggtgacgtacagacccggcccggcgaggcggtggaaccgcccgaagcgcagcaccacggcgcgctcccactcgtaggcgatgtgcacgctgcctgccagcgccaggccggcgaccacggcgagcgccacggtgaacgccgagcggaaggggaacgtcgcagccaggacaagggcgaacgcgacgaggaacagcgtcacggccagcaccaccgccccgcggcgcgatgccttgcgcctgccggagacgctatcctccccgcctgacagcacgtcgttcgcacgctcgttgccgcgtttgccgaacttgaccatagctcgctcctatcccatccgggaaatcttgtcctgaaggcgacccgctatctcttcgcgcgtcatgcccagctcctcgcactggcggatgaaatcgcccatcatcgcatcgatggttgactccagggagtcctcgtcgtcgaacgcgggattctcggcgacgaaggttccgcgcccgcgcttcgacatgatgagacccgacgtctccatgctgcggtacaccttgttcacggtgttgtagttgatgttgaggttgacggccatctcgtgcacggtgggaagctggtcgccgggctggtagcgcccggtctggataaggtagacgaggcggttgcgaagctgcacccagatgggcacgccgctgcgttcgtctatgctgaaattctccatgccccgagcttcctcgcgccgtcgtcggctggcgcggattttcctacatctctagccaaatacaaccgtgtatattctagcgcgcttcgtcggcatcgccggcgagaatcgcgcattcgcaagcacgaaacgacgacagggcgagacgacgagacgagggagcgagacgaggggacgaggttgttgcctcattctgcgatcgaagcgggacaccgaccccgccccttcgtctcacaggtacgacgcgatgtccatgaagggagccgtgcacaggcagtaccgcaggaagaagccgcctatcagcaccagcacgccgatgcaggcgcaggcgcgcgcgtcgggacgccgcagcgccgcctccagcgcgaagggggccgcgatgcccaccgccgcgagcgcgccccagaacgcgggcgccatatcgcccgtcagcaggcgctgcgcggccgcgctcgacagcacgtcaccggccgccgcaaccatgaaggccgtcagcacgacggcctcgagcgccagcagcgcgccgtcgatgcggaagagccgcgcgaacaacggctgcggatcggcgtcgcacagaagcggcagcacgagcatcaccgccgcgccgcacgacagcgacgagcaggtgaacagcaccggcacgagcggcgacgcaagaagcggcagcgtccagatggtggagaggaacagccccgagtacaccatcaccacgagcgcgctcgcgcagccgagggcctgcacggccagcacggcgccgtggccgagcccgagcacgcgcaggttgcacgcgaggagcgccgccacggcggccatgaacgccacgagcgcccacgccccgaccgacagcacgctgccagccgggttcgccaacacgtcgagcgcgagctcgggccttcccagatccagcatgaggcacgcggcgcccactgcgaccatgccgcacgagacgacgagcgacggcaaggccacccgcccgagcgagcgcctcagcgcagcggacgagcgcgcccgctgcgacaggtacacggccgcgacgaacgtgccgcagcccgcgcccgccaagaacaggtagatgacgatgagcgggccgaacatcgcgccgccgctacagcttcacgtaccagaggtttttgaggtcgcccagccccgcgcgcagcttggacagcacgtcgtcgtcgacgtcgccctccacgttcatgtacacgagcgcgcattgctcggccggctttgtgccgatctgcatcgtggtgatgttgatgcccgcctcgcccaggatggtgccgatggcgcccacgcgccccggcgcgtccacgtactcgaacacgagcgactgaccggccggagcgatgtccagctggtagccgaacagcgacacgaggcgcgcagcctgcgcttcgcccgccagcgtgcaggccacttcggtgccgtcggccaccaccgacacggtggaagcgtagcccccggcgtcgggcgacgaaagcgtctccaccttgatgccgtggcgcttcgccaccgcgtcggcgttcaccggcgtcaccgtggccgtgctctggtaggacaggatgcccttgagcgtgccggcaacgaggatggacgcgtcggcgtgcgccagcgcgccagccgtcgtcagcttcaggaactgggggatctcgccgtcgatctgcgcgagcatgctgcccatcatctggcaagcgggcacgtacggtcccaccgcgtccatcacctcgggcggcacgggcgccatgttcaaagccgtgggcacgatggatccctcgaggcccgccgccacgtactcggccgtctgcacgccggctcgcagctgcgcctcctgcgtggacgccgcgatatgcggcgtgaggatggcgttgtcgaactcgcgcagggggctgtccgtgcagggctcgctttcgtgcacgtcgatgccgaccgcgccgatcttgccggcggccaggaagtcggcgagcgacttctcgtcgaagatgccgccgcgcgcggcgttcaccaggatcacgccgtccttcattcgcgcgtactggtcgggcccgaacatcccgatggtctccttcgtcttgggaaggtggacggtgatgaagtcggccaacggcacaagggcgtccacgtcgtcgtacagcgtcacgcccagctgctcggcgcgctcggggctgcagtacgggtcgtagccgatcagtttcatgccgaaggcgcgtgcccgctcggccacgaggccgccgatgcggccgaggccgaagatggcgagcgtcttctcgtacagctccacgccggtgtacttcccgcgctcccaaacgccctcgtgcatggacgcgttcgcctgcggaaccttgcgcgcgcaggcaagcatgaggccgatggcgtgctcggcggcggacacgatgttggacgtgggcgcgttgcacacgatgatgccgtgctcggtggccgcttcgacgtctacgttgtccacgcccacgccggcgcgcccgatgatgcgcagacgatcggcggcttcgacgacctcggccgtgaccttcgtggccgagcgcacgatgagcgcatcgtagccgggaacggtctcgatcagctcctcgggcgtcatcttcagcttgacgtcgacctcgcaccccttgtcgcggagcactgcgagacccgcctcggccagcctttcggtaaccagcaccttcttcgtcataacgaaaaccacctcttgccttatggatgtcagggaaacagtcccgcccggcgccggccgcacgcgttcacgccgatcgagcaaacgtccttatgatacggaaaaaccccatggatagatgcacgggctgcgaaattcccgatgaattgcgaaaacgcgcgtccgactcggcaagcacggcgaaaagcgaccgcacggctgctttggtgcggtattgtagacgttcccgcacctcccgtcgggtatcctattccgacgtaccgaaaagagaagggaacgccatgcagaagaccacctcgcagaaagccctcaaggtcatctccatcatcatgatcgtgttcgcggcgctcacgctgctcctcggcatcggcggcatcgtcaccggcggagccctcggcatcctgggcgcgggcatcggcgacgccggaagcgccgccctcgtcggaggcgtggcagccgtcgccggcttcgtcatcctcctcggaggcgccatcaacctggccatcggcatcttcggcctgcgcggagccaacgacccgcgcaagatcggcgcgttctacgcgctggccatcatcgggctcgcgttcgccgtgctgagcgcgctcggcaccttcttcggcggcagcgcggacggcggcgacatcgccagcgccctcttcggcctcgtcctgcccctcgtctgcgtgcttttggcctacaacatcaagaaggagaacaacctgtagcggcccgcagcttcgttcccgcacgtgaaagaaggggcccgacgtgaactgcctcccatttcttggacaagaaagtaaagttcgagagatgggaggcttctttatgccgccgaagc

SEQ ID NO: 8562 - DNA, 3074 bp, Unknown
  gut microbiota DNA sequence
cggaccgcagtcctacctcctcacgaagctgaacatcgagcggatgttggcgcccacttcctcgatctgggcgttgccatgctccatgcgctgctctttgagccacttctggccgttcttcgagtcctccatgaactcgtgggcgaagctgccgtcctggatgcgcgccagcacggtcttcatcgcggctttcgtctcgtcggtaatcacctgcgggccggcgtagtagtcgccgtactcggccgtgttcgagatggagtagcgcatgttcgacatgccgccctcgtacatgaggtccacgatgagcttcatctcgtggaagcactcgaagtaggccatctcgggcggatagcccgcctccaccagcgtctcgaagccggcgttgatgagcgccgtcacgccgccgcacagcacggcctgctcgccgaacaggtcggtttcggtctcgttcttgaacgtggtctcgatgacgccggcgcgcgcgccgccgatgccccacgcgtacgacagcgccacatccttggcctggcccgacgcgtcctggttcacgcagatgaggcacggcacgcccgcgccttcggtgaacacgcggcgcaccatgtggcccgggcccttcggcgcgatcatgaccacgtcgacctccgcgggcggctcgatgtagccgaagtggatgttgaagccgtgcgcgaacgccagcgtgtcgccggccttgagatgcggggcgatgtccgcttcgtacgtggcggcctgggtctcgtcgggcgtgaggatcatgatgaagtcggcttcctcggcagcgtcggcgacgctcatcaccttgaggcccgcctcctcggccttggcccgcgagcgcgagtcctcgcgcaggcccacgcgcacgtccacgcccgagtccagcaggttgagcgcatgggcgtggccctggctgccgtagccgatgatggccaccttcttgtcctggatgagctgggggttcgcgtctttctcgtgatagatcgtgacagccatgttcgtttttcctttctattggctgaggttacctggtgttcgggatgcgccgcgcgagcctcacacgtccttcgaattgcgggacatggcgattttgccggtgcgggtgatctccttgatgccgtaggcgcggaagaggtcctccatgcccttgagcttgctctcgtcgcccgtggcctcgatggtcagcgagctgcggcccacgtccacgatcttcgcacggaacacgttggcgatctcgatgatctcgttgcgacggtcgggctgggcgttcaccttgaacagcaccagctcgcgctcgatggccgcgtcgttggtgaggtcggtgatcttgtgcacgctgatcagcttgtgcagctgcttcgtgatctgctcgtaggccacgtcgtcggccttcacgatggccgtgacgcgcgacatggtgggatcttcggtggggcccaccgacagcgactcgatgttgaagccgcgccgcgagatgaggccggtgacgcgcgacagcacgccgggcttgttctccaccagaacggacaggatgtgcttcatcggtcgctcccctccacgtcgcttccatcggcttcgtcgccttcgggcacgtcggtgcgcacggctcccacggccacgtcgatggcgccgatcacctcgtcgagcgcgcggcccggcgccaccatgggatacacgttctgatcgcgcgagatggccacgtccagcaggtacggcccgtcgcttgccagcatgcgcgccagcgccgcgtccacgtcagcgggcttctccacccgctcgccccgccagccgtacgcttcggccagcttcacgaagtcggggctggcgtccagcagcgtcgaggagtagcgctcgtcgtagaacagcttctgccactggtgcaccatgccgaggcagcggttgtccaggatgagcaccttcaccggcacgcggtggatgctggccgtggccatctcctggctgttcatctggaacgacccgtcgcccgccacgcacaccacctgcttctccggacagccgatggccgcgccgatggcggccgggaagccgaagcccatcgtgcccaggccgcccgacgacaggaagctgcgcggcgcctcacggtccacgctctgggccgcccacatctggtgctgccccacctcggtcacgacgacgctgttctgaggatcgagcgactccgacagcttcttcagcaccacctcggggacgatctcgtcggggtcgtcccccacgccgggatggtagaacgggtagcgcgtgcgccaggcggagatctgctccacccatgtgcccgtgccggggcgcgcgccttccttctccaacgtcgacacgatgccggccagcacgcccttgaggtcgcctacgatgggcacctgcacctcgcgcaccttgccgatctcggccgggtcgatgtcgatgtggatgacgtcggcgtgcggcgcgaactcgtccagcttgccggtgacgcggtcggagaagcgcgctcccgccgcgatgataaggtcgctttccgtcatggcgaggttcgcgtacttcgagccgtgcatcccgacgggccccaggttcagctcgtgggacgcggggaacgcgcccttgcccatgagcgtggtgaccacgggaatctgcatgagctcggccagcgccttcagctcttcggacgcgccagaggacacggtgccgccgcccacgtacagcacgggacgttctgcttgcttgatacgggacacggcctgtttgatctgcttggcgttgccgcggtaggtgggcttgtacgacggcaggttcacgtcgtcggggtactcgaacgtcatgagctcgctggccaggtccgacgggacgtcgatgagcacggggccgggacggccggtcttggcgatgtggaacgcctcgcggaacgtagtcgtcaactcgtcggtggactgcaaaaggtagctgtgcttcaccaccggcatggtgatgcccacgatatcggattcctggaacgagtccgtgccgatgacgccgcgcggcacctggcccgtgatcaccacgagcggcacgctgtccatgtaggccgtcgc

SEQ ID NO: 8563 - DNA, 4666 bp, Unknown
  gut microbiota DNA sequence
gcacgtgcttgatctggtccgagtcgtacaacgcgtcgtatattttgatggcttggccgccgggatagccgaacacgaggtcgacgccctcggcttcgagcgaggccaccacggcctcggcgcccttcatcgtcttgccctgcttcggcgtcttgctgcccaggccgcgcggggcgccggcctcggtggcgttcgcctggttcgggcgcggcgcgcggccgtcggttgcggtgctccgtgcgttcgtcatgatacgtacgcccccttgtctgccgacgagacgagcttcgcgtacttcgcgagcacgccgtggtcgtgcttcggcgccggcggccgccaggccgcgcgacggcgttccagttcggcgtcgtccacgcccagcgtgagcgcgccgccttcgatatcgaccgtcaccgggtcgccttcctcgatgagcgcgatggggccgccggccgccgcctcggggctcacgtgccccacggccgggcccttcgtggcgcccgagaagcgcccgtcggtgatcagggccacgctggtggacagacccatccccacgatggaggacgtgggcgtcagcatctcgcgcatgcccgggccgcccttggggccctcgtagcggatgactaccacgtcgcccgccgcgatcttgccggcgttgatggccgcgcaggcctcctcctcgctgtcgaagcagcgcgcggggccggtgtggacgagcatggacggatcgacggccgacttcttcacgatggcgccgtcgggcgcgatgttgccgtgcagcaccttgagcgcgcctgaaggggagaaggggttgtcgtgcgcgcggcacacctcgccgtcggccggtttcgtgcaggcctgcaggtactcgtcgagcgtgcccatgcacgtgacggcgctgcggtcgagcaggtcgagctctgccagctcgtgcatgaccacgggcacgcccccgacctcgtacaggtcggacagtgggcgcgggccggagggctgcagcttcacgaggtgcggcgtgcgcgcgctcgcggcgtcccagtcgtccatcgtgatggggtgtcccgcctcgcgcgcgatggccgtgaggtgcagcaccgtgttcgtggagccgccgaaggccatgtcgcattccatggcgttgtgcaaggcggcagcactcacgatgtcgcgcgcgcagatgcccttctccagcagctccatcaccttcatgcccgcatgcttcgccaagcggatgcgctcggagtacaccgcgggcacggtgccgttgccgggaagcgcgatgcccagggcctcgcacaggcagttcatggagttcgccgtgaacatgcccgaacagctgccgcaggtggggcacgcggtgtcctcgtagtacttgagctcggcctcggacatgtcgtcgttcatcacctgcgccgcgccgtcgaacagcgtgttgaggtcggtggtgggcccgcacccgcccggctgcttgccgggaagcatggggccgcccgacacgaacaccgtggggatgttcacgcgcagcgcgcccagcagcatgcccggcacgatcttgtcgcagttcgggatgcacacgagcgcgtcgaaggcatggccctgcaccgcgcattccagcgagtcggcgatggcttcgcgcgacacgagcgagtagtgcatgccgtcgtggttcatggcgatgccgtcgcacacgccgatggtggatatctcgaacggcacgccgccggccatgtagatgcccgccttcacggcttcggcgatcttgtcgaggttgttgtggccggggatgatgtcgttgcgggagttgaagacggcgacgagcggccgctccatctcctcgtcggtgatgccgtcggccttgagcaggctgcggtgcggggcgcgcgccgtgccgcaccgcacggcatcgctgcgtagctgcatgtccgatcccttccttcctggcgttgccggtttcgtggcataaagaaatcccgttgcaagcaagctgcaccaggacctcagaaggaagggagatgcgcccggctgcacgcatccctgcgcgccgcggtcgctctcgatcggactgataacggagtcgccggttcagcctacttgccccggctgcacgcggaggtcgtccgctgcgtgccgtcgcgttcgagccgaactgctcggaggtggcgttcaggccgcccaccgccggctcgcagcatccgccggctctctgaagatgggttcgtccctactgtcctcgtcaacgcatttcgtctatgaacttgttgcgggtaagtatactccagcttcacgacgtcgcaagtaaaactttgacgatcgaagcgattgcgcggtaaatccacatggaggcggtggggattgaggagacgggggttcggggcgccggaggagctgcgaggcgccgcgaggtgccggaggctcccgctaggcgaggtgctggtagcccctccccgcggagcggttgggcgaaacgtcgcggagcgccggaaacccctcctcgcgacagctccagctcctggcggctgccgtccccgtaggtcgcgtcgtttcgggcctgcacctgccaccagccggtgatgccgggcttcgcggagaggagctcgcccgcatcgtcgccgtaggccgcgagctcctcctcgacgacagggcgcgggccgatcacgctcatctggccggcgagtacgttcagaaactgagggagctcgtcgagggaggtcttgcgcagaaagcgcccgacacgcgtgacgcgggggtcgtcgtccaccttgcgctcgcgctcccattgcgttagctgctcgggactcaggtgcttctccacgtcgtcggagtcggccaccatggtgcgcagcttgaggatgcgaagcggcttgccgcgatagccgacgcgctcttggaggtatattggggagccgggggattccaggcggataaccaggcaaagaagagcgaccggaatcaaccctacgatcgtcgcgcacgccgagaacacgatatcgaacgcccgcttcacgaagtggtaccccagccgcccctcgacagccagcggttcgtactcgcgtacgctttcggccggcgccgctcgggatccttcgacttcgctccctacggtcgcttcgctcaggatgacagcctggcggacccctccggtcgcttttttaggatgaccgggggcggcagctccacgctcagggcagcagccgtcgtccagggcaaccgctcccccggcgtccactgccgttattccgttttcaagttcgttttctgacaattcccaatccgattttcgtttggatggttcgcccgaacatatcgatctccagatacgcggtgcgcttgcgacggttgatcttcctgatccagccctcgcggcccaccagcgggcccttcagcacgatgatccggtcgccctcgatcacaccctcggacacgcccaccgtccgatgccccttctcggtgaacgcgtcgatccacgccacctcgtcgcgctccaaaggaacgaaacccccgtcgttgctcagcacccaggcgaacgccggcacgcgccgaagctgcgattccagctcgtccacgcggtcggtcaccacgatcaggtagccggggaacagcgtggccgtacaggtgcgccactggccgcggaactgcttttgcacctcgtagcgcggcacgaagcactcctgcagcacatcgtcctcgaccaagctctctatcaggcggcatacggcgaactcgcgccctgccaccgtctgcaccacgtaccacatgcacggctcctcaacgcgcgacggcatggcttcgcccttcggctgcgccgccgacgcgcacgtatgacgggggtattcatcccttcgaagctggcgaaacgcacacgcggcatcgttttcgcgcatcgaagtatgttcggtcgcgcccgtaaaggcgcatgcagtttcctgcggggagatcgaaggaggggtttcgccgtcggcgcctatccgtcgagctcctcgcagcaagctggttcaagctgcgaagggcgaggtcaggttttgcgcacgatctcaagtcccaccctcacctgcttctgatcgagcaggccgatgtccaggtaggcgatgcgcttgtgacggtcgatcttcttgatgcggtcgacgtgaccgcgtagcggcccttcgtcgatgatggtgcggccgttgtctatcgtgccgcgggaaaagcccaccacgtggctcggcccgccgaaatcatgcacgaacgaggcctcctcgggccgcagcgcgaaagcgcgccgctcggcgcccagaaggcgcgcgaacgcagtggaacgtttgatggttttctcgaaagcctcgatgtcgtcggaagctacgaacaggtaacccgggaacatggtctccgtgagcagacgccaaacgccctggttcttcttgaggatgcagtagctcagcgcgaagcagtcgcgcaccagctccggaccggcaagcgccttgacgcgctcggccacggcgcgctccctgcccggcaccacctgcagcacatagcgagcccgaccgcgcgaaggcacgggcggctcgatcgattcagttggagagatcctgatgacgcggggttctcgaacgacgcatccgacggacgcggcgcgagcgacgccgcctattcgatgcggctcgcgacagtctttctcagactgcccccc

SEQ ID NO: 8564 - DNA, 246 bp, Unknown
  gut microbiota DNA sequence
cgacgagcttgcatgctcatcgatgaagcgatatgttgaagccggaaagcccataaacttgtaccctaaccgttactcgtttgtaaagcgcgctctatttaaccataggctcacgtcattgcaagacgcctcgacacaaaagaccggtaacatgtaacaaaaacccgttcggcgcgcagcgttgttttacaagatgataacggcagagcgccggaagtgcaacagtgaacagcccccccccccccc

SEQ ID NO: 8565 - DNA, 4288 bp, Unknown
  gut microbiota DNA sequence
gcgaggtctcgatgtcgctttgcaaggcatgcggccagccgctcgtctttccgacgcatctcgctcagacggaaaaggcgttcgtgcgcccgaaacgagcgttcatggccatttgaaagatgagcggcgattttccgtcacacgatgacgattcggatgataaattggtatctgcaaatatccgaaaacaaagcaggagcgattatgaacccggcaccggcgcatagcaaaacgacctcgacgcagcggccccgacgctcccccgtccgcatagcgatatcgacgctgctatgggcggtcacggcatgcgttgtcgtcatcatggccgcacgcttcgcaccttcagccctgagcaacggcaggctcatcccggaggcggcagcattcatcccgtggctggcccttctcagcgtcctcgttctcataatcgcagcgttgaccaggcggaaagtactttccgccgtcaccgttctctgccttgtctgccagatcgtgtggcatgtcggcttcttcttgcccgcgccccgcatcgccgaggaggcggtcgaagccgtcccggagcagaccaccccgcgagacaccgtcatgcgcgtgatgacgctcaacacgaagaacggaaacgccgatgccgagcagatcgtctcgatcgtccgcgaccagcacgtggaagtactcgccatgcaagaggtcagcggctcgctgatcgaacggctttccgccgccggactggacgagcttttgccctcgcgcgtcatcggcttggcaggagcgggcgacaacggcggcgtcaacgtcatctacacgctcgcgcccatgcgcaacgcttcggaaagcatcttgcccctcaccggatctgccgtgccggcctgcacgataaccgccggatcccacgaggtgcgcctcgtcagcgcgcatcccacatcgcccaagacgggcacgctcggcttctggaacgagagcctcaccaacttgggaaccttgcgccgatacagcgatgaatacctgatcatgggagacttcaactccacctgggatcactcccgctaccgcaagatgctgggagacacgctggtggacgcctccgagcaagcgggcgaaggcttccacatgacgtatccgtcggaaccccactatgccatggttcccgtgccgcccatgatcgagatcgaccacatcgtgtactcgaagaacagcggtatgtccgtcggcgatctcgagaccgtcaacgtgcagggctcggaccacttcgccctcctcggaacctgggtgatcgagtaaccgaagccggaaactcgtcctccccggcgcacctccatcatttcgaatacctttgcatcccagccgataacttgtcggattgctgaccgatcgcccatagaggggaaacgatcgtcccagctcgcacgagaaaccccatacggcgactagactcgcctcacgcgaacgaacccgagaaccgcttcccgccgagcgcgaggagcggttcgacctatcttcacccctctatccgaaaggaggcgttcatgccgtatcgaggcttactctatttcgtttcccaaagcgccagctccgattaccgctccgacccgtacgcgacggaacgccgcagcctcccgaaccgcacgcacggcatccgctacgcatccgcgccgaaacgttccacctgcatcaggacctacgctccctccgagacggtgcgccccgtatgcgcaagctcaaccaccgccgccagccaagcaagccgaagcgtcgagccgcagcgcatgctcaaagcggtgttcgccatggtgctcgtcgccgtcctgtctgcgtttctcggaatcttcgccgcgcacgccctgtccgccgcgatcgacgacggagcctttcccctcataggatcggccgacgccgccaccgccgaagacggcttcagcacccctcgatcgtcatgggaacaaggcgtcgtgcccaccctgtatcaggacgacccgcaatgggccgatcgcccctacggatcgaggaccgtcggcgatgcgggcgccgccccgctgtgcctggccatggtgcgcatcgaagccaccggggacgccagcatggggcccgtcgaagtggcctccctctcgcagagcagcggctatgccgacaccgttgaagccaccgggctcctgaccgacggcgcagcccaactagggctcgcatcgcgagagatcgatgcgaacgagttggccatgcgacgcgagctcgtgggagaccgtcccatcatcgcctccatgaaagcaggctcgttcggatcgtcggacacctacatcgtggtcaccggcatcgacgagcacggcgaactggcggtggtcgatccgctcagccgcgatcggacaagccgccattggacgttcgacgagatcatctcgcaagccaccggcctctggtcctacacggcggccgcgtaaagtccgccgctctccccgccattcagcgcgcccgatgggcgcgcttttcttttatggaaagcatgctttacattgctggcgcaggggtctatacttgatggaaagctagctttacatattcgcatcggagaggagcgccatggagaaccggttggaggagatccgcaaggcgcgcggcatcaagcaagaggatctcgcgttggagctgggcgtgtcgcgccagaccatcagctcgctcgagaaggggcgctacaacccttccatcctgctcgcgttcaaaatagcccgccgcttcggcttgcagatcgaagacgtgttcatctaccaggaggaagaccatgaataggaagtccgctgtcctcacgctgtccatcggaatcgcctgcgcgatcgtcgccgtcgcgctggctctcgacctcggcgggatctcctcggtcctgcccatcgccgcgaagggcgtgtggggcttcgccggatgcgcggccgcgctgctcgtttgcggcgccttcgcgctggcccacaagcccacgccgcagcagatcatcgagcagggcgacgagcgcaatgcggccatcaacgggaaagcgggactgtgcgccttcgaggcgttctccatgcttgcgcctttggcggcgctcgcgctgtacgccttcgagcagatcagcacggccggcgtgctcacgatcatcgccgtcgaggtcgtagcctcgatcgtctatttcgcgcagatcgcccgcatgcagcggatcatgtagcgctggctcaggatccggccctcctgtcatcctgagcggagcgcgcctcagcgcgcgctcaccagcatggtctgatacgcgacctgcaccgttgccggatgcccggcgcgccgaaccacggcggtcagcgcctcgcctggcagacggtacgtgttgttgttctgcgagatatgcatggccaccacctgctcgagcgcgtcgctcaacagcgcctccagctcgtctgcggcctgcacgttcgacaagtggcccgtatccgagcccacgcgccgcttcaccggatacgggtagggcccgtctttgagcatctgcacatcgtggttgctctccagtgcgaggatgcgcacatcgcgcaacgcctcgtcggcctcgccggtgacgatacccgtgtcggtcatgaaccctaccgcgtctccgtcggcctcgacccggaacccgcacgacgatgccgcgtcgtgagacgtgcggaaggcgtgcacctgcatgcccgccagcgacagcgcgtcgcccgaggagaacgcccgtaggtcgcatgcgccctccagcacgatgatctccttgctggccgcgcgcacggcgtcgtcggcgaacaccgcgggctcgatgcccagcttcgccaggccgcgcagcaccacgccgaggcccttcgtatggtcggtatggtcgtgcgtgatgaggacggcctcgaggttcgccggatcgaacccggcctcgtcgcaacgcgcgaagaaatcgcgcttgcagatgccgcaatccacgagcacgcccttgcccgtggcggtatcctcgactacggccgcgttgccgcggcttccgctggccagcacgtgcaatgcaagtcgttggttcatagggttcgcttcccgcatctcttctcggtgtctcagtcggcctccgattgtacccgaatgcgcgcccctcgcgccccgcatccccaaacgctcaaaagggcgtcccgaatggcacggttcctgcccgggtttttcctttcaaaacgcgccgcgcgcgggcggaattgccgccgatcgggaatcaacggttccccgcgccgcccgtttcgcctactatggttcctcatacgaacatgcaggtcgaaccaagggg

SEQ ID NO: 8566 - DNA, 577 bp, Unknown
  gut microbiota DNA sequence
aatcggcatattcaagaccagataaatcataccaacataaatgaaaggaagtcctgtcgcataggtaccggctgcgattttggcataacgcagcagctcgtcgattcccagaatggaaaccagacaggtatccttcaacagcgtcaggctctcattgataaaggaaggaatacagttgcgcagcgcctgtggaagcaggatatgcagaaacgtataggagttggaatagccgagaagcttggctgcctccttttgtccctcatcaatggattgtatgccaccacgcagaatttctgtgaaatatgcggtatagttcagaagaaatgccagtatagctgctgttgtccgatccagacggatgcccagataaggaagaccgaaatagacgaacatcagctgcagaagcagcggtgtacctctcatgatataaatatagaaacgaacgatggtagagacaaccgcattccttgacagtctgacatagaccatgggaagtgccagaacaaaggagccgaccagcgttaccacccagaagaacagggtgatcttcagcccttctacaaaggccggaagcagc

SEQ ID NO: 8567 - DNA, 818 bp, Unknown
  gut microbiota DNA sequence
ctttggcgtcggcgccctccccgccgtccggcgatcgaaccctccggaactcatgtggagacctcgaaaagaacatgtgcaaactccatttgccttccagattgatatactgtaattctgtggttcgaacaccgaaaggaaaaacagacatgccgagcacggttctgattggcgcccagtggggcgacgaaggcaagggcaaagtcaccgacctgatcgcgcgcgaatacgattacgtggttcgctaccagggcggcaacaacgcgggtcacacggtcatccacggcgacaagaagctcgcgctgcacctcatgccctccggcgtcatgtacgagcatgcggttccggtcatcggcaacggcgtggtcgttgatcccggcgtgctcatcaaggagatggccatgctggaagccgaaggcatctcctgcaagaacctcaagatctcgtgcgacgcgcatgtgatcatgccgtaccacaaggatttcgacggcgccgacgagaagcgcctgggcgagaacaagatcggcaccacgaagcgcggcatcggcccctgctaccaggacaaagtggctcgcaagggcattcgcatccaggacctgctggacgagaagatcttccgcctcaagttggaagcggtgctttcgcagaagaaccccatcctcgagaagatctacggcctgcacacctacacggtggaggagatctgcgaggagtacctgccctatgcgcgcatcctcaagccgtatatggccgagacggcccagctgctgaacgaggccgtgcgcgccggcaagtccatcctgttcgagggcgcgcag

SEQ ID NO: 8568 - DNA, 1822 bp, Unknown
  gut microbiota DNA sequence
aatctgcgaggagtacctgccctatgcgcgcatcctcaagccgtacatggccgagacggcccagctgctgaacgaggccgtgcgcgccggcaagtccatcctgttcgagggcgcgcagggcacgctgctcgacatcgaccacggcacgtacccctacgtcacgtcctcgtcgtgctgcgccggcggcgccgccacgggcacgggcgtgggccccacggtcatcgatcgcgtactgggcatccagaaggcctacgtcacgcgcgtgggcgaaggccccttccccacggagcagcgcttccccgaggatggcggcgaaggcgaggaggccgaggtcggcgagctgctgtgcaaggtgggccacgagttcggcgtgaccacggggcgcaagcgccgctgcggctggttcgacgcggtcatcgcgcgctacgcggccgaggtcaacggcctcaccgacgtggcgctgacgaagctcgacgtgctgtcggccttcgacaccatcaaggtgtgcacggcctacgagtgcgaaggcaaggtgtacgattacttccccatgcagcagagcgtgctgttccacgcgaagcccgtgtacgaggagcttcccggttggaagggcgttgacatcaccgagtgccgcacgttcgaggagcttcccgagaacgcccagcgttacgtggagtacctggagaagatcaccggcgtgccggtcagcatcatcgctgtcggccccgatcgcgaccagaccatcatgcgaggctgggatcggtaatgttccgccgttctgtcgaacggcggaacgactcgacgctgcgaagcgccgatgcacccgatctcgcggcgatgccgacggctcgcgtaccgaagtatcccctacggggacttccttcggggcgcgcttcgccctcgccatccccacgatctcgggcacctcggcgcttttcgctgacgtatgagttcgacctataaagcgacgaaacgtttcacgtgaaacacttcgtcgcaatgacgtgcgacatgggaacaaatgtttcacgtgaaacagtggcaacaccagcagcactgaagcgcttttgcgcgacgtaaatagtttgagggtttgaaaggacctgacatgaacatcttggtattgggtggcggcggtcgcgaacatgccatcgcgtgggcgctggcgaaatccccgcgtaccgacagcctgtacgtggcgccgggcaacggcggcacggacggcatcgcccaaaacgtacccgacctgaaccccgaggacggccaggccgtgctggcgttcgttcgcgagaacgccatcgacttcgtggtcatcggacccgaggctccgttggttgcgggtgttgccgacgtgctgcgcgccgcgggggttcccacgttcggaccggacgcccagggtgcccagctggaaggcagcaagacgttcagcaagaaattcatggacgccaacgacatccccaccgctcgctacgccagcttcaccgacctcgagcctgcgcttgcctacgtgcgcgagctgggcgcgcccatcgtggtgaaggccgacggcctggccgctggcaagggcgtcgtggtagccgacgaacttgaggacgcggaagacgccgtgcgctcctgcttcgacggcgcattcggcgactcgggcaaaaccgtgctcatcgaggagtgcctgactggccccgagtgctcgatgctggcgttcgtcagcgacggcaaggcgcactgcatggccaccgcccaggaccacaaacgcgcgttcgacggcgatcgcggtccgaacacgggcggcatgggcgcgtactcgccggtgcccatcgtgacg

SEQ ID NO: 8569 - DNA, 1216 bp, Unknown
  gut microbiota DNA sequence
cggccccgagtgctcaatgctggcgttcgtcagcgacggcaaggcgcactgtatggccaccgcccaggaccacaagcgcgcgttcgacggcgatcgcggtccgaacacgggcggcatgggcgcgtactcgccggtgcccatcgtgacgccggacgagctggcggccatgcacgacatcatggagcgcgcagcggttgccaccgcgcgcgagttcgacaacgattaccgcggcgtgctgtacggcggcttcatgctgacgcccgaaggtccgaagatcatcgagttcaacgctcgcttcggcgaccctgagacgcaggtggtactgccgcgtctcgagtccgacctggcggatatcatgctggccgtggccgaaggacgccccgacgacatcgacctgcgctggtccgagcagtgggccgtgtgcgtggtgctggccagcgaaggctatcccggatcgtacgagaagggcaaggtcatcctcggaatcgacgaggccgagcagatcgagggcgtcacggtgttccatgccggcaccgccaagaatttcgacgacgagctggtcactgcgggcggccgcgtgctgaacgtggtggcgctgggcgactcgttcgacgacgcgcgcgagaaggcgtacgaagcgtgcgatcttatcaacttcgaaggcaagcagtaccgcagcgacatcggcaaacgcgctgcggccggtcgtgccgcttgggagaactaaatgctttcagaacgcttgctcacgtccgttgttcgcgaatgcacgaagaattacctgcgcctcgaaccgacgcaagagcgacgcgtgcccgggccgaagcccggccagaagtacatgctgtacatgcacgtgccgttctgcgagcggctgtgcccctattgctcgttcaaccgcttcccgttcgcggaggatcgcgcgcggccctacttcgccaacatgcgcaaggaaatgctcatgttgaaggacctcggctacgacttcgaaagtctgtacgtgggcggcggcacgcccaccatcatgatcgacgagctgtgcgacaccatcgatctggcgcgcgagacgttcagcatcggcgaggtgtccagcgagacgaacccgaaccacctgattcccagctacctggacaagctgcagggtcgcgtgcagcgtttgagcgttggcgtgcagagcttcgacaacgacctgctgaagcagatggatcgctacgac

SEQ ID NO: 8570 - DNA, 1075 bp, Unknown
  gut microbiota DNA sequence
cctgtacgtgggcggcggcacgcccaccatcatgatcgacgagctgtgcgacaccatcgatatggcgcgcgagacgttcagcatcggcgaggtgtccagcgagacgaatccgaaccacctgattcccagctacctggacaaactgcagggccgcgtgcagcgtttgagcgttggcgtgcagagcttcgacaacgacctgctgaagcagatggatcgctacgacaagtacggcagcggcgaggagatcctcgagcgcatcggcgaggccagcccctacttcacgtcgctcaacgtggacatgatcttcaacttcccggcgcagaccgaggacgtgctgttcagcgacatcgagcgcgtggtggaaagcggcacgagccagaccacgttctacccgctgatggccagccccagcgtggcgcgctcgctggcgcgcaccgtgggcaaggttgattacgcgcgcgagcagcgcttctatgagatcatctccgaagtgctggccggcggcgagaacccgctgttcgagcacggcagcgcctggacgttcaacaagcgcggcacgggcgcggcgggcgaggacgcgatgatcgacgagtacgtggtggattacgaggaataccccgccatcggcagcggcggcatcacgtatttgggcaacaacctgtacgtgaacacgttctcggtgaacgactacaacgacgccatcgagcacgaccgcatgtcgttgatgggcaaggccacgttcagcaagcacgaccagatgcgctaccgcttcatgatgcagctgttcggattgcgcctggacaagcgccagttcaagaaggacttcggcgtgtctgtggagcgcggtctgccggtggagatggcgttcatgaaggcctcgggcgcgttcgaccgcgacaacgccgacgagctgacgcttacgccgaagggccgctacctcatggtggtgatgatgcgccaattcttcatcggcgtgaacaacctgcgcgatcaggcgcgcgcagccctggtgggtgaggaacgcgagcttatcttcggcgacggcaaataaccgtctgtccgcatccgctcgaac

SEQ ID NO: 8571 - DNA, 1896 bp, Unknown
  gut microbiota DNA sequence
gttcttcatcggcgtgaacaacctgcgcgatcaggcgcgcgccgccctggtgggtgaggaacgcgagcttatcttcggcgacggcaaataaccgtctgtccgcatccgctcgaacaccgaaacgcctgcgcatctgccgcgggcgtttttcgtgtgtgccgagccgcgcccggcaacgtgttccggttcgactgcgggctcgggtgtccgactgtttcacgtgaaacgcgcttgtttccgtgttccgcggagtatccaacgtagacgttttcatcggcgggcacgcgtttcggcattcctcggcaatttacgtgctatgatacaaaaccacaacgagggacgttctattgcctgataggaggaggaaacggcatagacatggccaagaggggacggcatacggagggctttacgctcgccgaacttctgatgagcgttgccatcgtactcattcttgctgctatcgcctttccttccatcgtgtcggcgcagaacaacatgcgcatgttggagctgaacaacgccgcccaatccatcgcgaacgccgcccaagcccagatgacggccaagaaagtatcgggcacgtgggtggatgccgtgaaggacggcgactcttatcgcgcctgcttccccgccgcgcttgcgggctcatcccattcgcaaggcgaaacggaagatgtttcacgtgaaactctcgggtccgacgaggttgctcctccttccgcttctgctgcggagtcttccaaacgttacatgacggcggacaccgcccgcgagcagggcatcgtcccggcgctcgccgtggaggaggctgtgcgcgacgccgactatatcatcgagttcgatgccgacacggcgcaggtgaccggcgtgttctacgccgacggaaggtccggcttcttcggatcgacccctgcctccacgaacgccgcgaagacgtattacgaaaccgaggacgcctccaccgatcaggcggcgcgcatgggccacgaccccatgatcggctactatggcggcacccctgccggcgccacgcccgagaaagcgctcgcgaatccggtgatctgggtggacgaagcaacgggctgtctgatggtgcaggaccccaacattgccgcggacggaagcgcgggctccaccacctccacggtggctatcgagaacaccggcaagaacgtggcgttctcgatctccggcttgagcaacggaacgaccatggtgtcgttgtccacggccgatgacggttcggagtcggttggcttcaccaacttcgccgcagccatcaagcagcagacgcgcgacaacgcgaacgtgaagggcaatgtgtgggccatcgacctcaacgcactttcgcagctggtggcgaaggggaatgacggcaagccgacggcggatgactcgcagaaagcgaagctcaagcaggtgttcgacgcgtgtgtggcgggcgacgccctgaccgtgtcggtggagacgaaggacgcctcgcgcagctgcgtgccgggcacggctgccgcccatgtggagtggccgagccctgcgggcaagctgacgatgctgataaccaacccgtactccgccgtcgtggccggcgagaagaacgaagcttacatcgagccgcaggtgcggtcggcggtcgcggacagcgcgcatccttccattggggcgggcttcggcaacggcgacggcgtggtgaaggacgggctgacggtcaaccccttctatgaagataaagataatcacttccgcgtttccaacgcgaacgcgcagttgaagcaggagaacccgcaggccggctaccagtcgtacgcgggaggctggatagcctcgtcgtccgtgcgcgacgacgccacgtaccggctcgagggaactgtgggcgcgtacaacaatcatgcgtac

SEQ ID NO: 8572 - DNA, 2948 bp, Unknown
  gut microbiota DNA sequence
ccggcaacggcgacggcgtggtgaaggacgggctgacggtcactcccttcttcgaggacaaggagaaccacttccgtacttcccccgtgaacgcgcagctgaagggcgagaacgagcaggccggctatcagtcgtacgcgggcggttgggtggcgtcgtcgtccgtgcgcgacgacgccacgtaccggctcgagggaactgtgggcgcgtacaacaatcatgcgtaccagatttgggagctgtggatcaagcgagccgacaccggtgaatgcatgcgcgtgggctacttgaacgatggcaagtgggaatggggcgtgttcaaccagaagggggtcaactacgactaccgttttctgaacgactgcttcacctggtacggaacgaatgaaacgggcgatgcttcgggtacccttgccggaaccgataccgatgcgaacaacgtcatatccctgcgcctcgatgtgcggaagttctacgccgaggccgagaaccataagaaccacggcttggccgacgaggacggcaatgcaacggtgtacgtgcgcacggctccgaaggcatccgaagtccaggcgtacttcaacaagctggcggttcctgaaccggcttcggttgagaatccgttgaaggctgcctatctgagcggcagcgcccaggagaccggctcgcgcaccgcggataccccgtcgatcacggcacgcgccgcgttcgaaggcgagttcggcgcctcgtcgtccgacgtgtcatgggcggtgtccaaaaccacggtcgccgggttttcccaaggtaacgaatacctgagcgccgccggcaccgtgccggtgcgggtgtactactccattgcccccggggttggtttcgcgaacatcagatcttacgataacggcaacggcagcgggtacctaagcggcgtgctcagcacgcgcttgaccaacgtctcgctttggctgtaccgcggtccctctatcaacgatcttgccgttatgccgtccgcccttctgaagaactacaacgggttggagttctcgtgccgccaaggaagtacgtacgacttcaagataaccacccaagaagactaccgcttctaccgggcactgctctactacaccgagcaaggtgttggaaaacccgattatgcggttcagcatgttccgtattcgtcgatcgagtcggaagttgttctgggtgaggtcgaccctcctgcgaaacccgagacagacgagttcacctatcgtttcgtgggttgggaaacggttgatgttcgcgatgccggatcggggtcgatcgtctgcgtgccgggcgatacggtcggaaagtacgacggccagctggcattcaagggaacgacgttcgtggccaagttcgatgagatacgcaaaccgaaggtgagcctcggtttggcgtatatcgagcttgatgccaacggtgctgcgaccagctggtacggttattacggaaccgacgaaggctcgttcgttaatgagcttcgcacagacaacgccatcgacgactgggggtacttcatcctcgttggggagggcactgagaagtcagccatcacacaaggcaaaggtagccagtacaaaatcaaggatgaagaagctataacggtttctttgtctgggacgacgtattctgcatatcgcatcgttgcgtcgggagatgttgcgctgaagaatcaatctacaccggtggaagtgttcgtgaacaagtcccagccgaacgagttgaccgcaacctaccaggtcaacttcaatttcgcccgcgccgtgacgcttgatggcgatgttgcgaaaacctggggagaagatgcttcgccctggagcgtgcgccatgctatgcagtttcctggttcattgaaatggtttaacaatgtcaacggcgtacagtatgcgtacatgggagatgcctttattcaagaacatgatctcgatatgaagaacatcgttgacgggtacaagttcaacaacatattcacaggggcttacgatggcggaagctaccgtatcttcaatttcggacgagcgacgtatgccagccttggcgatactagcggcttttccgtgctgaactcagcgaaagagtacgagggtgttgggcaggggcagggtctcttcccttgggttctcagtgatggaacttcgtctgcggttataaagaacgtgaggcttgtcgttgacggcaattcgtatgctgccgtcggtacgaactcgaactcgaacttcggttttctggtgggcaatgctgcgaagtccaagattgtgaactgtacgcttgagggtgctagcgagaacgcgactgctgtcgtggacaggctttcctacggaacccatgcggtgtcaccgctcatagggtatgcggaagagtgcgacatcgaaaagtgcaaggttttcgatgtcgatgtccgagtctcttggagggataccgggacggtcgatggattgtcggcgggtttgatcgttgctcgaacaagccaggtgaacctatcatcatgttcggtgaccgacgtcgtcttcaacattgaaaacaaagtgaagccctcctcggtcgtttgcttgggcggcgttgtcggtagtgccgggtggtctctcgacgagagttactgcacggtgaaaacggtgtcgttctcgtttccggagaaccagcaggtgcttacccggctttccgccggttcggtgatcggcggtcaaagcggtgcgtgttcggcgcactacaacacggtcacgcagcctgttcagtactctttgggtggcagcgcatgggttcccatcgaggcggaagttggtggttccctatgaagcgcgtgaggatccttcgtgacacttccggggcttctattgtcattgcgctggtgttcttccttatttgcggcatcgtcgggtcggtggtgatgacggctgcctcggtgcaggccaaggcagcgcagacgcatgtggacttgcagcaga

SEQ ID NO: 8573 - DNA, 1079 bp, Unknown
  gut microbiota DNA sequence
atttctggaccgaacagcgcacgaaggacatcctcgccgcccgcgcggaggggaaggattacgtgctgggcggctccgcatccaatcggttgctcatcgaccctccaagcgaagcggggggtctcgccccggtgtacggctgtatcacggtggatcccgacctcaacatcaccgtggagttgtcgctcgattccgctttcgcggcggattccccctacaacaccaccatctccgtccaatgcacgcccacgttcgataaccaaggccgcgtgacggtgatcgagtacggcgacaacaccgtcgtgaagaagacggaggcggcgtgatgatcggcaaaacgacgcgcgtgctgcgtgagaaactgcaagattgccacggcgacacgatggtggaggtgctggcggcagtgttcattgcggcgttgggcgccacaatgctcgccacgatggtgacggtgtcggcatctgcctcggcccgaagccagcaggtgctgaacgcctcgtatgcctcggagaattctttatacgattcgtcttcctacgggcctgtcgtgtctgtaacgctcccggactcttcgaccgcagttcccatcaaagtgagcgtataccagtcgggcggctatgcatactacgaggagggttggtagcatgacaccccttctcgacaaagcgtcgcttcgatcccgcctgcgcgacacgcgggggttcatgatcgcggagcagctgaccagcatagtgttcatcgggcttctttgcgttgcggtgggcgtcgggctgcaggtggccatgaactcgtacgcctccatcacccggcaggcgcaggccgacgcgctgctgcaacaggcggtggaggtagtgagcgacgagctgacgtacgcgcgcgacgtggagggcgagggaacgcaggcgcccgataacccgctgtacttcaccagccccacgcgtcacgagacgtcggtgctgcaatcgagcgagactggcgaagacggcatctggctaaacgcggctggagagcagtcgcaaatcgtgccggcacgcgacggcctcgcgcccaagctggcagagctttcatacaacgcg

SEQ ID NO: 8574 - DNA, 254 bp, Unknown
  gut microbiota DNA sequence
tacgcttccccgtacttcgagaacgacgtcgggtaggcctcgcacgcatcgagcgcgcgaacgagccacagcggaaacgggcccgacgacttgatctccatcaccgcgtcgccgacgggcagcagcggatgcgctgcagctccggcatcccttgcgaacagatcgccgtaggcgatgccggtatcgaaggtgatgcgcaagtcgtccggcacatcgcccagcgcgcgcaagccggttgcgccgccgcctgccgc

SEQ ID NO: 8575 - DNA, 1300 bp, Unknown
  gut microbiota DNA sequence
gggatggggtcgcggcccattaggtagtaggcggggtaacggcccacctagcccgcgatgggtagccgggttgagagaccgaccggccacattgggactgagatacggcccagactcctacgggaggcagcagtggggaattttgcgcaatgggggaaaccctgacgcagcaacgccgcgtgcgggacgacggccttcgggttgtaaaccgctttcagcagggaagaaattcgacggtacctgcagaagaagctccggctaactacgtgccagcagccgcggtaatacgtagggagcgagcgttatccggattcattgggcgtaaagagcgcgtaggcggcctctcaagcgggatctctaatccgagggctcaacccccggccggatcccgaactgggaggctcgagttcggtagaggcaggcggaattcccggtgtagcggtggaatgcgcagatatcgggaagaacaccgatggcgaaggcagcctgctgggccgcaactgacgctgaggcgcgaaagctaggggagcgaacaggattagataccctggtagtcctagccgtaaacgatggatactaggtgtggggggctccgccctccgtgccgcagccaacgcattaagtatcccgcctggggagtacggccgcaaggctaaaactcaaaggaattgacgggggcccgcacaagcagcggagcatgtggcttaattcgaagcaacgcgaagaaccttaccagggcttgacatggacgtgaagccggggaaacccggtggccgagaggagcgtccgcaggtggtgcatggctgtcgtcagctcgtgtcgtgagatgttgggttaagtcccgcaacgagcgcaacccctgccccatgttgccagcattaggttggggactcatgggggactgccggcgtcaagccggaggaaggtggggacgacgtcaagtcatcatgccctttatgccctgggctgcacacgtgctacaatggccggtacaacgggctgcgagaccgcgaggtcgagcgaatccctcaaagccggccccagttcggatcggaggctgcaacccgcctccgtgaagtcggagttgctagtaatcgcggatcagcatgccgcggtgaatacgttcccgggccttgtacacaccgcccgtcacaccacccgagtcgtctgcacccgaagccgccggccgaacccgcaaggggcggaggcgtcgaaggtgtggagggtaaggggggtgaagtcgtaacaaggtagccgtaccggaaggtgcggctggatcacctcctttctagggagacac

SEQ ID NO: 8576 - DNA, 393 bp, Unknown
  gut microbiota DNA sequence
tcccagcctacctacgacgcgcgcgccatcgtgctgcgcaagacgaagctcggcgagagcgacctcatcctgacgctgctcgccgaggacggctcgcagatgcgggccgtagcgaagggcgcgcgcaaacccgccagctcgttcgcggcgcgcctcgagctgtactcggtcgtcgacttgctcgtcgcgcgcgggcgcagcctcgacatcgtgaaggaggcgcggctcgtcgagagcaacgagcgtcttcgccgcgacatcgagcacgctgccggggcagcgcccatggccgaactgctcgaccgcgtcacgcagatgggactggagaacccgcggttgttcgcgctcacgcgcacggcgctgtccagcctgggtcgggtcgatcccgcgcag

SEQ ID NO: 8577 - DNA, 6911 bp, Unknown
  gut microbiota DNA sequence
aacgggaggaaaaggagggatgtcatggacatctcaagacgaggattcgtcaaggccacggcagtagcgctggcgagcgcggcggcggcaggcaccatgtcgtcgctcgtgggatgcgcaagcggcgaaggccaatcgacgaccgccgcttcgggcgacggacagaagtacacgtcggtgtgccgcttctgcggctgcggttgcggcgtcatctgcgaggtcaaggacaacaagctgatcagcgtgacaggcgacccggacaacgagtccaacaagggtctcaactgcgtcaaaggctactacttggcgaagatcatgtacggcgacgaccgcctgaccacgccgatgatccgcgaggacaagtccacgaagggcaccggcgaaggtttgcgcgaggcgagctgggacgaagctctcgacctcgtgtcctccaagctcaaagagacgtggaagaacgacaagtcgcgcctggccttctggctgagcggccagcagcccatcaccgaaggctacgcctgcgccaagttcatcaaagccggtcttctctcgaacaacgtcgacccgaacgcgcgcctgtgcatggccagcgccgtggtggcgttcatgaacgtgttccaaaccgacgagcccgccggatcatacagcgacctcgacgaagccgacgtgttcgtcacctggggcgccaacatggccgaagcgcaccccatgctgtactcgcgcctgacggcccgcaagctctcgggcgagggcgtgaagcactacgatctcggcaccatcagaacgcgcacgagcgcgagcgccgacaagacgatgatcttccatccgaacaccgacctcgccatcgcgaactgcatcgcaaactacctcgtgtcggagaagaagtacgacgaggccttcgtgaacgaccacctgcagttcaagcagggcaccgaggacatcggcaactccttcgaggacggctacgacaagagcgagatcggctcgaaggtggacgcggtgagccctatcaccttcgaggagtacgccgcgcgcctggaaccctacaccttcgagtacacctctcagctctccggcgtggccgtcgaggacctcaaggagctggccgaggtgttcgcggatccgaacaagaaggtcatgtcgctgtggaccatgggcgtgaaccagcacaaccgcggcacatggatgaaccattgcatttacaacgtccacctgctgtccggcaagatcgcccagcccggctgcggccccttctcgctgaccgggcagcccaccgcctgcggcaccgcccgcgaagtgggcacgttcagccaccgcctgccggccgacctcttggtggcaaacgagcagcaccgccgctacaccgaggctatctgggatctcccgcaaggctacctcgacgggatcaaggctcccggcatgcacacggtgaagatgttccgcgagctttccaagggcaacatcgacttcatgtggtccgcccataacaattgggcgcagtccatgccgaacctcacccgtttccttggcgaaggcgctgacaacaagggcatcttcgacacgttcatcgtggtcaacgaggtgtatcccaccctgtccacgcagtacgccgacgtcgtgctccccgtggcgctgtgggtggagcgagagggccagttcggcaacgccgagcgccgcaccgccgtcttcgagaaggccgtggacgctccgggcgaggccaagtgggacctctggacgttcatggaagtagcgcatcgcgtgctcgacggcgagaagatcggcagcgaggatgccttcgaccacctgttcggcttcatctacgacaagaacgcccgcgatttcaagaacgacgaccgcgagacgaaccgcctgctgtgggaggagtaccgcatcttctcgaaccccgagatgaacgacaaggccaaggctatcaacgacgataccgacggcacgttcggcgccaagctcaaaatggaggcaaagcagctggccccctacgaggagtaccttgccaaccacggcatgacgtggccggtgcgcaacgtgaacggcacctggaagtccacgaagtggcgcttcgccgagggctcgcaggacgagggcttcgacgaggtcggcgtgaagcagtacggcaagcccggacaggccggcggcgtgagcttctacaagtccgccaacctgaagccgtccgtggtgttccgcccctacgaaccgcccgcgcagacccccagcgacgagtacccgttctacttcgtcacgggtcgcttgctggagcactggcacaccggcacgatgacccgtcgcgtgcccgagctcgaccgcgcgctgcccgaggcgctgctgaacatgaacccggacgattgcaagaagctgggcatccaggacggagacatggtgaaggtgaagtcgacgtacggcgagttcgacatcaaggtgtccacggcgggccgcaccgagcccccggccggcgtgacgttcgctccgttcttcgccgaggagaccctggtgaacctggcggtgcaggacgtgtactgcccgctgtccaaggaacccgactacaagaagacctgcgtatccattacgaagctctaaggggaagacgatgaagaagcacatgataaccgccgccctcgtggccgtgatggcgctgggcttgggcacggttgcaggctgcagccaggaagcccccagggaagacgtgaacgcgaacgtgcccgccggcgctccgcctttgatgccgacgagccacgacgggcgcttcgaaaacctcggcgcggcgggctgttacggctgccacggcgcgaacgaccaggccaaccccatgctggccgacgcaaccgccctgcccgccgaccactacgcgggcggcgacgcgggttccttggaaatggacccgacgcacgagcagtgcatcacctgccacgcgcaggcgtaagagatacgtgcctacccggcggacggagcgtcgcgcgtccgccctccctcctcgccccgccccctccttccaagggggcgggccctcggaggataagaagaacgaacgtgaggaacccatcatggttatttcgagtttggtcgtggaaacgatgcccgatcgcaccgacgacgtggcccgggagctggcgcagcgcgaaggcgtcgaggtgcacgagacgaacgggcacaagatcgtcgtcaccatcgaggccgacaccgtggacgactcgcacgacatcgcgagcggcttcatcggcatcgaaggcgtgaccggcatcaacctcgtgtacgctaacttcgaggacgatcccacgctggccgaggccggtacgcgatgagcgaagcttcggacacgcggcgcgcgtttcgctggtcctggctgcgccatgccgtgcaggcggcggctctcgtgctgttcgccgccccggtgcttgcggccggatggagcctgttcggaacgtccgtcggcggcgacgacgccgcggcgacccccgcccagcttcccttcttcggcagcctgtcctcctcgtccatcgggggtctcgacatcctcgaccccttcggcgctctgcaggtcatcgccgcctccaaaacgttcgagctcgattggctgctggccgcgctgccggtgctcatcgtgtacgggctgatccgaggccgggcgttctgcggatgggtgtgcccggtgaacctgctcctcgagatcgtggacttcgctcgccgcaagctgcgcatcgacgtgcgcgagatgccggtgccgcgccatgcgaagctgtggatcgcccttgccgtgctgggcctgtcagcgctgaccggtgtgccggtgttcgaggcattctcgcccataagcgccgtcaacaagggcatcctcttcggtgccgtgacaggcgtttgggtgctgctggccatcgtgctgacggaactgttctggggctatcgcgtgtggtgccgctcgctgtgcccgctgggcggcttctacgaggcgcttggccgattcggccaggtaaacgtgaagatcgatcccgcagcctgcattcactgcgacgcgtgcaagcatgcatgcctgtccgatcccgcgatcctcgagccagcgctcgacggatgcgacgcgatcgtgcgggccggcgactgcatggcctgcggttcgtgcatcgacgcctgccccacgcgcgccctgtcgttcaccctgggacgcgcctccaagccggccgccccgaacggcgaggaatgacccggtgcggcctctggtgcatcgcgcggcttcgcgatgcaccagaggccgcacctttcgcgcgcgccgccttcccctttacacgttcagcagcttgtgcctgagggcgtagtccaccaaatcggcgcgggtcttcaggcccagcttctggtatatcttcgaacggtgggcctccaccgtcttgaccgagaggaatatctgctcggatatctccttgttcgtgaagcccttggccagaagctggaggatctccagctcgcggttcgagagctgctggtaggagcgatcctcttcctctcctccggccacaagctgcttggtgagcatggccgtcatcttcggatggatgtagctgccgccctcggccaccgcatgaacggcggcgatcagctcttctgacgtcgagttcttcagtacgtagcccgccgctcccccgcgtagcgtgtagaagaggtactccggttcggcgaacatcgtgaggatgaccaccttcgtgccggggaagtccttcgcgatcttctcgcaggccaccagcccgctctgccccgggggcatggagatgtccatgagcaggatgtccggtttctcgcgcgccacgatggcgtaagcctgcgcgccgtcggctgcctcggccaccacccgcacgtcggggtcctgctcgagtatcatcctgaaacccacgcgtaccacttcgtggtcgtccgccagcattactctgatcatgcgcccgcctccttgccttccgccacgtgcatcggcgcaaccagcgtcatcttcgtgccatgctcgtcggattccatcgcgagccgggcgccgatgacgctcgcgcgctcctgcatgcctacgagaccgcagccgctccccttgatctccggctgctcggtgtcgaagccgcatccgtggtcgatcacgctcacatgcagccatccggccgaatcctcgagccggacgatcaccttctcggaacccgagtacttgcaggcgttcaggatggcctcctggcagatgcggtacgcctgcgtctcgagagcctgatcgaagcgatcgcacgacaggctgccctcgaacacgatctcgttgccgtacgtgcgctcgaacacggcagcctgcgagcgcagagccgcaacgaaaccaagatggtcgagagccgaaggtcgcagctgcaccgacaggttgtgcagctcgtcaagcacgttggcaagatcgttgttcgcttccgccagcagctcgtagccctcttcgtcaacatgcgcgacaaggcgcttgaacacgaacgacagcgtcagcagctcctgcgctatgccgtcgtgcagctcgcgcgagatgcgcttgcgctcgtcctcctgagcggcgatgacgcgcgcaagctccgagcggatgaagatagggttcttctgatcgtcggcgcgtttctccaccgcgattctttcgaaatccatgaagtcgtcggaaacgacgtccaaatcgcacaaggtgccgtccagatcgtcgatgacctggcggtacgccgcttcgtgccgatcgctcaccgtgcggaacgcgcacagcagcacggcgaccacgcgcccgtcgcgcgtgagcggcaacgcgcagaagctatgcagatcctcggcgaacacgatagggtacgacgagtactcgcgcgggtcgatctcctcgtcgatgttcgtgaacatcatgggcttgcccgccttgatggtgatgccgccgatgccgtgccccggtgccagcacgatgcggcgatggcgctcgccggtagcgcctgcgctgtatatccacttgagcggcgcgccgatgaacgccgtcaacccgatagacacgaaatcgaacccgtaccgatctttgatgtcgttcaccgcacgcgcgtacttctcgcacgcgcccgccagctctcgctcgctgaaattggacgctcccaccgcgtctcccccgttcccgttgccgatccgctcgttcgctcgtcgacggtctattatcccctacttcgctcgtatttgcacggggcggcttgccgaacgcctcgacgacgcgcgtaatccgccatgcggcacgctcccgcggcccctgcttccctgatcagacgctcgttctcgtcggtgatgccgccgagcgcgaacacgggcgcatgcgcgcgatccagcacagcgcgcaggaagggcaaccctcgcgccgtggacgccggcttgcacgaaggcgcgaacacggggctcgcgacgagaacgtcggctcccagaacctcggcctcggccacctcgtcggcctcgtggacgttcgtacccacccacgcgaacccgtcgggacggctctgcgcgcgcaacagcggcagcggcaggtgcacggcggcgcaaccgaggcggcgcgccgcctccacgtgcgcgtgcgcgacgaaggcgatgccacagcgcgcgcagacggcggccatctccgctgcgaggagctcgtaggcggcatcgtcgaggtccttctcgcgcaggatgaccgcgtcgatggcgcccgactccgcgaggaacgccgtctgctgcggcaacgggagagcgcagcggaggcggtcggtgacgaacacgcgccgaaacgtcgggtccgccgccgagggctcacaggcgaacatagtcgttcatcaccggctcgaggccgacgccgcgcagcgcggcgcgcacctgcgccacgtcgcggccgtcggcgatctcgaactggtcgtcgcccgcag

SEQ ID NO: 8578 - DNA, 298 bp, Unknown
  gut microbiota DNA sequence
caacggcacggagcgcgtcgtcgtctcccagctggtgcgctccccgggcgtgtacttcgcctccgagcgcgacaaggcgtccgacaagacgctgttcaacgcgaaggtcatccccagccgcggcgcgtggcttgagttcgaaaccgacaagcgcgacatcctgtccgtgcgtatcgaccgcaagcgcaagcagcccgcgacgctgctcgtgcgcgccctcggcctggccgagacgcgcgaggagatcatcgagctcctcggcaacgacgagatggtgctgcgcacgctcgaccgcgac

SEQ ID NO: 8579 - DNA, 460 bp, Unknown
  gut microbiota DNA sequence
ctcaagctcctcaacagttgccataactccctcttcctaggtcaagctgaaaccgccttcgttgtagatggtctcgcccgtaatgaacgaagcgtcttccgaagccagaaacagcgcgacgtcgaccgtctcgcgaacttcgccgtagcgtccgaagggcatcttcgccaggaacgcagcgctccgctcaggatcgttgatcgttccggcggcaatgcgcgttttggatgtgccgggagctatcgcgttcacatgaatgccgtacttcgccagctcgagcgccatcacctgcgtaagcattttgacggcggctttcgaggggcaatagggagtgatgccgccgatggtcttgcgggagctgttcgagctcgtgttcacgatgtagcccttcacgccaagctcgaccatcgtgcgcgcaacagcctggccgacgtagaattcgccgttcagattcgtggcc

SEQ ID NO: 8580 - DNA, 4020 bp, Unknown
  gut microbiota DNA sequence
ctccggcggctggatgaagcagggctcctcctggtactacctctccggctccggggcgatgcagacgggctggctgagcaagggcggctcctggtactggctggaccccgactccggcgcgatggccacgggctgggagaaggcctcggacggcaagtggtactacttcgaaggctccggcgccatgcagtcgagccgctggctgaaacaaggaaccgcttggtattacctgagcggatcgggagccatgcaaaccggctggttgctcacgggaggagcttggtactggatggatcccgaatcaggcatgatggcaacgggctggctcgagaacggagggtcatggtactatcttgacccctcctctggagccatggcgaccggcaccgcggtaatcgacggcacccgctacatattcgacgattccggcgcgtgcgctgatttcgtggatgaatagaaaaagaaaggcctttcatgcgcaacgtagataatcagctcgtctctataatcgtcccggtcttcaacgcggagccgtaccttgcgcaatgcctcgacagcattctcgcgcaaacgcaccgcgagctggaggtcatctgcctgaacgacggcagcacggacggctctctcgccatcatgcaggcatacgccgctcgcgacgagcgcatccgcgtcatcgacaagcagaaccaaggctacggagccacctgtaatcgcggactggaagaggcgcgaggcgcatggatctccatcgtcgagcccgacgactggatcgaacccggcatgtatgccgacatgctcgctttcgaagcaaccttcaacgatcccgcagacatcgtgaaaaccccgtactggcgcatctggatgcccgacacccccgagcaacgcaagctgaactgcagctaccgccgtcgcatcaagccgccttgccagccgttcatcatccgcgacgcggcgcatctgctcacgcaccatccgtccatatggtcggccatctaccgcaaaggattccttgaaaagcacggtatccgcttccgcgagtatccgggagcgggatgggccgacaacccgtttctgatagagacgctctgccaagccgagcgcatcgtctatctcgacgaaccgtactactgctaccgcgaggaaacgcccgagaaatcgaagtccttcgcgctgaacaacacgctactgccttttgaccgatggaacgacatgatggatgcgctcgaacgcataggcacccgcgacgaagccgtgctgcgcgcccacaacagccgcggcttcacctacctaggcggcgtcctggaagaagtcgacctgacgaacgacgaggtgcgggcggcagccacgcgcatgttcgagcgaatggataccgatcttgttctgtctgacgccgagatacctccaggatgcaagcgcatgtttgccgaactgcgcggcatgcccgaaccgtacgtccgcagcgcgccctacgcctgggggctcgtcaagcaggggctgtacaacctacgcaacgtaggtccttggttcactcttcgcaccttcaagaaatacgtgacgagaaaaagcagccgcgaaggcgggaaataaaggaagaccccgagcattcggggtcttcttgcatactaaatggcttacgccgcttctacttcgggcaaggctacgaccgtcgtcggatcgccgccggattcgaccacttcgataaccttcctccacgttccctcgtcgcgaggaaccatccagaggccgtcatgctcctccataaagtcgccaacgtaagggccggtacccgactggaaagcgatcctgtcggcgttcgcggcgaagtccgccaccatagccgccagctcgtccttcggccaattcgtttcggcattgccaagaagcgcgtcaaggtgcgccgcagcgttcgccgggtcggccgcaacctgcttgatgcccgcctcgaccagctggcggtcctggatctggcggcacgcctcgatgtcgacagcgtacagcttgcgcacacgggcgagaacaagggcctcggggccgtcgagctcctgcgctccggcgtttagctcaatggtgccgccgttcacgatgtccttcaaatgcatgtctatggggacgttcgccgtgactccgccgatctggtcgacgaacttctcgaatccgacgaaacccatgtcgagatagtactgaacatgcacgccagtcaggctctccaccccttcgacagcggcctccatgcctccctggcggtatagctcgttgatcttcaccaccgaaccttcgtagtcggcctcagtatcgcgcggcacggtgactagcgttatcttgtaggtaacggggtcgacgcgaaccagcatcatggtgtcggagcgccccgtgccgtcggcgtagtcctcgagcgagatctgagtcgttccaacgcgcgaatcgtttccaaccactagcacgtagaagggagccttcgcatcgccggcagcctcctgcatgagctgcgtatcggtgggctccgactccgcagcaggctcctgtttctgacagctaaccataactgccatcgttagcgccatcagcgccgcaaccgcaccgtagcgcacgatgttcttcaatttcacctgtaccattcctttcgttcgagcagtgcgcctaacgacccaagcgctccttgagtcgacaaggcagggccatgatagcatggcctatccggtacgtcgtggagccaaggtactcttgacgaattcccccggtttctcgcgcgtgctcaatcacgtgcaagcgaaacgacacaccctcgtcgggatccgatgcgcccagctgggtcgcgcacgcctctagttgcgcctcatcgagcgacagggcatcgaacgccgcccgatcgtagcagaacgccacatgacgcagcaaaacgcggacgaacgcctccgagcactcccccacatggacgcgcagccacgcctcgatctcgtacgctgccttgaagtgaccgtacacgtgcttgatctcgcgatcctcggtcatcgtggagccgcgccgcacccgcctcacgtacaaagactcgttcagaaagccggttcgcggcgccaaggccagcatgaggcaggtgaagaggttgtcctcgtgcacgattccctcgtagaaccgaaggccaactttgtcgagaaagcttttacggacgaactgcattccgggagacacgcagaacgaatcctcttcgacgaagcgcaccataagctcgcgacccgtcatgatgccgtcgatgtcggagcgaccgccatactcatcatgatagcgcgctcgcacgtcctccccttcgtacagcgtgcgggccgagaagaacaggtcgtccaacccgtcgcgctccgcccgctcgaacagcatctgcaacgcacgatcctcgtagtaatcgtcggaatccaggaagacgacgtacttccccgtcgcgcgggcgatgcccgcattgcgcgcggcagactgccccgcgttcgcctgagaaaggaatgagaagcgagcgtcgtcgccgcccgccttccgagcggcttccagcgtgccgtcggtcgaaccgtcgtcgacgcacagcgcctcgaaatcgccgaacgtctgccgcttcaacgacagcaggcagtcctcgatatagggacgcacgttgtacatgggtatgatcacggaaacagccggcatggcctctcgtccttccttgatgcctatcagaccgacgcgtccgaagacgcagggatgatcgcagtcgattcgacgtccagctcgccaggatcctcgccggcgtccaccgcggccatgaggttcgcccacccttccgggttctcgtagcagaaccatagaccgttatgctgctccatgaaatcgccgttgctggggccggtgcagctgtatacggtcatctcacccgagccgcccgaaaaatcgagggcgagcgacaggatgtccgacgtgttcatgtcggtgcccacgctctcagcaagatcgagcaccgtgcccggcaattcggccaggggtttctcgagaaccttctcg

SEQ ID NO: 8581 - DNA, 1304 bp, Unknown
  gut microbiota DNA sequence
ttctaggtgcaggggatctttacttcgccgggtagaagccgctcggctcttcgcccaggttgatcatgatgttcttcgtctgggtgtagtgctcgagcataatcttgtgcgtctcgcggccgatgccggactccttatagcctccgaacggcgctccggacgggatctggttgtaggtgttcacccacatgcgcccggtcttgacgccctgcgcgacgcggaaggcgcggttgatgtcgcgcgtccagacggcgccgcccaggccgtacacggaatcgttggccaggtcgatgacctcttgctcgtctttgaacttgatgaccacggccaccggcccgaaaatctcttcctgggccacgcggcaggagttgttcggcacctcgatgagcgtcggcttcaagaaggcgcccttggcaagctcgccttcggtcgcgcgctccccgccgcagaggacgcgaccgccctcctgcttggcgatctccacgtactcgaggatcttgttcatctgattctggtcgatctggctgcccatctgggtgtcgtcctcccaaggcatgcccaccttcaccttgctgaacgcctcgcatgcgtcctcgacgaacttgtcgtagatatcctcgtgcacgaagatgcggctgccggcgcagcacacctgaccctggttgaacaggatgcccagctggatgccgtcgagcatcatgtcccacttggcatcggggaagatgatgttcgccgacttgccgcccagctccaacgtggccgggatgaggcgctcggccgccgcgcgggccacgtcgcgaccgacttcggtcgacccggtgaaggcaagcttgctgatcttgggattgtcgaggatgtactgacccgacttcgagccgcggcccgtgaccacgttgaatacgccggccggaatgacgccttcggtgagcttggcaagctcgagcaccgtgagcgaggtcgtggacgagggcttgaacaccgtgcagtcgccggcggccagcacgggagccagcttccaagcggccatgaggaacgggaagttccacggcacgatctggccgacgacgccgataggctcgtgcagcacgagcgacatcatgttgcccggaagcaggtcggcctctcccgtgtcggccagcagcacgccggcgaagtagtggaaatggtcgaccgagtacgccacgtcgatggcgcgcgtctcgcggataggcttgccgttgtccagcgattcgagcagcgcgaacctctcggcgttctcctcgatgaggtcggccaccttgttcaggatgatggcgcgctcggcc

SEQ ID NO: 8582 - DNA, 994 bp, Unknown
  gut microbiota DNA sequence
tccaccgtgtgccccgagggcatcgacgtggcggatcccggcaaggcgacgctggaggcctgcaccttctgcctcgactgcgtggagaactgccccacgaagtccatcaaggtcaaggcgagggcggggaagccgatacccggctctttcgacgagctttccgacgttgaggaggtcgaaccgtccgtcagatagcgcacgagtccgatctcgtttccgtcttggcaagtcgggcttccgctatcatgagtgcgagccatgatagcggggtcgaagggacggcgtatgaagttcaccatagtggcggtgggaaagctgaaggaaaagttctggacggctgcgtgcgccgagtacctgaagcgcatgcagccgtacggtaagaccgaggtgcgcgagatcgccgacatcgatcctgcgcgcgcgggcggcgtggatgcagcgcgcgaccgcgagggcgccgccatcttggccgcgctcgggccctcggagcatgtggtgctgctggccatcgacggcaagcagcgttcgagcgagagcttctcgcagcgcatcgacacgctcaagctgaacggcgcgagcgatatcgcgttcgtcatcggcggctccgacggcgtgagcgccgcggtgcgtcagcgtgccgacgagacgctgtcgttcggccctatcacgctgccgcacaacctggctcgtgtggtgctgctggaacagctctaccgcgcccagaaaatatcacgcggcgagccataccataaatgagacaaagggacgggttaatgtctcgtcgtcgcaagagcgcccgtcccctttgtcccccgaatgagtcatcaaccccattcctttgcctcattttgcctcatgagtgcgaggagcgcggtggccagcgctgccgttgccagggcggcaagcgcgagcgcattcgcgcggtcgccggtaggcgcgagcttgcttgggctgtcgggctggtcgtcggctggttgcgggagcggttgcggtt

SEQ ID NO: 8583 - DNA, 224 bp, Unknown
  gut microbiota DNA sequence
tattccgttgcgacgggcgaccccttcggcccgtttgccgccgcaacgctcattcccacgtcgagccagcgtccgtcgtcgagccatgcgcccaagccggtggatgctgtagtaagcacggagagcggttgcaggttcgcatcgcagaacagaacgtcgctgcgggagatgggcggtttcgtcatgtcgatgcgccgcgacagcgccacggtgccgtggcgagc

SEQ ID NO: 8584 - DNA, 2727 bp, Unknown
  gut microbiota DNA sequence
tctatcacgctgccgcacaacctggctcgtgtggtgctgctggaacagctctaccgcgcccagaaaatttcacgcggcgagccataccataaatgagacaaagggacgggttaatgtctcgtcgtcgcgagagcgcccgtcccctttgtcccccgaatgagacatcaaccccattcctttgcctcattttgcctcatgagtgcgaagagcgcggtggccagcgctgccgttgccagggcggcaagctcgagcgcattcgcgtggtcgccggtaggcgcgagcttgcttgggctgtcgggctggtcgtcggctggttgcgggagcggttgcggttgaatgccgggatcggcggggtcatcgcctgggtttgcaggagttttgtcaagttgcgtcgttaccacgtatcgggcgcgcttggattcgtcgacctcgccgccttcggttgcgccgccggattccgttgcgacgggcgaccccttcggcccgtttgccgctgcaacgctcattcccacgtcgagccagcgtccgtcgtcgagccatgtgcccaagccggtggatgctgtagtaagcacggagagcggttgcaggttcacatcgcagaacaaaacgtcgctgcgggagatgggcggtttcgtcatgtcgatgcgccgcgacagcgccacggtgccgtggcgagcgacccgaagttgcatgtatacgtcggatccgtccacctcgataggagatcgcgcccgttccgctcccgtgctgtcgaactcgatcagcaggttcgtcagcttcgcgggatccaagtagtccgaagaaagcagcgcgtagaagccttccttcgcgcgctcgacggccagcagcatgcggctggcgcgcagaggcagcgtggccgcggcgcgctcgggcgtgcacagctcgccattgtcggcggcatgctcgagaagggttgcgccatcgcgcagcgccgcgacgatggcgtcggcgggcaggatgcgcgcttcctccgtcaaagcgcctgcgtcatccatgaacccgaaggcgaacgcgtcggcgtcgacgggaaccacggtttcggcctgggtccatccgtagcgcgcttccacggttccgtcttcaagcggggtgagcgcggcgatcgttcggccgccgcctggatagaaagacgccgctaatacggtggacccgctgcctgcaagcgagagggaagcggcttggtcgaagggataggacgcgataacggttccgcgctggagatcgatccagtatcccgcgctttcgcctcccgctgcaggcatgagcacgaacgcggtctcgttcgatagcggcacgacgcgaagcgaaggacggtagtccaagacggcgggaacgggaacgccctcgaccgtgcgcgaggatacgcgtgcgacatcggcggggtcgatggcgtgcagcttgagctggccgtcggctatctggaagaaccgtttgcttccgtcggggcaggcgaacacgttgctgagcaccgtggaatcttcggtgtactcggtgcccaggtagccgcccgcgcagtcgacgggggtgagcagcgggcttgctttcagctcgaggcgcacttcgggagaatatgcagtcgtgccgcctgtttgagccaagacgaacatgccggcagggaacacgatctcgcacgttgacgagggcccgatatcgccggcatcgagaaagtacggaaggctgaccgtggtgccgtccgtctcgatgttcagcagggcgtggggctggccgtccacgatgagctgcgttgccgcgggcagcggcgtggcgagggcgggcttcgtggacgcttcgaacgacagcgtccccgtgttcgagacgctgtcgaacaggggcgtaagcgtgaaatcgtcgggcggttccggcttgccggcgttcgagtacgagatgttcagcgtgccgccatccgcacggctttcggtgacggcgatggtcaggccggtgaatccgacgttggcgttttcgaaaaagttggttgaagggtaacctcggggagacacctcgtcgcctgcgtacagcatgcagccgtattctctcgagccgattgcggctgggacgaggtcggtgctttccgcgtgcggttcgttcatatcagggtcgaccagctcgatcagctggttgtgcacggttccgtacgtgttcgaatgaacgaaatacggtccgcccgatcctaggtcggcctgaactctgaagaggcgaaatcccgacggaagctcggcgggttggccatcttgctcgtagcgaacgctttggttgccggcgaagcggtcgtactgcagcaggtagtaggacgagaacatgcttgcgtcttggttcgccaccacgacgataccgccggtttcatcgatgtcgttcgaagcgaacgcttctaaagctgcttctacggacgagctgccgtcggcggttgcgtccacgtgttgcaccaccttgccgtcgcgtttgacgtcgatgcccgtctcgttcgcgaagatgcgggtgatcttgctgtcgggcagccagcccagcatccatttcgagaatccattgtgatcgccctggttctgcatcatgatgtcaaaggtgaggattcccgtgcggtcggtggagcctccttgctggctggcgtactggtagtagtcgggcaggcccagcacgtgacccgtttcgtggatgatggtctgcgcggcccacggctggtcgcacggattcgacagcgccacggcgttccat

SEQ ID NO: 8585 - DNA, 516 bp, Unknown
  gut microbiota DNA sequence
gaaggtgaggattcccgtgcggtcggcggagcctccttgctggctggcgtactggtagtagtcgggcaggcccagcacgtggcccgtttcgtggatgatggtctgcgcggcccacggctggtcgcacggattcgacagcgccacggcgttccataggcgcactgtgccgtcagcgtacacggcgtcggggacgtcgagcacctgctcgttgctccaccagacgctgccccagccggtgtcgccgccggcgaagtgcaggtagacggcatcgatgcgcccgtcgccgttcgcgtcgaatcgcgcgagatcgatgccggatgcctcgaggtggtcgagcgcctccttgtacagttgcccgatgttcgccgtgtagaaatcgcgctcgtgctgggccgcgtagtcgaacgcttcgccggtgacggtaagcgcgccgtacgacgcgcggaggtagtagtcgtgcaggttctcgtagggaaagccgccggcgctcggcagcgcggcctcgccgacggcgcg

SEQ ID NO: 8586 - DNA, 1645 bp, Unknown
  gut microbiota DNA sequence
gagatcacatacgactgccttgcgcttatgcacgagagtgctgctctcggcggttttagcctgcgcgcttcttataccggtcaccgctgaagaagctcatgcctccgaccagccacgcatcgtcaaggtgggttacaccgacagcgaaggcctgctcgcaaaaaacgatgacggcacctatgaaggctacacctacgactacctcatgcgcgtcgcccagttcaccggctggtcgttcgagttcgtggaagccgagggcgacaatgcaaacgaacgcgctttgcggcttttagagatgctggacaacggcgaggtggacatcgaaggaagcatgtcgtacagcgccgcccttgccgagatgtacgaataccccgaaaacagctacggctcggcccacaccgccctgttcgctccgaacatacatgccaccgtctcgaaaaccaatctgttcacccgaagcgagctgcgcgtggccatcctcgccaccgcgaagaagcgccgcgcggagctcgagtactactgcgatcagaacggcatcaacctggtcaccgtcgaatgctccaccacgcaagagctgctcgacaaaaccttgaccggcgaagccgacgtgttcctcgagatcgacgtcaacatcttcgacgggttccatatcgtgtcgtcgttcgctggacggcccttcttcttcgccgcgcctaagggcgagcgctcgatcatcgacgagcttgatgccaccatcgaccgcatcaaccaaagcaacccccagctccaggaaaccctgtacaagaagcacttcctcccctcggaggacaactacgatctgaccagcgccgaactccgttacgcgcgcaactacaaaacgctgcgcgtaggcgtcctcaccgacaggccgccgctgcagtcgttcgacccggaaaccggcgagtttaaaggggttacgaagggtattctggaatatctctcgaagcacacggggctatcgttcgaaatggtgagcataccgcgctatgacgatttggccactgcgctgcgcgaggagaacatcgacatcgttgccggcgtgaacgacgacgacaacacggaaatcgacaagatcgtagccatgacggctccgtacatgaccacctccatactgctggtatacaacaagttcgtagaccccgatcgcctggacggcaaaagcatcgcacttttatgggaccaggctgaaaccgcccctgaaggcgcgccggtgcagctgtacgacactatcgaagaatgcctcgaagcggtgaactccggcgaagtcgactacacctacggcacgtcgtacaccacgccgtactacctcaacatcgacgaactgagcaacatcctctatttgcccacctcgacgcaatccatcgacatctgcttcggcctcgcgcagccggttgaccccgatttgctggtcatcttaaacaaagcgctgcgcagcctcaacagtgcccagctggactccatcatctatgacaactcgctgatcgaccaggacgagcagatcaacctgttcatcaaggatcacctgggagaattcgcgctggcgtgcatatcgctgctggtgctcatcatcgttctgcttgcgctgtacctgcgctcccgcatgcatgcggcgcgcgccgtacgcgaa

SEQ ID NO: 8587 - DNA, 316 bp, Unknown
  gut microbiota DNA sequence
ccagccttccaggatctcgcagaactggcggatgccctcttcgttcgtgcgggcggactggcccacgtagaagtggtcgcccaccatcatgacgtcgccgccgtccagcgtgccggggctcacgatgcgcttcacatgctcgtcgtcgaagaactggcgcacggccggctcgatctcgtccttctcgccgttgcggctgtcggcgcccgggttcgtgatgatggcgccgcagcgcgtgatgaccgcgggatcctcgacgaagcaggagtcggggaactgctcgagggcgggcaggacggtcacttcgacgccgcac

SEQ ID NO: 8588 - DNA, 1515 bp, Unknown
  gut microbiota DNA sequence
ggaggtcgttcccgcatggtcgagcgcgcagcagaagaaacgtcggaacccgaggacgcggctttcgcgcacgggtcgctggggcggctcgcgcccgcgtggtgggagcctgccgagggcgagccggagcccgagccgtggttgacgcccgatgcggcgctcgaccgcttcctcgactggacggcggcgcgcggcatagagctctggccccatcaggaggaggcgctcatggacctcatggtgggcgaccacgtgattctaggaacgcccacggggtcgggaaagtcgctggtggcgctggggatgcagttcatggcgctggcaacggggaggcgctcgtactacacggcgcccatcaaggcgctggtcagcgagaagttcttcgatctcgtggaggtgctgggacgcgagaacgtgggtatgatcacgggcgacgcgcacatcaacgccgaggcgcccgtcatctgctgcacggccgagatcctggcgaaccaggcgctgcgcgagggcgaggacgccgacgtgggctgcgtggccatggacgagttccacttctacggcgacgccgaccgcggctgggcgtggcaggtgccgctgctgacgcttccgaaaacgcagttcctgctgatgagcgccacgttgggcgacgtgggcgccatcgcggctcgcctcaagagccaaaccgggaccgacgtggacgtggtagccgacgccccgcgtcccgtgccgctgtcctacgagtacgtggagatgccgctggagggcacggtggagctggccctgcgcaaaggcgaggcgccgctgtacctcgtgcatttcgcgcaggatgcggcgctgtccaccgcgcaggctctgtcaagcttcggcgtggcatccaaggagcagcgcgagctcatcaaggaggccgtcaagggaacccggttcaccacggcgttcggcaagacgctcaagcgtctgctggccagcggcgtgggcgtgcaccacgcgggcatgctgccgcgttaccggctgctggtagagaagctggcccagcaaggccttctgcccgtcatctgcggcaccgacacgctaggcgtgggcatcaacgtgcccatccacaccgtggtgctcacgcagctcacgaagttcgacggctacaagatgcgccgcctgcgcgcccgcgagttccatcagatcgtcgggcgggcgggaaggtccggcttcgacaccgagggcatggtggtggcgctggcgcccgagcacgacatcgagaacgcgaagcttctggcgaaggcgggcgacgacccgaagaagatccgcaagatcaagaagaagcagccgcccgagggcttcgtcacgtggaacaagcagaccttcgagcgcctgatagaagcggtgcccgagacgctgaagccgcgcatgaagatcacccattccatggtgctgtccgaggtcgtgcagggcggcgacgcgtacggccgcgtgcgcaagctcatcgacgactcggctcagaccgacgaggagaagcgggcgctc

SEQ ID NO: 8589 - DNA, 185 bp, Unknown
  gut microbiota DNA sequence
ctggccaagcttgtggaattcattggcgatgcgaaggtggtcgcgcataacgcagagttcgatcgtacgttcaccacgcgtcatcccagcggttatcccctgttggagaatacctggatcgattcgctcgatcttgcgcgaatcgcgcttccccgcatgaaatcgcatcgcttgctcgatcttgt

SEQ ID NO: 8590 - DNA, 653 bp, Unknown
  gut microbiota DNA sequence
cgaagcccctcagctttttcgacctcttcaaaaccatcgaacccacgttttccctcgaccagatgaccgacacggaatcctggggctcatacctctccgcccccgaagccgagtatcatccgttcgcgggggatgaagccacgttgttgctgatgtcgaagaaatccgaacggatcaacgtccgatgcaagcacacgaagccgctcatccccgaatacatgaaagagagaaccatcaactacctcgttttgacgaacttccttcccgaaggcgtggagcccgcccggttcgtcaacgatcgcccgattccggcgaagggagagcacccggcgcccgatccgtatctctacaccctttcgtcttgcttcgacatgatctcgatctcgcagctcaccgaagaatcgcttcgaaagcttcccgatggaaccgccctcaataaagttcccgcgttcgagggctacttcctgacgtacgaccagaaaaccacctctctcgaccaagaggaggtcatgcacggtatcttcaacgacctggagatttgggggcgcgatcacaaaaccaaaacacctctcaacatcgacctggtgatattcctctccaacacgaacgacggcgggagcagcgcccagttcatcgacatgaacgaaatacgc

SEQ ID NO: 8591 - DNA, 823 bp, Unknown
  gut microbiota DNA sequence
gcggcatcttcaacgacctggaaatttggggacgtgaccacaaaaccaaaacacctctcaacatcgatctggtgatattcctctccaacacgaacgacggcgggagcagcgcccagttcatcgacatgaacgaaatacgcatcccgaagcctggcgaacttcaagagggcttcgaccacaggcgctgcatggcgatacgcttaaatctaggaatgctgaacaagaaagacggtttccagcgggacgtcgtgcccgttcgcaacaacccgtttcgattcgatccgctgtacggattcgtcacctcatggagaaggaaggggttcaggcacttctcccatgccgactacatcacgaagaggaagcttgtgagggcgtgggcgtacctcgtcaaactcgaagaaatagtcgggaatcaaacgctcgcgcccgtgttcttccacgagttcagccatgtgatcgagttcaccctcaacagcgagggaagctcgctcggcggtgcgatcttcaacccggacgattcggggataaagctgagttcgctgggcatcaaccatcagcaattcgcgatgagaatcgtgttgaacggagcatacgagaacatgcatataagccattcgaaaatgttgtcccatcttggcgtcgactacgactatctgcacgagcggcttgatcgtttttggcgttcatggggaaagaccttctaacctgcaaaatggcatcctgtgccacttggagttggaaggcggcgggatcgcgcgccgagccgacggcttgtgcggaaccgtttcacgtgaaacatctgcaggcagacgcttaagaaaaa

SEQ ID NO: 8592 - DNA, 4554 bp, Unknown
  gut microbiota DNA sequence
ccggggtcgccggtgaaacggttttcgagaccgccgcattcagccgctctgccacccttccgcgtatgatcggggcaaaaccccgtatgaaacgcgcctcgggggcgcgggagtaatctggcggagagatagggattcgaaccctaggtactcttttggagcacacacgatttccaatcgtgcaccttcggccagctcggtcatctctccgcttattggtcgagcatgctcgcgcgttgcgcggtcatgcagcagctacgtagtatacaacagctaatacgcactcacaagcgagaaatattcctcttcacgagcatcatcgaaattttcgtctgcttgcacacagggcgaggcggatttcgcactcgacgcgcagggtatagaagatgtcgacgcagcgtcaacaacggatcgcggaagcgtgctatgaggtacggctgatcgcggagacgtcgtgggggatgcagcggaatgagaagtttgcgtggccggctccgtagaacgtccggcgatcatgcgctgcacgtgcaaaggaacgtcgaacagctcgctcatcacgccatccgtcaagagccggcctttcgacccgtcggcgaacaccgtaccgtttttcaatagcacgacgcgcttgatctcggggataatatcctcgggatagtgcgtgaccagcacgattccctttcccgcttttgcaagcgtgcgcatactcgaccgaacgtaatacataccttcgggatcaagtccggtgcacggctcgtcgaacacaagaacgtcggggtcgtgcacgagcgcacgagctatgagcactcgtcgcgcctggccggtggacagcgtcatgatgtcgcgtgccgccaactcgtcaacacccagcagctccataacctcacgagctcgctcacgggcttcatgcaagtgccgggcgtcgacccgcgccgggacgcccagcgttccgtacaaccctcccgccaccacgtccgccgtaggcagatgtacggaaatctgatcctgcatcgtcgacgagacgacgcccaagctccgcttcacgtccgcaagggtcgcacgctcgctgccgcgaaaccgaaccggcggcacttcccggtgcaaggggagcacctcgcgcgtgatcagcatcacaaacgtcgactttcccgacccgttcggacccagcaacgcaagatgctctctttcctccagtcgaaacgagtcgaccgtcagaataggcgcgcccgcacgctgcacgaccgcgttgtgcagttcgaggaagggaggcgtttggatatccatggttctcctaaggggccgcggatgtttcacgtgaaacatccggtcgggacgggcgatccacaagcaaccgaggctggcaagcaacccggtgagccgtcaaacaaacaaactcgcagccacgccagaaacgaaacggcggggtcccgaaggacgcccgccgtgtcgaactcagatgaaccaaccttcccgaagcttaggcggcttccgcaggctgctcggaggcgttgtcgcccgcggcggcatcggcattgccctcggaggaatcggcgccatcggtcgcggcctgatcctcggaagcgggagcgtcggtaccgtcggcagaagcaccgtcggcagcctcaccgccttcggcaccgtccgtcgaaccttcctgagttccgtcggttgcgccgctatcggcgttcggcgcaggatacttggacatatcgacatcatagggaagaccctgaggcatgtcgttgatcttgatgtcggcagcctcggtggtttcgtcaagccacttcttgtaggcttcctgctgcttcgtggacttcagcgacgaagcgatgacggatatccactcttccgggatctgatcgaggctcgtcacttcttcaggagccttgtacacatcggtgcacttgatgatatggatgccgaactgtgtggtaacgagaccgctcaactggcctttctcaagcggctcgaggccgtccttgtactctttcgccaggttgctggggttgttccaacccacatcgccatcgcgctcgacagaacccggatcctgcgagtattccttcaccgcatcgacgaagtcaagctcgccggagttgagcttgtcgagcacttcctgagcagttgcttcatcatcggaattgaacaggatatgagaggaacgcttggaaccgtcgtacgcggtcgcgtacatctgggcgtactgcagcatgtcagcgtcgctgggatcttcgtcggaggcgaacgatgcgtacagcttgttctccttgagcttctgctctatttcagcgcgatagctatcttcggtcattcccgcctgatcgagcgcggcctgccacttctcgtcggtgtcgtagttcgccttcaccttgtcgatctgctcgtcaatctcggagctctcgacggtgatgcccttctcctcgacgccttccttcagcaactcacgctgggcgtaggaattgaacacttcttcacgcacggaagcaggggtgtaatcgttctgagaaagccatgtgccccacgaatcttcatcgtcagcacccagctgctcgcgcacgccctggatgtagttggtgatggtgtcttcggcgatttccacaccgttgaccgtgcccgccacaccgccggtgcccgacgaagcgttgtcatcgctcgagcatccggccagaccccatgcgcatgccgccgtcaaaccgaccgcgcacacggtcttcatgatgtacgttttcttcatatgacccttccctcgaacatgggcttcgccatcgcaccgcctactggatcgcccatgagataagtactgcgctgtattctcgcacacgcgataaaacgggttcttgcgttgcacaatatacccattatcgattcacagtccccacgccaggtttagggatatacccgcctgttcgcgcgagctgaagccttatttccctcttgtaagaatgcgccctgatcagggcgcattcttacatagtgatagattatttcttggcagccttcttgcgatcggtggccgacagcatccgcttgcgtaggcggatgttctgcggggtgacttccaccagctcgtcatcctcgatgtactccaacgcctcttccagcgtgaacgtgatgggcggcgtgagcgagatagccttgtcggcgcccgacgaacgctggttgcccaactgcttcgacttggcgatgttgaccaccatgtcgccttccttcgacgactcgcccacgatcatgccttcgtagcattcctggccgggacccacgaacaggcggccgcgctcctgcagcgcatccagagcgtacgcgacgctcttctcggtggacatggagatcatcgagccgttcttgcgcccgttcatctcgccgcgatacgggccgtactcggagaaatgatggaacatcgtggcttcgccacgcgtgacgttcagcagacgggtgcgcaatcccatcgtgccgcgcgacggaatcttgaacacgaggtgcgtctggtcgccgcgctggtacatgtcggacatctcgccgccggcgctgccgaacacctcgatggccttgcctgcgtactcgctgggcacgtccaccgtggcctcctcgatgggttccagcttgcggccggactcgtccttcttgatgagcacgcgcgggcgacctacctggaactcgaatccttcgcggcgcatcgtctccatgagaaccgacaggtgcagcaggccgcggccggcaacctcaacgcccgacttgtcctcaagctcctcgatgcgcatggagatgttgctctccttctcgcgcatcaggcgctccttgagctggcgcgctcccacgatgtcgccctcgcggccgacgagcgggctggacgatgcctcgaacacgatggccatcgtgggctcttccacttggatgggatcgaagcgcacggggttctcgcgactggtcaccatgtcgccgatgtcagcgtcttccacgcccaccacggccacgatgtcgccggcgtgcacctcctgctgctccttcttgcccagcgcctcgaacgtgaacacctgcttgatgttggtgttgtagcgcgtgccgtcgttcttgatgaccagcgagggctcgcctttatggatggtgccggagaacaggcgccccacgccgatgcggccgacgaagctggaatggtcgacggtgcagatctgcagcgccaccgggccgttcggctcgcagtcgggagccgggatctccttgaggatggtttccagcagcgggatcatgtccatgttgtcgtcgtcgggcgcgaaacgggcgtagccgttcatggcactggcgtagacgacggggaagtccagctgcgcgtcggatgcttcgagctccaccatgaggtcgaacacctcgtccaccacttcgttggggcgcgcgcccggacggtcgatcttgttcaccaccaggatgatgcgcaggccctgctcaagcgcgtggcgcagcacgaaacgggtctgcggcatggggccctcgaacgcgtccacgatgagcagggcgccgtcggccatgttcagcacgcgctccacctcgccgccgaagtcg

SEQ ID NO: 8593 - DNA, 1300 bp, Unknown
  gut microbiota DNA sequence
taggatgatgcgcaggccctgttcaagcgcgtggcgcagcacgaaacgggtctgcggcatggggccttcgaacgcgtccacgatgagcagggcgccgtcggccatgttcagcacgcgctccacctcgccgccgaagtcggcgtggcccggcgtgtcgatgacgttgatcttcacgtcgttgtacacgaccgagatgttcttggacaggatggtaatgccgcgctcgcgctcctggtcgttgctgtccagcacgcgctcgtcaacctgctggttctcgcggaacacgccgctggcgtacagcaggcggtcgacgatggtggtcttgccgtggtcaacgtgcgcgataatggcgacgttgcggatgttctcttgcttcatgcctttcttcttctttctattcaagccatgcctaaatcggcgcggcgatgatccttgcgatggggcctgcggcgggtaccgctcccgcagaggacgattgtcgcccgaaaggtgcgttttccgcttgaattccgcacgtttcgggcgacaaggcaggcgctgccgggcgatcgggacgataaggagagacgaccgccggcgaagtacggcggctacacgtcgtccaactcctcggcgaggcggcgctcttccttgttgagctcggcgatatgttcgttgagcgtggcgatggttctctgggacgacacgacctgcacgatgccccacacagcggcggcacttgcaatggcggcaacgataccgaacaggccgaacggccggcggccggatatcagcgccacgatgccgccgatagcggtcatggcaatgccgttacgacgctcgtcaagcgccacatcgcgctgcttaaccagctgcgtgcgtgcggcggctacgccggccatgcgcgcctcaacctggttggacgacgtgtagctgcgggcgcgctcggcagcggcgcgcggatcgcgagcggaggtgcgcgagccttttccgctggtcaggtagtcgtatgcttcttggaggttcttgaactgctcagtcgcgcgatcttggagcttcttgttgctggcgaaccggtcgggatgcaggatctgcaccgtttccttgtaggcggttttcacatcttcgggcgtggcatcatcgtccagtcctaaaatgcgcagtgcttccgttcgattcatagctccccatgtgccggtttcgcggttgatatccgaagcaggattctaccatgccacctgcacgatcacgatgtttccggcttgcgctcacagaatgcacgtgggaaaagagcgcagcgcgaaaccgcgggaggctgtgt

SEQ ID NO: 8594 - DNA, 1641 bp, Unknown
  gut microbiota DNA sequence
ctggtcagaagagctcaagcgaagcgccgaaggcgtgctgaccgcgcgatgcgaagtgagggttttctgcccggagccgtttatgttccgattgaaccctcacgggagacgatatgagcagaacattgtgagcccctgcttcgtgtcgtctttgttttgcgtgggtcggggccgataatggttcgtatctagcaagccggcaatcgaccaggttgccacagacatgagaggggctcaccatgtcctatgttacctcaatcggcctcgacgtacacgcacgttcgataacagctgtcgcattcgatcctgcaacaggagaagtgcgttcgaagagattcggctatgctccggccgaagtcgctgcatggacgctagccttcgattcccctaaagcggtttacgaatccggcgtgaccggattccaccttgtccgcgccttgcgaggtcttggggtcgactgcatcgtcggcgccgtgtccaagatgcacaagcctgcagccgacaagcgcaagaagaacgatcgcaacgatgccgagttcttggcgcgtcagcttgccgcccgcaacatcaaagaggtctggatacccgatgaggagtgcgaggcggcacgcgacctctcccgcgtcttggaagacgtccgcgaagacctcacgcgcgcgaagcatcgcctaacccacttgctcatacggcatggctacgccttcgacgagatcgggccggacggcaagcgcaagggcaagtggacgagggcgcattgggagtggatacgaagcatcgagctttccgaagcggcggcgcgcgacgcccttgacttctacgtttccgaagtgcgccatatcgaggcccagaagaaggccatcgaaaaagaaatcgccgactacgcccgtgccgatcgttggcgtgggcgggtggaagcccttcgccgtctcaaaggcatagagaccatgacggcgttttcccttgtggcggaagcgggggtgttctctcgcttcgagagcgcccgcgcattctcgtcctggctcgggctcactccttccgagcattccagcggagagagggtgagccgcggcggcattatcaaagccggcaacacccatcttcgaaagcagctcgtagagtcgtcgtggcactacacgagggctacgaccaagcgcaagagggatcagcggggagaagaggtgccccttgcaatcgaaaaccatgccgcccgggggcgtgaagcgccttgcagagaggcgggctcactttgcaaggcgcaatcttcgcccggcggcggccaacgcggccaccgcaagagagctctcctgctgggtatgggttgtgggctgcatgtcggaaggggctctcgtatagaaactcgttaacgttcgatcttttatccagcaagcccttcacgtcgactggtcgttggatgcgatcccagctgctttttttggacgccggtttatccggtacgcccgcacggagactcttctttgaaggtgcgcgcatccagccgtagcaacgaaatgcgaagccagcgcagcgaacataccgggcaatgacgcactgttgccgacctcggcatcctggggttataggcaagaaagtgtgtccgttttaggggtgtaagggcaggtcaaaccctcgataaaccatcgt

SEQ ID NO: 8595 - DNA, 253 bp, Unknown
  gut microbiota DNA sequence
gggttataggcaagaaagtgtgtccgttttaggggtgtaagggcaggtcaaaccctcgataaaccatcgtttaaatttcggaggcaggtttaagtgcctggcaagaatgtgtgtccgctttcgacttgacaccgcaggtcagaggccgtaaaccgccctcttaaattccgtggttcaatcacgggatgaagaagatactgtgccctgcgtgcgggggcgacacgaaacgcaacgggaagacctcgtcgggggc

SEQ ID NO: 8596 - DNA, 3287 bp, Unknown
  gut microbiota DNA sequence
gtatccgaagcaggattctaccatgccacctgcacgatcgcgatgtttccggcttgcgctcacagaatgcacgtgggaaaagagcgcagcgcgaaaccgcgggaggctgtgtttcacgtgaaacacttgtcacaatgacgcaagataaacgaacaaatgtttcacgtgaaacatcttcggtaaagagaagtcccttcgacagcgagctcataagttcgcgagtcggaaccgggcgacggagttctccgaccgggtacgcacagtgttatctgagagttgaacgcgcgcggcagggctctcaaccgatcatgaccagaagcaacgaacccctgcctctcggcgggggttcggatgaataacgtatggtggagcatagggggatcgaacccctgacctcaggcttgcaaagcccgcgctctcccagctgagctaatgccccaagttgcacattcttcggctagtcgcgaactgcataaaaccgcgtctagaaattaataaacgctccaccggctaactcggctcacggtggagcgtttattgcaaaaaaatggtgggcccgaatggatttgaaccagcgacctcacgcttatcaggcgtgcgctctaaccaactgagctacgggcccaaaaaaagtgcctgatcactatacgtcgaatcactaaggtaggtcaagcactttttgaatatttcttaccactttttgaatatccggtaacggcagcgcgatcttggccgtccgtatcttgaaaccgaaacgccacggcgatgcgaccggcgaccctgccgaagcgctataatcggtaggccggccgcgcgcgacgcgacgcaagaaacccgaggaggagtgccgatgattcccgttaccgttcaaacgctgatcgtctcggcggcgccgtcgccgtccatcatcgtgctgcaaccggtagaggagatcgtccaagaaggaaagtcgcgcatcatccccatctgggtgggcgtgaacgaagcgacgcaaatgggcatcgcgctggaaaaagcgcggttctcgcggccgatgacgcacgacctgttcctcgacgcgctgacgaacctcgacgcgcagatcgaccacgtggtcatcaacgacgtgcagggtgcgacgttcttcgcgcggctcacgctgcgccagcacgaccgcctcatcgacctcgacgcgcgcccgagcgacgcgttggcgctggccgtgcggcagaaagctcccatctatatcgaggaggatgtgctggagcgtgcttcgttcccctatgtgctgaggcggacggaaccggaagcgagcgaagccgaactgtccgagttcaaaaagtttctcgaaggtctcgccccggaagatttcgagggctgaccgattcagccggcggaaagctttccgccgcctaccacagtgccgtcaaggcatcgatgacggcctgaacgatcccatgcgtcaagcccccgtcgtcggccagcgccagccccataatcgccgacaggctgacggcgcccggttctttcggacggcccgttgcgctgggcttcttcaacacgaacatcgacggcttcgcgtacgacacggccggagtctccacggcatccggaggcgtttcgagccgaggctcgggccgccgctcctgagcgcgccgccgccatcctccgcgtgcgaacgttaccagcaggaacccggcgcgcagccactcgtccacgcacatggccacccacatgcccacgatgccccagcctaagccgattcccagcgcatagccgcctgccaccgcgaatatccacgacgagatgacgttcaccgtcaccggggtcttcacgtcgcccaccgcgatgagcgcctttaccatcacgatgttgagcgcacgcccgatacccaggaatatctccacaagcagcacctggcgacccagctcgtgcaccatcggatcggcggtgaacaggccgaacaccgcgtcggcgttgatccagatgagcgtggacacgcaggtggtcagcgccacggcgatgagatcggccacccacacgcgccgcgcgaccgcatcgaacttgcccgcgccgaacagataccccagcacgatctgcgtcgcctgcgacaacgcgatggaatacaggtaggcgatgcccgcgatcatcgagcagtacaccttcacggtgaccaccgtggtgcccagcacgttgatgaacgacaggatgacgatctgtgcgaggtcgtagttcatctgctcgcccgacgaggggatgcccacgcccagcatgcgccgaagcgtcttccaggggaacgggcgcaggtacgccaggcgcatgcgcacatcggtatggcgcagcacgaggcggcatgccaccgcgaggcctgcgacgcgcgccaccacgttcgctaccgccgcgccttccaccccgaacgccgggacgaacgcgacgccgccgatgagcacggcgctggctgcgatgttcaccgcgttcatcgccaggctggcgcgcatcacgtcggcgccgcgcgcgtagctgcgcagcaaagccgtgaacgcgaagaacgcgccttgcaccaccgtggtggagccgacgatcagcaggaacgacgacgccattcccgtgatggacccgtcgatgtgcagccaggagaagaactgcggccaaaagaggaacagcaccgcggtcatggccgccgcgagcgctacgttcaccacgagggccacagtggcgatctccgacaccttgctggtcgccgacgatttccccagcacgcgggtcacgagcacggtggaagccgtgcccatggccgacagcgcgatggtcacgatgttgaggatctgcagcgcgtttcccaccgcggcggccggctcggttcccagcggcgccagcataaattggttgatgttcccgatcataatttgcatgaacagttccacgaacagcgggacggaaagcacgaacacgtcgccggctgtggttttctccgccggagaacgcagggcgcgttcgcggcgcgtcgtttgcgcgcgcttcgcggctccgcgcgctttcgacgacaggcgcgccgcttgcgcggcagctgctcgatacatgggtttccgtcctcctttcgcatgaacggccgcgttggcggccgtcgataacagtcatgaggcgtgcagtatacggcacgtcaacaacccgccagggggctgcgggttccttcatgtttttcgcattcatgaggcagagggaaagaaaatgtttcacgtgaaacatcgcgaacgaagagagccgcaagcgataacgcgaaagaggctgaatgtttcacatgaaacatt

SEQ ID NO: 8597 - DNA, 3742 bp, Unknown
  gut microbiota DNA sequence
gggatgcgggcccctcggtgcagatgcccgttccggttgttcgcccgccgagtctcggccggcgcgctagttgcaccccgggcagtaggcgcaggccgtcggcgcggcggctatgcccccgagagcgctttcgcgcagttcgaacggcaaggttcgacccacttttcgcatagcctccaccgtctggtcgaagtcgaccaggttgccgatgcctgcgagtgcgatctgcgcgctgaccagcgcgacggcggcgccggcagcgttgcgcttctggcaaggttcctcgacaaggcctgcgatggggtcgcatacgaggcccatcatgttggtcagcgcgttgctggccgcgtcgaggcattgggcgggagcgccgcccatgagctcgaccgacgccgccgcggccatcgcggcggccgagccgatctcggcctggcagccgccctccgcgcccgataccgtggcgttgcgcgtgatgaggtacccgatggcggcggccgccgccaggccgcgcgcaagatcgccatccgatagcccgcgcgtgcgctgcagcgccagcagcacgccgggcagcacgccagacgatccagccgtgggcgcggccacgatgcgacccatcgacgcgttcgtctccagcaccgccatcgcgtaggcgatggcgcacgacagctggtcgtcgcacagctcgccgtcgcgctcgcgcagatcggccagcttgcgcgcttcgccgcctatgaggccgcccatggaaggcagcgcttcgtcgatggggcgctgcgcggcgcatttcatcacgtccagcgtctcgtgcaaatacgcgagggagcggtcggcgtaccccaagctctcggccagcgccgcctcgcgggcgagaaacgcctccgatagcgtcgtgccgtgcttttcgcaccatgccagaagcgcggctccggtgccgaagtccgcctcggcgaaccgctgcagcgcctcctccgcgtcgggcgcgtcaacggacccgcagccggggcgcgcgtcgccgggaatgacgcgcacgtccaggatggcggggtggtcctcgatggcggccttcgcggcgccgtccacctcttggtcggtttccagcacggtgtaggcgatgtcgcctttgcgctcgcggtacatgcgcgtggtggcgatgttcacgccttcgtcgctgatgctctgcgcgatgtgcgccagcacgccggtctcgtcgcgctggcgcacgacgatgctcgtgctctcgccggtgatgcgcacgtcgatgtcgtcgatcttgcggatgacggccgctccgcctccgatgctctcgccgcgcacgctcatcgcgttgcccgcggcgtccacgatgtgcatgtcgatggtgttgggatggtcgtattccgcgtcgggaagcgtgacgaacgagaacgcgagtcccgcatcccccgcaagctgaaacgagtcgcggatgcgcaggtcgtcggcggccagccccagcatgcccgccacgagggccttgtcggttccgtgcccggtcagcgtgtgcgcgaacgaccccagcagcctgaactccaccgtcttcggctcggccaggcacagccgtcgagccatgtaggcgatacgcagcgcgcccgccgtgtgcgagctcgaaggacccaccatgatggggccgatgacgtcggagaggccgagagttttcatagatgctcctcgattgacgggtagggaagggggcgggcgcggggatggtgcgcgcctatggtatcacggactgtcgcagccgtctcgtgcgctctttctggctctttcgtgacgtttgcgctcgaaaaggctgatcggccgccgttcgcttcgctggtgccgctatactgtggctctcggcgccgcgcggctcggtatgcggcggcgaacaccctcatgacaagctaagcgagcgggatgcggcgtgcgtgcggcatccccgggtaaggagtacagcaatgtcggcaccgatcatcgtcgtgggccacaagaacccggacaacgattccatctcctcggcagtgggctacgcctacctgaagaacgagctggcgcgccgtgcggccggcgagggggagccgttccagacgtacgttcccgcccgcttggggccgttgcctccggagagcgcctgggttctggaagagagcggtatccccgcgcccgagatcgtgggtcacgtgcatgcgcgcgtcggagacgtgatgacgccgagccctatatccatcagccataacgccacgctgctcgaagcgggtcgcctgctgcgccagtacaacgtgcgcgcgctcgtggtgacgaacgacgacggcacctaccgtggactcatcaccacgcgcatgatcgccgagcgctacatcgccgccaccgacgccctcgaggacggaggggcgaacgagatggcggtcgccggcgacctcatcgcctcgctcggtcagaaggtggacgagatcaccgagaccgatgtgctcatcctcgacaaggagggcctgctcaaggaggctatcgaagacctcatggccagcgcgttgcgcgaggccgtcgtgctgaacgacgacggcctcgccatcggcatcgtcacgcgctcggacgtggccgtgcgcccgaagcgcaaggtggtgctcgtggaccacaacgagacgcgccaggccgccaacggcatcgaggaggccgaggtcgtcgagatcgtcgaccatcatcgcatcgccgacgtgatgactgccaaccccatccagttcctcaaccttcccgtgggctccacggcgaccatcgtcacgatggagttccgccgccacaacgtggagatgcctccggccatcgcgcgcgtgctgctgtcggccgtgatgaccgacaccgtcatcctcaagtcgcccaccgccacgccgaccgatcacgagcaggtagcctatctcgccggcatcgcgggcgtcgatcccaccgaattcggccttgccgtgttcaagtgccgcggcggcgaggacgacatgcccgtcgacaagctcgtcggcgccgacgccaaggagttccagatcggcgacgccaccgttctcatcgcgcagcacgagacggtggatcttcccgccgtcatgaaacgcgaagaggagatccgcgagcatatgcgccgtctgcgcgacgaccacggctacgagttcgtgctgctgctggtcaccgatatcgtggccgagggcagccagttcatgtgcgagggcaaccgccgcatcgtcaaccgcgtgttcggcatccattgcacgggcgaaggcggcacctggatgcccggcatcctcagcaggaagaagcaggtggcggcgaagatcctaggagcataggggcgagggttcgcgccagcgttcttcgaaaaacgagacgaggaagccgtggaacgccgcggcttctttgctaagggggccgcttgtcggggcgatctcgatggtgcgggcgaacggcgcgtcggctatgctcgccaggcgcgcgctgctgtcgtcgaggcctccccagctgcgttcgggccaaaagcccacgcccagccccaagccgatcatgttcttcaccacggcggggctgtcgctttcgaacgccacgcgcggcacgaacccggcatgcgcgcacgcttcgtcgcataccgcgcgaaacgtgcggcttccggcgaggcagatgaacggctcgtcggcgaggtcggacagcggcaggggttcctgcgaggcgcgctcgacgggcacggcgatgccgatgcgttcgaagaaacggc

SEQ ID NO: 8598 - DNA, 833 bp, Unknown
  gut microbiota DNA sequence
acttaggagacgccgctcgaagcccgcgctactcccccgctgcgggccttcccgcggtcgccgcacccccggcttcaggcgcgaagccctcgctgaaggcgctggggatgaccagcgtgccgcccgactgctcgacgctttcgtaggccagatgcatcgtgcgcagcttcatggcgtcctgatcgccggcgtacacttcggaggcatctttcagcatctcggagatgtccttctcggcctcggccagcaccatgcgggcgttcttcttgcgctcggccacggcctccatggccatggcctcctgcagctctttcggcacgacgatgtcgcgcacctccacgtcgatgatgtcgatgccccaggggctgagcttctcctcgatggcgtctttcagctcggcgtccagctggtcgcgtcgcatagccacctcggccacggtggcgcgcccgatggccttgcgcatggccgtctgggccacccaggccacggcggccgagtagtcctccacctccacgcacgccttcttggcgctaaacaccatccagaacagcacggcatccacgttgatgggcacgagatcgctcgtgagcgtctcctcggcgccgaagtacgtggttgccacgcgctgatcgatgcgcaacgtgtagaactcgatgatgggccaggtgaacacgaggccggggcccgccacgcggttgaacttgccgaagcgcagcaccaccgccttctcccactccaacacgatgtgcaccgacgaggatgccagccacccgacgatggccgcacttacgagggcgacgaggccgatctccgcgaacgccgcctgcgccgcc

SEQ ID NO: 8599 - DNA, 4331 bp, Unknown
  gut microbiota DNA sequence
gaaatagctcgcttcgctatcgcgtgccgtggagcatgcgggcgaactcgtcggccatggcggcgggggactccttcatcccgctttcgagccagcagatcagcacgttgtagaacgcgccggcgtagaagtacagctggtagcgttcgggcgagcttgcggacatgtcgccgtgcgaggcgatctcgcagtcggtgacgaggtcgagcagcgacgtggaggccttcgcccggtgaaaccccagcacgaggctcgcgtgctcctggtagaagcggaactggtactcgatgcgctcgcggctgcgagggttgccgtccgtcgtgggcatgccctcgtggtagcgctgcgtcacctggcggatgccgtagtccaccaggtcttcgaccgacgagaagttgcggtagaacgacgcgcgcgcgacgcccgcctgctccaccagttcggtgacggtcaccttcgaccagtccttgcgtccggcgaaatctatgagcgcggcaagcaggcggtccttcacttgctggttcgcgagctttcttttgtccatgagacacatcaccccgttttgtctccggtcgacgattgacggtcgagcacaacctgatacaaaatgtatcgggttacagcataccatcgaaacggagcgaagcaccatgattctgtacttcagcggcacgggcaacagccaatgggcggcgcggcggctagccgaggcgctcgacgacgaggtcgtctccatcaactgcatcatgaaggaggggacatcggcgccccttcgctcacggaagccgttcgtgttcgtggcgcccacctatgcgtggcgcctgccccgggtggtggatcggtggatccgcggtgcgtccttcgcgggcagcaacgacgcctacttcgtcctgacctgcgggggaagcgtcggcaacgcggccgcctatgcgcagaagctgtgcgcgggcgtcgggctgcgctttcgcggcctcgcatcggttctcatgcccgagaactacctggcgctgtacgacacgccggacgaagcggagtgccgcgctctgatcgagcgcgccaagccgcgcatcgacgaggtggctgatctcgttcgccgcggcgagccgcttcccgaagagccggtcacggcgaagggtcgtttccgcagcggccccgagaacgcgctgttctaccccgtgctcgtgcacgatgcgaagttcgtcgcgacggatgcatgcacggcgtgcggcacctgcgtgcgtcgctgcccgctgaacaacatcgcgctcgcgggcggcaagcccgcatggaacggctcctgcacgcattgcatggcctgcatcgcagggtgcccgacgcgcgccatcgagtacggccagaagtcgaaggcgcgccatcggcacgacatctggacggatgcgggcgacggcgcatgcggaggcgatgcgcgatgagggatcgtcacgaggttctcatcgacgaggcccgctgcatcgggtgcgggctgtgccgggaggattgcccggccgccaacatcgtggtcgagcaggggaaagccgcggtgatctcgcaggactgcctcatgtgcggccactgcgtggccatctgcccgcaagcggccgtcacgatgaccgggttcgaggaagagccgagggagctggacgccggcgcgccaacggccctcgaccctgatcggctgcagcaagcgctcggcgcgcggcgcagcatccgccgcttcgccgaccggcccgttcccgacgacgtcttcgcgcgcatcgtcgaggcggggcggctgacgcctacggccaagaacgagcaggacgtgtcgttcgtggtgctgcgcgacgacatcgcgcgcttcgaggcgcgggcggtgcgcctgttcaggcgcgtgatgccgttcgtgcggcttacgagctcgatggcgcgccgcacctccatcgacgaccggttcttcttcaagggcgcgcccgcggtcatcgtcgtgatcgcacgcggggacatcgacggagcgctggccgcctccaatatggagctcatggcgcaggcgcacggtttgggcgtgctgtacagcggtttcttcacgatggccgcgcgcctgtcgcgcgggcttcgtcgcgagctggggctcggccggaagcagaaggtggtcaccgcgctcgtgctggggtatccggccgtgcgctatcggcgcaccgccccgaaggaggcggcggcgatcagctggaagtgaggctgctccgacgacgctgcggctcgccgcaagtggccgaagtatgaccgttccgtaaaatgttatcaacaaagtatcatttagcggtatcataggttcgatcacagacgacggacaacccctcatcgaaagaaggatccatggcttccagcatctacgacttcaccgtgaaggaccagcagggcaacgacgtgtcgctcgccgactaccgaggccgcgtgctgctggtggtgaacaccgccacggagtgcggtttcacgcctacgtacgcccagctcgaggcgctgtacaccaccttgcacgagcgtggtctggacatcctcgacttcccgtgcgaccaattcggccatcaggctcccggtacgaacgaggagatcgcgcgcttctgcacgtcccgtttcggcgtgacgttcccgcagttcgcgaagatcgaggtcaacggcgaaggcgccgatccgttgttcgcctacctgcagcagcagaagggcttcgagggcttcgacgagggccacgagttgacgccggttctggaagacctgctggcgaaggacgatcccgactatgcgggcaagcccgacatcaagtggaacttcacgaagttcctcatcgaccgcgagggcaacgtcgtgcgccgcttcgagcccaccgcgtccatccccgacgtcgtggcgcccgccgtggaggagctgctgtagccttttcggtccggacccacctcgcgcaagcgcatgaagcgcgaacccgcgaacccgcgaacccgcgaacccggccgccgcatccatcgcgatgcggcggcctttttcacgcctgaatgtttcacgtgaaacatttgttctgatcggatgccttgagcgcaactgcttgtcgccgaagcggaggcggcgaaaatccaggatttgccggtcgagttcaggagggagagccgggctttcgtttgccgatgcagccgaaacgcgacgagattcgcggaatctgtcatcatgggttggtggatcgtggccggtgggcggattaccataagcggcgaggagtatgaaaaacatgatcggttcgaacattcagagcaggcgcaagatggtcgggcttacccaggagcagctagccgagcgtttgggcgtgtcgcgccagacggtgacgaagtgggagacgggcgattcgacgcccgacttggccaatgccggcgcgctggccgaggcgctcgacgtgtcgctggacgcgctcgtaggctacgacccgcacggtacgatgctgcccatgccgccgcgcggcaagcatctgttcggcaccgtcacggtgggagagcgctggcagatcgtcatccccaagcaggcgcgcgagctgttcggcatcgaggccggcgatgccctgttggtgctgggcgacgaggagcagggcttggccatcctgaaagccgacgagttcatggaccgcgtgtcgatgctccgcagcatggtcgaccgatagccccgccgcgctgggcgacgtgggcgtcgagcgcaaggaggaagcatgggcgcaaccgggaagaggagggtcggcatgaccgcagccgtcatcatcgcggcgctggcagtgtgcatcgctgctgcgttggcatggtacgtgggcaacagccgtcatggcgaggagcgcgacctggcgaaagcggtcgctgctggcttcgttgagaagcgggctcgcgtggaagtttcgcttgcgggcgaggcaaccggctcgatgatcgaggccgtcgtcaactacgccgaaggtcccgacaacgggccggcgctcgtgctcgtgcacggccagggcatgcagtgggaggactacgcccgcgtgctgcccgatctcgcgcagcgctaccacgtgttcgccgtcgattgtttcggccacggcgaatcgagccacgatccggcgctttactcgtgcgaggccatcgggcgcgcgttcaagtccttcgctgcgcaaaagatcggcgcttgctacctcgtgtcgggccattcgtcgggcggcatcatcgccgcgtggctggccgccaacgatgctgagcaggtgacggcatgcgtgttggaggatccgcccttcttccgcgtcacgccggtcgagatgcagcaggaaccgggctgcttcgcatggaaag

SEQ ID NO: 8600 - DNA, 12135 bp, Unknown
  gut microbiota DNA sequence
cctgcacgctttcgcctccgccgaacccggtcatcgccacgccgatgaggcgcacgggcatgccggggcgccacagctcgtcggccatgcggtacagaagcggcgtgtaggaaagctcgtcgtcgctgggcgccggcagctgacgctgcaccgagcgcacgctgcggtcgtcgtagcgcatgcgcaggcccagggtgcggccgcgcagccccttgcgtcgcaggcggcgccccaccttcgcggcgatggtggcgatggcgccctcgacgtcttcgcgcgtggtgaggtccaccgcgaacgtcatctcgttcgacaccgatttcaccgtgtcgtcctgctccacgggcgcgtcgtcgcccccgttcgcccgcacgtgcatgacgcggccgttcttgccgaacgcgcgcagcagcattccttcgtccgcatcggccagctggccgagggtgcgtatgccgcgggagtgcagcttctcctcggctgcggctccgatgccgctcatcgtgcgcacgggcaggggcgcgaggaaatcccgctcgcctccggggtacaccacggtcagcccgcgcggcttgtccatgtccgaggctatcttcgcgacggtcttcgacgtgcccaccccgatggagcacgtgacgcccagctcctcgacgcgctgctggatacgctgcgcgacgcgcacgggatgctctcggttcaccgacgtgggagacacgtccatgaacgcctcgtcgatgctgacctgctgcacgtgcggcgtttcggcgcgcaggatgtccatgatggcgttcgacatctcgcggtagcggtcgaagcggccgtgcgtccagatggcgtgagggcacaggcgcttcgccgtggaagagggcatggcgctgcgcacgccgtacgggcgcgcctcgtaggacgccgtggacaccacgccgtgcttgtcggcatcgccgcccacgatgacgggcttgccgcgccaggcgggatggtccagctgctcgaccgaagcgaagaacgcgtcgaggtccacgagcaggatggccgaaccctcccacggctcgagcggcatggcgtagccgccgccgctggcgggccgttcgggatcggtctgtggtgaataggatcgcattgcgcgaataagtctaccatgccctgtccgggcgtaatgaacttgtgctaggatattcattccttgcctcgagccacgaggtaacatgcggggagggagagacatgacgatgacgcagcgagacaccgacgcgcttcccagcgtacgagcctgcgtgaccgcgctgcccgagcagctgctgtctcctccctacgagatgcgctcggagatgaactggatcgacttctcgggcacggcgaaccccttgggcacgcccccttctttcatccgcgctatggagaccgcgctcgccgccggcgagctgaactacccgcccgaccgcgaggctcacgccctgcgcagcgtgctggcccgcaagttcggattgtccgtggaatcgtttctcgtgggctccaccgtgggcgacatggtgcgcgccgtagcccagacctaccagccctgcaccgtgggtgtggccgttcccggccctgtggagtacgcgctggccgcaggaaatgccgggcatcgcgtggttgagatcgccagccccgccggcttcaccgtgcccgatccggccgcggccgagcgccacggcatcgtgttcgacgccgccgtgctggcgaacccgggctaccctacgagccgcctgctgccgaggccgacgctgctcgcctacctcgacgcctgcacctgggtggtcgtggacgagcgctccatcgagctcacgctgggcggcgagagcatggtggcgctcgtgaacgagcaccgcaacctcgtggtggtgcgctcgctgtgcgagcccttcgccatgccgggcatccccatcagctactgcatcgcgcaccccgacaccatcgcgcagatcacgcgcttctacgacagctcgtgcgtgccgatgttcgccgaggtcatcggcgagctggcgctttcggagacggagcacctcgagcgcacgcgcgacttcctcgattcggagattccctggctgcagtgcatgctgaacctcatccccggcatcgacatcttccccgccgaggcgaactacgtcatgtgcacgttcgacggcgggcccgacctggcgctcggcgtggcgaacaccgacgagctggcgcagcgcctgcagctggccgggttcctgatccgcaagctcgagggcacccccgcgctggaagacagccgctacttctgcgtggccgtccgcacgcgcgaggacaacgagaagctcgtggccgccctgcgggagatcatcgccggctgctagggctttcgacggagggccgcccgcggcagccctcctcgttcctacttcacctcgtagcccgcctccaccacggcggcggccagcgtctcctccggtacgtcccgggccagcttcgcggtggcggtgccggcgtcaaggtcgacgacggcctcctcgacgccctccacgccttcgagggccttcttcacgtgggcgacgcagtgctggcacatcatgccttcgacgttcagggtcttctccatgacagtctccttttcgttgggttcgctgggtacggtgctatcgatgggcgcggacgcgggcgcgtccatcgctgccgaggggaggttgggcttccagccgcgcagccgcagggcgttcgacacgacgcacaccgagctcaggctcatggcggccgcggcgatcatggggttgaggttcaggcccatgaacgacagggcgccggcggccacggggatgcacaccgcgttgtagacgagcgcccagaacaggttctgcttgatgttgcgcagcgtcgcgcgcgacagctggatggaggcgggcacgtcgagcaggtcgcttttcatgagcacgatgtcggcgctctcgatggccacgtcggtgccggccccgatggcgatgccgacgtcggcgcgcgcgagcgccggggcatcgttgatgccgtcgcccaccatggccacgcggccctgctcggacaggcggcggatctcgcgttccttgccgtcaggcagcacgccggcgatgacctcgtcggcgcccacctcgcgttggatggcggcggcggtgcgctcgttgtcgccggtcagcatcaccgtgcggatgcccatggccgaaagcgtggccagggcggcggcgctcgagggcttcaccgtgtcggccacggcgatcacgcccaggagctcgccgtcctgcgcgaagaagagcggcgtcttgcccatgtcggcctgccgctgcgcctcctcggcgaacgcgcccaccgcgacgttgcgggcctccatcatgcgcaggttgccggcgcatgacgggcggtcgtcgacgagcgccgccaccccttcgccgggcacctgcttgaagtcctccacgagcagcgggtaggcatgacggctgcgcgcgtagtcgcacacggcgcgggcgagcgggtgctcggagcggccttcgatggacaccgccagctccagcaggcgctcctcgcccacgcccggggccgggaccacgtcggtgacgctcggcgcgccctcggtcaccgtgcccgtcttgtcgaacacgacggtcttcacgtcgtgggcggtttccagcgcctcggccgacttgatgaggatgccgttggtcgccccacgcccggtgcccaccatgatggccgtgggcgttgccaggccgagcgcgcacgggcacgagatgacgagcacgctgatggcgtgcgacatggccgtctcgagcgtcgagccaccgagcatccacacggcgaacgtgaccacggcgatgacgatgaccacgggcacgaacacgcccgatatcttgtcggcgatcttctcgatgggcgccttcgtcgatgtggcctcgtccacgagccggatgatgccggccagcgtggtgtcgtcgcccacgcggtcggcgcgcatggtgaaccatccggtgcggttcacggtggcgccggtcaccgcatcgccggggcgcttgtccacgggcacgctctcgcccgtgatcaccgactcgtccaccgtccccgagccctcgagcagggtgccgtccacggggacgccctcgcccgcgcgcaccgccagcacgtcgcccgcgcgcaccgcctccaccgcgacgcgctcctcgcggccgtccacaagccgcgtggcctccttcggcgcgaggtccacgagcttggcgatggcgtcggtggtcttgcccttcgcgcgcgcctcgaagtacttgcccagcgtgatgagcgtgaggatcatggccgccgactcgaagtacaggtccatggccgccaggtgcgcggcgtgcaggtcgcccgcgcccagcgcgatgccgatcttgtagatggcgtagatgccgtacaccgtggccgccgtcgagccgagcgcgatgagcgagtccatgttcggcgcgccgtggaacagcgtcttgaagcccacgcggaagaacttgaagttgacgaacacgacgggcagcaacagcaggaactgcgtgaacgcgaacgtgagcacgttctcgtcccccaggaagaacccgggcagcggccagccgaacatgtgtcccatcgacaggtagaacaaggggatcgtgaacacggccgacacgatgaggcgcatgcgaacatgcttggcctcggcggccgcgtcggccacggggcgcgcctgggccgcacggctccccgcgccctgccggccgccgctcgcgcctgccgggacgcgcgcggcggcgccgtagcccgccttgtcgaccgcggcctcgacggcgaccgtcacggccgacggttccgcgccgtcgtcgaaggcgacgtccatgctgttcttcagcaggttcacggcaacgtcggccacgccgggcacggcccgcgtcgccttctccacgcgcgcggagcacgccgcgcacgtcatgccggtgacatcgaacgtttgcttcacttcttactccttcgcagccgccctccccttcgcgcgaacggatgtttcacgtgaaacatccgcgacaaacggacgaacggccttgtctttcagcgcgggttagcgcgagaacttcttcaacaggttcatgacctcgtcgatgatctccacgttgccgcgttcgatctgttcgaccacgcacgtttccaggtggttgcgcagcaccacggcggaaatgctgtgaaccgcgctttccgcggccgccagctgcgtgagcacgtcggcgcagtagcggttgtcgtcgatcatcgtcttcacgccgcccagctgcccgatcacgcggttcaagcgacgatgaaggtcggcctgcagctcttccgagcgcggcgtctccttacggtggcagcagcacgtcgacgcggggcgcgacgagatggcggcgttttcagcttgcgcgtgattctcggtcatgatgattccttccttctataccccatgagggtatccaagcgcgagtatataccccttaagggtattgtcaaccccttcgtccgcgagcgcttgaacggcgggagcgacggcacgcgttacggcgggccgcgccgccgacgtcgcggaggcggctcgcccgcgctgcagccaatgcgaaaggtagcggcgcagccgagccggaacgcggccgtcacgcgaaggacaccgcacggtagccccgcatcgtcgtgcgaaccgctacactggatgcgagcggaaacgcgaggaaggagccgtggatgtgccgccgtttcataccgatcgactgcgacgaagtcgcccgcatcgctgcggagatagagcgcgacctggccgcgcacgcggacgagctggcttcgctcgacccgatcgaggcctatgaggacttcctcttcttccccgaatccgcgcagccggaccgcgccgagcagcgagcgaaacgcgaagaggcgcctgtgcagctctcgctgttcgacggcgaatcggacgagccggcagaagcccgcggaaccggcgcgatcggccgcgcgaaccgccccgaggcgcttccctcgtcggtcgtgccgctcatcgtggccgcgggcgacggatgcggcctcgcggtagcccatatggcctggggatacgaggttccttggaagaacggacccgtgttcaacacgcgcatcgagacggctctgcgcagcgagggcagcatgtgggccgagtccttcgcgcgtcgtcgctgcctggtgcctgctcggggcttctacgaatcgcatgcgaccgagacggtgccgagcgagcgcaccgggcgccccgtgaagcgccagtacgccttcgcagcgcccgacggcgcgccgctcttgctggcgggcgtgcacgatcgcggacgattctcgctcgtcaccaccgaaccgaacgccgccgtggctcccgtgcacaaccgcatgccgctcgcgctggaaccgggcgaggccgccctatggctgcgcggcgtctacgagccgctgctcgaccgcggtgccgtgcggctgaccgcgcgtcccgagcgttgagccggcgaaagcttcgacgccgcaagggccacgacgccggagcggcgacggagccgacatccctcggcatcgcgacgcgtagatgtttcacgtgaaacatccgtgcgtgttttccattcgacgaacgatgttcggtggaacccttcgctcgaagccgcccagtcccgagcatctccgtgcagccggttagacgtgtaatggagaaaacatatcgaattcggaagaaagccgcgagcttcgcggggatgaacgggcgcaatcccacggcttcccttctgcgatcgggcactatgcggaaaggcagcttgcgctgcgccttcgaaccccttgcgaacttccgaatccgatgctttttcgccaccgacgttgctttcggacgcgtgcgccgcctcgtagcgcgctacttcccgcgctcggaaaggaacagccctgctatagtaagcaggactccggcgacgaccggcggggtgagcgggtcgcccagcacggcggccgaggccagcacggtgagcgccggcacgaggtagatgtacaggctcgtcttcaccggccccagctccttcaccgccatgttccacgtcacgaagcacagcgcgctcgcgcccagccccaagaacacgaggttgccccacatctcgggcgcggcgagcgagccccaatcgggcgaaaagcccagaagcggcagcgcgggaagcatgaacgcgagaccccaggcgaacgtgcggcgcgtgacgaggatgctgtcgtagccgaacgtcgagagcttcttcgtcacgatggagtacacggcccacgtgcccgccgccgccaaggccagcgccacgccgatgagccccgcctgccccagcccgccttctgcgacaaggccgcccgacgcgccgcccgcgaagctgaccaggcacacgcccgccatggccaccgcgaagccgacgaagaacggcgcgcgcaggcgctctttcagcacgacagccgacgcgacgccggtgaacagcggcgccgcggccaccaccacgcccacgatggaggccgtggtgaacgtgagcgcgatgttctccagcaggtagtacaccgtcacgccggtagcgcccgccagcatgaaccaccgctcctccttgaagccccggacgtgcaggatgcgcgggcgcaggagcgcgagcgcgacgaacccgatgacgaagcggaagaacaggatctcgatgggtgcgaggtgcacgagcagcaccttcgtggatacgaacgtgaccgcccacaccaccacggtgaccaacgccagcgcatgcccgcgcacggcggggcggcgctgatccgccggcgccccctctatggcctcgcttgtttgaaccgccatctcgctatccttcccgcacccgcgtgcgcgccgccgttcggtagctgccgggggtgatgccgtagaacgatttgtacacgcgccccatgtgcgcctgatcggcgaacccagaccgcgcggcgacctcggccggatcgacgcccgccgccagcaggtcgcgagcacggttcgcgcgcaccgcctgcaggtagcgatgcggcgtgaggcccgtctcctcggagaacacgcggatgaggtggtagcgcgacacgcccgcgcagcacgcgaggtcgtcgagagtgatgcacgaggcgaaccgttcttcgaggtacgcccgcgcccgcgccacgttcgccgcggagggggcctcgggcgccgggggctcggccgcctcgctctcgcaataccgcgccgtctgcgcgaggagggcccaaagcgcttcttcctcctcgagcgggtcatgcgcggaatcggtccgggcgaacgcgtacagccggtccatgcacgccgaaagggccgcgtcgcgcaccaccacggacttgaagcggcaagcggggccgccgtcgggcagggacgcggcgccgataccgtgcgattcggcgaacgcctgcgcgaacaggccgacgggcacgaccacgctgcggtacatgagcggcgcgtcgtccaaaggcttgcagccgtgcacctcgccggagccgaacagcacgaagtcctcgggccccagatcgtgcacctcgccacggcacgtcatgcgccgccgccctcccaccatctggccgatggtccagaaatcgtggaaatggagcgggaacggctgcacgatgccctcgagcgtgacgaactccacgcccgggcacggcccgaacggcgcgatgcgccggttctcggcgcccatgtcggggtcggccagccgcgcgccgcgcacgtcggggcgcgcgctccaagattcgatcgtctccatccaaaacctttcgtccaagcaggagacgataccacgaaccgcaccgagccgcttgtacgaaattgcgggcggaagccgtcggtggcgaaggatccgcgaagtcggccgaacggccgacttcgtccgcgagatgcagaagaaaagccgctaacccttgatgatcttgatcttctgcgacgcggcacttgtagttttaagaaagggttcgtggagatacagacgatatttggccattccgccgttcacttcatccagaagctcgtcgcccagctcttccctgaacatgccctccaaggcctcccgcacctcggaaggagcagcctcgcagccgttttcccgaaggaaaacctccaagcggtcgccctccagcgcctgcccgaacgaagccctcaggtcttcgtcgtccaacaccttccggaacaattcttcgatggtctccatgtttgatcctttggttcgagggtatgcgtcccggccgcggcaaaagcgcaaagccttgcgaccagtgtgaacgcgcgcttccgaagcggtcaagcctcgacgaacaaacgaccgctctcgcgcaacgaaagacaacccgcaaaccattacagccgaaggcgaaggagcttgtccgaacagatatttcacgtgaaacatctgtacggagggctgcgtcggcggaagatcttcggccgaccgcgtcccccggcgaatcgcggcttcgctcgctagcggcgctccagcagcgcgcccttcgtcgagatcaccgccacctcgaacggcacgttcttgccgctgcgctcgagcgcggcgcgcgccgcatgttccaggccgccgcagcacggcacctccatgcgcgccacggtgaccgacgcgatgtcgttggaggcgaacagggcttcgagcttctggctgtagtcgacgccgtcgagcttggggcagccgataagagtgatgcgcccgcgcatgaagccgcgatggaagtcggcgtaggcgaacgccgtacagtctgcggcgatcagcacgtgcgcgcccgcgaaatacggcgcctgcacgggcgcgagcttgatctccaccggccactgcgaaagctgggagggcgtttcttcgcaaaccggttcggcgacgggggcggaagcggaaggccgggcgggcttcgcctcaggatcttcggacgcgaagaagcgcgagagcgatccgggacagccgcccgacaggcgtgcgaccgaattctcctgcgccgttcgagccttgaccgcagcctcgtcgtaggctgccgcctcgcgctccacgaacgagatggcgccggtcgggcacgcgggcagacagtcgcccaacccgtcgcaatagtcgtcgcgcagcaggcgcgccttgccctccaccaggccgatggcgccctcatggcacgccgcgacgcacaggccgcagccgttgcaggccgtttcgtcgatctcgatgatcttccgcagcatagattcctcccgaaacaagtcgtcctcttcgctatcgtccgggagcatagcatggctcgacagcgcgctgcgttggaaatacaacaagcgggaatttccccttcggccccttgacacgaaccttgttgtccgtatacttatgaacagttgatcatatgttgagaggttgacggaatgaagccagacaagattaccgaagcggcacccggaagcgaagacgctcagaacgcgcacgacaacggctgctcgtgcggcagcgccgagcatgcgggcgcgccgagccccgagtgcatgcccgacgaggagctgctgtacgacctcgccgacctgttcaaggtgttcggcgacacgacgcgcatcaagatgctgtacgcgctcatgggccaggagctgtgcgtcgccgacctcgccgagcttatcgccgccacgcaaagcgccgtctcgcaccagctgcgcacgctcaagcaggcccgtctcgtgaagttccagcgcgacggcaagaacgtcatctactcgctgtcggacgaccacgtgtacacgatgctcgcccagggcatgacccatatctgcgaataagccccgcatcgaccgcggcacgggatgcttcgactccgcaccgcgcgcccccgctcgcaacaacgccgaaacgaaaggacaccgccatgcgaaaggcattcaaactccaggatctcgactgcgcaaactgcgccgcgaagatggagaacgccatcaagaacatcgaaggcgtgaaaagcgcctctatcagcttcatgacgcagaagctggtgttggaagccgacgacgaccgcttcgaagcggtgctggacgaagctcagcacgcctgcaagaagttcgaaccggactgcgtcatcctgcgctaacttcggcttcgcgtatcctatcccctcatccataacgagcgaaagccgatgtcatcctgagcgagcgcaacgtgttcgaaggatcccgcgcagtgtcagccggcagacttccagctaccgccgcgcgggatccttcgactccgcgctgacgcgctccgctcaggatgacgaaccccgaactgcaaggttggagatcatgaacaagaaacagaaacgcacgaggaaccgcatcctcctcgccatcgcgctgttcgtcgtcgtgtacgtcgtggcggagctgcttccgctgtcgacgtggctcggcagcgagacggcggcgctatgggcggagttcgcgctgttcctcgtcccctatctcatcgccggctacgacgtgctgctgcgcgcggcgaagaacatcggccacggccaggtgttcgacgagaacttcctcatgagcgtggccaccatcggcgcgttcgcgctggtgctgttccccgacagcgacccgcacatggccgaaggcgcggccgtcatgctgttctaccaggtaggcgagctgttccaaagctacgccgtgggcaagagccgcaaatccatcgccgacatgatggacatcgcgcccgacttcgccaacgtggagcgcgacgggcagctcgtgcaggtggacccctacgaggtggccgtgggcgacgagatcgtcgtgaaagccggcgaacgcgtgccgctcgacggcgtggtgctgtccggcacgtcccagctggacaccgctgccctcaccggcgagtcggtgccgcgcgaagtgcgcgagggcgacgagatcatctcgggctgcgtcaacatgaccggcctcatcaccgtgcgcgtgaccaagcccttcggcgagtccaccgtcagccgcatcctcgagctcgtggagaacgcggccgagaagaaggccaagaccgagaacttcatcacccgcttcgcgcgctactacaccccggccgtggtgggcatcgcggtgctcttggccgtcgtaccgcc

SEQ ID NO: 8601 - DNA, 238 bp, Unknown
  gut microbiota DNA sequence
gccgaagtcgacgtcctcgcctgcagcgaccagttcgttatagcgttcgatggtggccttgaacgtggcggtttggtcggcgtcgaacttcatcgctttcgccagctcgtcgagcgtgtcgcgcttcttcagcgcgccgctctcgatgcgcggctccagccagaacgagtcgaggtgctccttcgtgatggcctcgcagtcgtacacgtcggcgttgaacgcggtgcccgacggcgcg

SEQ ID NO: 8602 - DNA, 2385 bp, Unknown
  gut microbiota DNA sequence
ctggaaagcctactacgccgctcagtacgccgaaggcaaaaccgaagagtggtgtttgaccgctggcgctcacgaccgcatcgtaaaggttgagattggcggccaaaacgcatggtacatgataggacaagcgtacttcgacagggagttctcagagcgctttcgctccatccttgaaaccgagtacgatcttcctcaaacgcgcgacaagctttgggaggatctctatatcgaacacatcaaagagcttgacatgcagatccgtcgctacgaagctcctattatccacgagttcgattcgcttaatgagctacgcgatttcgatcccatgttcttagagaacctcgatagtgaaatcttcgataacatctgcgtggtgctcggctgcgagaaatcagagatccacgacgtttaccccctcaaacagggcctcaccaatctttcctgtcactttgcgacgaacgacggcgagtatgtctaccgcaatccaggcgtcggaaccgagctcatcgtagatcgcgaggcggaactagaggcgcttcaagccgccaagctccttggccttgacgacacgttcgtgttcgccaatccaaagcgcggctggaagatatcgcgtttcgtacgcgattgctctaacctcgatgcgcacaacgacgctgagctcaagatggcaatggagatggctcggaagcttcatgagagcaacgcgagggttgcgcgatccttcagcttctacgaagaaggcaagtcctacgaacggaaaacgcttgaccgtggccagatcgatattcccgactattgggacatgtcgagccaggcgacaaagctcaacgagctgctgataaaggatagcggccgaccggtgctctgccataacgatttcttcgggttgaacttccttgttgcgaacgacggatcggtcagccttatcgactgggaatacgccggcatgggcgattacgctaacgatttcggcacgttttccgtatgcgagcagcttaccgaagaggaaatgctccatgccctcacgtattatttcgggcggactcccaccgaacgcgaatggttccataacctggggcaggttggtatggcgggctggtgctggtacgcctggtctttgcttaaagaggcagagggagaggatgtaggagagtgggcttacatctactaccgttatggcaagacctatcttaggcgcgcgcttgacctctacgacgctgtcggaatggataaagcaaactgaggcttcgcgcttttacctcggcatcaaaagcatccaggagcacaagagagaatgagggcacgatgaatcagaatgtgggggcgcttctcagagagcggaagcggaagtactttgcgaggggcatcgcctttgccgtggcctccggcatatgctacggactctataccggttttctgacgcttggggaaacccaaggagtatggggagagtggttcgcgggctctgaatggggcgagggcaacccggcgttgggcacctttacaattgtgttcgcccttgccgctctcgccgccggaatcaatgatttagccagtgcgatttggtcgcttatcgtttgcgcgaaaaatcgacagctcggggatctctggaagacgatgaaaacgaggccgggcctcgtcatgatgctttgtgcggccatcggcgggccttttgccacgatagcctacgttattgcgctcaattccgctacggcggcaggcaaccccggggtcatcgttcccatcgctgcgctgaattgcgcgattggcgccatcctcggcaggattctcttcaggcaggatctgaagacccataaagtcgcaggtatcgtcatttgcctgttttccgctgcgttgattggcggaacaagcttcgcgtcgatggggcccgaggctctcatgggttgccttttcgcgtttcttgcagctttcggatggggtttcgaaggctgcgttgcaggcttcggcaccatccttatcgattatcgtatcggcattgccattaggcagatgacggcggggatcttggaactgttcgtcgtgtttcccgtgctcgccgctattggtggcggactcggcagcgcgttcgagctggcgggagccgccttcgcaagtccggcgctcgtgtttttcgtcatctccggctttttcgccatgcctgcgttctccttctggtacaaaggcaactccatgtgcgggacggcgctcggcatggcctgcaatggcatgtatgcattctgggggcccttcttcatctggatcatcatgggagtgctcaacatcggcggaatgtctgccgactacccccctctttcggtcgttcaacggataggggcgctcatgatggtcgccggcatcttctgcatagccgtcagccccgcg

SEQ ID NO: 8603 - DNA, 191 bp, Unknown
  gut microbiota DNA sequence
cggggtgaagccaattgcgattcgtgcccagtgcgtctatccgcaccgcgatgcgcagagcttcgggccgtcgtgcgaacgggcgggtatcagccgcccgttgcgcaagacgggcgggcgctcatgcgctaccatgggggcacccgatttcagaaggagccgacgcacgccatggacgaagcacgcgagcc

SEQ ID NO: 8604 - DNA, 867 bp, Unknown
  gut microbiota DNA sequence
ttttcttttttttacggctgcttttttttcgttttgcattcgctttcctcctcttcctgattttgcctggtaatctaattatagcaataattttcgatttggcaacgagaagtttcactttaaacggatgcagcagcctgcggatggctgtgaaaagctgcagaaacacgctgagataccatgtaaaatagataaaagcacctagaataaaaaaacagatgagatagatattcgttataccgccattgatcttatacaatccaataaacataagggatgtaaacagaatatgatacaggatctctacgattccttttaaaatcggaaaacggagatactttacaaagctaattaaaaaactgaagccgaaagcatatacccatcccatcagaaaatgatagagtattgcctgaatctgtgtaggcagcagcattatttaaagatttttgaaatcactgattcctttccgtttccctttttactggatacataggatagagcttcaatgacaccgcgtattacaacatccccgcgttctgtatccagcttgcccaaggtcagatcctttccctgaatcaccatccatccctgtgcggtctccagcaaaaactcactggaatcaaagctgtcaatctgtttgacgccggtcagctccatcaccttgcggtccttaataattacgttatgatatgggttcgtttcaaaacgaagcggattgctaatgttatcttccatacaaactcctccttatttctagttcattacaatctatgtctggagagcggggaatagaacagcagcacaaaacaaaaaatatcccggcctcagtcttctgccagaatatcttttacttcttctttcttaatc

SEQ ID NO: 8605 - DNA, 529 bp, Unknown
  gut microbiota DNA sequence
caacatctaccggctgaacaacgacaaccgcggctgcaacagctgccacgccgacctcgacgcgacgctgcagcacctcgcgcagaccatgcacccctcgccgaacagcccggcgctcgacgccgagatgacggtggaccagtgcctgttctgccacacgtactcgccgggctacatccccacgcagtacgagttcggcacgctcatccacaacatccattacggcttggaggccgacagtcagttcgaggacgagtacaagggaaattgctactcctgccacgacgccaccaacgatggcgagggcatggcgctgtgggaccagaccaagttcgagcgcctgcgcggcgtgacgaaggtcgagaacgtcgagggcgacttctccatcgaccaggaagccacgatggcgcaggaggacatgttcaacatggacgcctggaaccgcctgtacgaccgcatgcgctccggcgccgagtacgccgacacgcccatgccccagagcctgttcgacagctggcccatcacggtg

SEQ ID NO: 8606 - DNA, 2662 bp, Unknown
  gut microbiota DNA sequence
ccgcggcggccgatcctaccagtggctgaccacgacgtcgcccactttgataaggtcgtacagctccaccgccttctccggcggcaggttcacgcagccgtggctgccgtagcccgacttgtaccgcgagtcgccgaacgcgggctgccaatcggcatcatgaaacccgatgtagttgtctacgaacggcatccaggccttcacctcggtctggtattccggctcgcccgtctcgggcttcatctggccgatcagcttcgacgggctctccttgccgttgattacgtagacgccctcgggggtgtcgtgctcgccgtccggcgtgccggtgaccacgtcggactcccacgcgagcgagccttcgtcgtcgtagaagcgcgcgtgctgctccgtcagatcgacgtcgacgtagcgcttgccccaatcgcgtccgtgcagcccgtcgtaggcgcccgcctcctgttcgcaagggatggccatgtcgccggtctgcgcggaacccacgccgttcgtcaccgcctcttgcagcttgcccttgtcgatgatccagccgtatacgccgcctgacacggtcacctccttgccgtcggcgcgcgtgaacgtgcgacgcgcctggtaggtgttgcacgccgaagccagatcctgcacccaggctgccaccagcccctcgtcgacgcccaccgtcacgtcgtcgtgcaagcgcacccaaccggcgatggcatcggcattcacctgcgccacgggcgtatcgcccagcttcagcgagaaatcggctttcaacaggttgttcgcctcatcggccgccttcgccagacgctcatcgtcggacagcagcgtgggctgctgcaacgcatcctcggacagcgtcgcgctcgaccccatcgcagcgacggccgcgttcaccgtctcggccaccttatcggcatcgagcgcagtgccgacggtctcggcgcgcacgacgaaccgagagccgccgctgtcgtagtcgagcccggcgttgcgcggcgcttcggcctgctcgttgaacgcctcgacggccttccgcacggcttcgtccagcttgccgttcgaagtgaccagcttgtcggtttcgtcgtgcacggtgaatacctcgaccggccaggcccacgggctggcatcggcgtgcatggcatccgtcacgctgctgctgttgacggccgtgcccatgtcggacgaggcgagcgtcagcgagaacccctcgcccgacacgctcagctggtagcttttcgccacgtcggtcaacagatcctgaacctcggcggtggttttcaacgacacgtccttgcccatgatcgtggtgttgggcatgaagcggtccatgaacacgagcgcgcccgccaggtagacgatcgcgatcacggcgacgagcgcgccgcccgcaatgagcccggtcttcttcgcgaacggaggcttccggttcgacgacccttgtcggccgccgtccgccgactccgggcgcccgccgcgaaccggccccggtcggccgccccgcgacgcgggcacgaacgacacgtagctttccggcgcgccgtcggccaagggagggtcgatcgagtcgatgcgccgcgttcgctgcggtgccgggcgcggcgctggctgcggcgccggttgctgcgcttcgtgcttgccgcgcgtttcgtgttctggcgtcaacgtgcgcctcctcgcttgccaatggctcgttcgaaccaaactagaaggttcgccgatggaattcaatcctttcactcaacaaaataaagaattggttcagacgctcgacgaagggagcggcgagacgagaccgagagcgacatgtgcgctttttcacctagcgtcggccgccgtgcggctggacgagcttgtccgtatgctctagcagcgaacacgaggcgggatggcagagatcgcgcgctatgcacgattctagaagcttgttgtcagagacaaaaaagggaaagcccaggtcgaagtacatggcgctgacgaaaaatcatgcatagcgttgaatctcttccatgcaggggaaggacgaggcacctcgacgaggagggctcgcccgtgcgacccgcgaatgcaggcgcgccgcgcgaactctcgaaacggcgcgcctcgcgcgggacgatcagtttgctggatcctcggaggccttcttcggcgcgtccatctcgtccagcaggctacgagcttccttgaactgcttcgccagctcctccatagggttcacgcgctcctcttgggcgcggaccgactcctccgtgatggcgagcgcgcaggccacggcgtcggtgtgcgtgtacgaaagcgacagcggcagctcgcgcacgccccgctcgtcggctacctccttagcgcgcccatgcagcaccacgaaggggcgacccttcgcgttgcggcgcacttccacgtcgtggttggcgatgccgcgcgagaacccggtgcccagcgccttcagcacggcctccttcgcggcgaagcgcgtagcgtaatgcacctcggggttcgccgtggactcgcagtaggagcgttcctcctcggagaacaccttctcgcgaaagctgggcgtgcgctccaagatgcggcgcatgcgggcaatttccacgatgtccacgccaagtcccaccgcgccctcgacgccctcgaacgccgccgaagccgcctc

SEQ ID NO: 8607 - DNA, 175 bp, Unknown
  gut microbiota DNA sequence
caaaggcgaccgcgtggtcatggtgcccgcgttcatcgccttcatcgtcggcatgggactgctggccaccgtctaccagccgacggccatgctgatcgcggcagcgttgctgggcttcggcgtagggacggttcaggcaagcggcctggctctggcggtgcgcctcgcccccgac

SEQ ID NO: 8608 - DNA, 6232 bp, Unknown
  gut microbiota DNA sequence
attggggacgagcttattcctcgaagccccacatgcgcacctcgggctcgagatccacgccggcgctcgcccgcacgcgctcctgcacatcggcgatgaggcggcgcacgtcggccgccgtggcgccgcccgcgttcaccacgaaaccggtgtgcttctcggacacttgggcaccgcccacgcggtaccctcgtaaccccgcctcctgcaccagctgcccgacgaagaacccggcagggcgcttgaaggtgcttccggcgctgggcagctcgagcggctgcttctcggcgcgccggcgcgcgaggtcgtccatgcgctcccggatggcgcgcgggtcgtcgggagccaggcgcagcgtcgctcccagcaccacgaaaccggcctcgcccatcatcgaatgccgatacgaccactgcgcccgctcggcgtccacgtccaccagctcgccctccggcgtgaggcagcgcaccgattcggccacgtccttgaactcgcctccgtaggcgcccgcgttcatgacggccgcgccgcccacggtgcccgggatgccgcaggcgaactcgtatcccgcaagcccctcctcgcatgcgcgccgcgccacgtcggcgttcgacgcgcccgcctccacatgcatccgctcgccgtcgacctccacctgcgacaagctctcggcgatgcgcacgacgacgcaacgaagcccctcgtccgccaccagcacgtcgctgccaagccccatcacacgcaccgcaacgcccaggcggcgacatgccgccaatacgacacgcgcctcgtccgccgtgcgaggctccacgagaacgtcggccggacctccgatgcgaaacgtcgtgagctccgccatcgaagcgtcgaagcgagccgccccttcgtcgaacagctcggccagcgcgcctttcagcaacacgcgatccactgtctacatcctttcctcggcgcggctccaagccgcgctatgcgcctcgcaccatggtaacgcataacggcgcatgcagccctgtcgcgcgcgcctcgtcccgacggtttcccggcgcgacggcatgccgagcgccatcgccgaaggaaagaagcgaggcgtcaggaagccagcgaccaccccgaagcttcggtctgcagctccaccatgcgccggtacagccctccctcgcgcgccatgagctcggcgggcgcgccctgctcggcgacgcggccctctttgagtaccacgatcttgtcggcgttggccacggtacgcatgcggtgcgcgatgaccagcacggtcttgccggccagcagcctggacagcgcctgctgcacctgcgtctcgttctccacgtcgagcgaggccgtggcctcgtcgagcagcaccaccggcgcgtccttcaggatggcgcgcgcgatggagatgcgctgccgctcccctcccgacagccgcccgccgttctcgccgatcaccgtgtcgtagccctgcggcatgcggctcacgaactcgtcgcacatcgccgcccgcgccgccgccagcacctcctcgtcggttgcgccggcccgccccaggcggatgttgcccatcaccgtgtcgtcgaacagcaccacgtcctggaacacctcggcatagtcggccagcagcgtctcgggatccacatcggccacgttcacgccgcccacgcgcaccgaccccgcgtcggcgtcccagaagcgcgccgccagcttcgccaccgtggacttgcccgacccggacgggcccacgagcgccgtcacctcgccctcgcgggcggtgaacgacacgcccctcaacacccgctcgccgtcgccgtacgagaacgacacgtcctcgaacaccacgtcgtggcctcgcggcgcgaagccggcggagccctccataggcttctcggcggccagctcctgcgtgcgcctgatggacagtcgcatgctcagcagctcgccgatggattgcaagatgaggttcaccgggtcgtacacgcgcgtgaccacgagcaggaaggcgaagtaggtcatgaagtccgtctgcccggacacgagcagcgtcgcgcccacgaagacggtggtgccgatgcccagcttgaggaacgcctgcgccgaggtgacgaacacgccggtggtcagctcggacgccacctgcctgcgctcgaacgcgtcgagcttggccgcgagcgcgtccagatgcgccgccgagcggttcgtggcgcggatctcctgcgcgcactccaggaactcctgcacgccgtcggccacctcgaggcgcgcgtcctccatcgcctgcgccttgcgctgctggtgcttcccggtgagcgccatcacgagcagcgccgcgggcaccacccagaacgccgcgagcgccagacgccagtcgtagaagaagatgccgacgatgacgatggccgtggacaggcccgtgccgaacagctgcggcatgacgtgcatgaacatgcgctcctggtcggagcagtccttcatgatggcgttcgtgaggtcggacaggtcgcgccgcccgaagaacgacagcggcagccggcgcaggtgctcggccaggtcggtgcgcttgcgggcgctctcctcgtacaccttgtggtacgtgttcgcgtactcggcccactgggtgaggaccatgagcgcgaggatgccgacgcaccccgcgaggtacggcgccagcgcgggcagcggggcccccgccacgaggtggtccatgaagtcgctcaccagcaggaacaggatgccgatcggggccatgagcacgaggttcgccagcgtgcagaagaacacgccgcgcctgaagttcttcgcgcccacgtcggtgaggcccagggaatcacgcagcatagccgccctcctttccgatgcgccattgcgccgaggttcgatagtcggcccacatgcgcgcgtacaagccgcccgcctccaccagctcggcgtgggtcccctgctccgcgaggcggccgccgtccagcacgtagatggcgtcggcgccggccacggtggacagccggtgcgcgatcatgagcacggtcttgcccgcgcacagcacccccagcgcgcgctggatgagcgcctcgttctcggggtcggcgaaggccgtggcctcgtcgagcaccacgatgggcgcgtccttcaggatggcgcgcgcgagcgcgatgcgctggcactcgccgcccgagaggtacacgccgcgggcgcccaccacggtgtcgagcccctgcggcagcttcgccacgatgtcgtcgcactgcgccgcgtgcgcggccgcctccacctcctcgcgcgtcgcctccggccgcgcggcgcggatgttgtccagcaggctctgcttgaacagcttgtcgttctggaacacgaaggccacgcgctccatgagctcggcctgcgggatggaccgcacgtcgacgccgcccacgagcacccgccccgcgctcgcgtcccagaagcgcggcacgagcgaggccgcggtggtcttgccgccgcccgagggccccacgagcgccaccgtggcgcccgagggcacgtgcagcacgacgtcctcgagcgcgggcgcgtcggcgcccggataggagaacgtgacgtggtcgaagtcgatggcgtcgtcggcgggcgcctcggcccgggccgggtccacctcggccatgagcggcgccgacaggatgccgtcgatgcggctcaccgcgtcctgcgcctcggtcaccgcctgcgacgagtacatgatcttgctcatcatcatggtggtgagcgccgagaagatgacgtagaacaggaagttcgtgaggaacgcgccgaagtcgcccgccgcgcccgccagcaggatgcccgccggcacgagcacgaagaacgtcgcgttgatggccacgagctgcgccacctgcgggccctcgcacagcttcacgtaggcggtggcgaagtcgcagtaggccacgatggactcccggaacgccctgaacgagtggacggtctgctggaacaccttcaccacggggatgccgcgcacgtactccacggcggccttgttcatcttgtcgagcgcgttctggtagttcaccatgaactgcatggcgttggagttgccctcgccgtccttgccgcccaggccgccgcccatcatgaggaacatgcagaaggcggaggcgagcacggggatgaggcacacgaggcccatgacccagtcgaacacgaacatgacgacgaggtaggccacgggcgtgaccagcgcgcccacgaaatcggggatgcggtgcgccagcacgccctcggtgagccccgtggacccttcgatgacgcggcgcagctcgccggtggagcggacggagaagtagccgagcggcaccttcgcgaggtgctcgagcgccgccttgcgcatgttcgtcgccgtgcggaacgcggcgaggtgcgtgcacatgagcgcggcgaagtacacgacgagacccgcgagcgcgaaggccagcgcccaggcgccgtacaccggggcctgccgcgcctcgccccacgccggggcgacggccacgaggtcgcgcacgacgaaccacacgcacacgagcatcgcgatggccagcacggcgttgagcgccgagagcgcgcagcccgcgatggtcaagcgcttgtggggcccggcgaactccagcagccgcacgatgggattctgcggtcttgacacgattcgttcctttccttgccgtaacgtgcttattgttagcctaagagaacataatagcgatcccgccgaaatccgctgcacgtcgatgccgattggacgatgccgccgaaaaagagaacggctcccccgaaagggagccgttcgttcggcgcctcgtcggccgaagggcgcggcgctcaggccgagatcttggcgaagtgcttcttgaacagcttcgagccgatccagccgcccacgaaggggcacaccgcggtcgcggccagcgccaccagcgcgagcgggccgtggatgaagtcgacgagcccctggccgtactcggcgctcatgccggaatcgaccacgatctgcacgtaggcgtcgcccgctaggaagatcatcgactcctggcccacccagaagcacagcgtccacaccgcgaacgccgccaggcagcgcagcgtggtgcgcttgctgccggcccccgccacgagctcggccagcaggccgcccgccacgatgcccaccgggccggtccacagcatgcccagcagcagcgccaccaccgcgacgatcgcggacatgatggcgaacgcgccgcgcttgggcaccttcgcggccacgtacatccacacgatgccgccgatgagcgagccgcacgcgtgcgtgaaccagaacaggttcgcgttcatgcccagcaccatcgcgaacaccatgaacacgaggaacaggagcaccccgaagatggccagcgtgatgtagtccttccccaccagcttgcccttcgcgttcgcgccgcccgaagaggcggcaaccgtcgtcgttgccataagcgtatctccttctcttgaaatggtcgatgccttcggtcagattcggtcagagcgggcgcgcccgcccgtcgatgccgatcgcgcgccggatgcgcccgagggcctcgccgcgcacgggcagcacgtcggacacgacgccgtcctcgagcacggccacctggtcgcaggcggcgcagacgaactcgtagtcgtgggtgaccacgacgatgcacgctcccgcgtcgcgcgcccggcgcacctcgtcggccacgcgccccatggtgccgaagtcgagcccgctcgtgggctcgtcgagcacgagcacgcgggcgccctgcaggatgccgacggcgatggccagccgctggcgctgccctcccgagagcgagagcgggtggcgctcggcgatgtcctcgaggccgaagcgcgcgagcgcgcggtccgcctgcccgtccgccccgtcgggcgcgggccgcagcccgccgtgcgtgagcgcgcccagcagctcgccgcgcacggtgtcgctgaacagctggtagccggtctcctgcatcacgaggtaggcgtgctcgggccggtcgcggcggcgcggctcctcgccgcggaagcggacgctgcccgcgcgctcccggtgcagccccaccaggcagcgcgacagcgtggtcttgcccgcgccgttcctgcccacgagcgccgtcaccgtcccggcgtccagccgcaggcccgccccgcgcagcacgggcgcgtcgcggccgtagcccgcctcgaggccggccgcgtcgagcgcgggggc

SEQ ID NO: 8609 - DNA, 214 bp, Unknown
  gut microbiota DNA sequence
gagttcgacgcggtgaaggacctcatggacgccggctacatcgtggtgtccacgggcggcggcggggtgccggtgttcgagaaggagggcctgtacgagggcgtcccggcggtcatcgacaaggaccgctcctcggccaagttggccgccgacttcggcgccgacatgctggtcatcctgacggctgtcgagaaggtttgcgtgaacttcggca

SEQ ID NO: 8610 - DNA, 262 bp, Unknown
  gut microbiota DNA sequence
tacgatgacggccaccgacatcgccgtacgcctgggaatggcttcggtgggggatccctcgctcgtggcggacatctcgcaggacgtggccgagcgcgcgatggccgtcatgcgcgcgatggtggaggacgccatcgacgtgatgaaggtgtccagcgatcctatcgacgtggtgctggtgggcggcggtgccatcgtgctgccgcacgagctggccggcacggccgaggtggacgcgcccgagcacgcgggctgcgcgaac

SEQ ID NO: 8611 - DNA, 3893 bp, Unknown
  gut microbiota DNA sequence
cgatctcggtcggcgtttccacatggaggcgcttctcgatggcgggcagcacggtggcgcagaacaggggcatgtcggcgaggctgacgaacaggcgggcatcgtcgttctcgcacacggtgcgcaggaagcccgccgtgcgcgcgaagtcggccgagcagcggaagaacgtctcgccctgccacaggtacatgcggtcgccctgcgccacgaaagccagctcgtcggcttcgatggcgtagccgccgtcgtcggtgcgccgcaccgagacctcgacatcggggtcggcgctgacgacatgcgcgcgggtgagggagcgcgttccgtagtcggtgccttcgacggtgaaggggcggccgtccagcagatccaacagctcgatgagctcgtagtccgacaggtcgaggtcgcgtccgatctcgtcgcgtccgcggtagcgccaaaacgcgctgccggtggcctgctcgcgcagcgccacggcgcggtcgaggaaccgggcgatggggcgcgccgactcggcgagcatcgccgggacgtgcgtgaacgcgagtttcttgccgtaggagaaccgctcgccgcgccgcatgcggccgacgaagtccgagatgctcttcatgacgtaggagccctgggggccgacgaccttgaagtgcgccgaccacgaccgatagccgtacacgacggttgcttccagatcgatgccgccctgttcctcagcttctgcagcggctttgctgcgctccatgagctcgagcaggcatgaagacgtggtcggcgcgcgatgggctcggtagcccatgaacttctcaggcgcgtccagatacgtcaacgccagagccacgcagtgcttgcacatgccgtcatactcgcggtaggcggggcaggtgcaggcgtagtcgaccaggtcgccttcgtcctcgtcgaaggtgacggaggtgcggtaacggtcgttccagccgctgctgctggcaacgaacgcggacagcgtggtctcgggcggattgtagcggacctgctttgtgaggatgttgcggtcggaggctgcgatggaccgtgcccgttgcaacgtgcgcgcatggcagtgcctgctgatgtcgtcttcggatagcatgcggtgcggcggccctccctcgaaagcattgcagaacatccgtacaatggtaccagaaatccagaaccgtgcgcgccgcgttgggcgaacgcgggtgttccctgcgtccgttcggaatgctatgctgtccgcaatcgctcctcgcagggaagagcgcgggtgtaattcgcggtgaacgaacggatggtgccatgctcgcgcatgcagtcgacgcgtcggaatcctcgcagcctcggcaaggggtgcgaggcctcgtcatcgccacgttcgccttcgtcaccgtgttcgccgcttcggctgtgcctatccctttgtactccgagtacaaaggggcgatcgggctcaccgacgccgacatctccgccaccatgctcatgtacctgttcggcgtcgtgctgacgctgttcttgtcgggatcgctgtccgatgcggcgggacggcgccccttggcggcggcgtcgctgctgcttgccatgctcggttgtttcctgttcttgagagcggccgatccgacgatcgtgctggttgcgcgagccgtgcagggcgtgtcgtgcggcttggccatgagcgccgtttcggcgctggtcgtcgattccgccgtggggcgctacgaggggttcgggctggcggtggccggttgcggcgcgctgctgggcgtgatggcgggctcgctggccgtggggttcttgtccttggtcacccaacagcacgcgctgatctattggatcatgatcgcgttgctggcgctgggcgcgatcctcattcccgcggctcccgaaacggtcgtcagccgcgtgccgctgcgaaccgcctgcaagccggtgatcggcgtggatgcgaagctgcgtggtgtgctgcccatcgccgcgtgcgcctacgtcgcgtcgtggggcgtgggcacgttcttccaatcgttcagctcgccggtggcggcggaatgcttcggttcgagcgacccgttcatggcatcggctatcctcgcgctgtcgatggcgcccagcgcgttgggggcgccgcttgaggcgcgcatgccgtcgggcgtgtcgttgcgtgtttcgatggcggcgctcctcgtgttcacgtgcgcgatgtgcgtagcgatggcggccggggctttgggcgctttcctcgtgctggtggcgttgttcggcctgtccacgggcatgtgcctgtcgggcagcctgcgcctcttgttcgcgcgggccgacatgcgcagcacggcgacggtggtgtcgaccatcaatctcatcggctacacgggatcggcggttcttagcgggatgatgggcgcgctcgtgggcgcgacgacgctcgtgggcgtgcttgcggcgctggccatgttcgcggccgtcgccacggttctagtgttcgcgcgcacgcgctaacgcagcggagtcgcgggctttgctatactgggtttttcgacgaaacgaggacgagcgatgccgatagccgtgagcgcatgcctgctgggggagccgtgccgctacgatgggaagtcgcgtccctgcgaggacgtgctgaagctgcacgacgcttgcgagatggttcccgtgtgccccgaggtgctgggcgggctgcctgtgccgcatgccccctgcgagatcgccgccgccgagcgcgcgctgcgcgtgacggacgcggacggggtcgacgtcacggacgcgtttttggccggagccgccaagacggtggagctggcgaaggagcaggggtgcaagctggccgtgctcaaggcgaagagcccttcgtgcggatgcggcctcgtgtacgacggcgcgttcgccggcgagctcgtgcccggttacggcgtggcggcgcgcgccttgcgcgaggcgggcgtgcgggtgctcgacgaggtgtggttcgcggcttgtgttcgggccggcgaggcgcggcatcccggttgtccgccggcgattctggcggagacgtcgggggagtgccctgcgctcgagaccgagcgcctcgtgctgcgcccgctcgtttccgacgatatcgacgacgtgtacgcctactgcagcgatcccgccgtcgggcccgatgccggatgggccccgcaccgcacgcgcgaggactcgcgcatgttcgtggaggtgatcgcgagcgagcctcatgtgttcggcatcttcgagaagacgggcgcggggacgggagccacggggccgtgcatcgggtcgatcggcctcatccgcgatccgcagcggcgcaacgtcgactgcctcatgctgggctatgcgctcgcgcgcacggcatgggggcggggctgcatgaccgaggcggcggacgagatgctgcgctacggcttcgaggagctggggcttggcctgatcacgtgcacgcactacacgttcaacgatcgttcgcgccgcgtgatcgagaaggcgggcttcgtccacgagggcaccatccacggcgccgaagcaacccccgacggcctcatgcaggacttcgaatcgtactatcttccccgcgagctttgggatgaggcgaagggacggggctaacgtctcatttcgaggtcgaccgcggccagcttgtcgacgagcttgcggtagatccggtcgcgcatccacggttccgtcgatgcggccagcgcctcgtcgaggtccatccagcgcacgccgctgttctcgtcgggcttgacgcgcagcgggtcgtcgggcgacgcgacggccagatacgtcacgttgaggtgtacatgcgagctgacgtagcgcccgcgtttctcgtgcccgtccacggtgagcacctcgagcgagaagatgttccccggcccgca

SEQ ID NO: 8612 - DNA, 263 bp, Unknown
  gut microbiota DNA sequence
cgggactcggtgtaacgcatggccgccgcgccgtcgccgtcgatggagccgaagttgccgtggccgtccaccagcggcacgcgcatcgagaacggctgggccaaacgcaccatcgtgtcgtacacggcgtagtcgccgtgcgggtggtacttgccgatgacgtcgccgaccgtacgggccgatttcatgtgcgggcggttcggcgtgtagccggactcgttcatggcgtacaggatgcggcggtgaaccggcttcaagccgtc

SEQ ID NO: 8613 - DNA, 4342 bp, Unknown
  gut microbiota DNA sequence
ggaaagaccgtgattcgaaggcttccaacctgcatggaaacacccagtttctcggtatgatgtaatccgcatcgtacggacaagctaaaaaatcgccgtcgcttcgagatcctaattggaccagtttctcaacgagctcatggcatctttgcggaccgacgccatggaacatgattcgggtgacgaggcctgcgaacttcgacaccttgcccaacggggcagatccatcccttacgtaggcgctgcaatacgccttgttcgcgaagttcgccagcttgagcctcgctctcgtaggccaaccgcttcgcgcgaaagcgtcaacagggaagaaatcgatgaaaactcccatgtctcttaccggcaggttctttggttcgacgagggaagtgcggcaatcgaccatcttggcgtacggatgccggtaatcaggaggattgaaggggcgtagaacgcgatatctgtcgtttgtgttttgctcaatggcgctgaagagtctctcgcaatcctccctttttatggcgacgtcgatgtcgtcgtcccagggaatgaagccgccatgccgaaccgctccaagcgcgcttccgtagaacaggcagtactcgataccctcctccacgcaaacgctatcaagaaactcaagcatggagaactcgatggcttggatctcttgaagggacagctttgctgtctcatccatgaagcacctctttgtacaaaccaagcaacgcgtcgactgagttttcgaccgagtagcccttttttacggtttcgaatccctgtattgcgagcctcttgcgcaacacagggtcctgcacgagcaaagccaggcatgtgcggagcgattcgggatcccccggttcgcaaagcatcccgtttcgtccgtggtgtatgacttctgggacggatccgcaatcggaagcgaccgaagcgacgccggctcccatggcttcgagaagggatatgggaagaacctctcgctttgaaggaagggcaaacacgtcggcctcgaccagcagatccctcttcttttccgaatccacccatcccacgaagctgcaatttacgccttcccgtcgagccagaagctggtatctctgagtctcctcgtcgcttcccgatccggccagcacgagttcgattacggcgccgtttcgaacgagggctcccgtggcttctatcagcgtaccgacgcccttttcctcctccagcctgcctaagaacaagatgttgcagcaggatctttcatcgtgatcgggctttgcgctcggatcgcccaatggaacgccgttcgggatcacgtggacgatcgagcgtttgatgtccagctcgtcgcagatcaggtccttccacttcgaggaaaggacgatcagagcatccgcgagcgacaggaacttcttaatctcgtttttcgatcccgaatcgccttcaaggattgcccgctccattgcgctcgaatgggaatgaagaatcactttcttacccatgttcttagcacgtcggacgaatagagctttgcgggtcatgcttacgccgtacgaaaaatgaatatgaaccagatcgcagtccttcgcctctctggagaacacaaacagggtgctcagtccgcaggccaacttgcgtgctttgcatccctcctcggtcgtcgcgagatagcgaacattgcaccttctgtccaggcctccgtttaaaagcgtggaagcgcacgatgccatacccccatgcgattctagactggggccgagcataacgacggagggcctgccgacactcaattggcacccttctcgcccaaaacatcggctatgcgctcgctggcatgcccatccccgtaagggttcgaggcccgcgacatcgtttcgtaggcctcgtctgactcaagtagctcggtaaacgcccgatatatccgctcctcatcggttccgacgagtcgaagcgtcccgcatgcgaccccctcgggccgttcggtcgtgtcacgcatgacgagcacgggcttgccaaggcttggcgcctcttcctggatcccgcccgaatcggtgagaacaaggtggcttgccgccatgaaattgtgaaaatcgatgacttccaagggctcgacgatgcgcagacgatcgaagccgtctagctcggcatgcgcggctcttcgcacctcggggttcatatggataggatagactgccttcacgtcaggatgctcttccatgacgcgcctaacggctcggaacattcgaaccatgggctcacccaggctctcgcgtctatgcgcagtgaggaggacgagacgggatccttgcgcccagtcgaggtgctcattatgatagccctcgcgcactgttgttcggagtgcatcgatgccggtgttgcccgtcacgaaaatccttcctacgggtttaccttcgtcgagcaagttgcgcttcgatctctcagttggggcgaagtagtattcggcaaggacgtcaaccgcctggcggttgaactcctcgggccagggagagtataggttccgcgttcggagtcctgcctcgacgtgaccgacggggatgcggaggtagaagcacgcgagcgccgcagcaaacgaggtggttgtgtcgccatggacgagcgccacgtctggaagctcccgctcgagaaccgacttgatgccgagcatcacgccgcacgttacgccaaagagcgtctggcccggcttcatcaccgcgagatcgtagtcgggaacaattccgaatgtgcgcagcacctgatcgagcatttcacgatgctgtcccgtgacgcacacggaaacatcgaagtcggacggtctcgactttagttccttaactagggggcacatcttgatggcttctgggcgcgtcccgaagatgagcagaaccttcttcattttccgctcctctccttcgatcgaatctccctgctcacaagcctcatgaatcgagcgtttcccatgacgtaccttctcatcagcctctttggctccttcatcatcctaaataaccattcgaggcccatcctctgcatccaaagaggagctctggggattgatcctgaaatcacgtcgaacgatccgccgacgccgacgtagaccccctttagacccataagacggaaatgctcgataacatgctctttcttcggcgaggtgatgcctacaaatacgatgttcggcctgctggatgccacctcttctccgactgcactaaaatcttcatcgtcgaaatagccgtccatgatcccacagatgtcaagtcctggatagctttcctctaacttccggcgggcggtctccaccgtgtcccgcgtagctccgaggagaaagatccggtatccttcgctctgggacaagcgacacagctcgtgcataaggtcgattcccgcaaccctctccgggatgtcgatgcccagccttctcgcagccatgaccattgaagccccgtcggcatttacgatttcgcactgcctaatcatgcgatccattgtttgatcgcttcgcatctgcaacagcttgtcagcattcactcctgccagatgcgcgaacactcccgtctccacgaaatcctttgttctggatacggtttgctccatggtataagggtctatgggcgcgcccatgatctcgatgcgtgcagggtagcccattgtctagcatgcccctttcccgttgaacatggccgcaacagtcttcgcgaccaccttgaggtcaaccaggaacgacctttcctcgatgtaggcgaggtccatgtccaccatctcctcgaaaccggtgtcgctgcggccccgcacctgccagtagccggtgaggccgggcttgaccgacaggcggcgcatggcgcgctcgtcgtactgggtgacttcggagggaagcggcggcctggggcccacgcaggagagctggcccatgaggcagttcaggaactgcgggagctcgtctatggagtgcttgcggataaagcggcctatgcgcgtgacgcgcgggtcgtccttgatcttgaacagcgggccgtcggcctcgttgagctctgcgagctccgccaggcgctcgtcggcgtccttgtgcatggagcggaacttgtacatgtcgaaggcgcggacctcgccgcccctcccgatgcgcccgacgcgcttctgggagtagatggggcagcctgggctctcaacgcggatggcgatgcagaggacgatcgaggggaccagcagcaccgctatcgcgcacagcgagaacgcgatgtcgaacgccctcttcacgaagcggtagcccaaccgtccttccgccggcgcagggacgggcacggggccctcggcctccgacaccagctcgggcgccaggaacgccacgtcggaggcggccatc

SEQ ID NO: 8614 - DNA, 1006 bp, Unknown
  gut microbiota DNA sequence
cgtcttcttggcctgagacgtcagccaatcgatgagcgcagggacgttctcgcacaccgtgcccttcaccatagtggccaggttcagctcgagggccaagacggattccttctcgcacagcacgacctcgtggccgcgttcggcggcgacgcgggcggcctcgagccccgctgcgccagcgcccaccacgagcaccttcttcttcgtttccgcgggcacgacggccatttcgcgctcgcgcaggaacgccgggttcacgcggcagcggcggtgcggcgtctcgttcatgcgcagctcgtcgcacgtcgcgcagtggttgcaacgacggatgtcctcggggcgcccttccgcaatcttgttgggcatgtcggggtcggcccagagaccgcgcgcgaacatggccaggtcgacctcgcccttttcgagcgccgcttcggccttttccggcgtggcgaagccgacgccgaacacgggcgcggacacggcctgcttgatagcggcagcggggggaatggagaggccttcgccgtccagacgatcgaggaactgcttcatgtcgtcgtcgggcgaggggtacatccagtagtccagcgcgaactgcatgggaactgggccgtagccatagcccgtcacgctgatgtagtcgacgccggcggcatcgtagaacttcgcgatctcgacgccctcctcgatggtgatggcgtccggatggccgtattcctgaccgttcgtgcgcacgcccacgatgaagtcctcgccgcagcgctccttcacgccgcgaatgatctcgcacaccaagcgcgtacggttctcgagagactggcaaccgtactggtcgtcgcggtggttccacacgcgcgatacgaagctcaacaggaagtagccgttcgccgcgtgcacctcgatgccgtcgagcccggccttcttcgcgcgttcggcagcggcgaagtaccgctccttgaacgcctcgatctcctcgagggacagcccgcgcgtgggatggcag

SEQ ID NO: 8615 - DNA, 247 bp, Unknown
  gut microbiota DNA sequence
gctgcgctccgccgagaagggcatcatcatcgtcgactacctgcagctcatgtcgccgccgcagtcgcgcaaggacggcaaccgcgccgtcgaggtcggcgagatctcgcgaggcctcaaggtgctggcgaaagagatggacatgcccgtcatcgcgctgtcgcagctgtcccgcgcggtggagatgcgcggcaagaagcgcccgatgctgtccgaccttcgcgaatcgggctccatcgagcaggac

SEQ ID NO: 8616 - DNA, 293 bp, Unknown
  gut microbiota DNA sequence
gcagaaccttgaaaaccggatactgaacagcgaagaagagaaaagccaagcaaacgattcttgcgaacggaaacccggcccgagcgcgcaccctcaagacggggggcgggcgagggccgaaaccaagatcggacttcagcgggaagcgattcccgcctcttaaacggagagtttgatcctggctcaggatgaacgctggcggcgtgcctaacacatgcaagtcgaacgatgaaaccgccctcgggcggacatgaagtggcgaacgggtgagtaacacgtgaccaacctgcccc

SEQ ID NO: 8617 - DNA, 232 bp, Unknown
  gut microbiota DNA sequence
tcgaacgatgaaaccgccctcgggcggacatgaagtggcgaacgggtgagtaacacgtgaccaacctgccccttgctccgggacaaccttgggaaaccgaggctaataccggatactcctcgcccccctcctggggggcccgggaaagcccagacggcaagggatggggtcgcggcccattaggtagtaggcggggtaacggcccacctagcccgcgatgggtagccgggtt

SEQ ID NO: 8618 - DNA, 199 bp, Unknown
  gut microbiota DNA sequence
ccttaccggcctgggattatggctgctgttcgcgctgcgcctgctgcacggcatcgcgttcggcacgtgttccaccgccatcggcaccatcgtcacggctcttgtgccggacaaccgcaaaggcgaaggcgtgggctactatatgctgtccgtcaccctcggcgcggcaatcgggccgtttctgggcatgtttctcacg

SEQ ID NO: 8619 - DNA, 541 bp, Unknown
  gut microbiota DNA sequence
gggatccggaaatgcagcaaggccgcgtgcaggacgcggccttgcgggtgcgagcgtcgctcgcagatgctatggaagcggttactccacgcccacgatgacgtcggtggacttcacgatggcgagcgcggcagcaccctcggcgagacccagatcctcgatggcctcgttcgtgatggagcccatgatgcgtgcgccctcgggggtctcgatggtcacatgaccgttcacggcgcccttcttcacggacgcgatcgttccggcgatctggttgcgggccgagatgccctggatgcgctcggagccggcggcgaacatcacgttgctggccttgatgatggccatggcgtcggtgccctctttgaggcccagatcgttgatggcttccatggtgatgtcggctttgaccacggtagatcccaggtcgatggaaacgacgccgttcacggcgccctcggcgatggcggagacggtgcccttgagctggttgcgagcggatatcttcatagcaggttcctttcgttgggggcttccggcttct

SEQ ID NO: 8620 - DNA, 15343 bp, Unknown
  gut microbiota DNA sequence
cgtagttactcgcgcacggcgcgctcgcgcttcaaccggcgaagcttgcgggcgatgcggacgaacccgcacgccatgaggatcatgatcgccgcccacagcacggcgatcggcagcatttccggcaggaaactgcctctatgcagcaggctcgccgctgtcgtcacctggacgaggagcacggccagcaccagcacctcgatgcggcgcagatgcgcgatcttggagtcgatgtcggagaacaggtcgaagggcgcgccatcgcgcgggcggcgcaggtacgcccagcggccgtacgttccgacgcactcgatgtccagatcgcgcaggaagtccagataacagcggccctcggagctgcccgccgtatgctccagcagctccagacggtactcgtactcccccggcgctccctcctcgaacacgtagcggatcccgcatacgtcgacgagggccagcccgcgcgcggcccaggcgttcagccagtcctcctcgcggtcgaaatcccatgcccagaacagccggtgcatgacccgcttcatgccgaccacctccccacgatctcctcgccgtttcccaccagctcgcgcagccggtcgagctcgacccgcaccgcatcgcggccggcgtccgtcaaccggtactccttcttgcgccccgaccctgcgccgggcgccggctcgatccagcgccgtttctgcagcgtgtcgagcgcgccgtacagggtgcccgccgccaggcgcacgcggccgttgctcaggcgctcggcgttttgcatgatgccgtagccgtgcagcggctcgtcgagcgagagcaggatgtagaacaccgcctcggtcagcgcgatcgattccacggttccctccgttccaaaactatatcggcttccgatatagtcagtatatcggaagccgatatagtacgcaaccgtgaaaaagaaagcgaccccggcacgctgccgaggtcgctgtcacgcggaggatggggagcaagcgtctacagcgcggcctcgcgcagcttctccaccagctgctcgaccggccacgcgccgaggtcgccctcgtggcgctcgcgcacgctgaccgtgccgttctcgatctccttgtcgcccagcaccaccatgtacgggatcttctggctttgcgccttcgcgatcttcacgcgcatgggctcgttctggtcgtacacctcgatgcggccgcccgcggccttcagctgcttcgccagctcgtgcgccgcctcgttgtgacggtcggccagcggcagcacggccacctgcacgggagccagccacagcggcagcgcgccggcgtagtgctcgatgaggatgccgaggaagcgctcgatggagccgaagatggcgcgatggagcatccaggggcgctcctcggtgttgtcctcggtgcggtaggtcagttcgaagcgctcgggcatgttgaagtccacctgcacggtggagcactgccaggtgcgcccgatggcgtccttcaccttgatgtcgatcttcgggccgtagaacgcgccgtcgccctcgttgatgtcgtaggccagctcgtggcgcgcgcaggcttccttgagcgcgttggtggcgtgctcccacatgtcgtcggttccgatgctcttctccgggcgcgtggagatctcggcctcgtactggaacccgaacgtggacatgatgtggtccacgaggtcgaggatggccaccacctcgtccactacctggtcgcgcgtgcagaacacgtgcgcgtcgtcctgagtgaagccgcgggcgcgcagcaggccgtgcacgacgccgctcatctcgtggcggtacacggtgccgaactcgaagtagcgcagcggcaggtcgcggtaggaatgcagctcgctcttgtacagcatcacgtggcccgggcagttcatgggcttcacggcgtactcggtgaggcgcggatcctcgtcggtgccctcgttgatgttgaagaagtacatgttctctttgtagaagccgtagtggcccgaggtcttccacacgtcggcgttgtacacgtgcggcgtgatgacctcctcgtagccgcgctcgtacaggtcgcggcgcagccactcctgcatggtgcggatcacgcgcgcgcccttgggcaggtacatgggcaggcccacgccggccagcggatccatggtgtagatgcccagctcgcggcccagcttgcggtggtcgcgcttctcggcctcctccaggttgcgcaggtgctcgtccagctccttctgcttgaagaaggtggtgccgtagatgcgggtgagcatctcgcgctcggcgtcgccgcgccagtacgcgccggccagcttggtcagcttgaacgcgcccagcttgccggtggagggcaggtgcgggccgcggcacaggtcggtgaacttgccgatggtgtacgtggtgatgacggcgtcctccggcagctcggcgatgagctccagcttgaacggctggctcgcgaagatctcctcggcctcggcgcgcgtgaccacgcggcgctcgaaggcttcgtcggccttcacgatctcggccatgcgggcctcgatggcggcaaagtcgtccggcgacagcgcgcggtcgagcttcacgtcgtagtagaaaccgtcctcgatggccggccccacaccgaactgcacgtcgccgtagaggtcgacgagcgcggcggccatgacgtgcgcggtggagtggcgcagaagctccagcccctcgtcgctcttggccgtgacgatggcaaccgagtcgccttcggccacgggagccgagagatcgaccggctggtcgttcacgatgcccgcgagcgcggccttcgccaggccggcgccgatggacgcggccacgtcggcgacggtggagccgtctgcgagctccttgttcgagccgtcgggaagtacgatgttcatatctgttcctttcctgtgccgggcgcgcacaaagcgcctgcacgatcggttcgcagcgagcgcgccttgcgcccgcctttgcgacaaaacaacgaagccgccccgttgttcgcgaggcggcttcgattgcattgcgaagtggttactgcacgccgtgctcggactgagcggggcgcgcctgcctcgtctgctgctgggtcgccgcctgctgcggctgctgcgttcgagcgccgcgctgctgcggggcacgacgcgtgcgcggaccaccggcaacgggcgtggcgcagtacgggcacacggtccaggtggggtcgagcgcgtggttgcaggtgccgcaaaggttcttgagacgctggtggcagttcgggcacagcacgaagtcggcttccaccgggtagccgcagttcgcgcactcgccgtacttcatgagctcgcgctgcttcagcgcgatctccagctcctgctcgtcgcggtcgatctgcagcagcggcgggcgcagcaagcagtacgcgatgatgccgagcaacgggacgagcgccacgatagcccacacgtaccagtaggaaccgcgcaggtacgcatcgcgcaccacccagacgatggacagcacatacaggatgaccagcagcaccacaaccacggtgaacgcggcttgcagttcaggagtccacagctggttaagcagttcgctcatttcaacctcgttttcttgtatattcagcgactggtgcacaggtatggaaaacgcgcaatacatgcacacgatcagtcattatagcaaagttgccgaaaaacaagctcacgtgcaggtaatttccgcaagctgttgaattcgagggctggttcgagagccgccccctaccagactctgaagctaagcccgggcgcacggaagcgcggccgagccgagccgatgagcgggttcgcggtcgagccgggccgacgcacggtttcggagtgcctgcgtgcagcaaaatcgccggtttggcacgccagacccgcccggatgccatattcccaggaggccgccgaacacgatctggggtttcgcttcggcctttttcgggaaacgaggccgaagttcgtcgagatgtgccaaaccgacgattttgctgcacctcgacaagcgaaaccgtgcggaggcggacgcgaatcaacttccatgacaatgttagcctcgtcaaccgtgccgaaaacggttcccaaatcgcacgatctggaaaaacgccggacgaaataccgcgcgatgccgaacaagacaagagaacggggtcagcgccccatccatcccccgtcgtcctgagcgagtgcggcaagtcgaaggatagcgatagtgacggacgcaactcacaaagaaagcattgaaggtgggtagcgaacttctaggattgatcctcgtcggggacgtactccatgatgtcgcccggctgcacgtcgaatcgctcgcagatgcgaaggatggtgtccgtggtgacggactcccctttggagagcttggcgatggtagttgacgaaagccctatctctgttttgagatcggtctttttataccccatccgcgcaagcatatcgaaaagcttgaaaaacctaatggaagccatcattgttcctcctcgctgctgacagactaccagcaaaccgcagcgtcgaaaagccgaggattaaaagcactatttccttttcatcagctctggattagaatatccgaatatacagatttatttcattagattcggatttgaggttaagatgttccgacagttaccgatcatcgaaactatagccgatgccgtcgacgaactcaccgacgtgcgcatgacgctcagcggcctagcctctttaaccctggcgcttgcgaacagcggcatgcacgagcccgacaccataaggctgatctcctgcctgctagactactgcgcgctcacgaccgaagccgcctccgataaattcgacgaagctccccgtgatacgactcgaccagatcgcctttcataaccgagaaaaaagctatcgaagcatcacgcctgcgtgatatctccatgagttcacctcgttatcagacgcgatccaacccttttttcctgctctttgtcgaaaaatcaaaagaaccgaccttgtgctttcagagcttcgtaatgatccatatctcgcatcttgaacattttggcaggatgacctccggcaacagcaccctttggaacatgatcgacgacgacactcccagcctgtataacagcgccctctccgatatgagcccctccaagaacgatgacttgatccccaagccatacgttgtcttcaatcaccacatctttatcaatcttcgccataccatacggaacggcatcaccgtagtcgaagtcatgaaacgaaccaattatcgaacaccctcttcccgaatgaaaattgctcccgatccgaatttctccttcgccaacaattctcataccgttaaagttaacgttgtctcccagaacgacgcttttcgatacccatgaatagcgattcactttgagacctttgcccaccgtacgcgcacgggttctcacgaccgcaccgaaaagcacctgctttactttcgaaatcaaccgtttcactcagcatcctctctcaaatctattggtcactcgcaccgttcaaataacgagaatccgagagcattgtcatgtctatcaagacatccgcaggaatatccacgcgagcaacccttcccacgacttcccccaccaacgagggcgagatgcccgtgcccggtctcttaaacgtgagcatccccttatctatcacgcttccagcgggtatatccgccgccgcgacaagagaccgacgagcattggcccttgcagcagtttccgattcgctatgtcgtaacgaggaatcgccaagtagtgtttcaacgaagcacacgccttcgaggatcgttcgggcatcagagggatccatggcgtggtaatggtcatttcctggaagcgtcttatcgagcgtgaagtgcttctccacaatgcgagctccaagcacgtaagccgtcttgacaacctcggcagaggggtcgggcttacaatggtccgaataccccacaattacgtctggaaattcccgggtgatcgatgcaatcctgctcaaattagcatgctcgtacggcgttggatattcgagcacgcaatgcagcagagcgagcggactgtcgttcacggcgcgtaccgcctgaacggcagaacgcatctcggtcaagtcgccagccccaaccgaaagaatcataggcttgccttttcgagcctgatgctcgatgaaagggatgttcgtcaggtcggatgaagacactttgtatacccccatcaggggttctagataatcagccgactcgaaatcaaagggggtcgagcagaaacctatcccgatcgagtcgcaatagacggaaagttctcgatactccctctctccaaacgagtcgtatcgcttgaaaagctcgtattggctcgttgaggattcctcgctcgtatcccaatacgaaggagaatgtcgggaagcgagcgattcggccttgtacgtctgaaatttcaccgcatgaacgccagcttcgctcgcttctttgcacatgagctttgccgcctccatagggctgatgccacgctgccgagcgatatcgtaataattgacgccgatctcagctatgagtgtaaacgccccgcttgcaatcctatcctctaagttcatagtacgtctcccaaaacgatcctctttactcttcgtatccctaatctcaaatcgttctcaagcatcagcttgcgcatctctcgccgtacggacctcgcccccgcaagccacgctattgttgaagcgaggtcttcgtcggaaacctcgcttccgagccccaggttgatgaacccgttatccatttgagcaaacgtgtggagctgctcgcgttcgttctccgcgagaacaattgtaggcacgcccatgcaggcaagctcgaacgtggtgcgcccttgggaggaaagagccatgtcggccttacgcatatggtcgctcatgcgcaacacgttgcgactcacctctatcccgcactcaggaacgctttgcaccgcaggattgtcgtatcccgagccgagaacgaaatcaaacgtcacgtccactgcctctgcattatgcctttttgccagttcgtacacccgcgccgtcaaatcgagcggatccgttcctccaaacgtgacgagaatccggcgcacctcatccgaatcttccgaaggctgcgttataaggaactcgtcccgcaagcagacgtaccccttacccgaatacacgtttccatgcggagacgccccttcgtaaatggcgttgacaacagcatcggccaaccttgcgccttcacccaaatcctcgaacgtcaccaagcgcttaacatacctcttcacatcagccataagactggcatcgctatcaaggcaatcgtatacgaatacatcgggacggcgctcctccagccatcggagcatctcttcgtcgtcctccacctctaaaaccggcatattcgccgatttcaacttggcgattccttctctatgacgtgcattgcatacgaatacgacgtcatgctctatcagttcgtacccaagcgttaatgcacggtacacatgcccaaggccaagctccttatgcccgtcgacccgaaacacgatgagccttcgagagagcatggcttcgcacacgatccaatcttgcatcgtgtcgatgtcgaccgcttcgtcagcagggacctcaaaaaccgtaacgttgtcccctatgcgagacgaaggcccgatacacgaacgcttcgaaaccaaaaatgcaccggtttcaacatagttcggcggaagctcctgtcgattgagacgtcgttcgtaattcggaacaaaacgattccgaccgtctttgccccagctcaaatgaggagcgtttgtcgcactcaccatcgtatccgaatcggaattcaaaaaccgctcaatcgccgtatcgagagtgcgcactgttagcaaaggcgaggtaggctgcatcgtgatgacgatgtcgtatcgcacaccccgcaacgcttccacacgaaccactgcgtcattcactaccggatcgagcgtaatatcgtctccggaaagttccgggctgcgctcaagagcaacaacgccatcgatctgttctacgaaatccagtatctctctcgaatcagtgctaacggcaacatcggtgatacagctgctctctgctgcacatgaaatcgcatagtcaatcaacggcctgccgtgcataaggcgcatattctttcgtggtatccctttcgagcctcctcgagcaggaatgacagcgagcacgttcctctccacattcatcaaatgaaggcacctttcctggagacgacacgtcgacgaacaaccctttgattcggcgacttttccaacttcttcgcagccctactcgcatccgcacaacaaaaaccttgatcatgtgccgacgtggctagaacgaacacaaagaacagcaagtaatgactcgtcatggtcgaatgcatcaccatgccgacaagaaaaaacggaacccaaacgccagccgtctcttttctggcataaggggcgatgacaatgctgaacacagcaaagtaaaaaattgtatagagaaccccgtgcttaagaagcaagttgatgaccgcgtggtgcggctgcacaaccctgtacccatgcaacgaagcactcgcgagcaaagtgtctttatcgccaaaagggtttccaatgttcatgacgcgccggatgtcgatatcgtatccacgaaaaatcaaaagcggatccttggaaatctgctcgatagcataaagattggaattgaacctgatagcattagaggtatcattcaaacctcgcgatgctaaagaggccgaaacggtatcgcctccgacgacagccgtactccaccaccagctaaacgtcacgattgaaaagaacatgagagcgaagagcaaaaacaacacgacaggatgcacggatctcgaaggctgagaaaccgacccctttcgtcgcgctctgatccatatcacagcatttattaaagcaaagcatagaagcatcatttgatatcccctgctgttgagaacgagagccgcaactacacataccgctacgccaagctttcgcttctcgtaccagcaccagcagaaaaacaggaacagcaccacgccaaaatagttcttgtcgtacgaaccaaaaacataataaggagtttccgcgtcgcggcgaaaaacggaaaccagcacaaccgcaagggcaaggcaataaaagacgcgtttcatgaagggactaatctcgaacgaggacggtcgtatgcaatagaagaaaagaaccgttagcaggagaaaactcgtgtcgatgaacaaatcccgcatggaatagggagaaatcgccatcgtgaggagaatcgaaccagcaaggccgaaaaggcaaaggatcatcggcaacgacatctttgtctcgtccagctcttctcttccaaagagaccggtcgcaatcaccaatactgcggtaagaaccaccgatgcataaactttgtttgccggcgacaagagaaaaagaacaagcagcaaaagaaccatcaagattgagtacacaatgccaatgtgactttttctcgcgctcggcgctgtagtatcagttttttgcgcaatcacgaatttgctcctgtacgaaccatagctcctgaacgtttcatatagaaaagccccactgaatacgtgaataggtaggacaccgcgttagaaatgagcatgagaaggcaaagcacccaaagactaccgacccaagaagagaaagcaatcgaagcggcatacaaaaccaaacggaacagcgacgaaacaacctgaaggcggggcggggcaactttaagaactacgaccatattgaacgagttgacaaccgcaaatatcgatgctgcatttcccaacggcatcaacgacaaggcctggtcataaagcgtaggatagagaatcatcgcgaacagcggcccaatgaagaaggcaatcgcatacatgaaaagccccactgcgagtatgaacagattcactaagtgatacctgcggacggttatcttgactacgccgtcgctcatgtaactgagcatgatggaactgatcggtgaggagaaaaacgagaacgtcttgccgaaaaaggttgcaacgtaataggtcgacacagccgaaggccctaaggccggatacagcagcaaccgatcaacgtacaccgacgaataggtgatgagattgctcgctataagagacacataggtgcgcagcgacgacccaaaaagccttgttttgccatacggttctgaaaacacgtttgagcatcgtgcaaaacatgcgagggcaaatgcttctccaagtatgaacacgaaaggccagaatccgcttgcgaaagcaacgcccatacctaccacataacccaaagcagttaagaggttgactagcaacagcttcttggaattgaaatgaagcctgaacgcgacgagacaatacgccttcacgatactcatacccgtaaggatcccaacagctaacgccatcaatagatccatcgatagaagttgccagcacactatcgcagtcgccactgccagtacgggggcagaaatggataggaggtatttgaagtctcccggtcctattccggctttctcatagcgttcgttgcgaataatcctcgtattgcacaaggtgctcccgaacgacggctcaagcgcgttgacgatccctatcgccaccaggaacaaaccgtatcgatcgccgtcaagcttccacgccaaaaacggatacacgagaagctgcagcgtccctacgagaaccacggtcgcaccgatagtgagagcgaaatcggtcgatgcttttttcaagaagtcttttttcatggtttcacgatcatcgaataaccgttttgccccgatcaggactcaagaaagcctctaacgagccgttccgtattctcgagcgcagcctcgtgccagacgtaggatttcaagctgtcagaaacggattcgacctctacgctcatgcgccccacaaattcagatgcgtccttcacaagctcggccgcacctgacctcatcagcggttgagcaatttcactgtcaaccgtatccaggatgaacacgcgctttctataggctatagcctcgaaaagcaccgtgctcgatatccctacgacaactgtcgccctttgcagataccaatcgatatccccggtctccgcgatctcaaccctggtgccgacctccgtcaattcaggatggacgaccctccacgagtttctttcggaaggatgcagtttcacgacaatgcggtattcgttcgcacgcggatcccgagcaagatcgcacacgaacgaggaaaccgcaccgttgtcataaccctgagacaccaccaagacgaaaggaacgtgctcgtctacctgttctttttcgatgtcgaaagacgctttcaaccctcgctcaagcggaatggatcctacggcgatcatccgtcgatccctatccggcacaacgcattcgtcaatccaatactgaccgaatgcggcgatacggtcaggaaggtatcttccgcagtccggcgcatcaagattgtacgcaatatgaccaggccctatttgcccatgctggagttcgattaccggtatgtccagctcatgaagaacttcgttgcagacgagacagaacaccgagtaatgctcgacctcgacgacgcattcaggttgccatcttgagaagatttcacgaaacgatttcgaaagcgcgtaatagccagtcaccacgtaagaggttcttttagccagagcctcccgatcaatctcgacatcgaattcacactcgagcagccccaccaattccgcaaggtcggacaaaacgcaacgagacgctttctcccactttcttgttgcaagagcaacaagccatctagcctctaggatatccgtgtatatcgtaagatcttcaagggagtcttttacatgggcaagcttatggggacgctccagaatcgagcagtcgtctgcaaggtctcgagccagatcctcgaggaacacgttgcaaacgccgttcgaaccagcggttttcttccaattgcctaaaaagacaaccttcttgccttcccttacccccgtctcgataccgctccgcgattcacccagctgcatgaggagacgaggcaggcttcttgcgatattagcctttgaaaactgcgcatgaaaatcaggatgcccaccgaattcgaaacgtcgaacctgcttgcataccgagtcgaacagccacttcctcagaagatgccaatagtgcatgccatcgacatttcgactgaaaacatcatggcgattctcaaatgcaagaaacgcttgcacgagaagcaccctgttcccgtaatccactccagccacgcccggttcgttcaaatccgtaaacaaactcatagccgccaaaagcttccataagacgagaagcgcttcgcgtccaatattcctttaacatccaaaagcaccttgctttcgtcgggcttgtctccgaagaaagcatcaatacgctcgaagcccagctctttgaactcatcatgggcaaccgcgacaatcaggcaatctgcgttcgcaatatcacccgactcgcgtagctgcatgccgtaaacctgcttcacctcgtctcccgaagcccaaggatccaccaccgacggctcgactccatattcctttagcctcatgacaatgtcgtacaccttggaatttcgaacatcgggacagttctctttgaaggtaatgcccaagacgaccacgttcgaggacttgggagcaagcccaactcgcaccatctccctgatggccgtctcggcaacaaaccctcccatggcatcgttcactcttctgcccgaaagaatgatctgagagtggtaaccgagcttctcggcctcgtaggtaaagtaatacggatcaacgccgatgcaatgcccaccaaccagtcctggtttaaagccgagcgcattccacttcgtgttcatgccctccacgacttcgctcgtatcgatacccatgcggtcgaagaccatggcaagctcgttcatgaaggcaatattgatatcgcgctgggagttctccactaccttaattgcttcagctgttttgatcgaggagaccggataggtgcctgcctctatcacgatgtcgtacacgcgtttgatttcttcaagggactcatcatccatgcccgaaacgatttttcggatagtggtcaaggtatggactttgtccccggggttgattcgctcaggactgtaacccactttgaaatcaacgccgcaccgcaatccggattccctctcaaggataggaacgcatacgtcctccgtgaccccaggatagacggtagattcgaaaaccacgatcgaaccccattcaaggtgacggccaagcatggtcgacgccccaacaaccggcgacagatcgggggtcttgtcctgattgatcggagtaggaacagcaactatatgaaaacgcgcttcccgtaaacgttcgggattcgacgtgaagtcgacgcctgtggagctgatcgcctcgtcgcctacttctttcgtcggatcgaccccctttcggtacaagcggattttctcttcgttgacatcgaatccgacaacttcgatatgcttagcgaactcaaccgctatcggcatgccaacatatcccagtccgataagggatagcttcgtcttccgctcgaccaaatcttggtacacgctcactttaccgttttcctattctcttcagaactgcatgaaacatctgccaaaacaggcagtagcctgcatatggcttgctcaaaccttcaatctccgtatacaggaaccatgttcccttcactgccgaaaccttattcgcgctgagcgaatcgcttcgcttcctattcgccgccaacacttcatcgaacccatgaagacatccgtacagctttataacctggagccacgttgcggcatcctgcctttttcgtatatccggcatgacgagagcttttttatcgacgagctcggtatcgaacatgatcgtgtgcgagcaggtgggaggttttttcagaaattttttatagtcgagacgctcatcgatatgaacgatgttgcgaaagcttccgtcttcgttcaccgtctcgtacgacgtcatgcatgctccgaaacggttctcggtcatgaaggtgatctgcctctccaacttctctttcttccagtagtcgtcggaatccaaataggcaataaacctgccgcacgcagccgctaaagccctgttcctagaaaaagccgctcccctgttgcaatcgtttctcaatacgacgaaacgatgatcccgctccgaaaactgaagggctatctcaagcgatccatccgaactgcagtcgtcaaccagaatcgcctcccaggaagacaggctttgagatacgatcgaatccaatgtttcagccagatatcgctcgcagttgtaaagaggaatgatgatgctcacgagtggggcgtcggcctcgccgaattcccaaaactcgatcagatgctcgtcagcgccggcgtgtatggagcagaactttcgcacttcgaaggcgcgcgtcttatcgtcgcgtaaagactccacttcagaagacaacgctcatacccccgtcttgttgatgatggatttgaatgtttcgagaaatacaaccacgtccagtttgagattcgcgttccgcacgtagtacagctcaagttgttggcgactgccgtcttcgtaggttgcatcgtttcttgcttgaacctgccaccagccggtgatgccgggcttcatgctcaggaaagcgtccacatccgtaccgtacgcaggcagctcgtcggccaccacgggacgcgggcccacgatgctcatagagccagcaagcacgttgaggaactggggcagctcgtcgagggaggtcctgcgcaggaagcgcccgactcgcgtgacgcggggatcgtcctccaccttgcgctcgcttctccactgcgccagctgctcagggctcagatgcttctcgacatcgtcggagtcggccaccatggtgcgcagcttgaagatgcgtaacggttggccgcgatagccgatgcgctcttggcggtatatcggcgaaccgggggattcgaggcgaatgatcagtaagagcagcgcgatcggcgccaagccaacaacgaccacgcacagcgagaacgctatatcgaaagcgcgtttaacaaagcggtagaccagaccgttcccggcggtctcagcgacgtgctcctcctcagaaacagcgaacgcgctttccccggcttccgccgctagcgtgccgccttcgagtaaatcttctgttgtcgtttgagtttcaaccaccagcacacgacccttgcggtcagcacccccccccc

SEQ ID NO: 8621 - DNA, 5670 bp, Unknown
  gut microbiota DNA sequence
gtacgaccgaacaggctgacgtcgatgtaggcgcgacgcttgtggcggtcgatcttgcggatgtcgccctcgaagcccatgagcggaccgcgcgtgacggtgatcttgtcaccgcttatgtagccctcgctcatgcgcacggtatggttgccgtccatgaacgacaggaaccagtcgcgttccttaccagtgagcgggaagaacgagttctcctcgttgcccagcagacgaatgggcatgggcacgcgcgacagctccctattgagagcctcggggtcatcggtcacgaagaacaggtaccccgggaacagcagccgcttcaccaggcgccattcgccgcggatcttccacatgacctcgtattcgggcatgaagcagtcctccatgacggagggcggtaccaaacggcggcacatctcgagcgtcgaggactcacgacccgcttgcacttgcgccacgtaccacatgcctgctcctttccctcgcacatgtcgaaccgctccgtcaaaagaaaagaggatgaatagctgcgccccgccgccgccctcaggcaacggccgctcatgcagagccggctgcgcatctattcatcctcttgtcgatcgacggaacgcgctttgcgacgatttcgccttctcaagatatgtaacgagccttgcgactcccgtatttgttgctcaaatacaacaatcacggcgaaagaaaaaggcgacgagcgcccttccctcccttaacgatcatgcaatgttgtatatagtccgttgttatatacacaacatccacgatacgctgcgacgatgcgaaacatacttcaaataaaagtcggtctgcgcatcaaggatctgcgagccgtccacgatgtcagccaagagcggttcgccaacaaaatcggcatggaccgcacctatctggcctccatcgaggtcgggcagcgcaacgtcaccctgcagaacctcgcgaaaatcgcgaacgggttcgacatgacgctttccgagttcttcgagggtattccccgcgtcgacccaaatacctgaccatttcgatcagcggttcgttcgtcgcggtctttattatacctacatgttgtataaacacaacaaaaaggtaacgaatgacgataaatccgcaacgagcggcattgccataccaacgccgtcccgcagcgcaacggaatcgcgaggctccgtcgctggtcgagacgatcccctccgtcagtccgccgccaaggcgcacgcctcttgcttgaagagcggatgatcggtacccagaccctgaagctctaacgagacaccgggaagtttggccgtgatctcgagggtgccgcccaggctggtgatgtagcgccgcagcgtctccacctgcatgacgtcgatgctgccgttctccaggtcggagatgcgcttctggctgacgcccatcttggcggcgacctccttctgcgtcatgccgcacgccttgcgcgcctgctgcagctcatagcccttgatcttcgcctcgacgagaagacggccttcctccaacatttcaggagtgatgtcaggacgcgtttcaagaaattcttcgatggaaaggctcttcttcatttctcatcctccaactcgctcaaatgctgtcggtaaagcctatcggctctcggaatagcccgcgcataccaacgattccatcgctcgcgggttccgccagccgatttgtcgcccgccagcagcgtcaccgcacgccgcttcgggtcgaacgcgaacaatatcctgatctcgcttctgccggaagaaggaggtctaagctctttcatgttcttgaacgacgaacctttcaccgtgtccacaagcggccttcccagtcctgggcccacatcgcgaagctcgttcagcgccaccgtcacaccgatgatcgtctccttatcctgctccttaagccatggagctatcaggctcaggtcaacttcccagttccccataatatacctcacacgttattttatgtccagcattcctcctcgttcaatgatagcgacgcgatctcacgcgcagatggcagggatctagcgcgggttccccctgaatccagcgcctttcccacgccgccccaacgcggtttccacgcgcggcacctacgaatccaacgcggattacacgcggttcaccgacaaatccaacgcggtttctatacgattcaaaagagccgtcgcccctgcaacacgaaaacgccccctgtgcatcttcgggatgcacagggggcgcaagtaaagctgactacatgagtccgcgatgcttccacctttgaagcgctcgttgatcgcctccatgatggcaccgtcctgcggtcgtttcgctcaggatggcaacgtgcggagccctggcggcttcgtccagaacgacgaatcgcacgggttccttcgacaagtggctcgatggccgaacgccggatcgcaaaatcaaccgcgcacctcgacggcgctccgcacgccctagcgctcaacccaccttcggccgctttccttcgcccggtacatggcaacgtcagcgcgatccagcagcgagcgaacggtgtcatccggccgcacgaagcacacgccgcaacttgccgcaagcgagaacgaccccgcctcagcctggaacgcatggcgctcgatcgcgtcgatctcagcgaacagacgctccagatcgccttccgaaagtcctttcggcgcgcacagcacgaactcatcgccgccgaaacgtccgacccacccgtcgaaagagcgtgagaaactgcgcatcttgctcgcgaagtactgcaaggcgtcgtcgccggcaatatgcccgtacgtatcgttgatctgcttgaatccatcgatgtcgagcagaaccacggcggcctctcccgccggcgatccgccacgtgcagcctgaacgagagattccagctcgttgttgatgaaggtcttgttgtacagcttcgtgaacccgtcgcgcacggcgagttcgttgaacttcgtgatcatttgggtgatctcgatgttgtcgcgcacctcgatgtcggccaccagcaggctgtccgtcacatccttgatcagctcgagcacaagctcggcgccctctatgtccatcggcacgctggtcacgtgaagcacgcgaccgtcgaggtactcgatcttgaacacggcgtcctgcatcgtcaggcaagcgcgcgacgagcagttgagacacggatcgtcctggttccacagctggtagcagggaccgtcgacctcgatcagacgatccccatcgcggtcgtacgcgaacacccggtggtcgcgcggatcgaccaaccggtaataatcgaatctcagcaggtcggtcgcggcgctcgcaacctcaggatggatgctcgcgtacgggaacacaggctaccccagctccgccagctgcgcttccacgcgagccagcttgtcggtcatctcggcatgcttggcgcgatccttctccacgatctcgggcgcggccttcgccaaaaagcccgggttcgacagcttcttgcccagcttcgcggcgtcggcggccagcttcacgcgctccttctccaggcgggcgcgctcggcttcaaagtccaccaggcccgacagcacgatgtacacctcgaggcccggcgccagcgtcacgctggactcggccggcttctccacgtcggcggccatctgaagcgaggccacattgcccatgccctcgatcagcccgcgctgcgcctccaagcgcgcgatgtcgtcctcccccgctttcacggccacggccagctgcgtcttcggcgagatgccgtagcgggcgcgcgtgctgcggatggccgataccgtctcgcacaccatgtcgatggcacgctcggcatccgcgtccacgtactgcgccagcgcatcggcatcgggccatgcggccacgatgaggtacggcgcctccgtgcggtcgataggcagctgctgatagatctcttccgtcacgaacggcatgatggggtgcagcaggcgcagcgcctggtcgagcacgaacacgaggttacgctggcacgccgcgcgatcctcaggcgagccgttcaggcgcgccttcgaaaactcgatgtaccagtcgcagaactcgttccagaagaacgagaacagctcgcgcgtgatctcgccgaactcgaagttcccgtacgcctcgtcgacgcgggccacgagccccgccaggcgcgagaatatccaacggtcggccggcgtcacgggctcgggcgcgcccggcacgtagtcgtcgaggttcatcgtcacgaagcgcgccgcgttgcggatcttgttcgcgaaattgcgcgagctttccagcttcgcctcgttgaacttgaggtcctgcgcacccgtcacctgcatgagcaggccgaagcgcatgccgtcggctccgtagtcctccatgaggcgcagcgggtccacgccgttgccgcggctcttcgacatgggcttgccgtcggcggccatcaccgtgggatggatgatgacgtgctcgaacgggatgcgatcggtgcagtacatggatgccatcaccatgcgcgccacccacaagcccatgatgtcgcgagccgtggacagcacctgggtgggatacgcctgcttcatctgcggcgcgtccatgccctcctcggtccagcccatcgtggcgaacggccacagctgcgacgagaaccacgtgtccagcacgtcctcgtcctggcgcacgggcttcccgcacacggggcacgtctcgacgtcctccaccgacgcgtcctcccagccgcactcgtcgcagtagaacatggggatgcgatggccccaccacagctggcgcgagatgcaccagtccttgaggttggccagccagtcgaggtacacctgcttccagcgctcggggtggaactggatggagccgtcctccaccacgcgcgccgcgtcctgcttgaggccgtcgacggccacgaaccactgctcggactcccagggctccagcttcgtgtggcaacggtagcacgtcataacggagtggtcgtggtcctccaccttgtccaacaggcccagctcgtcgaaagcggccaccacggcttcgcgcgcctcgtcgcggtccatgccgctgaagcggccgaagccgtcgaccacgtgcgccgtctcgtcgaagatgttgatgcgctcgaggccgttgcgctcgcccatggcccagtcgttcgggtcgtgcgcgggcgtggtcttcacgcagccggtgccgaactccatgtccacgtgccagtcggcgaagatggggatctcgcggtccaccagcggcagcttcaccgtcttgcccacgaggtgcttgaagcgctcgtccttcgggttcaccgccacgcccgtgtcgcccagcatcgtctcggggcgcgtcgtggccaccacgaggtactccaggccgtccaccggctcggtcagcgggtagcgcagatgccacagatgccccgtctcgtccacgtactcggcctcgtcatccgagatggacgtggtgcaatgcgggcaccagttcacgatgcgcttgcccttgtagatgagatcgtcgtggtaccagtccacgaacagcttgcgcacggccttcacgtacgccggctccagcgtgaagtgctcgtcttcgtagtcgcacgagcagcccatgcccttgatctggttcacgatggtggtgccgtactccttgtaccagtcgt

SEQ ID NO: 8622 - DNA, 3294 bp, Unknown
  gut microbiota DNA sequence
caccggcagcgtgccgtccgagttgtccagcacgagatccacctccgcgatgcccacgctcttgcgcgcagacgatccggcgaagatgacgtcctccatcgcctggccacgcaggtgcttcgcgttgcgttcgcccagcacccacagcacggcgtccgagatgttcgacttgcccgagccgttcggccccaccacggcgatgatgcccggctcgagcgccagcacgctgcgatcggcgaacgatttgaaacccttgaggaccagcgatttcagatacatggaacggctacccctgcttgcgctgcttcgcgcgctcgcgctcggacttcttgcgggccttctcctcggcgcgcgcggcagccttctccgccttggcctgtttggcggcctcggccttctccgcgcgagcctcgccgtccactcccaggccgaagaactcgcccaggcgggcgagcgtgctcttggcagcctggctctcggcttccttcttcgtacgacccgtgccgcgggcaagcccctggctgccggcgaacacctgcgcgacgaacgtgcggtcgtgcggcgggccttgggtctccaccagtttgtacgtgggcgtgatgccgtcttcctgcagcttctcctgcagggcgctcttgggattctcgggctcgcgcgccatgtcggccgacatgcgggggatcaacgtggcgcgcacgaaaccctccgcagcctcgattccgccgtccaagaacaacgcggccaccacggcctcgtacacgttctccagcgcggaatgcagcccgcgccgccccgtgcccgtctcggaagagccgaacacgatgacgtcggcgaagcccagtcgctcggcgacgtcggagaggctcgcgcccgacacgagcgcaaccttgatgcgggtcaggccgccttcgtccagatcatggaaccgatcgaacgcgatggtggccacgatagcgcccagaatgctgtcgcccaggaactcgaggcgttcataggagtacttgaccgatttgccctcggtggcggaaggatgcgtgatagccgaaagcagcagctgctcgtccgcgaaacggtagccgaggatttcctgcgctaccgccagttttctctgctgttcatcggtgaaggtcatggcatgctcgggctttcgttcaggctgctgacgaggtgcaggggaagggctccacgattgatcgggcatggcctactcgccctccgtcgcttcggcggcgcagggcgttgccaccgtttgcgcgattatatcagatacgccggttcgcgcgatgcgagccgtggtcagcacgccgttcttcaccgccagcgcgttggacgagccgtgccccaccagaagcgcgcccttcacgcccagaagaggggcgccgccgtacgtatcggggctcacctgcgccatgagctgcttcaagcctccttttatggccagagcgcccagcttcgtgagcggcgtggacatcatgatgctcttgagcgtcttgaacagggtcttcgacgtgccctcgatggtcttcaggcatacgttgcccgtgaagccgtcggtgatgatgacgtcgaagttcgcaggaaggatatcggagccctccgcgttgcctgcgaagttcgacagccgctccctcagcaggccgtgcgcttcttgcgcgaactgcgagcccttcgtgtcctcctcgccgatgttgagcagcgcggcgcgaggatgctcgatgccgataaccttctccgcgtagatcgacgccatctcgccgaactgtacgaggtactcgggtttgcagtcggcgttcgccccgatgtcgcacatgacgacgggtcgcacgggcgacgggatgaccgtggccagcgcagggcgggcgacgcccttgatgcgacccatcaccaacgtgcctgcggccaggcaggcaccggttgacccggcagagaagaagccttgcgccgcgccctccttcacgaggcggcagcccacgacgatggacgagtccttcttcttgcgcacggcgttcgccggatgctccgccatggcgatgacctcgctgcatgcctgcggcgtgcagcgctcgtgggcggcggcgaacggctccaccacgtcggcaggcccgcacaggacgatctcgagggcagggtcggaggcaagcgcctgggcgacgccgtcgagcaccacgccgggagcatcgtcgccccccatggcatcgacggcaacaacgaccttttcgtcagacatatcgaaaacctcactctcgcgtatcggtcagcgagaggctttgaggtacctgatattgcgccagcgcagacgcggcacagcgccgaccccttcgaggaagcatgcttcgatacgcgaagaggaaacgcgcaagggcaagatcaggtgcatcaaagcctcgcagtgtcgagcggttccgccgttcgcagaacggcggaatgcaagaaaagcctcccggcgcatcgcacgcgaagcgcgatgtgcgaggaggcttgtcaatgcgcggcggcagaacgcgcgcgcatgaacggtacgctactccgtctcgatgacttcgcggttcttgtagaagccgcagttcgggcacacgcgatgcggaagcttgacctcgccgcactgcgggcacacggaacgcgagggcgccgcgatcttgtcgttggtgctgcgacgggcgtgggtgcgggcacggcccattttgcgcttaggtactgccatgattctctatctccttctttaagccgagcgatcacgatcgctcgttctcgcttaagtaaacacgcgaaacggtatagtaccaaacgagaacccgcgccgcaagccccgatcacccgcaaaatccaatccgcacccaggtttcacaaaaccgcgccctgctccaccgggccgaactgcatctcgtagtagtgggcgtaggtgccgccgagggccagcaattgctcgtgcgtgccgcgctcggccacgcgcccgtcctccaccaccgcgatgaggtcggcaccgcgtatggtggacaggcggtgcgcgatgacgagcgtcgtgcgcccggcggacagctcctcgagcgacttctggatggcccgctcgctctcgttgtccagcgcgctcgtggcctcgtcgaggatgaggatgcgcgggtccttcaggaacacgcgcgcgatggcgatgcgctgcttctgcccgccggacaggcgggccccgcgctcgcccacgtaggtgtcgtagccgtcgggcagcccgcgcacgaatgcgtcgatgttggcgcgcttcgccgcctccacgatctcggccgtcgtggcgtcggggcgcccgta

SEQ ID NO: 8623 - DNA, 217 bp, Unknown
  gut microbiota DNA sequence
tgtatcggccgaaaccgtggcccggaaggcgagcgacatcgcccgcgacgaacgcatcgagcaggcgggcggattccgcgtgccccgtccgagcctgacgaactacctggaatccagcgtgatccccatcggcgctgtttgtgcactgctgttcttctgctattccagcctgcttgcgttcctcacgccgttcgcggccgaaaacgggctcgaaacg

SEQ ID NO: 8624 - DNA, 935 bp, Unknown
  gut microbiota DNA sequence
gtaaggtggctgctcaggctttgcaggaggcaggtgcagatgtgacagtgaccattcgtcagtacagaagcggagttgtgaatattccgctgggctgtaagcgcattaattacggtgacagaatggagtatgtgccgcagtgtgatcttgtagtgagtgcaactgcaagcccgaatttcacattaagagaagaattattccagggaatccggacaaaggatgacttgattctgatcgatctggcagttcccagagatatagagccatctgttggaaagcttcagggggtcacactttatgacatggacagcttccgtatagaggaagttcctgcagaacttcaggaaaatctggaggcagcaggcgcgatcgtaagagagcagatggatgaatttttccaatggctggatggaagagacctgatcccaagaattcaggatattaaagatgaggcagtcaatgacctgaatttaaggattgcaaagatattaaagaaaacacctatggaagaggatgacaggcagaatctggtccatgcagtggatacggcagcgggaaaagtagtaaataaactgatctttggtctgcgtgacagtctgaatcaggagattttccttgagtgtgtggcaggactggagaaaatatatgaagaataagccgtattttccaatgtttatagacttatcagataagaatatcgtggttgtaggcggcggaaacattgcaacccgtcgagtgaaaacccttttatcattcaccagaaatatcagagtcattgctccgaaggtcaccatggagatgatggagcttagcaaagccggctatgtagagctgatcacacgtccggtgaagcgtacagactttgcgatggcatatatggtgatcgcagctactaatgacagaaagttaaatgatgagatccacaggatctgcag

SEQ ID NO: 8625 - DNA, 4926 bp, Unknown
  gut microbiota DNA sequence
gccagcaaagaatgtgttgcctgaatatgtttgtgattataagaaacgagcagggttatttcaaagatctgcagatttagagtagttctttttttctgagagaaaaattaaaaatcgtttttggttcttctggagagtgattatagcgtttgggaaacatccggagaaaccattacctcagggtgtcggtaaagttctttatcaaagagagctttgagatgccctttctttttttatccaaatctttcctcttgtttacatatataaacataagaaaaaacttgacgtttaaatattacaagtgtaatatttaagaaaatacgaaaaaaggagaaataaaactatatgagaaaaacgaaaagaaaaaaacacacgaagactatcacaaaaatagttttatttagcggtatattgattggtggtggaatcggtattgtaacaataatgaatcgtaatgttcctgaaaaaagactaatggaatatatgaaatatattgaaaaaggggaatatgagcaaatgtatgccatgctggatcagaaaaaaagcagcatgaacagtaaggaagaatttatagaacgaaattctaaaatatatgaaggcattgagatgtctgatctgtccataaccgatattacagtaaaaagacaagaaaacggaaatgcggcagtttcctatacaacaaatatgcagactgctgcaggaaatgtagaatttaccaacgatgcggtattttcacatgattggacaggatatcatttaatctggcaggatcagttgatttttccagagttatctgcaacggataaagttcaggtaacgtcagaagaggcaaagagaggagatattttagacagaaatggtcgtcagttggctggagagggaactgcatcttcggtaggaattgttccgggcaggatggagaacagagaagatacaataaaaaaactggcagagtatcttggaattggagcagacgaaattgaggataagttaaaagccggttgggtaaaagcagattcttttgtaccagtagcaacaattcctaaaatacaagaggtcgatcttctgacagtgaatccggataaaactgttctggaagaaaaagaaaagcaggacacattattgaagattccaggtattatgttatctgatgtaaaagtacgaacttattatctaaaagaagctgcctctcatctggtagggtatgtacaggcggttacagccgaagatttgcaggaacataaaggggaagggtatcgtacaaacagtgtgattggaaagactggactggaaacgctttatgaaaaagaactaaaaggaacagatgggtgtgaaatctgtattgtagatgcaaatggaaataaaaaaagtgttattgcatatgagcctagaaaagatggagaagatatccatactacgattgatggtgatcttcaaagtactctttatgaacaatttaaagaagacagaggatgttctgtggctttgaatccttacacaggggaagtattggcgttggtaagtacgccatcttatgatgataatgattttgtacgtggaatggacaacagccagtggagtgcattaaatgaaaatgaagataggcctttatacaaccgctttcgccagacatggtgtcctggctcaacttttaaacctgtaattgctgcaattggattaaaagtgggggcatttactgcaaatgacgattttggaaatgagggtctggcgtggcagaaagattcctcgtggggagattatacagtgactacacttcatgattatgaacctgtgatcttgaaaaatgcgcttatttattcagataatatttattttgcaaaagcagcattaaaaattggtgcggatcaactgatgcagtctctaaatcaaataggatttaatcaggaacttccatttgatattaaaatgtcagagtcccaatattctaatatggacaagatagaaacagaaatccagcttgctgacagtgggtatggacagggacagattctggtaaatcctttgcatcttgcaagcatttatacggcttttctaaatgatggaaatatgataaagccatatcttcacgcggatggtggaagcacttccagtgaaatctggataaaagatgctttttcaccacaaattgtttcggaggttatggaggggttagagggtgtagtgaataacccggaaggaactggttatggagcatgccgggaagacattagattagcaggaaaaaccggaacagcggaactgaaagctacaaaagaagatacatctggaacagaaattggctggtttacagtttttactacagatagagatacaaagaatcctattttgctcatcagtatggtagagaatgtgaaagatattggaggaagcggttatgtggtggaaaaggataaggcgatactggatgaatatcttggtaatgaataatttttacctttaaatattacaaatgtaagaggaaaatgatatgaaaaaaatttggaaaatatttgtgggagttatttttcttgctgtctgtagtggatgtggcataaagaaagagcagaaaaagacaattgaagatacgaaagaaaaaatttacagagagtgtgaaatgctagcagaaggctatcggaacatatatgagaatgctgtgaaagaaaatgcactatatgagctgagtacaatacaaaaaagtatggattattttggaaaatatggatatgcagtaattgattcctacaatcagctggatatggttcaaagtattaaagtagatgattttttgaaaaaagcagaaaaagagaagaatggaaaaactactatatttcaagttatagcaggggatcattttatccggtatgatctgaaaaccaaacaggggaaaatagacgttgaagtaagctcttttaaatggaaagaggacacttggcaggaaacatattatcatgagtttagagctaattcatggaaatatacagaaaacgggcatttctttatagaagaatatcatccggcaggatatgatggaccgtctggatatcgggactttcgggtagcaccgttaaataaaaaatgtcgggagttgaatcgaaaatatatacttccttttggatatacacttaataaattgtttacttctaattggagtgaaaaaaattatgatggaataaatttttatgatgtttttgaccgtttactttcaatggaagaaaaaactgatgaatttaaggaaggaaagacttatgaaatcccaaaagaatcatttgaagcgatatttcaaaaatattttaatataagcgcagagatactgcagacaggaacggtatttcacacggaaacacagacatatcggtatcgaaccagaggaatcgtatatgattttgctcccacaccatatattccatatccggaagttgtttcctacatagaaaatcaagatggaacaataacactggaagtaaatgcggtatggccacaaaaagaattagatcaggcgttttgtcatagcgtaaccattcggctgttagataaagatagatttcaatatgtatccaattatgtatcaaggtcagaaatagaggttacctggtatacggaaagattatcagacgaaaagtgggaggaatgttatggagataattgatatgagtacaaaaagaaaactgaaaaagatggtgagtgttttatttattttgggatgctttttcataggaaatacaaaatgtaaaggggctgatttagaatatatttcacaggaaactgcgaattatgctgtacaagaaagaggatatgatttgccagtagatgaagtcgtgaaagaagaagctattgaagattgtaagaatgttatgaatcagatgaaagccatttatcaaaaggcggataaaggaacttcatcgaatgtagtagtttctgagacagtaatggaaaaaatgcaggaagtattaaaggaaaaaaaatgtccctgttattacatcagcgccgtattcaaatatggctaattattctaaaatggaagaatttcttttcagggcagaacaggatctgccaggagatatcgtcttatataggattaacagggatggtgggatagaaagactcaaattcaattatgatgggacagatatgtatttgttggctgcgaaagttgtttggggtatgaacgacaatccatctattgtatatgtttcgtatacaaggatagaagaatggaaatatacagaaaaaggctggtttggttatacgctatgtgttccaaaatatccggaagtatcagaagcggttgatggcagttctatgataagaattaaacctttaagtgatgaatgcagggaagtttcaaagaggtgtgtgtatttgcttggatatcaggggaataatcttttatgttctgattgggatagatctgatatggaagggttagattataatggtttatatgaatatttatatcgaatgaaatacggggagagatatgagttttcaggtaactcaagtggaattccggcagaagagtttgaaaatctgataatggagtttttgccgataacagcggagcaaattaaaaaatgggcagcatttgattcggaacatcaaacttatgactgggaacgattaggttgtttaaattatagccctacttattttggaacatctttaccggaggtcgttgaaataagagatagcggagagggaaacaatgtgctggttgttgatgctgtatgtgatacatttatatgtaatgatgccgttattacaagtgagctgactgttaagttcaacgatgataagagttttaaatatatggggaataaaattctgaataatggtacgaaagaagttcccaaatatcaatatagaataaaaagaaagaactgataacaactatcaatccttcctataatttcaagccctaattcattg

SEQ ID NO: 8626 - DNA, 278 bp, Unknown
  gut microbiota DNA sequence
gaaagtcacgagcgctgtgcaaccgccagggtggcgcggggggatcccgcggccctgacggggccatacaggcccgcgcgggaacgccctgcgcgagcgcgaccatggaggcggggatcacccggtcccattccgaacccggaagttaagcccgccatcgccgaaagtactgcagcgtcaggctgtgggaggatagggcgtcgcgctcgcggagggcgtttcggcatgcgaaggccccgcccccctcgggaggcggggccttcgcgcgttctgggggc

SEQ ID NO: 8627 - DNA, 578 bp, Unknown
  gut microbiota DNA sequence
ttcggcggcagcgcggagtactgcgaccagctggtgcccgccatcaacgagatgggcttccagtacctgggcaacgctatgaacacgggcgacggcatgaccatggcctccgccattggcgccgcgctgtacgaggatccgtgggtcatcccgaacgtcatcatgcccacgcgcacgctgacgaaggccgacgcgggcttcaagaagctgtgcgacaccggcatggaaggtgctgccacgtcgtcgaagatgctggtggactccacgggcgcgcgcttcgtgaacgaggcggctccggtgacggcgctggccacgtccatgaccgacaaccaggcggggccgtactacgtgctgttcgacagctcgaacgccgaggtggtcgcagtcatcgagaagggcctgtccacgggcgacgtgctgaagggcgtttcgatcgaggagctggccgacgcggccggcgcgccccagcttgcggcgacgttcgaggcgtaccagcaggcggcagctgcgggtgcggacgaggcgttcggcaagaaggccgacatgctggcggcgtacggcgacggcccgttctacct

SEQ ID NO: 8628 - DNA, 3220 bp, Unknown
  gut microbiota DNA sequence
cccccccgaaacacgttgtcgcccgaaagccgctgttttcacgctgaaaacgcggctttcgggcgacaacgagcatgcggaggcggccccgacgcaagccgacggggccgccaaccggctcctcttcctagcccaacagcttcttgccaagcgaagcgcggatgatgctgcggctggcgaagtgcgtgaccaggagatacgccccgtacacgatgcctgtcagcacgccggtcatcagcgcgggctcgagaaccgaaacgcccagctgcgcgagcaccgcatcgctgatgacgccgacggcgcatacggtatggcacacggccaaagcgagcggaacgaggaagtacacgagcacctgcgcgcgcagcgaccggaagatcatacggcggtcgcagccgatctcggcgagcacccggtagcgcgccaacgagtcgctggtctcggacagctgctggatggccagaatggcagccgtggcgatgaggaacacgaagccgatgtacagtgccaggtacgagatcatcatattcatgccgctcgactggacgaccacctcctcggctgtgaacgagagcgtcaccggccagggcttcgggccgaacttccaccccgaagccgccacctcggcgctgggaggagaagcctcgcccagcatctgcgcgagcagcttgtcgccttcggttcggctcgtcttgtacatgaggttgagcacggactgctcgggcacaacgccctgggcgcgcaggtcggcgatcaccgagtcggggacgatcgcctcggcgccgctcgaagcgaacgcggcgtcctccaacggctggcgccgcagctcgcccgtcgacgtcagcgtacgaccggccgcttggatggtctcgcctttgcctgcgagcgcctcggcaaggccctgcatgccgtcgagcgtgttgttcacggcgtagccgtcctcgcccacgtccaccgtgggccgacccgtcagctcggcaagcgcattgaactgcgagaccccgaccagcgagatgccctgcctgtgcatcgcctcgttctgcttatcgttgcccgtgtccttgccgtagcgatccatgatcgcgccatagctctcatcggcgtccacgtacacgtcgacctgcaccgagcgatccaccagcgcgtcccacgtcggcgaagcgtccgccagcttcgcggcgatatcccaatcgtacgcctcggcgtccgcagcgatggcggcggccttctcgtcggcgactcgctgatactcccgatcctcctcgctcatgctcgcgagcgcctcttcgtcgtggatgccgcccgcgttgaggtacacgttcgccgtgagcgtggcgtcgtacagcgtgccctcctcgacgttgccgctgaacgcgcgcgccaggcccatgcccgtggagaacaccgtgagcgagaagaacagcatgatgcataccaccgacagcgacacgaacgccgtgttcaccttgctggcgatctggcgcgtcgtgaacatggcaaggcccttgaagtagatgccgcgcgtgcgctcgatcgccgcaagcgcgaagcccgcgagcgaccagaagaataaaaacgtgcccgccaccatgagcgccgtggcccgccagaacccttcgtcgaactgcatgaggccgttgtcgacaagcgtaacgtacgaccacgcgatcacggcgacggccgcgaggaagccgacgaggctgatccaggggttgcgcacgcggaagcgcgcgttcttcgagcgggccgacaagaggtcgatgagcttgtagcgccggatggacagcgtgttgaacagccccgtcacggcgaagatgagcacgaagcagcccagcgtcagcaggaaggcgttggtcgagaacacgaatcggtactgttccatctggatgttgaacagccccgccgtgacgaacgacagcccttgcgacaacgcgaagcccaaggccaggcccacgcccagcgaaacgaggcccaccgccaccgtctccagaagcacgatgaccgacacgctggacgggttcatgcccagcatgaggtaggtgccgaactcctgcttgcgtcggcggatgaggaacccgttcgcgtacagcacgagaaagcccagcacgcaggcgatgaccacgctgaacatccccaacatctgaccggtcatctcgaacacgctggccgtggcggtatcctcaaggtcgaacaggatggactggccggtcaccgagttgaacgcgtagaacaccgccacgccgaacacgagcgtgacgaagtagatagcgtagtcgcgtaccgagcgccgaacgttgcggaaagcgagtttagccagcatcgcgcacgtcaccgcccaggaacgtcaccacttccatgatgcggttgaagaagtcgccgcggctcgtggcgccgcggcggatctcgttgaacaccgcgccgtccttgatgaacaggatacggctggcgaacgaggccgcgaacgagtcgtgcgtgaccatcatgatggtggcatgcagatcggcgttcatcatggacagggtctccagcatcaccgtggcgctgcgcgaatcgagcgcgcccgtgggctcgtcggccagcacgagcttcggatcggcgaccatggcccgcgccgcggcgatgcgctgcttctggcctccggacatctggtaggggtacttgccaagcacctcgtccacgcccaacgtgcgggcgatagcctgcacgcgaggcttgatggaggcggtggactcgcccttcaccgtcagcgccagcgcgatgttctcgaagccggtgagcgtgtccagcaggttggaatcctggaagatgaagcccaggtcgtcgcgacggaacttcgccaacgcgcgggagcgcaggcccgtgatgtcgcgcccgtcgacgaggatgtgcccgctcgtcacggtgtcgatggtggcgacgcagttcagcagcgtcgtcttgccggagcccgacggccccatgatgcccacgaactcgccgggggccacgtcgaagctgatgtcgttgatggcccgggtgacggaatcgcggttgccgtacaccttctcgatctggcgcaccgacaggatgggacgggcgccgagagacggagccgcgcctccggggcgcgccgccgtctgggtttgcggagtcgcgtagacttcggtcatgatcgtatccttcctcgcttgcaggtcttcgaccatgctacggcgcggcgcgcccgggcgccatcgaatcg

SEQ ID NO: 8629 - DNA, 2417 bp, Unknown
  gut microbiota DNA sequence
gtaggcgtactgggcctggttgatgttgtgcccgatctcgtgcgcgatgccccatccgaagtacgacccggaagccttctcgccgtcgccgtccaccgcgaccggagaacccttgccgagccccgggaccgaatcccactcgatgccgatgtggttgcccgccgcgtacatgaacgcgcccgcgaacatgcgcgtgtagcggatgttgagatgctgcgagggcagcaggttgctcttgatcacggccgcgtcggttcccgcgtcgaaggaatcggccaggcccttgtgctggtagaacagctccatcatctggtccatggcgtcgaacgaggcgagcagccgagccgcgcgctcgtcggcggtgcccgaacccgccccggccagcatctgctgggccggtaccgagtacatcatctggtcgagcatgacgtcggtggcgttcaggacgcagttcttgggatcgtagccgtagcgcaccgccgcgtttccgccggctccgtgcagcttgccgtggctctcctccaaggccggcacgtaggcctccagcgcctggacgtaggccgtggtgcgcgcgaggcgctcggccgagtcgtccacctggtacagatccagcacgggcaccgcctgggccccgctgacgcgcacgccccaatcggcggcatcgttatcgcccgtgtactccacgtacagctggccgccgtgttcgacgtcgagcgacgacaggctggggatcgttatctcgttgcggcccaccttgagcgtggcgatggtcttggacacgttgctggactccggatgctgctgcgacaccacgaggcgcagcggcgcctccttgccggtgaccgctcccttcgcgcccgtgtacaccacgatctggtcgccctcggccaccacggcgcccaagggctgccaggcgttcaggccgctgatacccaggctgcggttgtcgcgcgccgaggagatgccgttgtgcacgcgcaccgttccctcgaggccctgggttgccagcagcttgcgggcgttgtcaagctccacctgcagctccacgcggtacgggttgaactcgccgcttgccgggtcgggcgtgtccaggcgctgctgcagcgcgtccaccgccgcggaggtcacgtcgtctttcagctcgaggtgcaggtcgtcggcgtacagcgccatgatgtcgctctccaggctgtcgtaggcatggaagcgcatctcggcgaccacgacgttgcccgaggaccaggaatggcccatgccgatcctcaccttggacgaggtcacgggctgaggcagcttcgccagcacgtacttgcgcccgttctcgcccgtgcgcatctgcacgttcgcctggacggtctgccaagcgccagcgtcgtcgacgtaagagacgctgaccctgccgtaaggaacgccgtcctgaacgtcggcgaacgaaaccatgccgagcgtctggggctggtcgaacgtcaccgtgacgcccttgccgagcgcggggtaaaagccgccctcgtcccagtcggccactttgagatacgacgcgtagtcgtcgtcgaacaagccgtaggcgctttttgcctcgcccgacgtttcgtccagcgggctgtcgatcatggagccgcgcccgtaggttgccgagacgatgcggttcaggtagtcgccatccgcgttctcggtgttaaccaggcggtaagccggcagctgcgccggcttgacgttcgccgtgcgcacgacggccatgaccgaaggcgcgctctcgccgatctcgttcgcaccggtcagatacacctggtactcggtatcgtccttcaaaccgtcaacggagcaggacgtcttcgtcaggtcgggcaccttcgtgaaatcgccgccctcgtcgcccttctcacgatagaacaggttgtacgaatcggtgtcctccatgttcttccagctggccttgaaccctcgataggcgccggacagcgagatgccctcgggcgcgtcgggaaccttctcggccttcggcgtgacctggacgctgccggaccagtcgctgcgccaggcgccgttcgtggagcgaaccttgagggtgaacacggtgccgttcttgatcttctgctcgtcgaactgcgtgacggaaagcgaggtgcccgtggcgcgcttgacctcttccctgccgttcgcgctgatggagagctcgtagcccgtcacgttggtctccgccttccatgaaacggagaactgcttgctgcccgcgacggcggaaagctcgccgggaatgttcagctcgggttcggggatgcgctcctccatgttgttgaggaactccaccttggacacctcggcgaggttcgtgccgccctgcgttttggtgatgacgagcgtgaccttcttgacagcgatctggccgccgaagtccaccaccaccgtgccgttctcgt

SEQ ID NO: 8630 - DNA, 503 bp, Unknown
  gut microbiota DNA sequence
cgacctgcgccgccccatctaccgcttgacggccgcctacggccacttcggccgcgagcttcccgagttcacgtgggagcgcaccgacaaggccgacgagctgcgtaaggcctgcggcctggcgtaagcgacaaccgtagaagcatgtggcgaaccgcccggcgatcgcgccgggcggttttgcttttgcggcgcgcgggacggtgcctcggggggcgcttcgcgtgaagcgtgagcgttcggctatgcgcttggtaggtctggaagggtttctgtcccgcgttctctcccgcgcgccgtttcgtgctgccagccgggctcttcgctgttgaaccggggttagcagggaaagcggggatcgtgggcgcgaatcgatgtccgtgacaatttcggggctcgtttcgagccgtttcgggccgttcgcgccgggcttccgggaaggcgctcgacatatgcccaggtcgctgaaactcggaaccgtcgcaatatgagttcgccgaagg

SEQ ID NO: 8631 - DNA, 328 bp, Unknown
  gut microbiota DNA sequence
caccaacgatcccacatgcgagttgccgaacagcacttcgctgaagaacttgccgccttccagcagctcgtcggagctgtcgaggccgaactcgctgacgatgccgctcgacggcaccttgaagcccgaggtggaggtggcggacacgaacgagaacgacttgcccttgatgttctcgatggagtagccgctgccgctcttgtactggtcggcgtcctctttgcgcacgcagatgcggctgtagtagcaggcgccttcgaggccgccgtcctcgtcgctgttcgtgaaggcggccagcaccttcgggttcttcttgttggcctgcacg

SEQ ID NO: 8632 - DNA, 8204 bp, Unknown
  gut microbiota DNA sequence
gcctgggcgccgcacccctcggcacggcgcccagccaacaaccctacagcagcatgtcgcgcgcagcctgaagggccgcgtcgatgcccgaggcgtctttgccgccggcctgcgccatggcggcctttccgccgccgccgcccttgatgttccccgagatcgccttgatgacggcgtctgcgtcgaagcccacctccaccgcctccggcgtgccggccgccaacagcgtgggcttgccgtctttctccgtggccagcaccgcggcgcccggctggcccagacgcgcgcgcagcacgtcccacatgttgcgcatctgacccgcatcggcctccggcatgcggccgaacactaccggatagcccgcagcgctcgtctgcgcggtctcgagcaaggcgttgatgccgtcgtcggccacggcctcgcgcccacgcttcagcttcgtctgcaggtctttcaaagtcttcatgttcgatgccgtgcgctcgctcacgtcgaacaggggcacgcgcaaagactcggccgcctccttgagctcagcctccacgcgattcatgtacgcaagcgcgtcgaagctggtcacggcttcgatgcgacgcaggttcgcgcccacgctggtctcggaggttatcttaacgaagccgatttcgctcgtagccgaaacgtgggtaccgccgcacagctcctgcgaaaagccctcgatgtcgagcacgcgcacgaactcgccgtacttctcgccgaacagcgccatgacgccggcttcgcgagccgatgcgagcgacgtctcgtaggcgcgcacgggatgattctccatgatcttctggttcgccaggcgctccacctcggcgatctgttcggccgtcatggcctcgaagtgggtgaagtcgaagcgcagacggctgtcggcgacgtagctgcccgcttgcttcacatgatcgcccagcacctcgcgcagcgcccaatgcaggatgtgcgtagcggtgtggttgcggcggatacgctcgcggcgcggcacgtcgatggcggcatgcacggcatcgcccgcgctcaagcgaccgctctccaccttcacggtgtgcgcgatcaggcccttctcgggctccttcgtgtccaggaccgccacggtggcatcgtccttcgcaagcacgccggcatcgccgatctggccgcccttctcagcgtagaacggcgtagcgtccaacaccacgcgaccctcgtcgcccgcctccagcacatccacctgcacgccgtctttcacaagcgccagcacgcgcgcttcggcgtcgttcttcgtatagccgaggaattcggtggaacccacggcctcgaggatctcgttcatcacgccgccgtaggtggaccaggccgcctcggcgtccttcgtattggcagcgcgagcgcgctcgcgctgctcgtccatgcagcggccgaagccttccatatccacttcgatgccgcgctcgtcgcacagctctcgcgtgacctccacggggaagccgtacgtatcgtgcagcgtgaacgcgcggtcgcccggcagcacctcgccctcgagctcggccagcgcctcgtcgaggaacgcgcggccctggcgcaggttcgcgccgaagcgctcttcctcggacaggatgacgcgccgcgtgagctcgcggttctccacgatctcggggtacacgtgacccatgaggttcacgatctcgtcgacgtaatcgttgaggaacggcttgtcgaggcccagcagatggcccttcatcacggcgcggcgcagcagacggcgcagcacgtagccgcggccttcgttggagggcaggatgccgtcggcgatcatgaacgccacggcacggctgtgatcggccatgatgcgcagcgataggtcgatggccgcgtcctcgccgtacgtcgttccggtcagcttctcgcccaccgccacgaggctgcgcagcacgtccgtctcgtaattggactggacgccctgcaggatggccgcgatgcgctcgaggcccatgccggtgtcgatgttcttcttcggaaggggcacgaacgtgccgtcttcctgtccgtcgtactgggtgaacacgaggttccagtactccaggaagcggtcgcagtcgcaaccaggcgcgcagtcggggctgccgcagccgaagtcctcgccctgatcgaagtagatctccgagcaggggccgcaggggcccgtaggcccggcacgccagaagttgtcatcctcgcccaggcgcgagatatggtcgtcgggcacgcccagcttcttccagatctcgatggtctcgtcgtcgtcgagatacacggtgaagtacaggcgctcggccggcaggcccagcacctcggtggagaattcgtacgcccacgcgcacatctcctccttgaagtattcgccgaagctgaagttgcccaacatctcgaagaagctctggtgacggcccgtggtgccgatgatgtcgatgtcgttcgtgcgcacgcacttctgcaccgtcgtcgtgccgatgtagggggcttcgaggtgcttctgctgcaggaaatacggcttgaactgcaccatgccggcgctcgtcagcaacaacgacgggtcgtcgggaatgagcgaggacgagggccagcgcttgcagcccttctcctcgaaaaagctcaggtacttctcgcggatctccgcgctggtcatgtacttcatagtcgtgtctttctatctcctcgggggccgcctcgcacgacccgctgctccactaacgacgtgcgcccgcacgcctccacgcgctcaggccaacaaagcccgatcaacgcttcttacgatgctgcgccttctgatcggcctcggccttgcgctgctcgacgcgctcgaacgccgccgagatgtcgggatgcggcgacgtggcatcggcgatgggatcgagcgtgccgtccgaggcggtggtgccttggaagaacacgccgtctgcgcttaccagctgccgccccgtgcgcttttcgaaataatacacgaaaaccgacttcgcaaccgcgacggcgggaatggaagccaacatacccacaagcgagcccgtgaagccgctcatagcgccgcctatagcggagcccgccatcaaagcgatgagggtgagcgccggatgaacgtccaccgagttcgccatgatcttcggcgaaataaacgtatagacgatctgctggatggcgatggtgccgccgagcgcgatgaccgcgatccaggggctgacgaacacgcccacgatggccgcaagcgcaccgccgagccacgggcccacgatggggatgatgttcaacaggccggcgatgccgccgagcgccgcgtagttcgggatgccgatggcgccgaacagaacgacgcagcccacgccgatgatggcgcactgcaaaagcgtgcccttgatgtagccgcccatgacgcgcgtgaacgtgacgtgcagcatttccagatcctcgtggcgcttcgggttgacgaggcgcatgcattcgcgtccaagctgcggaagctccatgaggatccagaaagccaccaccagcgcaaacccgagcgcaacgaacgtgttgaccagacccgtcccgatggcgaccacgccgttggcgctatcgcgggcgaacgtcgaagcccatgagacgatggcgtccagcgcattgttgatccacgtttgcaccgtgtcgttctgaagcacgtcggcgtagcgcgtgtacaggtcgttgccccacccggcgatggtctgaacgtagcccggaatgctctcgatgaggttggtgaactggtcgcccacgccgaacgccggcgagaacatgagaagccccaccaaagccagaacaacgaacatcaggacgtaggcgatcgtcgtgccggccacgcgtggaacgcccagtttctccagcttgttcaccggtcctcgcaggcagaatacgatgacgatggaccagatgacgatgccgataggcacgctcaaaatattgaacaggtaaacgagaacgcccgtgagcagaatgccgcccacgatcgtccagactatgagaaagcttcgcttcgctttgtcggttttcgtcgcttcggagctgggagtctccaccgagtcgccctttcgtgccgtgtatgctgtcgttacttgccctggttcgctttttcgtctgcgtcgtacgtgaagtactgctgcgcagctgcggcatcggcgttcgcggcggtagccacggcatcggccatggtggcggcgacttcggacgtcttatcggcggcgacgcgtttggcttctgccttctcgtctcgctcggcacgctgctcggcgcgttgctcgcgctggtcggcaacggcctccttcgcggccgcgaccgaggtggtcacgacgcccttgacgacgtcggcggtcgaaacgggcacttcggtgccgcgtccgctcgcaccatgggaggcggagcgctcggctttcgcctggccgagggcaaccgactcgtcgctggcgcggcgcgacttgaacgcgttgcgcacgcgcgaggtcacgttgttcaccaattccaccggagcgttggtcaccgtgtccaccgcttcgacggccgaggccaccgagtcggtgatctcgttcacatcttcgagaatctgatcgacgcgcatgatctcgaggttggcggcatcgaccgtcagcgacacacgctccaccagcggatccaccttcgccgcgacgggctcgagcgacgccgtgatacgctccacgcttgccagcgtaggctcgacccgcctctgcagatcgtcgaccgtcttgcgtgtcttgcgcacggtcatgacaagctcgatgacgagccacaccagcaccgcgcccacgatcacatagaccaccggcaacgctatgctgagaatttcgctgatatccaccgtatgcctcctgtttccgaagccattactatagcacgagcaccttggatgatatacaggccgaggtcaacttttcaccctgcttccacaggagtagacaatcggttaccttccgcgcgacgtggggttttctccggaatccagacggtctcgcgcgaacgtgtcgctgcggtaggcctcccagccgcgatcgctcgaccggtagaagcagccgcgctccaaaccgtcgggcaggtagcgctggctcacccagccgctggggtagctgtgcggatacttgtactcgccgtagttctcggatccggggcggtgccgatcgcgcagatggtcgggcacgttgcgagacggcccgttgcgcacctcgttcagcgcggcatcgatgcccgcctccgccgcgttgctcttgggcgcgagcgccaggtagatggcagcctgcgccaggttgatgcggcactcgggatagccgatgacctcggccgacttgaacgcggcttcagcgatgagcagcgcctgcggatcggcgttgccgatgtcctccgacgcggcaatgaacatgcggcgcgcgatgaacttcgggtcttctcccccatcgatcatgcgggcgagccagtacagcgcggcatcggggtcgctgccgcgcatggacttgatgaacgccgagatgacgtcgtagtgcatgtccttgttcttgtcgtagggcagcgagcgatgcggcgtggccgcgcgcacgttgccctcggtgatcttcgcgggcttcttcgaggtgccgggctgcaccataccggcggcaagctccaacgtggtgagcgccgcgcgcccgtcgccgcccgccagcagcacgatggcgtcgcgcgctttggcatccaaccgatagcggccgcccaggccgcgctcgtcgaccagcgcacgctccacgaggctgacgatctcctcgtcggacagcccgtgcagctccaccacgcgcgagcggctgatcagcgccgagttaacctcgaagaaggggttctccgttgtggctcccaccagcaccagcacgcgatcctccacggcgtgcagcagcgcgtcctgctggctgcggttgaagcggtggatctcgtcgacgaacaggatggtgcgcaaaccgaacgccgacaggcgcttgtcggcggcatcgatttcgcggcgcagatccgaaaccgtgccgccgatggccgacacctccacgaacgtagccttcgtcgtctcggcgatgacgtgcgcgagcgaggtcttgcccgtgcccgccgggccgaacaggatgaccgagctcaactggtcctgctcgatggcgttgcgcagccacgagccggggcccaccgcctcgtcctggccgaccacttcctcgagcgtgcgcggacgcatgcgcaccgccaagggcgccacttccgacttccgctcgttttccatttcggtaaataaggtatccatgccatatatcgtatcatgcgaacgcttgtttgcctagcggacgttgcgttgtcgcccgaaaaactcggaatcgcgcccgaaaacgaggccttcgggcgacaacgcactcccgtcctcgcattccgtcgctcgatccgcagccgctcggcatgtagaagaccgggttgtgtaatcggcgaaacaaccggatgtcaagtctttattttaacgatgctacccatatactcaaaagcaggtcctgccctcgtagccatactttgcgatggaccgatgctgatacatgagggagctcaagatcgcgtgtgaaatggggattcgtgtccgttgacacgaaagccaggaagcgggctgcgagcacccaccttttaaggtgggttcatccttctggccgggggtagggcttccaatgacgcacgaaggggctgcagttcaaaactgaactgcgccccggttcttggacaaggaaaataaaggtggctatgctgctaaggactggttccggaattcctccggggtcagtcctttcagtttaacctgccttcgcctcgtgttccagtggacgatgtacgcctcgagcctctccttgaactcctcgaagctctcgaagctctgcccgcggaagaactcgtccttgatatggccgaagacctgctcggtcgcgccgttgtcgatgcagttgccctttctcgacatgctctggacgatgcccgcctcctcgagcgtcttgcaataaccgtcgtgctggtactgccatcccatgtcggagtgcatgaccgggctcgcggcctccggcatcttcgccagcaggccttccagcatctccttttgctgcgccatgttcgcagaccgcgatatgctccaggacacgatctccttgctgccgaagtcgtacgctggggcaaagtaggccctgccccacggggccttgaactcggtgacgtccgtgccgagcttctgccagggttcgtcggctgagaagtccctgtccaggacgttgtcgaacgccctgccgacaacgcctttgaacgagttgtacctgtggtagtcgctctcgcgccggatgccgcagctgatgcccatctcgtgcatgatcttcagtgcggtcttgtcggctatcgccacgtcctcctcggcgcgcagggccatggcgacctgcctgtgtccgcagccgttggccgtgcgggagaacacctccgccaccttctcccatagctccggcctcgtcggcctcggcgggtgcgagcgggcgcggtagtaagtcgatctcgggagcccggcggctgccaacaggtcggaaagagcgtggccttgccctgaaagcatctcgatcacttgggacttctcccagctcgagacttctccgcctccagggcgcggactttttttaagtaggcgttctcggcttcgagcctgcgcacgcgcgcctcgagctcttgctcgcgcgtcttgggcgcgctttgagccgcagatcccttcggcctgcccttgggcttgggcctgagagcgtcggccccgccttcgcggtagagccggcaccaggagtcgagcggggtcctcgacgcgatgccgaaggcggccatggcctcgggcttgcccatcccctcgtccacgacggcccgagctgcggcgaccttcgtctcccaagcgtatctcgttttccggctacccatgcagagcagcacctcgcttccgaccgacctgtacgtcagaagccatttttccacgatgctggccgacatgcaaagcctcgcggcgacgatgtccctgccgtacccctcgtcgaacagctcgaccgctagttcgcgcatcttcctgtcatgcttcggcggcataaagaagcctcccatctctcgaactttactttcttgtccaagaaatgggaggcagttca

SEQ ID NO: 8633 - DNA, 190 bp, Unknown
  gut microbiota DNA sequence
gggctggttctgcaagtttttcgacttcgtggcaaaccgtttgcaagcaccggttttctcaccaggcgttttgcgtcggcatcgggaaggagcgactgggcgttgcgaagcgtcgaggacaaaacccctggtcgtgaatgatggcttatgccacgaagtcgaaaaacttgcacgggccgccctatttgct

SEQ ID NO: 8634 - DNA, 113 bp, Unknown
  gut microbiota DNA sequence
atgcaagcacgatgcgcacgcgggatgcaagaggcgcgtctgctcaacttcgtcggcgccgagatcgagcgtcacgcggctgcaaacgtttcgccagcgctggttttcgggct

SEQ ID NO: 8635 - DNA, 118 bp, Unknown
  gut microbiota DNA sequence
acgtcggcatcgggaaggagcgactgggcgttgcgaagcgtcgagaacaaaacccctggtcgtgaatgatggcttatgccacgaagtcgaaaaacttgcacgggccgccctatttgct

SEQ ID NO: 8636 - DNA, 180 bp, Unknown
  gut microbiota DNA sequence
ctgcaagcacgatgcgcacgcgggacgcaagaggcgcgtccgctcaacttcgtcggcgccgagatcgagcgtcacgcggctgcaaacgtttcgccagcgctggttttcgggctggttctgcaagtttttcgacttcgtggcaaaccgtttgcaagcaccggttttctcaccaggcgtttt

SEQ ID NO: 8637 - DNA, 1570 bp, Unknown
  gut microbiota DNA sequence
gctgacgcgactttcgattgctgctacccgtgccaaaccttctcgaccgtagcgttcggctcgccagcacaaatgtttcacgtgaaacatcggacagaacggaacgcagggggatgggatccgccgttgaaccgcaaccgacacgaccgctccccgccgggctctgagctgagctgcgccgatgtcggcgcgacggctaccgaccgtcagaaccgcgcgggcgctgcggaaggcgtggacttcgcaggctggggcggcttgcatggacgagcccccggcttcgggagaagccgggggctcggacgatggcgcatatgcgcggcggttaaacccgtctgcgatatttagcggcagcagcactcgtgggctttgcgacccttcttcttgccgttgatgcccttgtccttcatcgagaggatgagcttctcggtgatggcgttcagctgggcgatctcctcctcggacaggcatccgatgatgtcgtcagccgtcttgtcgttcgcggcgacgcgcttttgagcgacctcgcgaccctcgtcggtgagcttcacggcgtaggtacgctcgccttcggcgtcctcgatggtgacgtagccgttgcgctcggccttcttcacgatatccttgagctcgctgcggttgagaccgagaatcttcaccagctcgcgctgagtggtgccgtcgttgtcgacgagggcgttcagcagcgcgccctggccgcgcttgtagcttttcgggccgttcttgtgaaaggcgaggcggacgagcttgctggccttcttgagctgcgcgagggtctgagatgcctggttcatggagggtccttctctcttcgtattcatctcttacggagcaactatagaacctcacgcacagcataaaaagattatccaaaaatattcattgaataattatctttcgaggtaaatacacttaattatattattcatgaataagtatcaatgcaaacaatccgacaccttctcgtcgagggcgacggcgaacggtcggacgtcgacctccacagtgcctgcattcgccacgctaaccaacagatttccgcgcacgaactgctgggcggctcgattcccataggagacgtcgccgagctggggcacaaccgagggcggcaccagagaggtgcaattgtagaaaccggccagcagctcccgcttcgcgtcgtcgaacgaggaagcagcgaagacatcaaccatcaggcggcagtcgtcgtcgcgatggtagaagctgcggtacgaatggcgcgcgccgggcaacgcgtcgcgccatacgaggcgaaaccccgctccatcaaacaaggcatccggtatgacgaaccgctcgcagcggccgtcgagctccgcgcggcgcggccagcgatcagatccgtacagctgggaaagagcgtttacgtccatgatccatccttccttacggcatagccggacgacgggtctcgctcgaccaaacgtaggcacaccttccaacacccgccgcgtcattcgttgcaaaatgctcccgataggaggatcgcgccgtgatcgtacgcgggataggctcggtatcgtcgaag

SEQ ID NO: 8638 - DNA, 1116 bp, Unknown
  gut microbiota DNA sequence
actcgaccaaacgtaggcacaccttccaacacccgccgcgtcgttcgttgcaaaatgctcccgataggaggatcgcgccgtgatcgtacgcgggataggctcggtatcgtcgaagtcggagaagttcatgccgttcgacagcacaggatctcgcttgctcgccgaagagggcgtatcagacccgttgagcgtgcaacatgcgtcgtacaccgcacggtcttgattgttcgtcgtcgccgctttcctggatacggccacttcatgataggtgaacctgccatcttgccagaccttcttgccgatcgatttcaccttcaagaacgtgaattgctgcttgttgctcggcgaaggatcctccatgcgcgcttcgtgcaagtcgcagcccaacgcgttggcgaacgtggtcacgatgatcgcgcagtccgtgcagttgaccagagaagaggtttgcctcaagaaattgcccaacaggaagtagcccgtgttcgtgcagtagtaggatcgcccccatcccgacgtatcgtattcgaggcccagcccttcgttcacctttcgctcgatcgtgcccgccgcttcggcgggcgtcttcttccccgacgcccaagagcaggccttttcgagcagcgaaacccacggatactgggaggatccgttgcggctgagccacggctcgttcgggtacgacagcaacgtatacattacatgcttcgtagtggacatcttcttccatccgccctgatagtagcactgccactccagctgcagctcgtgcttgcccacgcccttgtttgccagcgcgtgacgaggaaacgccaaagtcgcgcccgaggcccgcccgtatctgaacgtcaccgcgatctcgtcggaatcgccgagcaacgtcgatcggctcttgtcgacggcacgcactttcacggaagtcaatgaagggtcggagcacgtgaggttcgccttgatcgtgatcttctttcccttgaccgcctcgatgcagtaggcgcacgggtcgcttttgctgctatcccactcgggcttggacacgagctgggtcccgttccaagccagcgcgatggcgtcggcttcgcccgtaggcagcggaacagtgctcgtcaccgcatg

SEQ ID NO: 8639 - DNA, 844 bp, Unknown
  gut microbiota DNA sequence
gacgaccagcgacacctgctcgggcgtgccgaactcggcgacgtcggccgtggccagcatggcggtcatgaacggcgtcatgcagccggtgcggtggtacagcgtttcggtcatgaggcccagcgtgagcttgtcgcacgggatgccgccgcattcctcgggcaggcccatgaaggcgaacccggcgtcgcggtacgcctcgccgatctcgtcggggatgccgtggttctcgtacatggcgttcacggtgtcctcgtcgaagtacctctcggcgaattcctggatgctctcgatcagcagttcctgatcgacggtcaggctgaaatccatagtcaacgctccttctctgtgcagatcgtccgcagcgctcgtcctgcgcgcacgaccccgtccgtccgtgtccccgcgaaacgggagagggggtgccgcgcccgtttcgttcgagctgtcgcttcgtacagtttgcacccatattcgcgttggtgtccaataggttcttttcagtgaatcgacggccgattcataggttcctcctatcgatagcgccatgcaaccggacaaagccgttggtatgctggtggcatagagggtgtatgaactggtaaaatatgcaatattgcagcaggatgaagaaacagttgatccagggggaatcgacggcagaaggggaaccatagccaaaacctatcctttggcaaatgaatcatcatcgattacctattggacaaaatattcgtttagggtgcaaactgaggccaacgcggttgccactcgccgacacgacggggaagcagcgcgaaaccgacagtctggcaagacgttgaaggaggatgtatgagcaagc

SEQ ID NO: 8640 - DNA, 433 bp, Unknown
  gut microbiota DNA sequence
cacgatggggcttgaggacggcggttgcgcgcgcaaccatcgcgccgccgtgttcgtggcggcgttggtggcaacggcgtgctgcttctcgctggtccccggcgacaccctcgccgggtcgctcgcgcagggcgcggcgctagctgcggtcgcgcttgcggctgtggcggcatcgcggccgcgggctttgcgcgcgccgcgcctttgcgacgggcgcggtttgctcgcgtgggccttgtacgtgctggccgtgggtttggctgtgggcctcgcgtcgctggtcgtgcaaccgcaaggggccgctttggacgcctccccgttgcacgtgatgcaagtggtcgcgctttgcctcctgaccgctgtgttcgaggagggcgtcttccgggtgctggcgctcgatgcgttcgctccggcgttgggaggaggccgacgc

SEQ ID NO: 8641 - DNA, 1418 bp, Unknown
  gut microbiota DNA sequence
catggcgcgcccgcgtaaagaccaggaaggccccaccgccgtcgagcgcatggaggaggcgttctgggagatcctcgccgagaaaccgtacgcccagatcaccgtcggcgagatcgccaagcgggcgcaggtcaacaagaacgcgttctactaccatttcgacggcttgggcgcgcttgccgcgcaggcgctggacagcatgctcccgcgcgagatggcgcgcatgttgctgatgaacggagggccttcgaaaggcatcgacgagatcgaggcgaacgccttgctgcgcaaccccgacctgaaaaagcggatcgaccgtgcccttctggtcgtcggcaagaacggatcgagcgagcttgtggccacgctgaagaacctggtcatgcatacctggttcgacctgttccatgtcgatgaaacgcgtttgagcagcgaagccatggtggtagtgaggttcaccttgggcggcctcgtcgagatcatgagcgacgaagcctgccgcggcgaccacgcgaacccgctccaggccatactgagctcgggtgtcgcgaccaacgcgtcggcgaacgtcgtggcgacgttgcgcgccgccaccgacgagcacctgcgcgaaaacgccgatgccgcaggcgacggcgaacgcagttaagccatagcctgcttgacggcggcgagcaggtcgtcgtattcctcgaacgcgggcaggtcggggttctctgccttgatggaatcggggctgcggaacaggaagcccgccttgctggctctgatcatccccaggtcgttatggctgtcgcccgccgcgatggtgtcgaagccgcaggactgcagcgcgcgcacggtggtcagcttcgattcggggcagcgcatgcgaaagcccgcgatggtgccgtcgtcagccacctccagctcgttgcagaacagcgccggccagcccagcttcgccatgaggggctgggcgaactgggtgaacgtgtcgctgatgatgacggcctgggtcgtggcgcgcagctcgtcgaggaagtccttcgcccccggcaaggggtcgatgcgcgcgatggtctcctggatctccttgaggcccaggccatgctggcgcaggatgtccagacggaagtccatgagcttgccgtagtcgggctcgtcgcgagtcgtgcgcgtcagctccggaatgccgctctcctcggcgaacgcgatccagatctcgggcaccagcacgccttccaggtccaggcaggtaatgtacatcgtgtcgtctcccttcggccgcgcacgcggcatctcgcaacaggcttgcagcaacgccatgccatcatacccgcaaccgccgcgcagcgcatcccgcaacgctttgtttctttacggcggggccgacgccgtggttcaatggttgcgcaagccaacgacgaaaggacccc

SEQ ID NO: 8642 - DNA, 1550 bp, Unknown
  gut microbiota DNA sequence
cgttttcgagcgagagttccagaacctgttcgccgatctctgatcgaaggcttcgacgaagcttgccggtccttccttcacccgctgttcctgcgctccgcttctcgcgcccgtgctcgtgccctccgcgttcgatcccgctcccgcgctcccgctcctgcttcctcgcgctcgcgcaccctgcgttcgccccggccacccgcacccgagctccccacgcccgcgtccaattactctggatccgcgtttgcgccccctcctcgcggcccgcgctcgattccgctacctggatccaggtccgcacccgcgctccccacgcccgcgtccaattcctctgggttcgcgttttgcgctcgattccgcgggatctgcgttcgagcccgctgcccgggtctgcctcgccgttcagttctcctgcgtcgcccggctcgtgggggcggtgcgcatcccggtcagccggaatgtttcacgtgaaacatccgtacgcgttggagggggggcgcaggatgggacccgtgccggcgagcgccctgcgacggatcgtttccctgcgcatggaagagaatgctcgctatgcacgattcttctccctcgccatttcttccgacctggtgtttccctcctcgcctccgtcggcaggccccgataatcgtgcatagcgagcattctctgccgccccgcttcccggccttctgcgggcgatgccggcgcgagcccgttcgggccgaacgcggcggccggcgccccctcggctggcgcccccccgactggcgccccccgactggcgcggcttccccgacctcctcccggactggcgcgcaggttcccaatcctgatccttggccgccgtagtgtccctgcccggctcgtgggggcggcgcgcatcccggtcagccgggatgtttcacgtgaaacatccgttcgcatcctttctccaaaaaccctcttgacttggagtccgctcgaagccctatgatgataggcgaacccatcgagaggagcatcattgagaccggaattcgaaaacacgccgaagctgggcttcggctgcatgcgcctgccgttgcttgatcccgctgaccagcagagcatcgacttggagcagtttaagcagatggtggacgcgttcatcgaaggcggcggcacgtacttcgacaccgcgttcgtctaccacgagggcgcgtccgagaaggcactgaaagaggcgctggtgaagcgctacccgcgcgacgcgtacacggtggccacgaagtgcctggcctgggccgcgcccagcgccgaagaggcgaaaagcaacctggccacgtcgcttgagcgcatggggctggactacgtggacttctacctgctgcacaatgtgggcggcgagcgcacggccaagttcgacgcgtacggcatgtgggacttcgcgctggatgccaaggagcgcggcctcatcaggaacgtcggcttctccatgcacgacggcgccgatgcgctggacgcgctgctgacggcgcatccgcagatggacttcgtgcagctgcaggtgaactacctcgactgggacg

SEQ ID NO: 8643 - DNA, 13568 bp, Unknown
  gut microbiota DNA sequence
cgtaggcggcgagcgcacggccaagttcgacgcgtacggcatgtgggacttcgcgctggatgcgaaggagcgcggcctcatcaggaacgtcggtttctccatgcacgacggggccgacgcgttggacgcgctgctgacggcgcatccgcagatggacttcgtgcagctgcaggtgaactacctcgactgggacgacccggtggtggaggcgcgccgctgcatggaggtggccgcgaagcacggcgtgcccgtggtcatcatggagcccgcgcgcggcggccgcctggtggagctgccccagcgcgtggccgacgtgctgcgcgcggcgaaccccgacgccagcctggcctcgtgggcgtatcgcttctgctgcaaccagccgaacgtgctcaccgtgctctcgggcatgtcgaacctggaccaagtgcgccagaacgtggccgactaccaggcgaaccgcccgttctcggccgaggagcagcaggcgctggacgcggccgtcgaaacgctgcgcggcatggccagcgtgccgtgcacgaactgccgctactgcgtgaaggactgcccgcagggcgtggtgatacccaccatcctgggcctgctgaacctggagcttatgaccgagaaccgcgatttcgcgaagggcctttactcgtggcaggccgcccctgggcctgcctcgtcctgcatcgcctgcggcgcctgcgaagcgatgtgccctcaaggcatcgacatcgtccatcagctggaagtggcggccgagcacttcgagggatagccgccgccccgctcgggcaaagcccgcagcccgaggttcgcgagcgcgcggcccgcgagccgcgagccctggttcgcagcccgtgagcccagcccgaagccgtgcgccgcgagccgcaagccctagcccgcgagccccaacccgaagccgcgcgccgcgagcccgtgagcctgcagcccggaccctgcgtgcctgggctccgcgaacctcgagctcgcagccctaacccaaaggcccgctccttcgcaagcgcgaacggatgtttcacgtgaaacatctcgagcgaggcagggcgaacgtggtcggtcgatgccgccgtcctcctgcgtttcggctcgctcatcggctcgttcgcggccgctttacctgaacctttctcgttcctgatgccccctttgctcaaacttgggggcatctttacgcgcgccttccttcgtccttaccttcctttcttacgatggttctcgcacgttggccgcagggtcaactcgtgccgaagacgaatgcgatcccggcgattgcgccggggatacgagaggaacgcaactatggcagaagggtttttgagcaggcgccagttcgtggccggcagcgcggcgctggcgatggcgggcatgttcggcgctttgacgggctgcacggccggcggctccggcgcggctgcgggcgcggacacggcttcggcctccaccggcggcgacgcagcctcttccaccgatcccatcaccatggtgtggctgcccgacaactcctcggccgacctcacctcctcgcgcgaggccatcggcgcggccatcacggcggcatgcggccgcgaggcgaatctgctgaccaccaccgactacaacgtggccatcgagtccatcgcgtcgggcaaggcgcagatggcgctgttgggccccgagggctacgtgcaggccaacaagaagaacccgaaggtgctggccgccttcacgaacagcgacgaggacggcggcctcgacggcgcctgctactacagccgcatctgcgtgcgcaaagaagacgccgaccagtacaaaaacggcggtagcttctccatcgagaacatcgagggcaagtcgttctcgttcgtgtccgccacgtccacctcgggcttcaaggtgccgtcgagcggcatcgtcaccgagttcggcctctacagctctgacgagctgctggaaggcggcaagttcttcagcgaagtgctgttcggcaactcgcatgtgggatcgttggtgaatctgctgtccggcgatgccgatgcggccgcgttcgacgatgtggacgtggatatgtacctcgacctcgtgtccggcgaggccaacagcatcggcgcggtgtacaaggccaaggacgacgccgaggctcccgtggactcggtgcgcggcaaggaattcaccatcatcgccatcacgccggtgctgaactcgcccatctgcttcaacgaggaagccatctccgacgacgaccgcacgaagatcatcgactacttctgctccgataaggtagccaacgacaaggccatcttcatcgatcccgaggacgagagcgccaagggcctgttcgagaaggattccgagaagacctgcttcgtgaagaccgacgatgcctggtacgagcccatccgcaaactgggcgggactgcgtaatgagcgaggtgctaggaacaccttcggtcgagcggcagggcttcgagccgctgctcctccttgagggcgtaacgaaaagctacgacgggtggtcgaaggcgcttgacgacgtgtcgctttccgtggcgcgcggcgaattcgtcagcatcatcggctgctcgggcgcgggcaaatccacgttgttgcgctgcgtgaaccgcctaatcgaccccacgcagggcagcgtcgtcttcgacggcgacgacgtgacgcacgtgcgcggacgggcgctgcgccagacgcgtcgccgcatcgccatggtgttccagcactacaacctggtgtaccgtgccaccgccatcgagaacgtgctgcaggggcgcttgggctacaagtccgccgtcgccggcatgctgggtctgttcagcgaggacgagaagcgccgtgcgttcgagattctcgaccaggtgggtctggccgacttcgcgtacgcgcgcaccgaccagctgtccggcggacagaagcagcgcgtaggcatcgcccgggcgctcgtgcaggacccgctgctcatgctggccgacgagcccatcgccagcctcgacccgaagtcatcgcgcacggtgatggagcacctgcgttgggcggccgacgagctgggcgtggcgtgcctggctaacttgcaccaagttgacttcgccatggaattctccgatcgtatcgtggcgctgaagaagggccgcgtcgtgttcgacggcgcgccgcacctgttggacgaggccgccatcgccgacatatacggcacgaacgaggaagccgaagccggaagcgacttcggcgaacgaagcgttcggcaggtcggcgagctatcgagctctcgaacgcgcgaggcggatccagaaaggctcggaaaagcggaggcgaaggattcctcctcgccggaggtggcggcatgaccgagcgtgttctgcagtcggccggcttcctttcgcgtctgcgcggcaggcgcgcggcgccgcgcggcgcctacgacccgtcgttctttctgcggcgcacggcggccgtcgtcggcatggcgctcgtgttcgtggcgctgggcgcgctgtcgggcacctatgtcggcttcgatttcatgcaggcaatcctcgacgtcccgggcgggctcgtttggatggcgacgcaattcgtcccttcccttacctccctccagaagctggacaccatccttcccgccttgggttcgacgattctcgcctcgatcgcctccagttgcacggcggcggttctggcgtatatctgcgcggtgctgggctcgcgatcggtgggggtgggtgggccgtttcccctcatcgtgcgggccgtcgcgtcgctgttccgcaacatcccggtggtggcctgggcgttcatcctgctgttctcgttcaagcagagcgagttcaccgggttcttcgcgctgttcctcacaagcttcggttacctgacgcgctgttttctggagagcatcgacgagatgagcgcgggtcccgtggaggctctgcgcgcctccggggcgacctacggccagattgtggctcaggcggtcgtccccatgagcatcacgtcggtgatcagctgggtcatgtacatgatcgagacgaacatccgcgacgccacgctcatcggcctgctcacaggcacgggcatcggatttgtgttcgacgtgtattacaaaagcttccgctacgacatcgccgggctggtcatcctatccatcgtcctcgtggtcatcgcctgcgagctaacctcgaacttcgtgaggaggaaggtcatatgatggcgaatgccgacaaagtggctgccgaagcgaacgcggcggccatcgccgaggacgtcggcatcgtgcagggcgcctcggccgacgcgctcggaataggcgccggtgctgcggaaaccctcgatggcgatacgaacgacctgtgtggcatgggcgcgcgcacgtcgcgctcggggaagatcaaggtgcatgtggccagcaagtcgaccgtggcgctgtacgttgtgctgagcgtgctggcagccatcaccgtgttcgcgcttgtggtgatggactacggcaaagtgtcgtttcccgcagcgatggccgcggccgtggaagacttcgtcaccatgatgacgcagccggggctgggcgggcacttcacgctgcccgacgtgatcgaaggtctgttcgtgtcgctggcgctggcgcttctgaccacgttcatcggcgcggtgatcgcgttcgtgctgggtttgctggcggcctgcaacctgtccagcaagggcatgagcaacgccatcaaggtgttcatgagcgtggcgcgcgccgtgcccaccattttgtgggtgctcgtgttctcggtggccatcggcctggggccggaggcggctgtcacaggccttttgttccacagcgtggcgtacctggtgaaggcgtactcggaaagcttcgaggaagtggacgccggcgtgctggaagcgctgcgcgccagcggtgcgtcgtggtggcaggtagtgttccagggcgtggtgcccgagaaggtgaacgagatgctgtcgtggacgttcatccgcttcgagatcaacttcgtcaacgccgtggccgtgggcgccgtggcgggcgcgggcggcattggctaccagctgttcctggccggtagcttctactacaacatccacgaggtggggctgatcgtgtacttgtgcctggcggtggccgtggtgctggaagtggcggccacgcagctgcgcaagcgctacatcgtgcagcactgatttgtcttgcgagcgggagggcctgggggctgcggggcccggggcgatgcccagtcgctcaaacagtcctcgcttcgctgcgaaactcgcttggtgggcaccaccccgggccccgcagcccccaggcctcttgcatgttgaaacgatcgttctgcgcggggcgcttgcgcggattcgcggccggtgtatgaagagagaaaaactcagatgggagtggtgttttgttgaaacggtatgagcgtactcgtgctttggtggagggcgatccggcgttggctcgggccatcgtgtgcgaggtggagcgcgatgggtcgcagggcgccgtcgcggtgctcgacgagccgcgcgaggagctggtgatggtgcaggcgcgcgagacggcgcagggaagcctgttctttctgggcgaggcgctgatgacgtcgtgccgcgtgcgcgtgggcgacgccgtgggcctgggcctcgtgctgggcagcgatcggtgccgcgcttacgagcttgccgtggtggacgcggtgttctccggcgcggcgggcgacgcgtgggcttcccgctgggacgcttccctgcgcgccgagctggcgcgcgtcgaagcgcgcgaccagcgcgaggcgcgtcgcaccgcggcgacgaaggttgatttctctacgatgaaggtggaagcatgacgatacgagaagacgctgacctgcatcgcgcccagcgggcgttccgctgcgtgctcgatgcgttcgcgcatccgggaaccgtgcaccggttggcgccggcgcccgagaacccggcgagccccgttgcgctcgacgcgtcgttggagctggtggtgcgcctgttcgtggaccaggcggtgacgttctgcgtggccgattccgagtccgacgccgtggctgcgtaccttacgagcgagacgcacgcgcgtcgggtgtccctgcgcgatgccgacttcgtggtggtgcccgcgcgcgccgacgcgcagacggtgtacgaggcggtggcggaggcatgccgcggcacgctggtgtcgcccgagaagggggcgaccgtgctcgtgggttgcgcccgtttggccgacgcgcccgaaagcggcgaggtttcccagccggccgtgcacgtggtggcgctgcagggcccgggcgtggaacgcgagaaccgcttcgccgtcgatcgcgtggactggctgcgcgcccgcgacgcgcgcggcgacgagttcccttgcggcatcgaaatcgtgctggtggatccggaaggccgcatcgtcgccgtgccgcgtagctcgagcgcgcgacgcctcgccgaccccgcaaccgggttcggcgccgaccccgcgtctgacctcgcgcccgacgctgcaaccaacccagcgcccggcctcgatccctcgaccgatcccgcatcgatgtttcacgtgaaacaatcgactcaatgtagtgcgacaaaagaacaaatgtttcacgtgaaacattccgagcccgtgcccgccatgcccggcgcgtcgggtgcttccccgcgcgcggagatctccgtaggggcgggctgctgcccgcccgcgggcgcccagcagggcgcccctacgcagtctcccgacaacgcaacgcccgcggcgcccgtcgcagccgtcgcgcccgcaatgcccgcagcgcccgccgcaaccgccgcatccgctgcgaagggggtgcgctagatgggatacgttgccgtgcgcggtggcgggaaagccatcgaggaaagcctcaagctgctggaataccagcgcgttagcgcgtcgtccgcctggggcaccgacgagatcgagggcacgtttcccgaactggtcgaccaggtgatgggcgaggcctcgctctatgcgccgcgtctggctgcgctggcgctcaaacaggcgcagggctcgcccgacgaggccgtgttcctgctgcgcgcgttccgctccacgctggagcgcccctacgtgtcgcgtccggtggacacgggcgccatgcgcgtgaaccgccgcgtgtcggccgcgttcaaggacgtgcccggcggccaggtgctgggtgccacgcgcgactacagccaccgtctgctggcgttcgacctggaaaccgagggcgccgaagagctggccgagaagcgcgccgaactggccgcccacttcgagaaggtcgccgaggccctcgaggccgcgcccgacgttgcgcccgccgcttccccgtgcgcggagatccccgtaggggcgggctgctgcccgcctgcgggcgcccagcagggcacccctacgaagtctcccgacaccgccgtgcccggcgcgccccaaactcccgccacccttccgcgcgtgctggactacctgcgcgcccaaggcctgctcgcgcacgtcgaagccgacgacgcgccgccggtggacgccaccatggcgccgctctcgttcccggcaccgcgctccgtgcgattgcagacgctcgcgcgcggcatgacgcaggccgtcgaggcgctggggtacgccgccatccgcggcttcggccctgcgcatcccacggtgggcgagcttcgctccggtcgcgtggccgtggccgttgaccatccgcttgaggcgggcggcgagcaagacgcctactacctgggttccgtcccggtgaccgaggtggaaagcgtgttcgagagcgagggcgaaagcgatgccgacggcggcacggcgacggccacacgctccgatggcggcggcctgtcgctggccatcggctacggcctggtgttcggccgcgccgagacgaaggccatcgccatgagcgtgctcgaccactgcctggagcgcggcgacaaacggttccccaccgaggacgaggagttcgtgctgtaccacgtggacggcgtggaggccaccggcttcatctcgcacctcaagctgccccactatgtcacgttccagtcgaagctgtccagcgtgcgcggcacgcgtgacgagcacagcgaatgcggcgaatgcgacccgcacggcacgcgcgtcgcgcacgacccgcaaagtacgcgcgacccgcacgatcaacccgccgagtcgaaggaggcccgcgatgcagcagcgctataactacgcgttcttcgacgaggcgtcgaagcgcgagatccgccgcgccctggtcaaaggcgtgtccattcccggttaccaggtgcccttcgcctcgcgcgagatgcccatcgggcgcggttggggcacgggcggcctgcagatcacgttggccatcatcggtcccgacgacaccctcaaggtgatcgaccagggctccgacgacagcgtgaacgccgtcaatatcaagaagctggtcgtcgacaccaccgacgtggaggtgaccgacgccaccgaggacgccacgctcatccagtcgcgccaccgcattcccgagcatccgctggacgacggtcagatcctcgtgctgcaggtgcccacgcccgagccgctgcgcagcttcgagcccagcgaggccgccacgaagcgcctccacgccgaagccgactacaccggcgcgtggctggaactgttcgaccagatcgtgcgcttcgatgccaccaccaccggcgccgaccatcctgtgcaggtgttcggccgctacgtgatggcgccgtcgcccatcccgcgcttcgacaacctgaagctgaaccaggcgcgccacctcacgctgttgggggcgggccgcgagaagaagatctacgccgtgccgcccttcaccgatgtcaagccgctcgatttcgaggactacccgttcgcggtggaaaccttcgagggaaagcgctgccgcctgtgcggcgccgagggcgtctacctggacgagctggtggacgaagccaccggcgaaacctactaccaatgcaacgacacgaactattgtgtttcgtcggcttgccagccgacgaagccggtcgacgctgcggcggcttctggcaccgaatcttgcggctccaaggcctccttacgtgcagcagcacgcttcgtcggcctttccccgcaatcttcggcaccagaagccccctcgctgactctacgaacgaccggcaattctcggaaaggaacttcccatgcttgatgcgcaacgattcggcgtcgacgaggagccgtgcctgtcggtgcgccacctgtcgaagcgcttcggcgcgggctgcccgcactgccttgctcccgcggcgcagctggaacgcaacgtatgcccgcgttgcggcacggtgcacgccgtgcgcgacgtcagcctggacgtgttcccggccgagatcgtcggcatcgtgggcgagtcgggaagcggtaagtcgtcgctgatgaagtgtctgttcttcgacgaagaggccaccgagggcgacgtgcgcgcccgtcccttcgacggcggcgcggcgaacctgctgcagctgtcgccccagcatcagcgcgccatccgcaacacggtgttcggcatggtgtaccagaacccctacctggggctgcgcatggatttctccagcctgtcgaacatcgccgagcagatgatcgccgccggcaaccgcaacgtgggcgccatgcgcgttcgcggggaggagctgctcgcgcgcgtgaacatcccgctgtcgcgcgaggccgagccgccgcgcaacttctccggcggcatgcagcagcgcgtccagatagccaaggcgctgtcgaacaaccctcccatcctgctgctcgacgaggtgaccacgggcctcgacctctccgtgcaagccgccgtgctcgacctcatccagcagatcaggcgcgacttcaacgtcagcatgctggtggtcagccacgacctgggcgtcatccgcatgctggccgaccgcacgctggtcatgctggacggccgcgtcatcgaaagcggcctgaccgaccagatcctggaagacccccaacacgcatacacccaacagctcgtctactccttgctctgacgagcaaggagtacgccgacgctgcgggttcttccggtgtccgatcttggcgctccaagccctcgtcgcgtaccaaagtacgcttcctcggtctttcacgccaatctcgggcaccggaagaaccctcgctgacttactacgccaatatgtgaccctttgaaaggaacctgcaccatggacactgattcttgcatcatccgcggcggcacggtggtgtgcgccgaccgcgtgcttcccgactgcgacgtcgtggtcatcgacgggcgcatcgccgccatcgagccggtgggcgcgtccgacttcgacgcgcagcccgatgccacgatgggcgtgctgcccgtggtggacgcgcgcggcgcgtacgtggcgcccggcctcatcgacatccactcggactacgtggagaacgtggcctcgccgcgccccagcgtggtcatggacctgtccacgtcgctgtacaaggccgaccgcgagctggtgtcgcacggcgtgaccaccatcttccactcgctgtcggtgtacggcgcgcacgtgttcgaccacaagcccatccgcgatttcggcaacgtgagcgccctcatcgaccgcgtggccgccctgcgcgcgggcgaggagcgcgaccacctcatccgccaccgcctgcacatgcgcgtggagctggactcggtggatttgtacgacgacatcgagagcttcctgcgctcgggcaaggtggacctcgtgtcgttcatggaccacacgccggggcagggccagtaccgcgacctgctggtgttcggcgacacgctgaagggctaccgcgacgtcagcgacgaggacgtgcgcgacatcgtgcgtcagcagcaggagagccagaagctcacgtacgcccagatcacagcactggcggccgtggcgcgcgagcgcggcgtgtccatcgcctcgcacgacgacgacagcgaggacaagctggcgttcatggacggcctcgaggccactatctccgagttccccatctcgctggacatcgcgcgggcggcgcgggcgcgcggcatgcacaccatcgcaggcgcgccgaacgtgatgttgggccacagccactcgggcaacctcagcgcgcgcgaggccgtgcaggccggcgccatcgacgtgctgtgcagcgactactacccggcggcgctgctggacgcggtgttcacgctgcgcgatcagtgcgggctcgacatcgcgaaagcgttcgcgctggtcactatcaacccggcgaaggccgcgggcatcgccgacgaggtgggctccatcgcggtgggcaagcgcgccgacgtgctgctggtgcgcgagatctcctgcggcgaaggcgaaggctcgggcgagcacccgggcgcaaggccggacggtcgcgtcgcgcgcacgatgcccgtggtcacgcgcgcgttcgtgggcggccgctcggtgttccgctcgcactatcccgaccagccgctcggctacgggcgcgacaccgagcagctcgtctcgctcgaccagctgacccgccctctggccaaggcggtgtagcatggcgctcctccgaatcgacggcctgtccaaaaccttcctgctccatcgcgtgaaccggcgcgtgcaagggtgccaggacatcgacttcgccatcgaaccgggccagttcgtgggcatcacggggcgcagcggcagcggcaagtccaccatcctgcgctgcatctggcgcacaaacctgcccgagcgcggccgcattctgtacgactcgcagcgcttcggcatgctggacctggcccaggccacgcagcgccagatgctgtacctgcgcgcctacgagctgggctacgtctcccagttcctcaacgccctgccgcgccaaaccgcctacgacatcgtgctgaaaagcgcgttggaagcgtacggcgccgacgagcgctcccgcgccgaagaggagaccgagcgcatgctgcgccacttcgatctggacgaaggcctgtgggagctgtacccccgcacgttctcgggcggcgagaagctgcgcctcaacatcgccgccgccatgatcaagcgcccgcgcctgctgctgctcgacgagcccacggcctcgctcgacaacgcgtcgaagctcaaggtgcgctccctcatcgagcagctgaaagccgaaggcaccacgatgctcggcatcttccacgacctcgaattcatggaaggcttgtgcgatcatgagttcaacatgcaggaggggatgatggcgtgacgaggatgtatcgcccgcgcccgacgccgtgcggtcgcgagcaggaaagggtggcgcgcaagagaacggatgtttcacgtgaaacatccggaggcggcgacggagccccttgcggcggcgaccttcgtggcgacggcgccttgcgcggtcgcgcaacgtcgtcccaatggcaaaaagcattcgaattcggaatctcgagctgtcttttcgcggcgcaggaaagcggaacgctggcaaaacgcctggtcgtggaaaaccatgccccgacttctcgcatagtccaaccctatgaggcgggcacgccttccgaattcgatgcttttttgccatcccagccgtattccgtaccgcgaaaggggaatcgtgatcgaagatcttcacgtgcattcgacgatgtccgatggatcggacacgttcgagcaggtgctcgaacaggcggcgcagcgaggcgtcgagcgcctggcgttcacgaaccacgacaccactgccgggctgaccgccgctcgcgagctgggcgagcgcctgggcgtgcaggtggtgggcggcatcgaggtgagcgcctacgacttcgagcgcggccgcaaggtgcacatcctggggctgggcgtcgaggagggcgcgcccgcgctggccgccctgtgcgggtccacgcttgagcgccgtcacgcgaactcgctgtggcagctggaccggttggtggaagcgggctacgaggtggacgtagagcgcgcgcttgagctgggccgcgcgtcaacgtgcctgtacaagcagcacctcatggccgcgctcaccagcgagccgtaccccagcgccgcctaccgcacgctgtatcgcagcctgttcaagaacggcggcatctgcgaccgcgacatcgactacgtggacgcgcgcgacgccgtgcgggtcgtcgtggaggacggcgggctggcggtgctcgcgcatcccggccagcttgacagctacgatctgcttcccgacctggtggaatgcggtctcggcggcatcgagcgcttccatcccgaccacaccttggcagatcacgctcgctgcgccgagcttgccgttcgctaccgtctcgtctgcacgggcggttccgattaccacgggaagttcggcagggttccccacgtggggtttcgcgttccggcgtagattgcgcgaaccttccggagcgctagggcgcgtgccgttgcgtgcgcaggcccgccgaatcggcctgggaggccgcgttgcg

SEQ ID NO: 8644 - DNA, 936 bp, Unknown
  gut microbiota DNA sequence
atcgaggagggcgcccccgcgctggccgccctgtgcgggcctacgcttgagcgccgtcacgcgaactcgctgtggcagctggaccggttggtggaagcgggctacgaagtggacgtagagcgcgcgcttgagctgggccgcgcgtccacgtgcctgtacaagcagcacctcatggccgcgctcaccagcgagccgtaccccagcgccggctaccgcacgctgtatcgcagcctgttcaaggacggcggcatctgcgaccgcgatatcgactacgtggacgcgcgcgacgccgtgcgggtcgtcgtggaggacggcgggctggcggtgctcgcgcatcccggccagcttgacagctacgatctgcttcccgacctggtggaatgcggtctcggcggcatcgagcgcttccatcccgaccacaccttggcagatcacgctcgctgcgcagagctggctgtccgctaccgtctcgtctgcacgagcggttccgactaccacggaaggttcggcagggttccccacgtggggtttcgcgttccggcgtagattgcgcgagccttccggagcgctagggcgcgtgccgttgcgtgcgcaggcccgccgaatcggcctgggaggccgcgttgcgcaccgaccgctccgtccccgcgatcgcccgctccgcatcgacgcggccgtgccctgcgccccgcgatcgcgacctcgtacgggcgggggttcgcgcgctttggcggttgtacgccgtccgtcgacgcgctacactggtcgccatgacgcgcgacccctcatcgacttctccgaacgcccctgatccgaggggcgttttttcgcgcgcccgcatcgcttcggcctgcctgcgcttcgcgcggacccacgcggtgctgctcgtgtcggcgctcgccgcggcggccaccatgctggtcgtgccgcccgacg

SEQ ID NO: 8645 - DNA, 30526 bp, Unknown
  gut microbiota DNA sequence
gccgaacgcccctgatccgaggggcgttttttcgcgcgcccgcatcgcttcggcctgcctgcgcttctcgcggacccacgcggtgctgctcgtgtcggcgctcgccgcggcggccaccatgctggtcgtgccgcccgacgcctcctatctgggctacttcgatcttaaaacgctcgcttgcctgttcggcatcctcgcgcttgtcggtgcgctgcgcaacgcgggcgtgttcgaagcaacggctcgcgcgatggtggcgcgtttctccacctgccgcgcggccgtcgcggccatcgtgggcatcacgctggtgctgtcgatgatcgccacgaacgacatggctctcatcatgatgctgcccctctgtgcggcgactttgctcaaagcggggtgggaacgcgcgcttcccttcgcgttcatcatgcagagcctggcggcgaatctcggcggcatgatcgtgccgttcggaaacccgcagaacctctacctgttcgagcggttcgacatcccgctgacggacttccttgctaccatggcgttgccctttgccgtgtcggtgctgctcatcggcctgagctgcgccctgttcgcgaagccgacgccccgcgcttccgaagggcggcctgcggaggggcggcacctcgcgcgatccgacgtcgcccctgtcgaccgtcgtcgcgccatcgcgttcggcgcgctgcttctggtggtcatcgcctcggtgtttcgcctggttccgtatccggtttcgctcgtcgccgtggtagccggcttgctcgtgctcgaccgtcgcgccctgcgctcggtggacttcgggctgctgctcaccttcgtctgcttcttcgtgttcgcgggcaatatggcgcgcatcccctcggtcgaagcggtgttgtcccaggcgatggccgataacgcgctgctggccagcgcggccgccagccagatcgtcagcaacgtgccggccgcggtgttgctgtcgcatttcaccgacagctatcaggcgctgctcgtgggcgtgaacatcggcggcgcgggcacgctggtggcatcgctggccagcctcatcacgttcaaccagtatcgtgccgtgcgtgctgcgctcgggcgccgtcccgaattggcgcgccaaacggcgagcggcttcgtcgcgcgcttcacggctttcaatttcgcgtttctcgcggtgctgtatgctgtgtgcgccgtatgcggatagccgctccatcgctctagcgcgctaaaccgcacggccctccgaaacgaccgctcgggggccatcacgctcaactaacccttctcttggcgcttagacctttgataaagagcgtccggggccgtatagtagtgcgactgcatcatacttatagtgttcgagaaaagcggatgcagtggaaaggggaggaacatgaatatcaagaaatggggcgcgctcgtcgccgcaggcgcgttggccgcgtcgctcgcgctgttcggctgctcgtccggagatcagggaaccactaccagcagcaccagcgggaacgatgcgggctacacgttggtcaacgacggcaagctgacggtggcggcgtcgctcgacttcccgccgttcgagaatctcaacggcgacaagcccgaaggcttcgcggtggacctcatgaccttgctggcggaagagatgggtctcgagtgcgagtatctgccgtccaccaagttcgacaccatcgtgccgctcatccagaccggcggcaaggctgacgtcggcgtgtcttcgttcaccatcaccgacaagcgcctgcagcaggtggatttcaccgatccgtactgcaacgtgaaccagagcatcaccgtgcgcagcgattcgggcatcaccgacgtcgcccagcttgagggcaagaagatcggagcccaaagcggcacgaccggctacgagtgggctgccgagaacatcaaagatgccgaggttaccggttacgacgagatgacggctgtgttcgccgcgctcgactccggccagatcgatgccgtgtccgtggacttgccggtggcgaactactacgtgaggtcgtactcggactgccaggtgatcaaggagattcccacgggcgagcagtatgccgtcgcagtgagcaaggagaaccccgagctcacgaaggcgctgaacaaagcgctgcaggccgtgcatgacaacggcaagtacgacgaacttgccgccaagtggcttcagtaaatcaaccagcgtgacatcatgagtatcattcgatgcacgcggatgcacctggcaagtgccgcagcgcttttggccgctgcggcacttgccgtgctgttcgcgtttccgctgagcgctcaggcgatggaggttgagcgatggactgcccagcccaacgacgacgcgctcgaaaaggtcatgggcgccacgcccacgcgcgtcacgtggcaagggcagaccgccgaagacgaatcgctgtcggcgttggctatcgatctgcccgagggctcgtccgtcgacgccgagaacgtcaaggttaccgtcatgaacggtctcgatcgcctcgacgtcgcctcgaaggtgcaggttgacggcggatcgctggtcacggtgacgttccccgaggccacgcctgccggctctcttgtcatggtggagtgcaaccgcacgcttttgccgggcgatgggggaaccttcggcctgacgggaagctataccacggcggacgggcagacgctcgacatgcctgccaccgacaagacgttcgacgtggtcagcacgtctccggccgagcaattgtccacctggctcggcatgcaggattgggtgaaggcgtggaactccaacaagttcctccacctgttcttcgaccccagcatcatcgtcacctcggtgccggtggtgttcagcggatggcttatcgccatcgcgctcgtcatcgtcagctttccgctggccattcccatcggccttctgtggtcgttcatgcgcatggcgaaaagccgtgtcccgcgcgctctgggcgctacgtacatcaacatcgtgcgcggtacgccgctgtttctgcagatatacatcgcgtttttcggtttgccgctgctcggcattaaaatggatctgttcgtgttgggcgcaatcgtcctcgtgctgaactccagcgcgtacctggcggagatattccgcgcgggcattcagtccatcaacggcggccagttcgaagctgcgcgctccttgggcatgaatggcgcgcagacgatgttctacgttatcatcccgcagaccgtgcggcgcgtgatccccacgatgacgagtgagttcatcctcatgtacaaggacacgtcgctgttggccgccgtaggcgtcatggagatcatgatgtacgcgaaaaccatcacggccgctacgggcaacgtgacgccgtacatcgtggccgccggcttctaccttatcgtgaccattcccatgacgaagctcatcaactcgatggagcagcgcatggcgggcggccgcaagaagcgtaagaagggcgtgaccatcacgtcggaagaggccgtgctgcccgactccgatgcggccgtgtccaagagcctgcgcatgtccgagacgctggccggctccaaccatatcagccattaaggaggtgcggatatgagcgaagaaagcacaaatgcagctgacgtgcgcgtcggcgagccggtggtccgcatcgaggggctgcgcaaatcgttcggcgacaacgtggtgctgcgcgggatcgaccttgaggtgcaacgcggcgaagtggtggtcatcctgggtccgtcgggttcgggcaagtcgacgctgctgcgctgcgtgaacttgctggaaacgcccacggacgggcgcatcttcttcgaagacaccgagatcaccgcgaagaagaccgacatcaacaaggtgcgcgccaaagtgggcatggtgttccagaacttcaacctgttcccgcacctcacggccaagaagaacgtgatgctggcgcagcagaaggtgctgcatcgcgccaaggaggaggccgagaaggtcgccgtcgagcagctgacccgcgtgggcctggccgaccgcgtggactacaagccctccgagctgtcgggcggccagcagcagcgcgtggccatcgcccgcgcgcttgccatggacccgcacgtcatgctgttcgacgaggccaccagcgcgctggaccccgaactcgtgcgcgacgtgctgggcgtcatgaaaggcctggcgaagggcggcatgaccatgatcgtggtcacccacgagatgggcttcgcccgcgacgtggccgaccgcgtcatcttcatggacggcggcttcatcgtggagcagggcacgcccgaagaggtgttcgaccaccccaagtccgatcggacgaaagacttcctgggccacatctcatagttcccgccgcgccccgccccagcggggcgcgcccacatccaagcgaccggcgctccgctcaggatgacggcttgccatgggcgacagtctatccgtacagatgtttcacgtgaaacatcttcgtcggcacttcatagccccgccgcgccccgccgaccaaccgacccggcggggcgcggcgggggtctgcgttgcacagttttgcacgatatgttgcgtctcaagcgctttcggacgccctcgcgctcctccgggcgcacttctcgcgagcgttttaccaggtcgcgcgaaatcggggttcgagcggttcgggtcgaacgcagcatatcgcgcaaaactgtgcaacgcggaccccgcaccccctccccctcgcccgccccctcccgccggccaacccccgccggctagcccccgctcgcaccctccccgccggctagcccccgcttcgctccccgtcaattcgtccaaaaatgttattcgtccaataacattttttctacaaatgatggtataatgcgccccatagacatctgtcggtacagacgagagtaagggggtgtgcgatggatatcttctccgatcctgtgcttctggcgcgtttgcagttcgcttgcacggcggcgtatcacttcattttcgtgccgttgaccatcggtttgggacttatccttgccatcaacgaaacacggtactaccgttcccgcgacccgaaggacgcggctgccaccaagttctgggtgaagatcttcaccgcgacgttcgtgttaggcttggccacgggcatcacgatggagttctccttcggaacgaactgggcggattactcgaggttcgtcggcgacatcttcggtgcgccgctggccgccgaggcgctgctcgcgttcttcctggagtccacgttcttgggcgtgctgctgttcgggcgcaagcgcgtgtcgccgaagttctacatggtgtcggcctggctcgtgtggttcggctcggctctgtcggccctgtggatcctcatcgcgaactcgtggatgcagaccccggccggcgcggagctgtccgccgacggctcgaaggccgtcatcaccgacttcctgaccgcggcgatgaacccgtcggtatggccgcgctactcgcacaccatcgtggccgtgctcatcatgggcgcgttcgtggccatggccgtttccgcgtggtacctcatcaagaaccgccacaaggaattcgccatgaagacgatgaagctgggcgccgtggtgggcatcgtggtcagctgcgtcatgctggtcacggctcattcctccgccgtcaccgtcgccgaggagcagcccacgaagcttgccatgatggagggcatgtacgactccgaggtgcctcctctgtacgcgttcgggtgggttgacgaggagaaccagaaggtcatcaccccgttctccatcccgggtggcacgagcttccttgcaaccggcacctgggacaccgagtacgagggcctcaaccagctggccgcttccgccgagtacggtgctctcgatcccgaaaccgcgccggtgaacttcgtgttccagacgtaccacctcatggttgccatgtacggcctcatcatgctcaccgttatcctggcgctcgtattcacgctgcgcggcggcaagatccagaacatgaagtggttgcagcgcctggtgctcatctcgccggtgttcccgctcatcgccattcaggcgggctggttcacggccgaagtcggccgccagccgtgggtggtgtacccgtccgcaaccagccccgaaggcgtcagcctgctcacgaacgagggcgtctcgcagtcggtgtccgctcccgagctggtgatcacgatggtgctgttcctggtggtgtacgcgttcctcatggtcgcgtgggctcgcacgatgggtcgcttcatcaaggaagggccggttgcagagcatgagcctgcgttggagggcgccgctgcgggcaagaccccgaagggcaaagcagccccctcgttcggcgacgacctcgcgaaggaaggtgagtagtcatggaaatcacgttcttccaggggctttggttcctcctgatcttcgtgttgatcgccggctatttcgtgctcgacggtttcgacctgggcgcgggcgtgctgtaccccttcgtggcgaagggcgatgaagaaaaggccgttgtgcgcacgagcatcggcccggtgtgggacggcaacgaggtgtggctgctcaccgcaggcggcgcgctgttcgcggcgttcccggcggcatacgccaccacgttctccgggttctatctggcggtcatgctggtgctgttcggcctgatcgtgcgtgctgtttcgctggaataccgcggcatcgaccacaagtgggcgaaggtgtgggacggctgcttcttcgtgggctcgctgctgccggcgctgctgctgggcgttgccgtgggcaacatctacgcgggcatccccatgagcgccaacggcgactacacgggcattccgctgctgggcctcatcaccccgttcacgctgctgtgcggcctgctgggcctgtcgatgttcctggcgcaaggggcgtcctggctggcgctcaaggcgccgaagcctagcgacctgcaggcgcgcgccgcgaagctgcgcttcccgctgcagatcgtgtcgctggtgctgttcgtcgcggtgaccgcctatgctctgctgggcattcagccggcaatggatcccctgctgggagcggttcgctggttgctggccgccctgttcgtggttgccatcgtcgcctccgtgttcttcgcgaagagcaaggactgcgacctgggcgccttcatcgcccagtcgggcgcggcggcgctgctggtgctgctgctggccgcttcgatgttcccgaacttcgtggttgcttcggccgatagcgtcggcccggccatcacggccatgagcgccgcgtcgtccgagctcacgttgatgtggatgaccatcatcacgtgcgtgggcctgccgctggtgctggtctatcacgtcatcatctaccgcacgttccgcggtcgtgtgaaggaagaggatctggcgcactactagagcggatgccgttccttgcatagaagcgaactgccaggagccgtcggaaatccgacggctcctttgctatactgtcggaaaccgcacctgaaaggggattttccatggatgagcagaccgcgccgcagccgcccgtaccgccgcagccgcccgtaccgcccaccgtttccgcgccgcccggttctccggcgcaaccgacgcagccgatgccgcagtccgcgcaagcgcccggatccgcgccttacggtcagcagccgggccagcccttcggccagcagcctgcaggctactatcaaccggttcctccgcaatccaacggcaaggccgtcggcgctctcgtgtgcggcattctggccatcttgttctcggcttctattctgttcggaatcgcgctgggtatcgtcgccatcgtgctggccggccaagccgttaagcaggcgggcagggacggtaaggcgaccggtggcaaggtgtgcggcatcgtcggcatcgtgctttcggtgctggcgttcgtcttgtacgtggttatcggggttggcgtgctcgccttcgtggtcggtgcgtccgacgaatacgatcgcacgtactcgttggaaagttccgacctgtcgtccatcacgcagggcgaccagcagatggaagcggcggcgtctgagaagctcgacctgctgaagagcaaggatgctgtgcttatgcggaagatcgccgaccaagccgacgagcagctggccgacgcgacgggatacagcctcaccgacttgggcatcgaccccttgacgttcgtcgagtggatgctggtcgacttcgactataagctcgacggcgcctacgataacggcgacggcacgggcaccgtgtatgccgatgtgacgctgcgcgattctatggccttcgccaccacgttcatggaagacgcgcaagccgccatcgacgccggcgacttgcagtccctcgacgaggccggcgcgaaggtgcttctcggcgagctctaccaggctgcaatggacaagaccaccgccatgaccacggattacgtaagcttggaggtggtcaagaacggcgattcctggcaggttgacgaagactcctggggcgacgagctagattaccttttcggcctataaagaatcgattcggcttcacggtttccgccgtgccccgtatcgcacggggcacggcagtcgtcgcaacgaaagaaggcgcgcatcatgcgcgccttcttgcttgatgcgggggaggggagctaggccagcttctggcccagctccttggcggcggccgccttgtcgaagttgccgccggtcttctgggtgagggcgcccatgacgcgacccatgtccttcttggaggacgcgcccgtctcggtcagcacctcgtcgatgagcgcggccagctcgtcgcccgacacctgcttgggcaggtagctttccaggatggccacctgggcggtcagggtgtcggtgcgttcctgatcgttgccggccttgatggagccgtccagcgtctccttcgtctgcttgatcaggcgcttcagcatggcgtccacgtccgcgtccgtgatgtcgcggcgctcgttcacctcgatgttcttgatctcgccgtgcacctggcgcaggatggacaacttcggcttgtcctttgctctcatcgcatttttgatctcgtcttgcagctcgtcatagcgcatgggaacctcgtttcgctcgcagtttgctgtcctgagtatactgcaccgtgaaaccccgcccaacccaaacggatgtttcacgtgaaacatccggaatcgttcggctctgcggtgcgtcgtgctggcatgcttgcgcgaaagccgccttcccaacgcccgtcgattccgcggccgcgccgagaagcctgttcccgcgtagcgcatcgcgttagacgatgcgccgacgctctgcaattctgtgttgatgcggctcctggtgacgttgcgtcgctctggtatgatgaagcaagcatatcgacatcgaccagaaggactcgcatgaaagacttgccggcgcaccaactcgatccgaaggtcaaaacggtctggcgcatcaacgacgccatttggcttaccgtggtattcctctgctgcttcgttccattcgccatcgctgcaatggtggatccggcgacgtggatgttcgtcgtcctggtcgccgtcgccgttgcgtacgcagcttgcttgatcgtgtggttgatcgtgctgccgcccatccgcttcatgcgctggcgctacgagctttccagcgactacctcgatatcgcgaagggaatcgtgtggcgcaagcgtttcgtcatccccttcatccgcgtgcagaacaccgacacgcgccagggtcccatcttacgtgcgttcggcctgtccagcgtgacggtggccacggcggccggcgagcatgagatccccggcctcggcgccgacgtcgccgagcagctgcgcgatcgcgcggccgagcttgcgcgcctggcccaggaggacgtgtgatgacggactatcgccaaccgccccaacctccgcagccccagcctcggcccgctgcgccccaaccccagcctgctgcgccgcagcctgaagggccgcgggggagccatgtccatcatagctatatctggttgggcagtctgcgcacggcgttcatgctgctggccatcgtggtcttctcctcgttctcggctatcatcggcgccatctccgagggcgaagccatcacgcgcggcgacatccccatgcttttcatcgtcatcggatccgtgatcgccggtatcgtcgtgctggtggcgcttgtggcggtctaccaggtgatctcgtacaagcatctgtactacgagctagggcccgaggaattcaacctgtattcgggcatactcaacaagaagcgcgtgcatgtgccctaccagcgcatccagtccgtcgaccagcacgccacgctcatccagcgcatcttcggcgtgtgcagcgtcagcatcgacacggcgggcggcgcggcgaacaaggccgtcatcgtgccgtatgtgcagaagacgcaagctgaggagctgcgccgcgagctgttcgcgcgcaagcagtacgccgtagccgtgcgcaacggtgccgcgcccgatgccgccgttgcggcgatggcctctgcagcgggcgttcccgcgcaagccttgcacgagggcgccaatgtgctggacgctcccgccgagatctggcaggacgtgcgcggcgtgttcggtggcgccgcggtggatacgggccgcgtgacctacgagtacggcatgtccaacaaggagctcgtgttcaccggcctgtcgaacaacacggcgttcttcgtcgtggttgtcggcatcgtcggcgccgtttcccagttcatgggtcagatggcgcccatcctctccggttcgatggagccgctcgttggcaacgttgtagccacgagcgttcggctgttcgggggcagcctcatcgccgcgggcgtggcgaccttcctcgctgcgtcgctcgtgttgtggctgctgtctgccatcggcgcttgcgtctcgtacggcggcttccgcgcatgtcgccgcgacaaccgcatcgaagtcgagcacggcctgctgcagcaccgcttccagggcgtcgacgtcgaccgcgtgcagtcggtgatggtgaagcagagcttcatccgccgtctgcttggctactgcgagctgtcgctgggcaagatcgatgcggcggctgaaaactccgacgaccagcagaaaggcctcagccagcaagggctcgtgatccatcccttcgtgaagatgtcccgcgtgcccgagattctcgcgggcatcgttcccgagttcgccgacgttcccaccgagaacatcccggtggcgcccgtggggctgcgtcgcgccctcatccgccgatgcatcatccaggggacgggcttctggttggccgtcctcgtggcggcagggcagatcgcggtgaacctcctggcggatccggccgtgcctgacggagccatgacgttgttcttcgtcaacaacggcgcgctgttcggctatgcgcttgcggtcgtgctgctcgttctcgacgcggtaggagccgtgctgtggttccgtggctcggggtttgcgtacaacgagcgtttcatgcaggtgagcaacggcgggttcgctcgcgagaccatcagcttcccgcgcaaaaagatacagttcggttacacgaagacgaatccttttcaacgcaatgccggcaccgctacggtcaacgcgcgcactgcagcaggggttggaggcactaccatcaggcttatcgatgcccgagaggatgatgcccgtgcgtggcttgcttggctcaagccccacggaaatgtgatacagtagcaccatgaacgcatcaactacatccgacgccaaaggcgctcgaagtaccggctccggccgcagtgccgagagcccttcttcggtcgtgcccgaaacagagcaccggcccgctcccggttggacgccttcgcaattcaagccgaacgactacgccagcatgcacgcgctgcgcaacgaggtgtcgcatacgtcggccagcgccacgaacaaagctcgcgacatccgcgagtacacgctgggggaggagatcgcgaactccgtcacccatggcttgggggcgctgttggccattgcggccatccccatcctcgtggtgcgcgcgctcgacgacggaggcggcatctacctgttcgccgcgctcgtgtacaccctcacgatgctgctggaatataccatgtccacgctgtaccatgccatcgcggtagaccgtgcgaagcgcgtgttcaaggtgctcgaccatagttgcatctacctgttcatcgccggatcctacaccccgttctgcctgatctcgcttgccgattccggcggcgtgtggctgtgcgccttcgtgtggctggttgcgttggcgggcgttgcctgcgaggcgttctgggtgtttcgtccgcgctgggtgtcggccgtgctgtatcttctcatgggctggtgcgtcatctggttcctccctgcgctcatcgaggccatccccgggccgggcctgtggctgctcgtgggcggcggcatctgctactccatcgggtgcatcttctacgtgttgaagaaggtgccgtacatgcattccctgttccatctctgggtactcgccggaagcgttctgcagtttctggccatcttcttgtacgttatgtaagcggtcgcgtgcataagcgcgcgggcatgacagccccacgggtgccgcgaggacgcagcgcgaaagcgcctctccgcgcggccaaagcgcagaggttgcgcatcgtccgcttgtcgaaggagttgcagaagtaccatggatatttggattagcatcgtcgtcacgttcgtgctggtgctggtgaacggctatttctcgatgtcggagatggcgttggtgaacgcgcgccacgtactgctgcagcacgatgccgacgagggcgataaaagcgcccaacgcgcgctgggtctggccgccgattcggggcagttcctggccaccatccaggtggccatcacgctcgtcgggttcttcgcctccgcggctgccgccacgaacctctccgatccgctggcgcagtggctgtccggcttcaacatcgggtggctttccgttatcgcgcccggtttggcccccgtggtcatcacgctcatcgtgtcatacctcagcatcgtggtgggcgagctggtgccgaagcgcatcgcgctggccgatgccgagcgcgtcagcaagatggtggccggaccgctcatggtgttccagaaaatcgcttcgcctttggtggcgttgacctcggcgtccgcgaacgggctgtcgcgcctgttcggcatcaagaacgccgacgagcgccagaacgtgtccgaagaagagatcaagtacatggtcacggacaacgacgagctgctcgaggacgagaagcgcatgatccacgacatcctcgatttgggcgacatgaccgtgcacgagatcatgacgccgcgcgtggacgtgatgttcgcggaagacaccgacacggtgcgccagacggtggagcgcatgcgcggcacgggctactcgcgtctgccggtgtatcacgaggacatcgaccgcatcgtgggcatcgtccacttcaaggacctcgtggcgccgctcatggacggcaaggagcacgagccggtggccgagtacgcctacgaggccatgttcgtgcccgagacgaaggatctgttcccgctgctcgccgagatgcaaacgaatcgtcaacagatggctatcgtcgttgacgagtacggtggcaccgatggtttaattaccgttgaggacatcgtagaggaggtcgtcggcgagatcgtggacgagacggatcgagagaatccgttcatcgagcaggaaagcgagaacgtctgggtggtcgacgggcgattccccgtcgaagatgccgcagagcttggatggccggtggaggattcggccgactacgagaccatcgcgggctggctcatgagcatgctcgactcggtgccccaggtgggcgaggaacttgcgttcgacggataccgcttcaagattcaggctatgcgccgccgtcgcatttcgacggtgcgcgtggaacgactggacgatccctccccatcatgcgtggacgctgtcgaggcgatcgaccgggaggaagcgtgacgagtgaaaaacggctgctccgttcgcgaaaggcgctcataggcggcgtctgcgcgggcgtggccgattatttcaacgtcgatcctgtcatcgtccgtatcatcatggtggtgttcaccctggcctcgggcgggctgctgggcatcgcatacatcctgctgtggatcgtgctgccgctcgaaccgaaggaggaggcgccgctcgacgtgcacccccagtcggtgcattccgagacgtacgggacgttcgaattcggcggcaccccgcgcaaaaccgagtcgggggcgcaaaatgcgcccaatcccgcgcaagcggccggttggcgctatgcgcatcccccgtacgcctcggccgctcatgtgccgcccgagcccccggcaggcgcatcgcgcgcctctgccgctgcgcctgccgatgcttctcgttcgtatgcgcctccggcgagccattcgcatgaagggtggatgcatgccgcgccgcaacagcagccgccggcgaagtcgtcgcgctcgggcgtgaaggctgctctgttcgcggggtcgttcctgttgtttttcggcatgtccgctatggtggcgagcatggtcgaaggcgtggtgtggtggcagtattggccgcttatcttcgttatcttgggcatcgtcggtatggtagtccccggcgaagaggggcatcgcatgcgccagttcgtggactcccttatcacgttttccgcgggagtggtgctggtgctgatgagcctcgatgtcatcgggtggcgctccatcgagttcatgttggtgggcctatggccgctgctgcttattatggttgggctgctgcttctgggaggcgcgctcaagtcgccgctgcttacgttgctggcaggcttgtgcttcgtggcgttctgcgtggtgggattgctgtggtactcggttccgggagcgacggaagagctggttttctcggcgccgtacgggcgcgagtatcgtttcgacatgcagccgtgggaaaacatcggtctaaacgagtccgttgtgatctcgataaccgaatgagcgtgcttgtcgcgttacagagcacatagttcgttcgctttttcccgtgtccgcaactaaggcgaaccacctgctgaaatgcgctttcattcactgtcaagcgaacaaatcgtgtagggcgtctccataaaattttgccctcggacccccttgtccgttaaaatacgttttgtcacaacagcatatcgccctttcggcagcaaaccctcacacaatttactacgctgtcaaccgcttcggcggctgggtcgtgtgctgttcaacgaaaggtaactgacgttttggctaaaaagcgctatatacaaaagaagtcgaacctggctgctaaaattatcgcggtcggctgcgcatcgtgcgtgctgaccgggtgcatcggcttcgggttcgcctctgctggaagcggcgccgtgcacgatatcgattctttcggcatcggcggtgcggacgcgaatgtcgccattgccgattctgccgacttcgccaacgtatccgagggttccacccgcgagtccaccgtgcttaccagtaccgcatcgcgcgacatctcgcaaggcatcgaagctatcgaagccgaggaagaagctgctcgcatcgccgcggaggaggccgctcgtgccgaggaggaggctcgtatcgccgccgccgagcaggcgaaggccgagcaggaggccgccgctgcgcgcgatgcagcctccgatgccgtcgcctcgcttcccgaagttgatttctccgtgggcaaagaggctttcgtttccgagtggacctcccgtatcaatgcatacttggccggctcgcccttggcggggcagggtgccacgttcgccgaagctgcctggagcaacggcgtcgacccgcgctggtcgcctgccatatccaacaccgaaagctccaagggcgcgcattgcttcctgccgtacaacgcatggggctggggcgataagagttggtccagctgggaagaggctatcaacgctcacgtagcgggcctggcaaacggctacggctactccatcacgtatgcgaacgctgccaagtactgtccgcctaatacggatcattggttcaaggcgactatcggccaaatgaagatgatctaaacgttccgccggccacgagccggcggttccttttccatcgtcgaatccttcttccgcatgcgttcgagacgatggccttgcggaatgtttcacgtgaaacattcgttcctaagtgcctgattgccacgttacgcctttgtcgccgttctatggcgacgctggtcgtgcccgcatccatgcagtatgctaagcgcagcaagaaatcggcaccatgcgggtgcctggtgaaaggatcggtatgagcaacgtgatcgtcgtcggctgcggccgcgtcggttcccagctggcgaacatgctgtcggataacggcaacaacgtgtgcgtcatcgacaagaacgtgaacgcgttcgcgaacctggggcgcaacttcaacggctccacggtgcagggtgtgggcttcgacgaggaaaccctcgtcaaagccggtgtcgaagattgcgacgtcatggccgccgtcacccagttcgacaacacgaacctcatgtgcgccgaagtgggcagccgtctgttcggcgtgccgcacgtcatcgcgcgcctgtacaaccccgatcacgagcgcgcgtacatgcagctgggcatcgactacgtgtgcggcacgtcgctggtggccgaggacgtgttcagcaaggtggtgtcgggccacggcgcccatctcgacacgttcggcgagttcgaggtgctgcgcttctcgctggacctcagctccaccgacaagcgcaccatccgcgtgggcgagctggagcgcgatcacgacgtccgcatcatcgcgttcgagcgcagcgacggctcggccagctctattcctacgcgcgactccatcctctacaacggggattcggtgctcgcctgcgtgcgccatgagctgatcgaatcgttctcgcgctatatccaagattaagggagacggagcatgtacatcgttatcgctggcggcggcaagatcggcgaatacttggcttcagtgctgctttcaagcggcaacgacgtggccgtcatcgaggagaatctggccacggccgaccgcctgtcggtggcgcttcaagggcgctacctggtcatccacggcgacggctgcgactcgaagtaccaggaggacgcgggcatccggcgcgccgacgtgttcgtggccaccaccggccaggacgacgacaacctcgtgtcgtgcgagatcgcgcagcgcgtgttcaacgtgccgcgctgcatcgcgcgcgtgaacagcccgaagaacctccgcatcttcaaggaggtgggcatcgagtgcgtgtcgtccaccacgctcattgcgaacctcatcgaggaagagacgctgctgggcagcgtgagcgtggcctcgtcgctgacgcacggcaacgttacgcttaccgagatcgtggtgccgcgcatgcgccatcattccaacgaggccggcatcctggtgtcgtcggttcccatgcccgagaacagcctgatcgcggccgtgtcgccgaaggacgacgacaacgtggaagtggccagcgaagagacggtgctgtatcccggcgacaaggccatcgtcgtggccgacaacgaagtgctcgacgaagtccgggcgctgttcaaggggctgtaggttccgtcggccttgcggctagacagcgccaagccataaagcgaagttgtccgacctggtcggacaacttcgctttatgttttccagagcgtacggttgccttgtttcgtcttttgaacccatttttttgctttgcgacaatggggttgccgaaggggacgaccccatcggtcgaagaggacggagcgaggaggggttcgcatgaaacgtaatttcagcaacgaatcggcaagcacgaagagcatgtctcgtagggcgtttctcggaggcagcgcggtggcgtttggcacggtgatgctttcgagtgcgatgggcgcttgttcggcaccggaaacatccgaagggcggggcgcgggcgcgtctgcaaacagcgagcaggtactttacgagctctacgataccgatattcttatcatcggcggcggccttgcggggtctcatgcggcattgcaggcttacaagcagggaaaggacgttgcggtcgttgagaaggctgccttccatttcggcggtgcttgcggctacaactggtgcaactgggtgaacttcattcaggctgacacgccgtgggatcaatccgaggacttcgttttgaacgagttgacgaacaagaagatcgcaaaggcgacccatgaagcgtttactgtggaggagcgcaatttgctgctgcgctacgcccaagaaggcaacaacctgttcatgcgcgatgaaacaggtgcgtttgtgccgggcctcgatatcccgggctatccgcttttcggcatcttcaacggtttcccgcgatactttaccgattccgtggagcgttcgggcgctcgcatcttcgaccagaccatgatcaccgacatcgtagtcgaagacggtgcctgcattggagcggtagggctgcatgtgcccacgggaacggtgcgcgtttttcgtgcaaagtcgaccgtatcttgcacgggtgcaagttcgtggatttacgggtggaatactgtggctcccacttccatcaattcaccggacaacacaggagatgtagatgcagctgcttttcgacgcggtgcggctctgcaggattcggagttttttcaattcgacctcatcagcatgtatccgacggggcttgcggcgacgttcgtaggaggcatcggcgctgacaatctgtgctgcgaatacatctgcgatgcaaacgacaattactttttccgtggcatggactactccacgctcgatcgcatcacgttcacgcgcacaatcgccaaggcaattcacgacggcggtggatcgccgaatggcggagtgtacgtggatttctccaatcccgaggcgtttgcggccatgggggaggtgtatcgccgtaacgtcgagttgtggaaagaggtgttcggcatagatgtggcatccactaagctcgaatgcgcgcttgaggcttatgagcacggtagcaacccgcgcgttgatgaaaagcttatggtggagggcctgcctggattgttctgcgctcgcggtggcggagtatacggagcgcaaggcggttcatcggtgaacgttgcttatcgagacggctcatacgccatgatgcaagctgtcgagtatgccgagggcgcgggcaaagacaagccgaaggcgttcacgttcgatacggttgaagaggagattaaccgtttgcacgagatacgcatccgtcagacggatggtaagaggcctcaggaaattacccgtatgatacagcgcgcttgctatcgggcatgccagcccacgcgagagactcctgcgatgcaggaggcagttgccgaactagagcgaattcgcaaggaggaaatgcccgcgatgaggctgggagacgcgacgcttacctacaacaccgattggaaggcggccatcgaagcctacaacatgctcgacatcgccgaggcgagttcgaaagccgcgctcatgcgcgaggaaagccgaggccacagctatcgtccggaattccctcaggaagatccagccaactggacgtgcaacattgtcgcgaggaacgtgaacggcgagatgaagctcgaaaccgttcccgtcgtcgagctcgactaaccacgaccgctcacggactcacaaggaggcgctatgaagatcagcgtgcaaaagtacaatccctcggttgacgccgagccttatttcggtacatacgagatcgagcacaccgagcacatgaccctgctcgaggcgctggtggtcatcaacgacaccatcgagcctatcgcattcgattacagctgccgcgggcgcgtgtgcggccgttgcgccatgacgctcaacggcacaccgtgtctcgcctgcgttaccctggttgaggatgcgggcaagaacgaagtcacgccactcaagcattttccggtggtgcgcgacctgattgtcgacaagacgaaggttacggacaaagtgagccgtattctcgctcgtcaacgtgcgtttgacctaaaccttgatgagattaaggctccggtcgacgctggtctgtccgagaagctcgagccgctcgagtactgcgcacgttgcggcgtgtgcacggcggcgtgccccgttgtcgagcagaaggggtttaagtcctatatcggcccaactggaatgatagccattgccaatcgtttttacgatccttacgatcagggggatcgcgttgtccaagccgtgcaaaatggcttgtgggaatgtatagagtgcggtatgtgcgatacggtgtgcaaggctcttgagatcgaccatttgtcggtttggaaggatttgcgcaccgcggcctctgccgaagggttgaagccggtcggcatctaaggagcgatcggcagcgtggggaagggtactctttgagaaaaccgtatggggatgcgggaaggggggtagagatgggcgagtgggagccgaaggggatcctcgacgatgaagacgtgcggatgcggttgcggatcatgcacgctgtagacaagtctctcgaccagatcaaggtgaccgacttatgtgaaaaaatcggtatatctcgccaaatgttctatcggtacttcgatagcaagtacagtctgcattggtggtggccgatgcacgtccacaagttttacttgatagaggtgggccggacaatggattgggaaacaggctatttccatcatctaaagctgctttcgctcgagagcgaattcttcaaggtcgcaacgcagtatacgctcaacttcccaagccagcgcagtatcatgcctcactatcgcaagtgcgcactgctcgagacgctgcaggattacaagcatatagcccttgatgacgatctcatgttttgcctggacagctgggtgaaaaccgagacggatattctgactgagtggtatcgcctggacacggtgccccctctgcaggaagctgtcgagaggcttgcgcgcgtagcgccgaaaatgctgtacgatgcattgcgcatggattgaggtgttgccggtggacgttcggcctcttgttaggccggacgtccacgaggcgacaagtatcgtcttggtgctatcgagtcgcggcggccagctctgccagcgcttcgggcggggtgtaagcgcaggtgccgtcgccgagtgagacgacttccaccgggtcgcccacgttgatcgcgccgccttccagcgccacgaagaagatgccctcgcgcgggaagatgcagtcgcctgccaggtggtagatggcgcacttcgtgtggcacaccttgccgatctgcgatagctccaacagcacgtcctcgccgatgcgcacgcgcgtgcccaggggcagcgctaacaggtcgatgccctcggtggtgacgttttcggcgaagtcgccctcaaccacgtcgaggccggtcgcgcgcgctttctcgatggattcccaagcaagcagcgacacctggcgatgccaatcgccggcatgtgcgtcggtgtccaggccccgatgcgcgacgacggtcgcgccgccttcgcacggcatcttgcgcgttcccttgcgcttcgacacgttgatcgagcggactcgtccgcgtgcgacgatctgctgcttccgtgcttgctccataccgcggttcctccctaaaacctagcataataatgggaaatatactactcgaacaagaatagagaagtcaagcaataagccgcgctctgaagcgcgcttcgggaaggctgatccgtccgggcgcaaagcggcctagtggccgctttgcgcccgcgcagcccgccgccctggctgctcggcgctttccgtgaaatacgccgcgctgccgtccgtttgcggtatgctggttgccatcaggcagaacagggtgaaagggaccggcgtgatcaaccgttacacgcgccccgcgatgggcgccatctgggagttggaaaacaagttcaacatctggaaggaaatcgaggtgctggcctgcgaggcgcaggccgagctgggcaagtccggcatcacgaaggaggaggccgcgtggatccgcgcgcatgccgacttcaccgtggagcgcatcgacgagatcgagaaggtgacgaaccacgacgtcatcgcgttcaccacgaacatggccgagtacatcgacgccgacgtgccggaaggcaccgagccgcccagccgttgggtgcactacggcatgacgtcgtccgacctgggcgacacggcgctgtcctaccagatcacgcaggctatcgatatcatcctggaagacatcaagcagctgggcgagacgtgcaagcgccgtgccttcgagttccaggagacgctgtgcgtgggccgcacgcacggcatccacgccgagcccatgacgttcggcatgaagttcggcagctgggcttgggccctcaagcgcgcgcagacgcgcatggaggaagcccgcaaggtggccgccacgggcgccatcagcggcgcggtgggcacgtactccagcatcgacccgttcgtcgagcagtacgtgtgcgagcgcctgggccttgcggccgacccgctgtccacgcaggtgctggcgcgcgaccgtcacgcgcaggtgatggccggcctggctgtgacggcttccacactggagtccatcgccatgcaggtgcgcctgctgcagcagtccgacgtcatcgaggccgaggagccgttcgcgaaggggcagaaggggagcagcgccatgccgcacaagcgcaaccccatcacggccgagcgcgtctgcggcctggcccgcacggtcaagagcaacgcgcaggtggccttcgacaacgtggcgctgtggtacgagcgcgacatcagccactccggtgccgagcgggtcgcgctggccgacagcttcatcgcgctggactacatgttcggcaagatgcagtggatgctggacggcctgcaaacctatccggccaagatggagcacaacctgtggcgcacgaagggcctcatcttcagctcgaaggtgctgctggccctggtggacaccggcatcagccgcgaggacgcctacgtcatcgtgcaacgcaacgccatgaaggtgtgggaggatatccagaacgccgtggacggacccacctatcgcgaaaacctcgaagccgaccccgaggcgaacctcagcgccgaggtgctggacgagatcttcgacccttgggacttcctcacccgtaaagacgtggtattcgaccgcctcaaggagctggagttctaaaagctgccgcctaccttacgtagaggcatcaggaagccccgtcctgcggggcttcctgtttttgatgggtgcgatatctttgtgccggcttacgcagatggtctgggacggagaaggcgtttaagctggtgtccatacccttacgaggcagtacttcctggcctcgccgtcgaggggcttgtcgtcgatgtttgtgtacgtgaccacggcatcgcgcgagccggtggacgccaggtactcgccgtaatcgtcagcgccgcttttcacgtcgaaggcgaaccagtcgttcgtgtcgaagttgatgcccacgacttgcgtgcgcgacttcaccatgaggtacgacccgcaccaggcaggcggcgcggtagggttgcggctgaaacggaaccacggcgcgttgctgtagtcgccgttcgtcacggcgctggccggggtgtacgtgccgatgctggcgatacctccgccgtactggtagccggcatcgaacgagaacatgaacccggtgttgccgtagccggcttccagcggtttcatggacgtgggcagcgccatggtgtccagcgcttcgcccgtgttggcatccacgcgcacgagctggtagtggatggacgaggtgtccgtgcgcggcgtgatgaccacggagtcgccggtggcgtagggagccgtcgccatgcggccgatcgaggtccacagcgtctcgatgtcgttcgctcccatggtggcgcgcttgaacagcgacggctcggttttcttcggaccgctcgctttcggcaacacctgccagaatgcgcggtttcccacggcggcgatggtgggcatctcccaatcgccgtcgccttcttccaccagcgcgggattgcccagagccgcaccatcggtacgcgcggtgtatatgcgccagacgccgtcgaggatgtccgcctcggcccagatgagacccgaggatgtggcgcgcacgtcgtagatttcgaagccttcgtcggatccgacggcctgctccagcaccacggtggagtttcccgagctcagcgaaagcagcgccacctgggtcagcggcttgccggtgtcggtgggcaagaggcatgcggccaaatcgtcgtcgttcgcccagacgagcgagccgtacggcagctcgtaattccccacctggttcatgagcgtcgttggatcttccgcctggacgaacgtgttggtgaactcgtcggacgcagacgacagcaccgcgtcttcgggcaccttgagcactacgaggttgtcatctgggtcgttcttcgtctgctcgattacgacggatgcgccgccgcccacggccgccaaagcgcccacgcccaacgctccgtacaggaagtggcggcgggtgagcagaacctcgcctccgttcggcgtgggaacgcgaacgccgttgccgccggcgttgccgttagaggtgccgcgcggagcgggggacgatggggagggcgatgcggaggacgagcggcgatgcgcgccgaccgagcccatggcgctggcgctgccgtaccccgccacgttgccgacgtctgcggagcccccgcgacgaccgctgccgccgtgtgctccgccgtatccggcgacgtttcccacatgcccaccgcgcgcgttcggttttccgccggcgtacagcgcgcctccccgggaggctgcgcgcctgttcgcaaggcgtttcttagcaacggtcggtttcgcgtgattcgcgtgtgttgatctgcgggttaccatggtgtttattgtgtcatttcacgcacaggttaaagcgcccttcggtctaattgctacaataaacgcaaacacgaccaatacgctcggaactggtccgcgtagggaacgcgggcgcgcattgtccgagatgtcagcgagcttgaggagtgatccatgagcaacgaaacacgacgcatccttttggttgaagacgaaaaggccatccgcgacgccgtgacggcctatcttgaacgcgagaattactgggtgacggcggtcggcgacggccaggaggcgctcgaggagttctcgaagcaccacttcgatcttgtcatcctcgacctcatgctgccccgcgtgccgggcgagcgcgtctgccgcgccatccgcgacaactccgacgtgcccattatcatgctcaccgctaagggcgaggtggaagaccgcatcatcggtctggagctgggcgccgacgactacctggtgaagccgttcagcccccgcgagctggttgctcgcgcccgcgcgcttctgcgccgcgtgcacgccgattccgagccgcagcgcgaagtgctggagttcggcgagctcaccatcgacgtgtcggggcacaaagtgctggtcaacaacgaggagatcgatctcaccgccagcgagttcaagctgctcaccacgctgtcccgctacccgggtcgcgtgtactcgcgcatggagctggtggagaaggtgctgggctacgacttcgagggctacgagcgcaccatcgactcgcatgtgaagaacctgcgcgcgaagatcggcgacaacccgcgcagcccgaagtggctgcacaccgttcacggcgtgggctaccgcttcgaggatcccacgaaagttgcgcagtaaaccgacgtgcgagacgcaagcgaacaggctgcatcgccagcctccgatgcgcaagaaaccgcatcgcacaccccggtcgtcgagcgtttgacggtcgaagccgatacgggcaccacggggcccatcgtcgtgccgcacgagagcgacggcaaaaagcgccgcggcatccgtttcggctgggacaacctgacgtacaccacgcgcgtcacggccgcgttcgccttcatcgcggccatgaccgcgcttgtggccatcggcgtgctgtcgttcgtgtgggagcagcacttccagacgtatacgcaggccaacatctataaactcgccgaatccacggccgagcagatcgcggagatctactcggatacgggcacgctcgacaacgtcggcatcgcgacggttgcgggctatgcggcaaagctgaacggcgtgggcgtcaagatcttcgacaaccaaaccggcagcgtcgtgtacgattccacgattccgcccagcgaaaacggaaatgatatgccgggcaaggactacagtcgaggatcgctcgcgcctcctcccggagacagcgaccagctggccatcgcccccatcatcaccgacaacgtcgccgtcggatccgtccacatgtgggtgtacggctccgaggcgctgctcagtcagaccgacgaggaattccgtaacaactcgtaccaggccatggtgttcgcgacggcgctcgccatcgtgctggcatcatgcatcggcttcttgttcgcacgtacgctggtcagccccatcaaccgcatgaccaccacggcgaaggccatcaaggaaggcgacctgtcggcccgcaccgagctgcacggcgaggacgagatcgcgcacctgggcgagacgttcgatgcgatggccgactccatcgagcgcgaccgcgagctggagcgccgtctgaccaccgacgtggcacatgagctgcgtacgccgctgatggccatccaatccaccgtggaagcgatggtggacggcgtgttcgaggccgacgaggagcgcctggaaaccgtgaactccgaggtgcagcgcctcagccgcctggtagacgccatcttgaagctttcgcgtttggagagccgctctacgcccatgaagaaggaagtggtcaatgtgggcgagctgatcgccggcatcgtggccacgcacgaggcgttcgtagccgattccggcctcacgctgaagtacgagatggagcaaggcgtgcgcgtgctgggcgacgcggacatgattcgccaggcaaccgccaacctcatctcgaacgcggttcgttacacgtccgaagggggcttggttaccgtgcgcgtgaagcgcggcgacatcatggcgtccatcagcgtgcaggacacgggcatcggcctcacgcccgacgaggcgaagatggtgttctcgcgcttctggcgcgccgacgcgggacgcacgcgcgagagcggcggcctgggcatcggcttgtccgtggtgaaggagatcgtcgagcgccacaacggctgggtgcaggtggaaggccgcaagggagagggcgcatgcttcaccattcacatcccgctgtaccagggcgacgagcagcagcgcgggcagaaatcgcaaaaatcgcgtgggaagtcgcgtaaagaccagaaatagacgataatagggcgcgccgacggagaaggggagcgccgggtgccgcagagcggcgtttcgagagagcaacgaaaggaccagcatgaccggaatcgacatcaagcctgatgcacaagggaaagtccgcgatctgtacgatctgggcgacaagctgctgcttgtggcgacggaccgcatctcggcgttcgattacatcctggaagacgagatcccccacaagggcgcggtgctcacgcagctgtcgtgcttctggttcgagcttctggacggcgtggtggagaaccatctcatctcctccgacgtggccgacctgcccgagcagttccagccgtacgccgactacctgcgcggccgcttcatgctggtgaagaaggccgacatgttccccgccgagtgcattgtgcgcggctacctggccggcagcggcctcaaagagtaccagaagcagggcactgtgtgcggcatccagctgcccgagggcctggtgaactcgtcgaagcttcccgagcccatcttcacgccctcgacgaaggccgagatcggcgaccacgacgagaacatcagctacgagcgcctcgtggagatcatcggcgaggacgacgcttcgcagctgcgcgaccttgcgctgaaggtatacaccacggcgcgcgaccacgcggccgagcgcggcgtgatcatcgccgacacgaagttcgagttcggccgcctgaacggccagatcatcctggccgacgaggtgctgacgcccgattcgtcccgcttctggccgggcgatgagtacgccgagggcaaggaccagcccagcttcgacaagcagttcgtgcgcgactggctgaacgccaactgggatcgtcagggcaacccgccccgcctgccccaggacatcatcgaccgcaccagcgagaagtacatccaggcctacgagaagatcacgggtagaactttcgttccgtttgcctaacggcaaccggaacttctcgacgctgcgaggcgttgaggcgtccggccttgccgctccaagcttcgctcacgtgcaaaagcacgcttcgcaaagctttcacgacaattccgggcacctcaacgcctctcgctgactttgacggacctgcgaggttcgaggcaatcaacaaggagcaataacccatgtcccagcgtaaccctatgaacgaccggtaccagaccgacgagcatcgcggccagacgcgcaagagcgcggccaccatgaagccgaagacgaaggcggcttcgtcggtgcgcatccagcccaccgtgaagacgaagcagcagaagaaggccgacaagaaggccgcccgcgcgaagcagaccgagatcgatcggcagtactacaacccgcccacgccggagtacaagcgcctgcgcaagatctggtggggtcttttgatcggcgccatcgtgatgacggctatgtcgtggttcggccgcaccttcctgcccgaggtgggaacctatgtggtgctgggcctggcctatgtgtgcatcatcggcgccctgtacgtggacttctcgaaaatccgcaaggtgcgacgcgcctatcaggaagagatgatgtccaaaaaaaccaaggagatgcgcgcagcagaaaagcagcagaaggccgcgcagcgcgccgccaagcagaaggtggaggaggctccggccgtggaggaggcgcctaagaagcgcggcctgttcggcaacgggttccgcctgccgaagaagcaggaggccgagccggtggaggcgaaaacttccgacaaggattcgacgaagtaaggtggggaccatggtttctcgtgtctacgtggagaagaagcccggcttcgacggggaggcgaagcagctgaaagaggagctgcgcagcctgctgggcgtcggcgcgcttgagaatctccgcatggtgaatcgctacgacgtggaggggatctcggacgagctgttcgctcagtgcgtgcccaccgtgttcagcgagccgcagtccgacatcgcgacgctggagatgcccgaggcgaacggggcggcggtgttcgccgtggagtaccttcccggccagttcgaccagcgcgccgattctgcaagcgaatgcatccagctgatcagccagggcgagcgccccgaggtgcgcagcgcgaaggtgtacatgctggagggcgcgctgtccgacgaggacgtcgccgccatcaagcactacgtgatcaaccccatcgaagcgcgcgaggcgtcgcttgatgtgcgcgagacgctgcacatggagcagcccgtgccgggcatggtggagacggtggacgggttcctggagctggacgaggcgggtctggcggcgttcgtcgccgaccgcgggctggctatggacctggccgacatcgcgttctgccagcagtacttcgccgaagaggggcgcaaccccaccatcaccgagatcaagatgatcgacacgtactggtccgatcactgccgccacaccacgttcggcaccgtgctggacaacgtggcagtggaggacgaggccgtgcaggccgcgttcgagaagtacctcgagatgcgccatgagctgggccgcgatgaaaagccggtgtgcctcatggacatgggcaccatcggcgcgcgctggctgaaggcgaagggtgtgctgaccggcctcgatgagtccgaggagatcaacgcctgcaccgtgaagtgcaaggtggacgtggacggcgaggagcaggactggctgtacctgttcaagaacgagacgcacaaccatcctaccgaaatcgagccgttcggcggc

SEQ ID NO: 8646 - DNA, 1147 bp, Unknown
  gut microbiota DNA sequence
ctggaacagcccgtgccgggcatggtggagacggtggacgggttcctggagctggacgaggcgggcctggcggcgttcatcgccgaccgcggcctggccatggacctggccgacatcgcgttctgccagcagtacttcgccgaagaggggcgcaaccccaccatcaccgaaatcaagatgatcgacacgtactggtccgatcactgccgccacaccacgttcggcaccgtgctggacaacgtggcagtggaggacgaggccgtgcaggccgcgttcgagaagtaccttgagatgcgccacgagctgggccgcgacgagaagccggtgtgcctcatggacatgggcaccatcggcgcgcgctggctgaaggcgaagggcgtgctgaccggcctcgacgagtccgaggagatcaacgcctgcaccgtgaagtgcaaggtggacgtggacggcgaagagcaggactggctgtacctgttcaagaacgagacgcacaaccatcctaccgaaatcgagccgttcggcggcgcagccacctgcgtgggcggcgccatccgcgaccccttgtcgggccgcagctacgtctaccaggccatgcgcgtgacgggcgcggccgacccgctggttcccgtgagcgagacgctgccgggcaagctgccgcagcgcaagctggtgaccaccgcggccgcgggctactcttcatacggcaaccagatcggcttggcgaccggccaggtgaacgagctgtaccatcccggttacgccgcgaagcgcatggagatcggcgccgtggtgggcgccaccccggccgatcacgtgcgtcgcgagacgcccgcgtcgggcgacgtggtggtgctgctgggcggccgcaccggccgcgacggcatcggcggcgccacgggttcctcgaaggcgcacaagctggaatcgctcgaaagctgcggcgccgaggtgcagaagggcaacgcgcccgtggagcgcaagatccagcgcctgttccgtcggggcgacgcttgcaagctgatcaagcgctgcaacgacttcggcgcgggcggcgtgtccgtggccatcggcgagttggccgacggcctgttcatcgacctcaacaaggtgccgaagaagtacgacggccttgacggcaccgagctgg

SEQ ID NO: 8647 - DNA, 61540 bp, Unknown
  gut microbiota DNA sequence
ctgcaagctgatcaagcgctgcaacgacttcggcgcgggcggcgtgtccgtggccatcggcgagctggccgacggcctgttcatcgacctcaacaaggtgccgaagaagtacgacggccttgacggcaccgagctggccatctccgagagccaggagcgcatggccgttgccctggcggccgaggacgtggacgagttcatcggctacgcgcacgaggagaacctcgaagcaacccccatcgccacggtgacggaggaggcgcgcgtgcgcatggagtggaacggcgccgtcatcgtggacgtgagccgcgacttcctcaacagcaacggcgcggcgaagcaccaggacgtgcgcgtgctgccgggtggaacgtacgagcgcacctgggcgggcgacacgctggccgagcgcatgaacgcgctggtcaccgacttgaacgtgtgctcgaacaagggcctgtccgagcgcttcgactccaccatcggcgcgggcacggtgctcatgccgttcggcgggtcgcgccagctgacgccggcgatggccatggtggcgaagctgcccgtgttcggcgagaccaccacggtcagcggcatggcctggggcttcaacccctacctcaccgaggcgaaccagttcaccggctcgtacatcgccgtggtggagagcgtggcgcgcctcgtggccgccggcttcttccacaaggacatgtacctgacgttccaggagtacttcgagaagctgcgcgacgagcccgagcgctggggcaagcccgccgccgccgtgctgggcgcgctgatggcgcaggtggacctgggtatcggctccatcggcggcaaggactccatgtcgggcagtttcgagcagctggacgtgccgcccacgctggtgtcgttcgccacggccatcggctcggtggatcgcgcgacgtcgcccgagttcaagcaggcgggcagccgcgtggtgcgcatcgcgcccgcgtcgtacgacggtgtcacgcccgacgccgccggcttggtggaggcgttcgagctggtggagcgcttgatcggcgacggtgcggcgctggccgtgtccacgccgggatacggcgcgacggctgaggctctgttcaagatgagcgtgggcaacggcatcggcgtgaagctgactgattcggtgacggccgacgagctgttcgccccgtcgtacggcagcttcctcgtggagctggctccgtgcgtggagctgccgcatgcgtccgacgtcgtgcgcgtggacgaggtgggcgagacgaccgaggcctacgagttcgccgcctgcggcgaggtcatcgacctggtcgggttgcaggaagcgtgggagggccacctcgagtcggtgttcccgtaccgcgccgagggcgatgccgtggaaacggtgtccttcaccagtgccgcgccgctggtgtacaacggcaccatcgcgcgcccgcgcgtcatcatccccgtgttcccgggcaacaactgcgagtacgattcggcgcgcgccttcgagcaggcgggagctgtggccgagacgctcatcatcaacaatctgacccccgacaaggtggccgagagcaccgaggcgctggtgaaggccatcgagaacagccagatcatcatgatccccggcgggttctccggcggcgacgagcccgacggctcggccaagttcatcacggcgttcttccgcgctccggccgtcaccgaagcggtgcgcgacctgctgcagaaccgcgacggcctcatgctgggcatctgcaacggtttccaggcgctcgtgaagttgggtctcgtgccgttcggcgacatccgccccatggacgaggagtgccccacgctcacgttcaacaccatcggtcgtcatcagagccgtctggtgcgcacgcgcgtggcatcgaacctgtcgccgtggctgagccgctgcgaggtgggcgacatccatacggtgcccgtgagccacggcgagggccgcttcgtcgcgtcgcccgagctggcggcccagttggctgcgaacggccagatcgccacgcagtacgtggacgagcagggcgtgccgtcgatgagccttgacgtgaacccgaacggatcggtactggccatcgagggcatcaccagccccgacggccgcatcctcggcaagatgggccacagcgagcgccgcggctacggtctgtaccagaacgtccccggcgaccgctaccagcagctgttcgagggcggcgtgggttacttcacggactaggggcttctcgcatcaagttttctcgcgcggcgcatcttcgggtgcgccgcgcttgctatactggttgaaaaaggcctcgcggaaaggcggcttcatgaagatactgggtttgggtgttccggaaatgctcatcatgctgatgttgctggtgcccgtcgcactcgtggtcgcgctcatcgtggtgttggcgaagcgcgccggcagccaacagcctttgcccgatgagcgccagcgcgcgagcgcgcttgcctaccagcgtctttcgcagcttgacgacctgtataaacgcggcgccatcaccgaagaagagtacgcgttgaaaaagcaggagtgtatgcgcgatctgtaagcctgatcggaaaggcggctctcatggggttcatggatgggttcgagcgcgggttgtctggcaattaccgttacgagatcgcggggaaggcggtggtctgctcgcattgcggcggcgaggaattcgatgagcgctcggggcaattgaacacagccggcgcgtcgcttctcaacctcgattgggccaacgcgaccgcgcgtgtgcttgtatgccaaagctgcggtcatttggaatggtttctttaggaggagcatggatcccgaattcgtcaacctaacccccgagaaccttgccgacgagcatctttcctgcatcattcgcgtcaggaagccccatcccggcgtcgaggcgaagcgccaatggctcgccgatcggctgcgcgaaggccatgtgttccgaaagctgcaggtgaaagacccggttttcatcgagtacgcgccgcttgaaacggcgtgggttcccgtgctgggcgacaactacctgtacgtgtactgcctctgggcgtacggtgccggcaagggcaaaggctacgggcgcgcgctcatggagtactgcctggccgacgcgcgagtgcaaggcaagtcgggcgtgtgcctgctgggggcgaagaagcagaaggcgtggctgaccgatcaggcgttcgcgcggaagttcggcttcgaagtggtcgacgctaccgacgacggctacgagttgctggctctgtcgttcgacgggacggtgccgcggttcgcgccgcacgcgaaagcccaggctatcgacagcgacgagctgacgatctactacgatttccagtgcccttacgtgcccgagcgcatcgaggcgatccggcggtattgcgaggcgaacgacgtgccgctgacgctcatccaagtggattcgctgcaaaaggcgaaggagctgcccggcgtctttaacaactggggcgtgttctacaaagggaagttcgagacggtgaacgttctggataccacgtacctcaagaggatcctcaagaaataggagcgttgcagacgcgacaactcacggtgtcctgcgcatcatccagtccgttccctctccgaaggccgagcctttcaagctatggctcgcccaggttggcgccgagcgcatcgaggaaaccgtcgatcccgaacagggaatcgatcgcgcgttcgagctggtgctcaacatgcttgccgatgcgctgagcgacgtcgaggccctggaggcggggatgtccagcagcaccgccctgagcgatgtcagcacccaggagctgctctcgcgccttcgccgtcggacatccccagcccattgagcacgtaggagtcgctggacgtccaacagcggttcgcatcctcgcactcttcgctgcaagctccgggcgcgaatcgccggcgagcggcatcgcccgtgtgcgctcgtcggctctgcgcagcgcgggttcgccgtatgttggcggcttcgttcgggcgcgatcgggcttgccgctcgcgtgcttcttcgccgccgcttgcgggtcgctttcgttctctgctgctcgctgaccgagcgaggcgctacgcccgccatcggtcggcttcggcggcatcggttccgtgattgaatggcgcatcttttaaccgaaaacgctcgaaggcctggcggccccagagcggagaagggagtatgcgcatgcggcagcacacgacgaaccaaacaggcggtgaacggcgttcgcgccgattgcatccggcatggctcatcctcatcgcctgttgcttcctgcaagcgggaggcatgggcaccatcaacaacgcggcgggcatcatggttcccgccgtgctgggcgatctgcagttctcgcagggcagcttcatgctgtacttcacgatccagggtttgtgcatgacggcggcgcttcccgtggcggggaagctgttgccgaaggtgagcatgcgcgtgctggtgagcgtcggcatggtggcggccgcgctggcgttcgcgtccatggggcagttcaacgcggtgtggcagtggtacgtggcgggggcggtgctgggcgtggcggccgcgttcgcgttcctgctgccggcacccgtcatgataggcaactggttcaagaagaaggcgggccttgcgatgggcatcgccatggcctgctcgggcatcggcggggcggtgatgaacccgttgggcggcgcgctcatccaatcgttgggatggcggcccacctatgcggtgctcgccctgatcgcagccgtgctggtgctgccgttctcgctgctggtgatgaagttcaagccggccgacccgcgcgatgcctatggagccgacgaggtggaagacaccccggcgagcagcggagccgaaacggcgtccggcgtctcggcggctcgcgccgtgcgttcgctggcgttcgcgtgcgtgttcctggttgcgggattcctgtcgctcgagagcgcgtttttgcagctgatgcccacgtacgccggcaccgtcgggctcgccgccgtcgcagcgttccttccttccatcgccatgatcagcaacatcgtgggcaagctggtgctggggtggctggccgacgccgtggggccgcgcaacgcgacgctgtgcggcttcggcgtgggcgtgaccgcgttcgcgctgttcctagcctcgaacggcaacgtggggatggtcatggtggcggccgccttgttcggcgtgcttacggcgatggtgacggtgaacgtgccgctgctggtgcgcagcgcgttcggatcgaaggattacggcacgctgttctcgtacgtgagcatcggcacatcgctggtaggctcgctgggcatttcggtgtatgggttcctgttcgaccgcttcggctcgtacgatcccggcctgatgctgggcattggcacgggcgttgcgagcgccgcgctgctgctggtgggtatggctgcggcaaagcgcctgatgggcgccgcgcacgtgcgaagcggcgcggtgcaggcggaggagcccgcgttctaagagcgcgcttttttcttcgggacgatgcgttcgacgatgccctgggtgacgcggtggcctgccagctcggcaagcgagccgagggcgccgaccagggtttcgcgagcggtcccgtcgatgttcttggccgcctcgctcagcagggccaccgttttcgccccgccgaagaagacctcggtggcgttctgggcgcccgaggcctcgacggctttgaacagcgcgtcgacgatggccgccgcttcctcgtcggagtagcgcgccagccattcggtgagcagcgcgtcggtgaaccgggcgttttcggtgaggttgtcgaggtagacgaaatcgtcgccgtcgacctcccacgagaacgggctgtgctgcaaaaggccgcgctcggtgctgtgcaccacgagcggcggggtgtgcgactccatgagcataccgatgacggagtcctgcgggacggtgcggtggatgcggccgtccagctttctccaatcatcgggcgagaacgcgcccgctttgaaaccggggccgtcgtgcgtgtacacgcgctcgatgcggtcctgcacagcggcggacgcgttcagcgcggcgtacagcgcgaggttggcgcccttcgagtggccgcccacgaacagccggcgaggcaggtgcggcgctacggcctccaggtagcgcgcggcttgctcctgggcgggcacgggcgcggtgtagcacatgttgaagttctcgcgccagccggtgatggacgtgtcggttccgcggaagcccacgtaggcgaattccttcttgtagacgaacgtcatggcggcgaactgcgtctgccgctcggtatcgaacaggctgaggtaatcgcggatgaccatgtcgcgaaaccgcgggctggcggcgagtgccagcatattttccttcacgcggccagggatgaggcccgagaacatatgctcatagtgttcggcacgcaatgtatcgaggaagtgggcggggcgtcccgaaggggatagcaggttcttcacgatggtgccgagcctgccgaacgccttgcgctcgcgcagcggcggcacgatcccttcggcgcgcaccatgcagaactgggaaagcgccgccgaatcgaccgggttgaacggcttttcctcgaatgaggcgaactccgtgccgagatagtcgagaatgttcatgcagcagcgctcctagcatccgataccgcctgcgtcgcctctcatcataccgcgtctcgggcgctgccggccttcaatctgccgaccttcaacctctcggcgtttcgtcgtcgatcatggcgagtagctcctcgcgcgagttgatggcgagcttcgcgtagatgtggcgcacgtgggtgcgcacggtgttctcggagatgtagagcttctcggccacatagccgtgattgtagcctcgtcccaggtagtacagcacctcgcgctcgcgcggcgacagcccccgttcggctgccagcgtgtcgcagcggcggtggatgtacgtgcgcgagtcgtccgcgccgtgaggctcggtgcgccggccttcgcgctgccgcgagccttgcgcgaacgatatggcgatgagcgccaggtacacggtgagcatgatgagacagatcgtgcggccgtcggtgccgatgacggcgatgccgcacaggccggccacgaacgcgagcgctagcagcgcgagacaggccgggaatacgaacgtggcggcaaagggcacgctgcggacggcgctggccatgctgcaccagatggccagcgcgatcaccgcgaagctggcctgggtgagcacgtcgatgatacccgctgcgacatcgctgtcggagctgatgacgggcagcgcgagcagaagcgccacggcgatgggatacacggcctggttgagcaatctgagcggcgacgagtttgccttgcgcagcacgaacagcgcgacgacgatggccagcagcgacggcccgatgagcgatttccacgctcccagcggatcgggcaggcgcatctgctcgctcgagatgacgggatcccaggtgagcccgaagatgaagcaggtgatgcacgcccctacgaggggcatccacaatatggcggctgccttgcgcagccggatgcgatggtcatcctcgcttgcgctttcggcgccggcggggtgcggtgccgcagtctcgtcgttgaacgtgcgggcgacgaacagcagcgccaccgatgtgacaagcgagcatgcgatcagcgccaacccgatgggagagggggaaagcggctcggccgcgaaatggacgactgctgccgccacgatgccccatgcgctgttgaacagcaaattctccggttcgagccgcgcgaacaccgagccccacgccgtggcgagcatggcaagtcccgctccgaacgccaggccgaacatggcgggctcggcgaacggcagcgtcagctgcgtgtacagcggcagcatgaactgcactccgatggcgaccaggcaggcgcctgtcaccagaggcgccgtgcgggtgaggtcgggcgtgcgtcgatctgcgcgcttggccaacatggccagcgcggcgagcacgatgcccgcgcccgtcagcccccagccggcgtacaccgcgaaggggtgcagcgagggcgtcgcgcccgttccgtgctcagaaaagaagcggatcgcattgaggaagacggagaacagcagtcccgcgcccagcagcgcgggcttgaacgagacgggcgccggagacgcctgcttcgagtcgtgttgttgcgcgctttccatgccctccctgcaacgcctcggcgttttccctcgtagatagcgcaaatcaccaaattcagctatagggtgggcgcgtgcggcgcaccctgcggattccgaaatcatcgctttcagtgatggcgaaaccccggcctgcaccgtagtgtagccgaacgtccggcgccgcacaacagaagcgggcgacgccgggatcggaacatgggcacatgattgaagggagcgggaacatgggaaccacctcgaagcacagctggtcgcgtcgcgacttcttgaagggggcggccgccggcacgatgagcgtcgccgcgctgggagcgctgggcggatgctcgccgcagcagtcggcctccaccgcctcggcggcggccgccgattccggcgaagcgggcacgtacgacgtgatgcaggagctgtcgacgttcaaccgcggccagaatgccagcgcgaaggcgcctaccacgcccgaagagtacatcgccctcaagggcgacggcgtgctgtccgcgggcggcggctgcgagcagctgggcatcaagccggccgacttcatgctgaacaagccggcgtggttgggcgacgcgcccgtggtcagcgacatcgccgataccgaggactgcgacgtgctggtcatcggcgcgggcaacgcgggcaccgtggcggcgctgcgctgccaggaggaaggcgcgaacgtcttcttggccgatatgcagacctacgacgagtacgacgaatacgcctgcgacatggcctgctacaactcgaagctgttcctggacaaaggcacgcccgagatcgacaccaccgaggtgttcaacgagtacatgcgcctctcgcgcggccatgcgcaccagaagatcgtgcgcgactacgccatgcgctcgggcgagatgctcgactggatggtggggcacattcccgccgagtacgtggagaagtatgcgaagacctcgaactacaagggcaacgacaacttcaacggcgagtgctgcgggcagaggtcgtggccggccatgactcagtggcgcgacgaggaatccaacatcaacatgtggccgttcgtcatccgctcggtgcacgcggcgttcgaggaagccggcggcaccatcaagtggggttaccagggcgtggtgctggtgcaggacggcgacgcggtgaccggggccgtcttccaggatgtcgacggcgcgtaccaccagatcaacgcgaaggccgtggtcgtggcggcgggcgacttcggcggcaaccccgacatgcgcctcgacctgtccgaccagatgcgcaacctggcctggtcgtacggcaacgaccgcaccgacgccaccagcatcgggggcatgggccgcgacggctcgggcatccgcatgtgcatgtgggccggcggcacgatggagggcggcccccgcgccggccaggccgcgggcatcaacggtgtgccgggcttcgcgttcggcggcgcatggccgtgcttcggcaacgacggcaagcgcttcatgaacgagaccatggtgaagcacggctccaacggctacctggacatgcttcccgagggccagctgctggtgaacgtgaccgacgcgaactgggaagagtacctgtcgcaccaagggtacggccacgagacgatggaccgcagctcggactacatggtggaagaagtgcgcgagaacatggcgaactacaaaaccggcaaggacggcttcgacgtgcgcgccttctcccgcttcggcaaagagtactccacggtgtacgctgccgacacgcttgaggagctggccgagatcgtgggctacaccggcgaggccaagacgaactttctggccgaggtggagcgctacaacgagctgtgcgcgaagggccacgacgacgactggggctgcgacccgcagaacctgctgcccatcaaggacgctcccttcttcgcctcgttcggcaccacgggcggcaatccttccggcggcctgtgccagcatgcggccatctgcaccgacggccgctaccaggtgctcaccggcgagaagcagcccattgcgggcctgtacgccgccggcaacacctgtggccagcgctacggcatccagtacgccacgcccacggctggcaatagctgcggttcggcgctgacctccggctactgcgctgccgaaagcgtcatcgaggacctgaaggcgtaaagcggcccgcaaccgattcggggccggttggcgtatccctcctctccctccccgatgccagtcggcccatagcgcgcggcggctgctttcaagtggccgccgctccgcgcgagcagaagaaggagcaacgatcatgacagagaaacgcgatgcgatcgttcaggtgtccgtcccgttttgcgtggacgatcgcgcgcttcgccgcgagggcatgatcctcgggtgggatagcgcgcgcatggcgcgctacgccgacgcgctggtggccgagatcgaggcgaacgcggggcagttcgacgattgcctggtgcgcgccgtgcagctgggcggcggcgtggcatcgaacgcgggcgcggacatcgcgcgcatcgtgcgcgccgtgcggcaggtttgcgacgtggccgaggacgcgcccgtcgccatgcgttcgtccattgcgaacgtgagcggggcgaccatgccgtttttccgacgcgccggggtgacgcgcttcgacttcgagatgctgtcgctcaaccccgtcgacttcgtgcggctcaatcgggtggacaacctgaacgatctgcccattatctgcgaccatttcctgcattcgtacgcgaacgacacgttggggctggtgctggcgttcggccatgatgcttccgagggcggggacggtgcgctcaacgtgcggcgcacggcgctggcggccgcgcgctcgcatgcgacccacgcggagcttgtgcgggtggccgatgagctggcggcgggttgcgacgaggtcgcgcgccagctggacgagatgcgcggcgcgttgaccgagcatggcttcatggagtacctgcctcttcgctttgcgcgcgcaggcaaggaggaccgtttcgcgcagatggcggccgctggcgtgccgcagatcggtttcggcttgggtgcgattacgcgtatcgacggagccgagagcgtgaacacgcgcgacttggcgcgctactgcgccgcggaaggcgacttcgcgaagatcaccgaagaagtgcggaaaacgcgttaggcaccgttgcggaggagcggttgcttccttataatagcaggcgagccgcagggagcggctaactccccacggctctcgaactcgctacggcggttcggatgttattgtgcgcccggttcgtccctctgggacgaccggggttcgtctttcgaccacgcttgaagcgcgagcgaggccgccccgaccgccaagctgccgaaagcagctacgaggccgagaacctgcaagataactccggtaaggctgagtacaataccatccatggaggacacccccttccgtatatctagaattcggaaatggatgtaaagagggtgtgtcatcctccccgcctggcgggttcgtgcttcttagtataacaaccccatctcacgttttcatggcgcacatccagcgcagatcttcctcgatcttactgaaatcccacgcgtttacagtgcggattccacgtttcttgccgctgtttctcgcgcggattgcacgcgctttgcccttcgttcccgcgtggatcttgtcgaagccgtcgcggcgttgctcggcttcgaatatttcacgtgaaacattcgctctggctgtccgtttgacgcgcaagctccggccgcgcggcgtgtcgcctaggcgccgcgtctctcaaagcgccgtgcctcgtgcatccggcgaggccaccgatggcgaaaaagcattgaattcggaaattgcgtagcgaaccgcagacgtgctggtaatcccaatctatcatagtcccaggtcatgagatcgcttgcttccggcgctgctcggcggacccatcccggatgacgcgatcgcttccgaattcgatgtctttttgccattcgctgccctatcggctgctaaaccaggatcgacatgcaccgccgcgcgccgcttcccctgtcgggcggctggcgatcgggcgggacgggctcctggccgatggccgaagagggcttccgagccgccggcgagctttcgcggggcgggccgacccgggctatgtcaattctggtttgacagcggagggcaggtgggctgaccgaaatggcccgcagaagggcacgcacgccgcgcgctgcgcggggagcgggatgtcggacgcggtaggatgtcggataggggaagcgaaagggtcaggatgatatttgagggcaggcgagcaatccggccccgctcgttaaaaagcccgccgcgcgggaggcgcgacgggcttgcaacacggggtgcggagcgcggacgggacggctccgcaacacgacgctgagggcgaacccggtctagttggccgagtcgtcctgctgcccgtcgtcgctgttggacccgtttttctgggcgtactcttccggagtcatgacgtccaccacgttcacggtcatctcgaccacgttgaggccggtcatgtccttgaggtcgccgccgacaacctttttgatgtcgtcgaagatctcaggggcggacttgccgtactccatgatcacgtcgaggttgatcttcgcgttcgtgtcgtcgacgatatcggcgtccacgccctttgtcttgtctgcgccgcccaggccttcctggatgcgggagagaacgttgcccttcatgtcgatgatgccgtcgatcttctgagcggccatggaggagatcttctccacgacgttctcgtcgatgaccagtttgtacaccggctcggcggagacggagtcggccgtggcggcatcgctctttttcttatcggcgtccatatcggagtaggggttgtaggtggaagaggttgctggcttggtcatagtgctctgggtcatggtagttcctttctgtagcatgatggatcgggggggggcgaacgcctcgtgctgcgcgaatctcgcagggggatgggcgcggcacgcgaggcgtttcgctagttgaaacgttcgaggacctgtttcatctgctggcgcgtcttgcggtcgccgtcgcggtacttgccgatgaccacgccgatggcggcgaacacggccagcagcacggtgggccagaatcccacgatgaggatgagggctgccgcgacgaagccgatgatgccgtacagcaccgcatggctgtggttctccacgtacggcgagaacgcgcgcttcatgctggcgtacacgcccttgtcgcgcttcgtctcggccgctgcattcgccagcacgtcggacggtgtgtcggccgtacgctgcggagccttctgctcgtcgtgcttctggttcgaagacgcgtaagcgttcgtcgttttcggcttctgcttcgccgcctgcgactgcttgggcgccgacttcggagccggggtggccgcagggtggatgcgcatggtggactgagtcatcgtcgcatcacctactcgaccacgtgggcgggcaccggtttggtctggtgctgacggcgcgtgtcgtcggtatacttcgtggcctgctgcgtgaacgcgggtgtaaccacgtcggcgtcgcctgcgaacgtgatgcgcacggagtcgacggggtagccggtgaaggcttcaagcgtcgcggcgatctcgtcctgcagcttcgcgcccagctgtcccagctcggcgtttcgacccggatcgatcttcgcgtggatgctcatgcgcgggtcgtgcttgttcgtgatgtgaaccttgacgttgtccgtggacaggccgtgatggctctcgacgacgtgcttgaccgtggactggatggcgttctgcgtgatggcgatgctgccgttgtcgcgctcaagctccagctgcgagttcttgcccggagcagtgatggcgcgaatcaacacgaccagcaggcccagcgccgtgatgcctagcagaacggcctcgacgacgaagaaccacggcatgctcatgagccaggcgattgccgggaacagcggttcccaggcgaaccaaagggctgcgagcacgccgatgcccagcacggcagcaacgacgaacacgatcatgcaaaagcgtttgaactttcccatagatgccgcctttcttctagaatgcgcacgcccgatggcggtgcgctgccggatagagtgggactactctagaagaaagccgcaacgggcgcgcctggccgcgcaaaagtgccgccagccgtttgccgtgttgttgagcacccgtacccctttgcatgtccgacggctcggtaaaggggttcgggtcagtctatttgcgtgaacctgaacagctgcggacgggctatgggctcggtcgggccggggttcgcctcctcttccgcggcttgcgcgcgcagggcttcgccgtaggcgcgcagcgtttcctcgaggttgtcgaccggggttatgacgtaggttttcgtttcggtcgttccatcgtcgtacgtggccgtcaccttgagacgcgcctgcgcgatcatgtcggcgtatttgcggatgagcagcgcattgaggttttcgtgcatattgacgtcccattttcgacgatcgccgtagaactctcccgtcgtggcatcgtacagctccgccacctctccctccaacgggaacgaaacgcgcagggcgtgccatatctcggtcttgttcgcgttctgctcgtcgtagttcacggtgaagctcgtggtgcgatcttccgtataggggtcgtcgccctcctggtaggagaattcgggcatgcgggcgttcgtgtagaacagcacgcggtcgccttccaccgtgtaggtgagcgaagcgacgttcgttcccgtgcaggagaggtcgaacagatgggccactgagaggtagcgctgccccgagtcgggcgcgttgtcggcgttgttcggatctatctccgggtcgctgcgccacactttcgtgaagccgccgtatccgaagtcgtctgtgcccgcatcgagggcgaaggagtttttcgccgtcgcattgtcgagttgctgcgagatggcgaacgcgacgccgctcgcaagggcaagcacgcaagcggctgcgatgacggccgtgacgaagcggcgcgtacgatagccgctttggttgcaggtgcgcggtcggcgggtaggcttcgcgtgcaccgcctccgctgtgcgcaggcggtgcgcctcgcgcatcacgcgatcgtgcacgcggcctggcatctctatgtcgtccatcagcgcgcggtactggtcctgctcgggtgattgtcctgtccgtttcaaaggatgccccctttccccagcatcttcccgagttgcgttcgagcccggctcaggcgcgagcgaaccgtagcgggcgcgcagtgcacgaggcgggcgatttcctcggtcgagaatccctcgtagtagtgcagatgcacgatcaggcgcatcttgtcgggcaggcgtcctagcgctcgtccgagctcgctgtcctgcagggcgcgtgccgcatcgtcgctgcgaggatcttcgcggcccgcatcgggaaccgcgtcggtgagttcggcgcgtcgtttccaggccgaacggtgcaggtcgcggcagcggttgatggcgacgcagagcaaccatgccttgagatgctcgtcgtctttgaaagcggttgcgtctttcagcaggcgcaggaacacgtcttggcagatgtcttccgcgtcgtgcggggactgcgtttggttgagggccaggcggtagacggtgcttccccaggtgcgcatggcgcgctccatgaagtcgtcctgcctgagcgttggttgcatacggggtatcgcctccttgccaccaacacgaaaccggcttcggaaatgtgcccggaatgagaaaaaagcggcgaagcgggatttctcgccgcttcgccgcctgtgagcgccgccgaagggcggccttatgtcgcgggatcgccttttctggcggttccgcgcgacgagaccttttcgccgagctgccctgttgcgtccgccgccttcgctttacgcgtagatctctttctcctccacgaggtcgttcttgatcttgcccaccagcttctgcagcgcgtcgatgcagttcggtcggatgtcggcgccgatgagcacgtacatgatggagtcgcccacgttgagcacgccctcgttcagccacgtgcgcacgtagtatacgcccggccaggtgagggcctcttgcaccgctgcctccacgccggccgcgtcgtaggagaattccacctgggcgacctcgcccaggccctcgacgccttcgcgcacctgcttcttcggcgtgatgcgcacgatgccgttgtgggtgaggtacatgccgcactgcgcggcgttcggatcctgcttcgcttccgcgagccattgatcgatggacggttcctgctgagccatgccgctcccttcctcgaggatgatcgccccattatacgccattgagaatcgtgggagacgttgccatgaaggggccttgccgccgtcggccatcgcgtacggctcgtgcgggctcgcttcgtcatcgacctgacggcggattgggaagcgaggcggcagagatcgcgcgctatgcacgattatcggggctcgtcttcgaaggcgaagaaggaaagcccaggtcggaagaaacgacgatggcggagaatcgtacatagcgcgcgatctctgccatgcggagacgatccatcgcgggaccctgccggcacgggcaccatcctgcatcccgcttcgacgcgcacagatgtttcacgtgaaacatctgtgcgcgggcgggagcgaagggacgcgcgggcgggagcgaagggacgcgcgggcgggagcgaagggacgcgcgggcgggagcgggacgcgaggcgcggggagcatagacgcgcacatggggcgcgaaacgcggggagcgggcggatccgaagatgtttcacgtgaaacatctgtgcgcgttggttagaaagcaaccgtcgaccttccataacgttccccctgcatggagcggcgcttcggccggcttccaaaagccgtttagcgcctgccgcagggtggatgattgcgacattttcgatcagggtgtcgccgtgcgcgagcggggatgatagactaggcgaatccccaggacgcacgaaaggaatcgcatgtctcttcccgcagccgacttgagcaaacaaccggacaaccgcaccaccatggagctgggcgcggtgcttcccttgaccgccgaggtgaaggacgaccacctgtatgtgggcggcgtcgatatggtggagctggcgcgcgagcagggcacggcgctgtacgtcatggacgaggcggacatgcgcacgcgcatggaaacctacctcgcggcgttccgcagccgctatcagaactccgatgtcgtgtacgccagcaaggcgttcctcaacaaggaggccgcgcgcatcgtagccgacgaggggctgtgcctcgacgtgtcaggcggcggcgagctggccatcgcgttggccgcgggcttcccgaccgagcgcatcttcatgcacggcaacaataaaacgccgcgcgagctgcgcgaagccatccaggcgggcgttggccgcatcatcatcgacagccgcatcgagctcaagcgcatctccgagatcgcgggcgagctgggcgtcgtgcagcctatttacatgcgcatcacgccgggtgtcgaggccgacacccatcagtacatccgcacgggttgcgaggactcgaagttcggcttcaccatgcgcgacgacttcgcctacgggtgcgtgaaggacgtgctggcggccccgaacgtgaggctggcgggtctgcactgccacatcggctcgcagatattcgcgctgcattcctaccctgaggccgtcgaggtcatggtggagcttatggcgcgcatcgaggaagggtacggctatcgtatagaggagctggacgtgggcggcggcctgggcatcgcctacacggccgacgacaagccggcttccatcgacgagttcgccgaaacggtcacgtcggcggtgcacgcggcgtgcgagaagttcggcgtgcccgagccgcgcctgctcaccgagccgggccgcagcctggtggccacggcgggcgtgacgctgtacacggtgggcattctgaaaacgctgccgggcatccgcaagtacgtggcggtggacggcggcatgtccgacaacatccgcacggcgctgtaccacgccgattacgagccggtcatcgcgaacaaggcgggtcagccgcgcaccgagatcgtcaccatcgcgggcaagcactgcgaaagcggcgacgccgtggtcatcgacatgccgatgcagcaccccgacctgggcgacatcgtcgccgtcttcggcacgggcgcgtactgctacactatggccagcaactacaacggccagccgcggccggccatcgtgttcgtgaaggacggccaggcccgcgtgaccacgcgacgcgaaacgtacgaagacctgatgagccgagacatttaggaaaagggagcgcagcatgacggtaaaactgggactggtgggcacgggcacggtcggcggcgggtgcatcgacatcctgaagaaccaccgcgaggatttcaagcgccactacggcatcgacgtggagctcgtgcgcgtgtgctcgcgcaaccccgagcaggctatcgcgcacggcgtggaggacatcttcacgcaggattaccaggacatcctgaacgatccggacatcgacatcgtggtggagctgatcggcggcaccaccgtggcgcgcgacatcgtggtgggcgctctcaaggcgggcaagaacgtggtcacggccaacaaggcgctcatggcaacgtacggcgaagaggtcatgggcgcggccgacgaggccggcaaggagatcgcgttcgaagccagcgtgggcggcggcatccccatcatcgacccgatgaagcactcgctcatcgccaacgagatcagctcggtcatgggtatcgtgaacggcacgacgaactacatgctcacgcgtatggtggaggacgggctcagctacgacgccgcgctcaaggaggcacaggagaagggcttcgcggaggccgaccccaccgccgacgtggacgggttcgacgccgccgcgaaaatcgccatcctcgcgtccatcgcgttcaactcgcgcgtgaccatcgacgacgtgcacaccgagggcatccgcaacgtcaccacgatggacttggacgcagcgcgcgacatgggctactgcgtgaagctgctggcgctggcgcaccgcaccgacgagggcgtggacgtgcgcgtgcatcccacgatgctgccgctgtcgcaccagctggccaccgttgacggcgtgtacaacgccatctacgtcacaggcgacgccgtgggcgagacgatgttcttcggcgagggcgcgggcgcgggcccggccgccagcgccgtgatgggcgacgtggtggaagtggcgcgccatgtcacgctgggcgtggggccgctggtgggctgcacctgcaccgacgagcttcccatcgtgccgatggacgacctcaagacgaagtactacatccgcttcaaggtggccgaccgctcaggcgtgctggccgcgatggccggcgtgttcgccaagcacaacgtcagcgtgtactcggtggtgcagcgcggcaagaaggaaagcggccaggtggatctcgtgtacgtcacccacaccgcgcgcgagaagagcgtgcgcgacgtgctggccgagatcgccgagctcgacgacgtgctgcgcgatgagcccagcgtcatccgcgtggaggagtgatcctgcgcgcacatcgacgcccctcgaacggcctcgcctcgtgcggggccgttcgttttacactacccccttagcagcgacctgggcttcctctataatcatgccttatcagagggcatattggcacatcggggacagagaggggcgctcgtgcaattcgcagtagattcgctcctcgacggactgtccgagctcgtgtacatcagcgaccccgacacctatcagctgctgttcgtcaacaaggccggcaaagaggcttacggccaggacatcgccgacggaacgcacctgtgctacgccgcgctgcagaaccgcacgtccccctgcccgttctgcacgaacaaccgcccgagcggcggcgcgttcctcgaatgggagcacacgagccccatcacgaagcatcactacctgttgcgcgacaagctgatcgactggaacggcaagcaagcgcgcctcgagatcgcgttcgacataaccgatcacgaccgcgagaaggaatcgttcaagttcctcgcaagcgcgaacggtttgaacgtcgaatgcatccgggttctggagaacgacgatctcgatgcggcgctcaacgcggtgttgggcatggtgggcgagttcttgcaggccgatcgcacctacatcttcaacatcgtgagccatcgcatgtggaacgcctacgagtggtgcgcgcagggcgtgtctcccgagatccagaacctgtccgatttgccgttgtcgctgatcgatcactggatcgagcggttcacccgcggggaagcggtcatcatcaactcggtggacgacctgcaggacggcgagcgcgccgacgagtacgaggcgctgtccgtccagggcatccagtcgctcgtggtcgttccgctcgaagtggacggcaggctcgtaggctatatgggagcagacgatccgaagaaaggccgcctggaaatcattgagaagccgctggtcagcctggcgtcgttcatctccgccagcatgaagcgcgcgatggcggagcgccaggttgacgagctgacctggaaagacggattgaccggtgcgtactcgcgcagcgcgttccatcgcgattacgactgcgggacgttcgagagcatcgggttcgtgctggtggatgccgaccgtcttgcggtggtgaaccgggagcgcagccgcgacgagggcgacgaggtcctgcggcgcatctgctcttccatgcgcgaggtgttcggcgagggcgtgtaccgcatcggcgacgacgagttctgcgcggtggccctgccgcttgaatacgaggagttcgaccgcatgacgcgcagcctgacggcccgcttcgccgaggccgggctgcccgcttcggtggggcttgcctggagcgagcgctgcgaagacgcgaccgtgctgctgaacacggcgggcgaccgcatgcgccgcgtcaagatcgggcggcatcgggcaaccgatctgggcatcgacttggcgcaggacggagcggtgaacgacctcatccgccccggcggcgcgcgggacgcggtggaggccgggctgctcgacatcttcctcatgcctcaggtggcaacgcaaaccggtgcgctggtaggggccgaagcgctcatccgctacctcgaccccgagcgggggatcgaggtgcagccggcatccttcgttcccgcgttggaggacatggacgagatcgccgatgtggacttcttcgccctgacgcgcgcgtgcgagacggttgcgcgctggcagcgcgaaggccgtgcggcagtgcccatcgcggtgaacttctcgcgcatgacggtgggggaagagggatttgtcgatcgggtggcggaaacggtcgcgcgcttcggcgtggacccgtcgctcatcgagatcgaagtgaccgagtcggcgcgcgggcgcggaggcgacctgctgcgctgcgtggcggacgatctgcggggccgcggtttcagcgtggccgtcgacgacttcggggtggacaacgcgaacgtgtcgctgttcgtgcagctggaattcgacgtgctgaagatggaccggtcgttgatctggggcatcgatgccacggatcgcaccatgcgcgtggtgagcggcctcgcgtctttgtgcgacgacctgagcatcgagtcggtggccgaaggcatcgagaccgagcagcaactggaggcgctgaagacgacgggatgcacgagggcgcaggggtatctcatcgggaggccgtccgctatcgacgagttcgagcggcggttcatggcgtaaggacgcgatgcgccgcgaatgcggagcgccttttcctgtgggcgctttatggcagcaacatgtcagttcgatgacatcggctcgtcttggtcgaaaaataatcttactttaatactatatttcttcagagatcgaaagcggccgtgcgacggtcggcgtcgtgcgcggaagcgcgtttgcgctgcgtgcggccaggcaggcatgaaggagaagaggttcgcgtgaagggttttctggagcggttgcagtggaagctgtcgggcatgatgcaggggcgccgcggcgccgacacattctccaacttcttggtggttgcgggtatcgtgctactgttcgcctcgctgattcctgggcttgacctgctgtcttgggtggcgctgatcgtgctggcgtattcgctgttccgcagctactcgaagaacatcgccgcccgcgaccgcgagaacgcgacgttcgagcgcatcgtggagaagccgcgcaagcagctgtcgctgatgcgcaagaagtggacgaaccgcaagaccacgcgctacttcaagtgcaagggttgcggccaggtgctgtcggtgccgcgcggcaagggcacgctgcgcgtggtgtgcccgaagtgcaagaccgagacgaagcagaagtcgtaaaggtccgccgtggatatcgcagctttcaagcgcgagctgttcgccatcacctacgacttgcagaagatactgcacgatacgatgacgccgatctgccaggagcacggcctgacgttgcagcagatgcacgtgctggtggagctgatgcgcacgccgggtttgaccgcgggccagctgagcgaccgcgccggcatcctgcgcacgaacttctcgcccgtgtgccgcaagctggagaatcgagggctcatcgagcgccagcgcagccagaccgaccgccggtcgctgcggctgcatgtcaccgacgaaggccgcgcgctgttggccagcgtcgacggcgaggtgcagcgtcgttacggcagggcgttctcggccgagccgcaagagacgttcgatgcgatcctcgaaggtttccaggcgctcagcgccttttcgggaaagctggtgcgctgaggatgttcggatacgtggtgccccgtttggagggcttggacgaagccgagcgcgaacgctaccatcgagcgtactgcgggttgtgtcgcgcgatcggcgagcgatgcgggcagcactgtcgcttggcgctgacgtacgacctggtgtttttggcgctgttgctgggctcgctgtacgagccggaggagcgcgagggcgagggacgctgcgcgccccatccggtgaaggcgcacgggttcgtgcgttcggcatgtatcgactatgcggccgacgtgacggtggcgcttgcgtactacaagggcctcgacgactggaacgacgatcgcagcgtgcgggctcgggcgtttgcgggcatgctggccggatcctaccgtgccatccgcgaaaggaaccctcgcatctgcgaggccgtcgagacgggcatggccgacatcggagccatcgaggccgctgcgcgcgaagcgggcgccgctccgggcggcgaggtgcccgctcccgatgcggcggccaaccgcttcggcgtgctgatgggcgagctgttcgtgtaccgtcccgacgattactgggcggacgacctgcggacggtgggcgcccgtctgggcaagttcgtgtacgtgatggacgccgtgatggactacgaggacgaccgggcatcgggcagctataacccgctggttgctatggatatgagcgcggaggatatgcgcgaggatctgcacctgctggcggcgggcgtggccgaggcgttcgagcgcttgccgctggagcgcgacctgcgcctgctgcgcagcgtggtgtacgcgggcgtgtggcagaagtactacgcgttggaaaacgataaggagaagcgccgtggttgagaatccctacgacgtgctgggcgtgagccgtgatgcgtccgccgacgaggtgaagaaggcgtaccgcaagaaggctcgcgagaaccatcccgatctgaacccgaacgatcctgcggcggcggatcgcatgaacaagatcaacgaggcgtacgaccgcatcgtcaaccccgagaagtacgcggcgcgcgaccgtcgcgccggggcggcatccgggccgcagggtagcgcgggctacggaggcggcgcgggatacggcggagcaggcggcggagcaggccaggggcagggcgcgggcggttcgggttacgggaccgaggggccgtacggctggtcgggcggcttcgggttcgacttcgacgacctgttcggctttggcggcgcaggttacggcagccgcgagcccatccatcccgaggcggccgcgggcgacaacgtacagatgcgcaacgccatcgacgccatcaacgccgggcgcggtcagcaggcggtggacatcctgaacacggtgaccagcgacggccgctcggcccgctggtactacctcagcgcgctggccaacgacgcggcgggcaacacgctgatggcgctcgagcagatcaggcgcgcggtgcgcatggatccgaacaacccggactaccagcgcgcgcagcggcagttccagcagactggccaaacctaccagcaggaaagccaatcgcaaggcttcagcatgggcatcgaccccagcatcctctgctgcggcatctggtgcctgggcccctcgttgtgccggctgtgcgggatgccgttttaggttccggcggcctgccggccgtcggaaccgctcgacgctgcggcttcccatggtgcccgatctcgcggcgagtccgagggcttgcgtaccgaagtacgccacgccctcgccctccccacgatctcgggcaccacggaaaccctcgctgacgctacgaactaccggtgattcgagttttcgcacttgcacctatgcaatctcaacccgaaaggacgcactcatggcaacgatcggcatcgacttaggaacgacgaacagctgcgcggctacggtggagggcggccggcccgttatcgtgccgaacgcggaaggggagcgcaccacgcccagcgtgatcgcgttttcgaaggaaggcgagcgcctggtgggaaccatcgcgtgccgccaggcggcggtgaaccccgaccgcaccatcgagtcggtcaagcgccgcatgggcagcgattggcgcgccaacatcgacggcaagccctactcgccgcaggagctgtcggccatgatcctgcgcaaactgcgccgcgatgccgaggcgtttcttggccaggatgtcacgcaggcggttatcacggtgcccgcgtacttcgacgatgcgcagcgccaggccacgaaggacgccgggcgcattgcaggcctcgacgtgctgcgcatcatcaacgagcccacggctgcagctctcgcctacggcttggacaacggcacgccgcagaaggtgatggtgtacgacctgggcggcggcacgttcgacgtgtcggtcatcgagatcggcgacgacgtcattgaggtgctggccacgtcgggcgacaaccatctgggcggcgacgacttcgacgagcgcgtggctgcgcacctgctggacgccttcaagcgcgagcatggggttgacctgcggggcaaccaggcggccatgcagcgcgtcaccgaggcggcccgcgaggcgaagaaggagctttcgtcgctcgataccgcgcatgtcaacctcccgttcttggcgcagggcccgtcgggcccgctgcacctcgaggccacgctcacgcgcgccgcgttcaacgacatgacgcgcgatctggtggagcgcacgtcgggtcccgtgcagaccgcgctcaacgacgccggcatcgccgcgtccgagctgggctgcgtgctgctggtgggcggctccacgcgcattccggccgttcaggaccatgtgcgcaagctcacgggcaaggagccgtccgcgtccatcaaccccgacgagtgcgtagccatgggcgccgctatccagggtgccacgctgtccggcacgtcgacgggcctggtgaaggccgataacagcatcctgcttttagacgtgacgccgctcagcctgtccatcgagacggtgggcggcgtggcgacgcgcctcgtggagcgcaacaccacgctgccggtgcactactcgcaggtgttcagcaccgccgccgcgttccagaccagcgtggagatccacgtgctgcagggcgagcgccccatggcgaaggacaacaagtccatcggcacgttcaagctgaagggcatcaagcgcgcgccggccggcgtgccgcagatcgaggtgacgttcgacatcgacgcgaacggcatcctcaccgtgtcggcgaaggatctggacacgggcaaggcgcagtccatcaccatcgacgactccggccgcatgtccgacgacgacatcgagcgcgccattcgcgatgccgagcagtacgccgcgcaggacagcgagcgacgcgaggccatgctggcgcgcgaggaggcgcagggtctgctgaacgaggtggaccgggcgctcggccaggttggaaagcagttggagaaagacgagaagaagcaggtcaaggccgacgccgaaacgctgcgcaaggcgctgtcgaagcgccccgccggtttcggcaagaaggcgcgcgaggccgaggcggcgtcggttgacaacgtgtccgacatcaaggcggccgccgagcgcttgaggacatcgagcgcccatgtgcgcgagctgctggggaagcaagggtagggggcgcgggatctgacatgtcgacggcggcgggcgagatgctcgccgccttgggcgcaaaacggcgcccatgacaatgtttcccatggagaactcggagtcagggcgcctcgagaagcttgcgagctgggcatatgccgatccgcttctcgacgatccggcgcaagggggctgaaaggccgcccaaaattgtcatgggttgcattttgcgcccacgtcccggcggtcggcgctttctagtatcatggttcgcagcgggcgcgcggctgcgcggtgaaagagaaggaagggacccctcatggagcagtacaagcaagagttcatcgagttcatggttgaaagcgaagtgctcaagttcggcgagttcacgctgaaaagcggcaggaagtcccccttcttcatgaatgcgggcgcctacgtgacgggcgagcagctgcaccgcttgggcttgtattacgcgcgcgccatccatgatacttttgggctggacttcgacgtggtgttcgggccggcgtacaagggcattccgctgtcggtgatcacggtcatcggcttgcaggagctgtacggcaaggaagcgcgctactgctccaaccgcaaggaagtcaaagaccacggcgccgatgcgggcaacctgctgggaagcgagctgcacgacggcgaccgcgtgatcatggtggaggacgtcaccacgtccggcaagtccatagatgagacgtatcccgtgctcaagggcgcggccgatgtggacgtcaagggcctcattgtgtcgctcaaccgcatggaagtgggcaaaggcggcgtagtgactgcgcagcaggaagtgcaggagaagtacggtttccccgtcgcgtccatcgtgagcatggccgaggtgaccgaatgcctgtacaaccgcgaagtgcaggggcgcgtggtcattgacgacgacgtgaaggcggcgctggatgcctactacgagcagtacggcgtgaagtaaggctgagccgaccccctggtttcttcagctgttcccgtccaagcgaatgcgaaggcccgatcgacgccatcatgcgcgtcgatcgggcctttcaggaggggaggggattttgggggtcggctacttcgccaggttcttcgcgatcatgcggccgaacgtgacggtgcggccgcaggcgttgccggtcgagaggttcggatacgtcatggagtagtatccgcccgagtcgttgccggtcacgtacagaccctcgatcacgctgccgtctgcgcgcagcgcctggccttgggtgttgatgttgatcccgtccatggtgcacaacagcatgccggtgttgcggatgccgtagaacggcgggtttcgcacgggtgagagacggaacggctctttcccgaaatcggggtcgacctgattatcgtagttctcgttattgcgctccaccgtggcgatgagcgcgtcggcgggcaacccgagcttcccggccagctcttccaaggtgtcggctttttggatgtagcccttggccgccagctcttcgttcatgcccataaccgcctggatggggatgttcggcgcggcgccgttgtcgaaggggaagaggcgcgagcatccgtgcatgtcgaattgctcggcgtaggtggcgaaatcggcatcccagagcgtgacgtggatggaacccggctgctgggcgtcggagtgcagcacgaagtcgtacgtgccggattcgttgcagaagcgctcgccgttcaggttcaccttgagccagggctggcttcccatccagaagagcgtgcctacgccgcaatcggctccgccaagcgagtcggccggcaggccgccgcgatcgaacagcatgctggaatgcgtatcgtccatcttcgcacccgcccacaggcaggccttgatgccgtcgccttcgcaacccggctgcgcggagttgaacccatacaggctggtggtatgcggctgcagcgccttctgcatgtcgacgttgatgccgtagccgccggtggataccagcacgcccttgctggcgttgacctggatgtatccgttctcgcctttgccgatggcgccgaccaccttgtcgccttccacaaccaacttgaccatgggcgtgttgtagcggaacgtcacatggccggtcttctcggcgtaatcggacagcacggtgaatccgttaagcgagccatcttccggccaggcgggcgaatgaccggttgcccagtgcttgtagttcgtctcgtgcttttcttcggcggcttcatgccagagcttcacgccgtactggtcgagcacggtctcgtaccagtcgatggtttcgcccgatttttcgtaccacgtcttatgaaggttgagattgcattggcctgcggcgtagtggttcatgtcgagcaggtactcctgcagatccatcgtgtatccgctttcctgctgaaggcgagagttcacgcctccgacgtcgtcgcgcacgacgccgccgttgtacttctccagaacgaacgtctcgatgccctcttctccggctgcgcatgcggcgaacaggccgcctgtgccagcgccgacgatcaggaattcggtgtcgatggtttcgacgatgtcgctttcctgaacggtcggctccgagcccagccaatcggacgatgtgctgcccgtttcagcgttcgcttcttcggcgcccttgttctccttcggcgcgcatccggccagtcccaaaacggctccggtgcttgccaaggctgttcctgcgaggaagcttcgacgagatatgccctgtgcatgtttggtgctcataggtccctcccttgttcgcgagttgtgcaggcggtgctccgcgctgcggcggttcgagggtgcatcctagggtcgccgtgggcaaacttcatcaccctcagtgggtaatttttgggtaaccccaggtagaaagcttcttacgccggttaaccagatggagtgtttcggctacaatacgggcatgttgagatcacgggagcagaacggcgagggggtcgcgccgccgaaggcgggcttgttctcgtttgcgcagggccttgcgttggcgttgctgacgttgagcagttggtcgctgaacgtgcatctgtttcctctgtacgacacgcagctttccttcattcgagagctgtgtacgttagcgaacggcgccgcgctggtggctgtcgccgtcgtgtcggtgcgtcgtccgcgtgcgttgcgcaggcaggtgctcatgggcattgcgatcttcggagctgcgggagggtcgctgctcgtgtgggcgggtgatcggctgggatcgatgggcgtcatgctggcaggcgcctgcctggtatccgttgccgagggtgcgtgcgcgatcctggtgggcatagccctgtgctctgttccgacgaagctcgcgtccatctgcatcgtgacgggattgctggcatgcgccggcgcgaaacaggcgattgcggtgggctattcggagtttgcgcttgccgtccatgcagccctcttgctaggagctgcgttgttggcgaatccgactgcttcggaaacaatggcacggctttctcgcgacgaatcgccgcacgatatggccatcacgcagccttcgtcgttcttgccgttcggccatcaactattcgtctgcctccttctgttcagcgcggtccagggcttcatgctcacgttcggagaaaccgggggcattcctgccacgtcgatctggagcctcgcgattttggcggtggtccttgttgtcgcatgccttgctccccgccggttgacgaccgatgcgcttttgaagctggccgcgctgcttgcgatcgcggggcttctgctcgttcccgcttcggacttgattcggttctccatctcgaacggtttgatcagctgcgggatcgctgcgttcgacgtgttccagtggatcgtgctcacggcgttggcccggcgcaacatgcatggtgccgtttcggttttcgcttggggctccgcgatgcatgccattggcgtcatcctaggagccaatgccggccgtttcgtgaaccactattggacgagcgatgtgcaggtggtggttctggcggtggctggtatcgtgttttgccttgtcgttgccatgtcggtttttctgcagcacttcagtttcgagaaaaccatcaacggcgtgcgcgagagcgttccgcctgttttggtcgacagcgcagatgaagacgatgcttccgaggagagggctctgaccgttgacgagcggtgcgaggtcctctcgcagcagaaggggctcacgaagcgagagaccgaggtgctgcacttgctggcgcgcggtaggacgggcgtgttcatccagcacgagctatgcgtgtcgtacaacaccatcaaagcgcacgtgaagcatatctaccagaagctggacgtccatacccatcaggagctgatcgatctggtggaggatcttgggtagctgtctcgcactcggatgcgttaactctgggcaaaatcaagaccctggtcaaactcggatgcgaagtttctgatactctttcgtggaacaagaagacgattcgccgggcgccggtttagcggcgttcggcatgccttgagggggtatcgtatggacgcattccgcatcggcgtgatcttcgattgcgacgggacgctgatcgactcgatgatggtgtggcgcgagacggaagccggtttggcgcggcgtgcgaacgtgacgttgacggcggccgaaatcgatgcgctcaccgcgatgaccattcccgagtgcggcgcgttcttccacgagcgcttcggcttgggttcgtcgggtgacgaggtggtcgccatgatggacgagctcatgttggagttctaccgcgagcgcgctctggcgcggccgggagcgctcgagttcgtgcaggcgttggccgagcgcggggtgcgcatgagtgtggcgtcgtccagcccgcagccgtacttgcaggccgggcttgagcgctgcgggttcgcgccgtacctcgacgccatcgtgtcggttgacgacgtgggcgcctcgaagcgcgagcccgctgtgtacgatcacgctcgcgaggcgatgggcacgccgcttgccgccacctggggcgtcgaggactcggtgtacgccgtgcgcacgctgaaagccgcgaactaccgcacgctcggcatctacgactgcgatatctcgggcacgtgcgagcagctggcagccgaggccgagcggttcatcacgaccttcgaggatttggacgtcgacacgttcctcggttggaactaaaagaggcgaggggtgcttcgacttgaagcgccccccgttttgttcccgctagatctgcttctcgatccaggcgacaagctcgtcgtaactcatagtaccgttcgcgacggcgatgacggtgtcgaagaagtcctgcgtacgaggcttgaactttactccgttaccgtgtaggaaggcgatgatgagagccgttcccgttcgcttgtttccgtcgtcgaaggggtggttcttgatgaccccgtagccgtatcgagccgctttctcatgcacggaaggataaagatcttgtcctccgaaagaggcgaaaggctgagctagagccgaatcaagaagcccttcgtcgcgaactcctggcattcctccgttacgtttcagttggtcttcatgaatggcgagcacgatatgcttgggtatgggagaaggatcgcgcccgctcatttcgacagagcctcaaacaaatcgcggtactcgtccgcagcttccaagtatgcatctaaatacatggttccattctcgccgtccgaggcattgtcgtcgatgggaacgatttttacatagggtttgcttcccttgatgaccgttacctcgatattgtcctcatacacgcgctttgcaatggtcggaaattgcgcgcgggcttccgatgccttgactgtgaggggcatggcgattcctcctttcggttttctccggttgctatctatgccgatattatagcataaaaaacagctgaaaaaagagcataatcgaggatcaaatgaaagaggaagttctcttatcgccaagggtcttcctggaaggtcggctcgggggttggcgggcggtcgctgaacgggtcgtagccgtcgtcgtcttcctgggcggggcgcaggaacgggtcggatgacgcttcggacttcgaagccgcgctcttagtcggctgcgcgcctgcgaccggcgtcaccaccggtcgcaggatgtagcgcggtttgcgctgggagtcactcatggacgctgtcctcttcggtgcctactttcgccaaatcgtagggcgtggtctggtacacataatagttcaaccagttcgtatacaacagctgcgcgtgcgcgcgccaggtgacgcgaggggcttgcgtcggatcgtcgttcgggaagtagtggcgaggcagcggcatgtccaggcctttcgcgatatcgcgctcgtactcggccatgagcgtgtcggcgtcgtactcggggtggccgaacacgaagaaatgccggctgtcggtgctcttcgcgatgtagacgccggcctcgtcggagacggcgatcagctcgaggtcggggtgcgcctcgatgtcggcagcgtgcacctcggtgtaacgcgagtgcggcgctcggaacgagtcgttgaacccgcgcaccagcggcgacgacggcttcaccacttcgtggtcgaacacgccgaacagcttgttctccagctcgtacttggggatgccgtaatggtggtagatgccggcctgcgcgccccagcagatgtggaaggtggagtgcacgttcgtggcggaccagtccatgatgcgcgcgagctcgtcccaataatccacgtcctcaaagtcgagcagctcaaccggcgctccggtgatgatcatgccgtcgaagcgctggtccttgatctcgtcgaaggtggtgtagaacgtgtcgaggtgctgctcggacacgttcttcgcctcgtggctggccgtttgcagcaggctcacctcgatttgcagcggggtgttcgacagtttgcgcatgatctgcgtctcggtgacgatcttcgtgggcatgaggttgagcagcagcaccttcagcgggcgaatgtcctggtgcatggcgcggtactcggtcatcacgaagatattctcgccctcgagcacctcggtcgcgggcagggagtcggggattctgatgggcatgggaaacctcgcatttcgtagatcgtcgcggtatcgcgcgggcacgctggtgccggtcgtaacggtctgtatcatgataccttctaatcagatgaccggtttatctgaattatcgataacatgctatcggaagatagaactaccgtcgcgtaaaccatgatggcataatgagccggatcgcaagagcgcaatccgcaatcccgcaacaaggagcatccatgagcgaatccatcagcaccacctgcgtacagggcggctaccgtcccggcgacggcgagccgcgccagattcccatctaccagtccaccacctggaagtacgacacgagcgagcacatgggccgcctgttcgacctcgaggaggccgggtacttctacacgcgtctggcgaaccccacgaacgacttcgtggcggccaaaatcgccgagctcgagggcggcacggcggccatgctcacgtcgtcgggccaggctgcgaacttcttcgccgtgttcaacatcgccggcgcgggcgatcatgtcgtagccagctcggccatctacggcggcacgtacaacctgctggccgtgaccatgaagcgcatgggcctggaatgcacgttcgtttcgcccgactgcaccgacgaggagctggaggccgcgttccggccgaacacgaaggccgtgttcggcgaggccatcgcgaatccggcgctggcggtgctcgacatcgagcgcttcgccgccgccgcgcacgcgcacggggtgccgctgatcgtggacaacacgttccccacgccggtgaactgccgtcccatcgagtggggcgccgacatcgtgacgcactccaccacgaagtacatggacggccatggcgccagcgtgggcggggccatcgtggactccgggaagttcgattggacggcgcatgccgacaagttccccggcctgtgcgagcccgacgagagctaccacggagtgacgtacaccgagcgcttcggcttgggcggcgcgttcatcacgaaggcgacggcccagctcatgcgcgacttcggcgccatccagtcgccgcagaacgcctacctcgtcaacctggggctggaaagcctgcacctgcgcatggcgcagcacagcaagaacggcctggcgttggcgcagcatctggccgcgcatccgaagatcgcctgggtgcgctaccccggcttgccgggcgacgaccaatacgagctggcgcagaagtacctgccgaacggcgccagcggcgtggtgagcttcggcgtggccggcgggcgcgccgcggccgagacgttcatggcgaacctcaagctggcgcagatagccacgcacgtggccgatgcgcgcacctgcgtgctgcatccggccaacgcgacgcatcgccagatgaacgacgcggagcttgcggccgcgggcatcacgcccgacctcatccggctgtcgtgcggcatcgaggccaccgaggacctcgtcgccgacatagaccaggcgctggcggccgtgtagcgaagcatggtaaactgacccgcagagaagccccagcggaaaagccggtttggaattcggtcgcggaggtgccccatggaacgcaagaagcttttcgtgcgcgttggcataggcgtggcgggagcgttgctgctggtcggcatcttcgcggttgcgaatgccgtgggcgattcaaacgccatgcgacgaggcatcgacgaagggttcgagctgagaggcacctatcagggggatcccggccgggacggcatcggcaccatcgcatttcagacgctcgacggcgagccctcgtgggaagcgtcgaaggctccgggcgcgcatgtcaaaggcgcgttcaaggaaaccgtcgatccgaacatctacgtgctggaagacgagagcggcaacggggtcggctgggtccatcttgcgtactccgatgcccagggggcgggagcgctgtacgtccgctacggcgcgggcgacctggtggagatgcgcaaggtggatagggtgcccggttatatgcgctacgataacgaacgaaatacctgaccaaatgcggttcgctctcgcggccgcggacattcgagcccgctcgcttcccagcgcgcgggcttttcgcttttccacgaaacgcaagccctttcacgtccggtggtaaatagtttctagtcgcgtctcgatgccttgaagtgcatgcgccgcatctgcgaacatgcacgtgagggccgggaggggtgctcatgatgaagaagctcataatggacgatttctcgctgttgggcaacgctttggcgctggctgcgaagaaggcgccgacgctcgagtcgttggcggccgagctcaacgtgcgtcaggaggacctgtcgctgtgttggttcgcgctcaacaacctgcgccgatgccaaggccgcgtgctgcccgtccccttcgaggcggttgcggaggggccggccgacgttcgatccgtttcgggcaactggtacgcccccacttggcgtttgaacaagctgcttgaagagttccaagttaacgagggattggccgtgcattacgggagcattttgagccatcccgagggtggtcacttcgagttgaaccttgcggccgacgaagtggtgcgcgcggttcgtctggagaacgccgagctcgacgcggtgaggctcaggcgcgtgtgcgtgcaggcgcgcgagcccgccaacggcatcgagctgctggtatcgaatgccggcaagatactgataagcatcgaggactaccgggaggggccgttcaccgtagcgttcatcgagcgtctgcacgaacggctcgtcgaaggcatttccatcaaggaggtgcgcgagatcgagggctgtggcgagagcgcggcggatgagctgcgcgcgaaggcgctggagtcgttctgcgctcacgtgtgcgcgcccgacggtggccatactttagtggatgctttgatagcgctttgctatttcaaggcgttccacctgttctctgccgggaacggtgttcttgcctatttgctgtacttcatcgtgctgcatcgtgccggctatcatttctcggcgcatgttcccgtcgtcaagctattgttcccgcttgatgacgacgatcgcgtctgcgattcgccccttgtgcccgaagagctggtggtgccgtgcggtggcttctgcgattggacgctcttcttcgagcgggcggtgcagatgctcgtcgaggggcagcgatggttcatgaccaaactggacggcatggcgcgccgtcgagaacgttttcgcatcatcatcgattccgacgagagcatgaacttccgtcagaaggaggtgctgctggaggccgtgttacacagcaatgcggaattcacctacggcatccacgcgcagcgttacgacgtgtcgtatccgtgtgcgcgcagcgatttcgcccgtctgctcgatcagggtttccttcgccagcacgatgacgggatccgccatttcttcgtggcctcggacgagttcgaggatgtgttcgcaacctatgtgagggagcgctgcgccgaagcccttcaccgatactaccgtgaggacggggcgctgcgcgacgaatgcaaaagcccggacgacattgctgctgagtataaccggggcgtgggattctatgaaaagtccctgctggacaagacctatatcgagcattacgacttccggcgcacgcctatcgccgactgtgacggtccgcggaggcgtcgccgctcgaacgacgagtgacggagggcgaaggggaaggaggatttcggaagggcacggccgattccattgtcaaaggagggtcaatgaaacgcatcatgagcgggcaatcgtgctcgcacggtccaagcaagacgaaagtactggttgtgctgctggcgattgcgctagtggcttcgttcgcagcatggggctgcagcccgaaggccgcgaacgacgacgcgaaagcgcctgagaaaaaggcggaaagcgccgcaagcgagaaggccggcgacggcgtggacgagttggcggcgtacagcgggttccccacggaaggccgcttcatcgacaacgtggccgcgctccccggcttctacaagaacaccgagaagaacgaggccaacgccaaggccgaagcgccgcgccgctacaccgaccgcaacggcaacctcgtgcagccggttcccaccgacgagctggggtggaacaacacctacctcgacgccgacaaccgcggctgcacctcgtgccacacgttggagaacgccctgatgagcctgcccacgtaccatcgcctgatcttcttcgggtaccccaccgagcagagctatcagaactgcatcgcctgccactccgattcctactcggggcacaagctggccgacgccatccacacgctgcacatgaacagcaccatgttcgtcgatgacgacaacgggaactgccagtcgtgccactacatcgactccaacaccggcgtgttcgagcgctgggacgaggtgaagtacgacctgtacaagggcatcaccgacgtggcatccgacgagctgaaggcctcggtcacctacgatcagaccaccatcacgccggccgagaaccgcatcttcaaaaccgtcaaggacgagccgaacgagtggctgaccgacgactccaaggtggacacgtccatctacgagaactgggtcatctccatcgacggcgattgcgagaaccccgtcgagatgacgcttcccgagatggagcagcagttcggcaccgtgaagcaggtcatgaagatggactgcaccatcaacggcgtgggccaggccaccatcatgcagagcgaggtggagggcattccgctgaaggccatcatcgactacgcgaagccgaaatcgggcgccaacgtggtgagccccatcggcagcgacgggtacgactacgcgaagatgggcatcgactggctgcttgagaacgacgcggtcatcgtcacgaagatggacggcgagctgctgcccaactcgcagggctatccctgcatgatctgggtgaacaagacgtccggcggcaacttcacgaagcgcatctccaacctcacgttcatgacggtgcccgacgacaagatcgacgccgagctgtacgtgggccagttcaccgacgaccgcacgggcgagatctactccaagcccaacagcggcgtgctgaactatcccaccggcatcgtgctgtccggcgaggaggcgaagaccgtgcatctggagggtttcgccgacgcatgggacgagcccatcaagaagatggaattctccttcgatcacggcgagacgtggaccgtggtggacacgcccgacaacaacgccgacaactggacgtactggcgcatggacttcacgccgcccgcggccggcgcctacctgttggacatccgcacgaccagcatcacgcccgacggcgccgatcgcgtctgccagtacgacacccagttcatgttcacggtagagtagggggtacgataatgaaaacaacgacgcaacgcggtcgtgccacgatctctgccctcgcggggttcaccatggtcgcctccatggcggccgcgccggcggtggcgctgcccggcgaacccgctgccgacgagcccgtggccgccggcggcaccgaggccgcgacgaacggcacggctgtcgagagcgcacaggtcacgcccgcccaggtggagggcgagttctcgttcgaccagaccaccatcacgtccaacgaggtgatcaagaccttcttccagcgcgtgtcgcaggccatctgcggcgcgacggtgcccctcgtggcggacaacccgctgggctggaagctgtccgtgtcgggcgacgtggaaacggcgttcaccgcttcggtgggcgacctcgccaacgaggagtcgaccagcaacgtgatgacctgcacctgcggcggcaaccccgccggcgggcgcgccatcgtcaccgcggacgtgacgggcatcccggtggagcatctgctggcgaaggccggcgcggctccgggtgcgaacgccgtgacgttcgtgtcggccgacggcacgcagcagacgttcccgctgggctacgtggtggggcgccatgcggtgctgtcctacgagatcaacgacgaggacctgtcggcctccgtgggcggcagcaaccagctgtggatgacgaagacgccggcgaactacttcgtgcgcgacgtcgtggaaatcgtggtgtccaccgaggacgtcgcgcccgcgactccgggtgcggccgacgagcatcccaacagccccaacgcgggcgtgctcgcgggaacgcagggctagggggcgcacgatgatcgctccgatgcaggtatccgtgggcaagccggtgacgttcagcgggtacgccgaggactacggcaagcagatcgtgtcggtgcagttctcgctcgacaacggcgcgaactggaccacgtacgacgtgtcggattccaccgacgatctgtgggtgcactggacgttctcgtacacgcccgagcggcccgggttctaccggctgctcgtgcgctcggtgaacgacgccggcgcggccagcccgctcgcggacgtggccgagttcacggccgcctaaggtgggggaggggccgggtgcagagcgccccggctcctcctcagcgccgttccgtccgatactcgcggggagtggcgttgtagcgccgtttgaacgcggcgctgaatttactggggttcgcgtagcccacccgtgcggcgatggtggcgacgctttcgtcggtgacctcgagcagcttcgcggcctcctgcaagcgcctttcgcgcaggtacgtgggaacgggcacgccgtacactccctgaaagtagttgttgaggctggtcacgctgatgccgaacgagtcggcgatgtcgcgcagccggtagtcgcaccccagatcggcgcacagccgatcatgcgtcgtccgcgcgatgcgcatgtgcgatttcgtgtaatacgaatgtcggcgccccgtcggcaacccccgcgccttgacgtgcagcagcacctccatgaaccgcagcttgctgcgcggcgcatcgaacgggtccaccagcgcctcgaacgacgccatgagcgcgttcagctggtcgtctccctcgaacagcaccgcagggtcgagctgttcgatccaggagccgaaagagaaacccgcctcgcgcatcactccgtacgccggctcgttcgtcaccccgtcgctgaagcacagtttgatgccgcggtatcggccgagcgggtaccggtattcgctcggcaggcgccgcgacgcgctcaggcagcagtcgcccggtttcacgatgatcgcgctttcgcccggcatggccacctcgcaccgtccctcctggcagtagtccagggtgatccagcacccgcgaacctcttgggcgttcacgaggatggggcatatctccaagttgaaatcgaccgttgcgatgaagagacgcggcgaggcgaagagcgttgtcatgtggccgcgcccctgctcgttctcgacgagcagcgtgtgggcgccgccgggctcgacaaccacgcgcatgccgcggtcgagctgcaaggtgccgaatggttcgagtacgttcgtggtggcctcctgtcggtcggtccttcgttcctattgtatcccgccggtagttagaaatggctaactcgtttgcgtttggagcagaagaagacgcatggagttgagtggagcgatcgcaaacccttacccttgtcgcgcgacctctaggtacgacaaggagaaatcatgagcaaattgagcgatgcggccacgggagacgtggctgtgatatccggagtggaaggggatgcgcggttcgtcggacgcgtcacgtccatcgggctgaccgtgggctgcgaagtgcaggtgctgcagaacgtgcgcaagcgaccggtgctggtgtacgggcgcgacagcgtgatagccgtcgatgccgaagactgcgcccgcatcgacgtgcaggtgcgctcgtgagcgcgcgggaggcggtgctcgaagagctggacgccgcggtgtccgcgccatcggacgcagcggtggtctccggggcgcccacctgctccgtcgccttgctcggtcagcccaactcgggcaaatcaaccctgttcaacgcgctgaccggttcgcggcagcgcgtggggaactggccgggcaagacggtggagaagaaggagggcggtttttcgcgcggcggcgtcgattacgcggtgtgcgatcttcccggcacctacagcctctcggcgaattcggaggaggaagtggtcacgcgcgactacatcgcctcgggcagggccgacgtcgtatgcgtgctcgcggacgcctcgcagctggaacgaagcctgtacatgctcgccgacttcgcgggcgtcgattgcgcctgcatgctcgtgctgaacctcatggacgtcgccgaggcccagggcaagcgcatcgacgcgaaggtgctggagcgcaggctcgggataccggtcgtgccgttcgtcgcggccgatcgcgcgcactgcgacctgttctatcaggcgctcgatcgtgccatcgccgaccctcatgcgcttgatgcgaccgcgctggccgaggcgtgccgcgtcgagttcggagccgtctacgacgacgtgcgcgccctcgtgccggagcggagcgtcggcgcgctgacgccggcttggctgacgggcaagctgctcgagggcgacgttccggtccgcgcgctggtcgacgaagcgctcgacgaacgcgatcgagcgcgcttggcggccgcgctcgagccgatcgagcacggcgtgcagcgtggagggacgtgcaagttctcatggatcgacggggtgctcgacggcgccgttcggggttcccgcacccgctcgacgctctcgagattcgaccgcatcgccacgggatcgcgctggggcaagcccctcgccatcggcatcatcctggtggggctcctggcgacgttcgtccccgccatgcccatcatggcggtgggcggcctgttctcgctcatcggcgagtacgcggccgcagggctcgtcgccctgggagcgcccgctgtgctgggcagcttcgtgagcggcgtcctgttcgacagcctgcgattcgccacgatgatggtgggcttcgtgttcggcatcaacctcgtgttcggcgcgctcgaggaagtgggctacatggcccgtatctcgtacgtgttcgactccacgatggcgcgcttcggcctgcaaggcaagtccatcatgccgttcgtcgtgtgcctggggtgcaccatcggcggcgcgtcgggcacccgcgtcatcgactcatggggtcagcgcgtgctgaccgtcgccatggcatgggcggtgccctgcgcttccacctggggcgtcgtgccggtgctggcggtggcgttcttcgggccgtggtcgcctgtcgttgtggtggccatcttcctgacctcgttgctgctcatgtacctcgtgggaaagctgttcgggccgcacctcgtgagcggcgacgagcgcgccggtttggtcatggagctgcccccgtaccatgcaccgcgctggaagaacgtgttctcgacggcgatcgcccgctcgaagcacgtgttcaagcgagcggtgcgcgtggtgttcatcgtgaccgcggtggtgtggctgctcgtctacagcccggacggcaacccgcagaacacggccctgtacgcgatcggcgaggctatcgagccggtgaccagcttcttcggcctggggtggcagacgttcatggcgtacctatgcgcgatggccatcaaggagtcggcgttgggcgtgctgtcggggctgtttctgggcacggggacgctcaccacggccgttggcggcatggggccggtggccgccgacatcggccaggtgatggcgtcggccatctcgcagcccgaggcgctcgcgttcatgttcgcgttcaccttcaatgtgccatgcatggcctcggtggcggctacctacggcgagacgcattcggggaagtggacggcgctcatgatcgcgttctacttctgcgcatcgctcgcgctcgcgttcgtcgtgttccacgtatcgtcgctgttcctggggtaacgtcctcccgcgcctccccggagcgcctagcgcatggcggcgcggtaggcgctgggggtggtgtggtgggtgcgggcgaacagctcggccaggcgctcggggcggtagccgacggctgcggcaacctgcgccacgggcgcgtcgccggcggccagcagctcggcggccttcgcgcagcgcaagcgctggcggtactccacgatggtgcagccgcacgcctgcttgaaggtgcgccgcagcttggtctggcccatgcaggcgatgcgggccagctcgtcggcgtccacgggcgcggccagctgctgctccaggcgccgccgcacgcgctcgatggcgtgcatgtcctcgctggccagttcgctggcgcgctcgccggccatcgcgcgcgacttgtccacgacgagcgccaccgcttcctcaaccttgctgcggtagaacagccgcgccgacgcgccgcgtccgcggtaggcttccacctgcttgagcagcaccaccatctcggggaagtcggaaagcccgtcgatgctggcgaacgcctcctcggcgctgaaggcctcatcccggtacacctcgcgcaaatactgctcgtaaaacggcggggcgagcatgatctcgacgttgcggatgggcgtgccggcccggcacaggcagtcccaatgcggcgtgtccagaacgtgcccctccaggtaaggtgcctccaccgtgcggttcgtgacgctctcgacgcagcttcccgacaggtagtagcgcaccgagacgaagcgcggatgccggcattgctcgcggaagtcgcgggggaacagcatgtcggtcgccgagatggcgaaatcgcgctcggcgtacagccagaagtatcccgaggccacgtcgcgcggcatgcggaacatgcgcccctcgcgttcgggcgcgcccacgtccgccgcgcacgtttcctccatctgcatgtcggcgaggcaggggaggaacacctcgcgcatgatgtcgtagtcggcgcatgcggcagccgtgccgtcccgatttccgtctgcgcgaatcaacgcgccctccttccgttccaacgcgtttgcgcgcccgcccttgcgcccggacgcgctcgtctctaagttagaccaggataacatgatagagcgataggagcatatatggcatcatcagaaaacaaacgcgagctcatactcacccgatcgcccggcaggctcatggtgtcgttgagcctgccggctatcgtgggcatggtggtcatcggcctgtacacgttcgtcgacgcgatctacgcaggtcagctgatcggcgttgacgcgatgggtgcggtgtccatcgcatacccgttcacgttcatcaactcggggctggcggccatgatcggcatgggctcggcctccgtgctgtcgcgggccatcggcgcgcgcgatcaaaagagcatcgaccaggtgatgggcaacctcgtcgtcatgaacctcgtgctgtccctcgccgtgacggtggtgggcgtcgcgttcgcccgcccgctgctcgcgctcacgggcgcggaaggcgccatgctcgacctgggggagtgctacctgcgcatcatattcctcggcagcctgttcgtgaacttcgcccaaagctcgaacatgatcatgcgcggcgagggggagctggcccgcgccatgggcatcatggccggcggcgccatcctcaacatggtcctcgcgccggtgttcatcctcgcgctgcgcgatcaggggctgggcctggaaggagccgcgtgcgccaccgtgctgtcgcaggctgtgctggcgggcgtgatgctatggtggttcgtcaagcgcgagaagacggcgcgcatcgtgcgcgtggcggcgtcgcgcgcggtgctggccgaggtggcgaaggtgggcgtgtcggccatgctcatgcaggtgctcacgctcgtccagcaggcgatcatctaccgcgcggcggccgagtggggcggcgcggagtggcaggtgctgttcggcgcggcgctgcgcatccagtcgttcgcgttcatcccgctgtggggcatgagcaacggcttccagcccgcggcgggcacgaactacggcgccgggctgtacgaccgcgtgagaaggtgcaccgtggcgttctcgctgggggcgacggggcttgcgctgctgttctggatacccgccatgctgttccccgaggccgcgttgtcgctgttcatcaccgatccggcgctcgtggcgcaaggcgttgacgacttccgcgtgttcttcgtcgcctatctggcgatgggcgtcatggtgatgggcatcacgctgttccagtcgttggggaagggcggtttggcggcgctgctcgcgcttgcgcggccgttgctgctgttcgtgccgctcgtgctgatcgtgccgaacctgggcggcctcggcatccacggcgtgtggctggcctgcgcgatcaccgacggcttgctggcgctgatcgccgtcgccctcatggtgcgcacgtgccgcgggatggggaagggccgcgcgcggacggccgcgatcgaggagggggaagccgcgcgggcgtaacgcgcaggcggcccgggtcgcgcggcaggcgcgcgtcccgggccgttcgcgtgtctgctagccggccagcaggtttccgacgcgcaggcattcggcgctggcctcgtcgtcggggtagtcgtaggcgatcacggaatcggccacgtcgacgccggcttcttcggcgcgcttctcccacagctccatccactcgccgtcgttccactcgtacgagccgaacagcaccaccttgtgaccggctaaatggggctctacctggtcgtacatcgggaggaactccatatcctccagctcttcgtcgcccatggcggggcagccgaaggcgagggcgtcgtagtcctccacgcgctcggcggtgaagtccgcggcatgcacgaggtcggccgtgccgccggccgcgcgcacgccttgcgcgatgaggtcggccatggcctcggtgttgcccgtgccgctccagtagacgattgcaaccttgctcatagggtatctccttcgtgtcgagggatgtcgcatgcgctctctgttgagcgaggtgcgcgacgaagccgcgccgcgcacctcgctcaacagagccgcgtcccgcgtctcacgtgccgtccgctcgcgcgctagccggccgcgcggaacgcctcggcggcggggaagtcctcgtccaccgcggcgaggcattcgatggaaacgccctcgtcgaacagctgctggtacatggtggtgcagtttttgtagcagcagaagcacgtttgggcgtcgcgctctttcgcgtataccttccagcatccgctgcacaggaagttctcgccttcgttgtcgatgaagccgatgacgtcctcgtagggatagcccaggaagaagccgatctcgtgcgggaacgagcagcgtcccgtcatctggctttgcaggtcggtgccgcagatgcgcttgtgcagcttctcgatgcaggccgacagcgacgaggggtcgtagccctcggcggtcaggaacgcggccacctgctcctgctggatggcgcgcgtgagcagccggggccggtacacgtacacgagcgccccgctcgtgcggcgggccagcacctcgatgcgcacgccgtgcggcgccagcttggcgcggcaggcgcgcagcgcgtcggacagctggtcgtcgcgcagggccgccgcggtcgggcgccgtccgtgctggacggccgtgggggagagggtgctgcggcaggtgaacaggttcgcgggtttgagcgccgcgagcgtgggggtgcagtggtgcaccagcttgcgttcgaacgcttcgcaaggcgataattcctgctcgattgcttccatgcggcctccctcgggcagcgcctccgcgggtgtcggatgcgcctataagttagctttggataacatatacccgagtgtcggaggttcgtcaagcacggatccgaaaaagcgcgagacgcgcaacgtatgcggcagcgcaggacccgcggacgttgcgctcctcgccttgcgtcgttctccccgagctgcgcaaggggtcggcatccgggcgtccgaatgtttcacgtgaaacattcgttctggtttcattcgaggcgcgaccctcgacgatccctcgatcgcctccgctcaggcgctgcggcggcggtaggcgctggggggcacgccggtgcggcggcggaaggcttcggcgaacgcgccgggcttgcggtagcccacggcgcgcgcgatgtgggcgatgggctcgtcggtggagttgagcagctcgatggcgcgctcgatgcgcgcgtccgcgacgaacgccgcgggcgaggtgccgtacgccgccttgaacgcggccttcagcttcgtctgccccatgcacgcgcggcgtgcgagctcctcgcaggacagggcgcccgcgagattgccgttgatgtgggcgctcaggtcgtcgagggccgcgcgatcctccttcgacagcgacggcgcgctcccttcggcgcgctccgcctcgatggccgccgcgcgttcgatgaccagcgcgagcgcctcggccacggcgccctcgtagaacagggtggccgccatgcccgtgccctgataggcgcgcacctgtttgaacagggcgaccagctcgggaaagtcggtgcggccgtcaaccagcgcgaaggcgcgccgcacgtcggggatgttcccgaagcgggcctgcaggtagtcgcggtagtaatcgggcgagatggtgatggaggtcgcgcgggtcgccgaacccggctggtagagcgccacgtactcagcgccttcctcggcgaggtaggtggatatggccccggcgcgcagcgtgctgccgccgctctgcacgatgaggtcggcggcttcgtagtatccgatggacagatgctcggcgtggcggtagcgcatgacgccggcgtgctcgaacgtcatgtcgaaggcgttgacggcgaagaggttgtcgtggaagtaggcccagtattcgccgtgcccgcagccgttcgcgaaccggtagacgctgcccgccgaaccgtatcccggcaccgtgccggcgggcaccatgtcccagaggcggaacgcctcgtcgtacatgtcgtctttgatgctgcgcattcgcttcctcctccgtctgcccccgggctgccgatcgcgtgcgttccgcactgcccgaaacggtcgtttcgctaccgtgaatcgtcgcgcgcgcccgtcgtcgctgctgccgtccggctgattcgctcattataccaaaaagttaccgagggttaacaacgcgctgccggttggcggcgttcgacgggaaaggagcgtgcgcaatggcatcgaacgtggcaaacacgcagggggagagggcggcttccgcgacggcgaaccggtggacgacgcgggatgtgctcacgttcgtcatcttcaacatcgtcatcatcgtggcgacgatggtcgtgaagctggcggaggacgcggtgctctcgccgcagaacaccttcttcgtgggatcgtggctgttcccgctggtatccactccgttctacctggtcatggccgatcgcatcggcaaacgcggcgtgctgggcggctccatcctgctgttcggcgtcctgtacacgttcatgggcggcctgtactgcgcgcccgtggccgtggtgggcgccgtgatcggcgagctggtgatgtgggggaaggggtcgtaccgcagcatcgtgcgttcggccgtgggcttcttcgtgtactgggcgacgttcgcctgttacggcattatcccgtatctcctgttcaaggatgcgtacatggagcagctgggcgcgtattacagcgcgagcgacgtggccgccatggtgtcgcagtacacggagctgccgtggatcctgctcatgctggcgatgttcgccgccggcacggcgctcggcgcggtcatcggcgcgaagttcctgaagaagcacgtccgcaaagcgaagatcgcgtaagcgcccgatggagacgagctcgcaagcgcgccccttcgcgcgccccgacctgcgcgcgggcctgttcggcctcgacccgcgcacgcatctgctggccgtcgtggcgttcggcgttgcgtccatcgtgctcaccggcttgctggagacggcgttgttgcaggtggctgccgcgttgtacctggcgggcaacgggcgcgctcgcttggcgctgcgctcgtgcgcaagcttcgccgtcgtcgcgggcctcagcttcctgccgctgccggggctgtacggggtgctgttcgtgagcctgctgcacatggtgccgccgttcacggcgggctgcgcgttgttctcgctgtctccttcggctatcatgtgcgcgctcgcgcggtggcgcgtgccgcagcgcgtgctcgtgggcgtgtgcatgctgttccgcttcgcgtcggtgctctcgttcgaggcgcgctccatcgtgcgcggcatccggctgcgcggggtgttcccgcgcgcgatcgacgtggcgctgcatcccgccctcgcctacgagtgctgctacacgccgcttgtcatgcgctgtttgcgcctgtcggccgagctggccgcgtcggcggagctgcggggcatcgaggccgacggcgtgcgcacgtcggtgcatcatgtgggattcgaggcgcgcgacgcccttgccgccgtggcggtgctggccgtgtgcgcggggctgtgcgtgtgggggaaggtggcgtgatggcgcaagcgcaggacagcgagcgggcggcggccgtgctgctcgaccgggcttcgtttcgctacgtggacgaatccgagcgggggttggaagcggaagcgggttctgccgcgcccgcatcgggcagccgcgtggacgacgtgtcgctgtcggtggctcccggccgctgcctcgtgctgtgcgggcgctcgggcgacggcaagtccaccgtgttgcgcctggtggacgggttggcgggcacgttctttcccggcgatctgacgggcgtcgtggaggtgtgcggcgccgacgtgcgccggctcgcaccgcgggagcgcaccgagcgcctcggcgtggtgatgcaggacccgcgcagccagttcttcatggggacggtgggtgacgagatcgcgttttcggccgagaacctgggggtggaccccgccgaaaccgtgcgccgcgtgcatgccgccgccgagacgtgcggcgtggaagggcttctgggcgagaagctgtccgagctgtcgagcggccagaagcagcgggtggccctcgccgccgccatcgcgtgcggtccggccgtgctcgtgctggacgaacccacgtccaacctggacgcgcagggctccgaggcgctcgtgcgcatcctggccgagctcaagcgccgcggcaccgcggtggtggtatccgagcatcggctccaccagctgctgccggtggccgacgcctacgtgtgcctgcgcgccggccgcgtcgttgagcggtggagcgccgacgcgttcgcacggctcgggctggaggacgcggcggcatacggcttgcggcatccggacatggccgcgcccgcgccgggcgtcggcggcgttgcgcctgcagcgagcggttggcgggtcgaggggctgacgtaccgctacccgtccacgaagcggggcatccgcgacttcgatgccgcgttcgcctgcggggcggtgacggtgatcgagggcccgaacggggcgggcaagaccacgctcgcgaaggtgctgtgcggcgcgacgcgcgagcaggcggggcgcgtgacgttcgacggccgccccgtgccgcgccgcgagcgacggcggcgcagctacttcgtcatgcaggacgccgactaccagctgtacgccggcagcgtggccgacgaggtggtgctggggcggcgcgtggacgaggcgctgaaggcgcgcgcatgggaggcgctcgaggcgttcgacctggtcgatctggccgatcgacatcctgcgagcctgtcgggcggtcagaagcagcgcgtgacgctggcggcggcgtactgctcggacgccgacctcatcgtgctggacgagcccacgagcggcctcgacggccgcggcgtgcgcgaggtgtccgcgtggtgccgcaccctggccgccggcggcaaggccgtggcgatcatcacccacgacaacctgctggccgctctcgccggcgatgccgtcgtggagctgaaaggctaggcacccgacggggaaggcgggcgagccgattgcccgtgcgctgtcgatcgcgaaccgcgccgcaagttcgggcttgcaatccacccgaagcgcctctatactgataatcacattatcgataatgaaattatcagtagagggaaaggcggttggaagcttgtcgaaatccgacgcgagcatcgaccctcgcatcctcgacagcgcacggcgggagttcctcgcccgcggcttcgagggagcgtccttgcagagcatctgcgcggacgccggcgtgacgacgggtgcgctctacaaacgctacaaggggaaggccgatctgttcgaagccgtggtagctcccacgctcgccgacatccgcgcgcttgaggaagaggcgaagcgccgcgattacgcgctcatggacgataagaaccttcgcgagctgtgggctctgtccgaagatatccatcgccagtggatgatctacttctacgagcgctacgaagggatgcggctcctgttgtgctgtgcagagggcacggcctatgcgaacttccttcacgacttcgtggcgcgcaacacggcgttgtgcatggagttcgtgaacgaggcgcgtcggcgcgatttgccggtgagcgacatcgacgccgacgagttgcacatcctgctcacggcgtactggtccaccgtgttcgagcccctcgtccacgggttccccctggaaaaggcgctcggatactgcaagcgcatcgccgggttcttcaattggcaggtggtgttcggcttctaacatgcggtgaggaaacggaagacgaggcggacgggatccgccttttctcgaaccaaaggttaccctaatctaacatttgaaaggaaacgccatgcaacagaacgcagggcaggcgcaagccatgcccgaaaccgaggccgtgcccgcgggaaagcggccgggagcgcgcaacgagcgcctgaacgtgcgcgacttcgtgaccatcgcggtgctcaccgtgctggaactggtggtgtatttcagcatcggcatgattgcgggctcgacgcccatcggctggtgtttcacgctgggcatccaggccatcccgttgggcatcatcttcatgctgatgtacgcgaaggtgaacaagcgcggcgtcgtgctcatctcgggcgtgctcgtggggctgctcgtgggtatgagtttttggcttaccggcctcgtcatcgcattgggcgcgctggctggcgaggttatctggaacgtcgccaaccgcaagcgcttcgccaccatggccgccagcttcacgtccatcatggtgggctggtatctgggcgcgttcgccccgctcgtgctcatgaaggacttctttttgaactcggtgcccacgatggctgagttctacggcagcgtgttcgatatcgtggcgggccctctgttcttcgtctgcctgggcgttaccgcgcttggcggcgttctgggctcgctgctgggacgcgctgtgctgaagaagcacttcgaacgcgcggggatcgcctgatatggaggccgcgcgcatgcagaacgcgaccgccgtgcctcgcgacgggggatcgggcgtgccggcggtgagaaacctcgacccgcggatgaagctgcttatcgtcctcgtggtggggtcggccgcgctgttcagcccgcatcgtgccctgttgctgtggtgctatgcgattatcgcggcgctgtggctgctgtcgggcgaggcgcgtcgcgcgctgggattcgtggccgtgctcgcggcggtggcgcttgccgagtggggcgcggggttcatccccaacgccacggtggcgggcatggtgggttttctcttcttcattttcgcgcgctcgctgtctacgtttgcgctgatcatgtggatgtcggtggggttgcgcatcgatgatctcatcgcgtcgctgcagcgcttgcgcctgccgcgcggcctcgtcatcaccatcgccgtggtgtttcgctaccttcccacggctgccgacgagttccggaagatcagcgccaccatgcggctgcgcggtgtggagctctcggcgcgcaacctggtgctgcatcccggccgctcgctcgagtacgtgctggtgccgctcatcatccgcaccatcaaaatcgccgacgatctggccgcttccgccatgacgcgcggcctcgacctcgtgggtgcgcgcacgacgtaccgcgacgtgcgcatcggagcgtcgggggcgctcgtgacggcggcggtgctcgtctgtacggcggccggttatgtcgcgtgggcggtgaacgtgctatgacggccaacgaggtggtggtggcaggtgcgacgtttcgctacgcccacgatggccagcctgcgctgcgcggcctcgacctgcgcgcgggcggcgggaagctcgtgctgctgctgggcgcgagcgggtgcggtaaaaccactgcgacgcgcctgctgaacgggctggtcccccatttcttcgagggaggcgcgctcgacggctcggtggacgtgtgcggcatggagccggcttccgtcagcgtgcagcggctggccggcgcggtggggtcggtgttccaggatccgcgcagccagttcttcgccaccgacgtgtcgtccgaaatcgcgttctcgtgcgagaacctcggcgttcccgcgctcgagatgcgccgacgcgtggccgaagcggccggagcgtgcggcgtcgcgcacctgatggaccgcagcatcttcgacctgtcgagcggcgagaagcaagcggtggcggttgcgtcggtgctggcgatgcgcccgcgcgtggtggtgatggacgagccgtcggcgaacctcgacgaggtggccaccgctcggctgcgcaccatcgtcgagacgctgctgcaccgcggcgtgaccgtggtggtgtccgagcatcgggttcactatctggccgaccttgccgacgaggcgctgtcgctgcgtgcagggcgcgtggagcggcgtttcgccgcgggagaattggcgcgtcttacgcccgaggcatcgcacgagctgggcttgcgcgcgtcgagcctcgacgaggtgcgcgccgtgccgcgcgcggaggcccgggggactgcggtccttgaagtgcgcgacgtgagcttcggctatcggggcgcgccgcccgtgctgaagggaacgtcgttctcggtgcgggagggcgaggtcgtgggcatcgtcggacgcaacggcgtgggcaaaagcacgctgatcgacctcgtgtgcggtctcaagacggagtgtgcgggcacggtgtccatcggcggcgtcgcgttgcggccgaaggagcgcgtgcgggcaagctacctggtcatgcaggattcggattgccagctgttcgcggaaagcgtcgaagccgagctgcttctgggcgagcgtgccgacgaggcgcgcacggcgcgagcgcgcgcagcgcttgcgcgcatggggcttgcggggctggaggaccgtcacccggcatcgctgtcgggaggccagaagcagcggctgtccatcgcggtggcctacatgaaggatgcgaaggtcgtgtgcctcgacgagcccacgagcggcttggactgggcgtcgatgatgggcgtggcgcagctgttgcgggacctggccgaagaagggcgcggcatcgtggtgatcacccacgactacgagttcttgctggcggcgtgcgaccgggtgctgcgcatcggcgagggcgggtcggcggtcgaggtcggcttcgacggccctggcgatgcgagtgcgctccgcaaccccgaatagtcgtttcggtgccgcgatgcggcgggagtccctcgatcctgtgccggcgggcgcgcgtttcgggcattctgagcgaagtttgataaagctaacttgaggagttgaccaatggaagtttctccggcgaaccgcgacgtgcggccaagcgcgttcgcgaagctgtactacttcatgcggccggatcgcgggcgcatggtgtgctcgctcgtgctggcctgtatcggcgaggccgtgggcatggtgccttacgtggtgatcgcgctgttggcggcggggctcatcgagggcacgctgacgttcgagcgcgcggccctcctggcggccgtcgccgcgctcgcgcacgtcgcgcgcttcttctgcacgtggcgctcgtccatgatgagccaccgcatcgcgttcaaggcgctggccaccatgcgcgaccagatggcggagaagatggagcgcgttcccatgggcacgatcatcgacacgcccaccggcacgttcaagaaccgcttcgtcgacaacgtgaaccagctggaagacgccatcgcccacttcatgcccgagctgccgtcgaacgtgttcgggccgttgctggccatggtcatcgtgttcgcgctcgactggcgcatggggctggccgggctggccaccatccctctgggcgtgctgttctatgcggccatgatgcgcgattacaagccgaagatggcccgctacatcggcagcgagcagcggatgaactcgtcgctcgtggagtacgtgaacggcatccaggtgatcaaggcgttcgggcgtacggccagctcgtacggcggattctccaccgcggtcgccgagtaccacgactcgacgctcgcgtggttcaagcagagctgggtgtggatggcggccgtcaagtcggtggtgccgtgcacgctgctcgtgtcgctgccgctgggcgtgtggctcatgtccgcaggccagctgacgctgccgatattcctgacgtgcatcgtcatcccgctgggcttcatcgcgccgctgctgaagttcgcgcaggcgggcggccagatctcgcgcatggacgtgtgcctcaacgtcatctgggacttcctgggcacgcccgagctcgtgcgccccgccgagcgcgtgcggctggacggcgagtcgttcgcgttcgagaacgtgtcgttctcctaccacgagggggccgaggtgctgcacggcgtcagcttcgagacgcatcccgggcagatcacggccatcgtggggcccagcggttcgggcaaatcgaccgtggcgaagctcatggccgggttctgggatgcaacggacgggcgcgtcgcgttcgacggggtcgatgtgcggaacatcccgtaccagcagctcatggagcatatctcctacgtggcgcaggacacgttcctgttcgaccgcacgcttgccgacaacattcgcatggggcgtcctgccgcttcgcaggtcgacgtggaggccgccgcccgcgcggcgggttgccacgagttcatcagccgcttgccgcagggctacgacacgcgcgccggcgaggcgggcgagaggctgagcggcggcgagaagcagcgcatcgccatcgcacgcgccattttgaagaacgcgcccatcgtcatcctcgacgaggcgacggcctacgccgatcccgagaacgaggcgctcgtcgagcgcgccatcagcaagctcgtggtcgggaagacgctcgtcaccatcgcgcaccgcctgtccaccgtgacgggcgccgaccagatcctcgtcatggacaccggccgcatcgtcgcccgcggcacgcacgacaagctgctggaatgctgcccgctgtaccgtcgcatgtgggagcagcacagaagttccgctgttctacgaacagcggaaccggccgacgctgcggcttcccccggtggcaccggggaaaccctcgctgacgtttcgacgacgggcgacaacgatatcaaggaggcgatgtagcatgttcgcgctcatcaaacgcgtgctcgacctggctggcagcttctctccggcggcgcggcgcagcctgacgtggggcatggtgtgcaacatcctgaaagcgttcttcatggccggtatgctgggcgcggtgttctgggcgctcgagaaccgcgaccacctcgacgccgtcgtggcgctgcaatgcctgggcatcttggctgtcagcgtgatcgggcagtacgtgttccagtacctcgtggacatcacgatggacgcgcagggcttccacatcttccgcgacctgcgcctgcgcgtgggcgaccggctgaaggccgcgcccatgggctacttctccgagcagcgcctgtcggccgtcaccacgacgctgaccacgacggtgcaccagctggaggagttcatgaccatctgcctgacgggtctgacgggcggcgtggccatggcggtgatcatgagcctgttcttcctcgccgtggcctggcccatcgcggccatcacgttcgcgggcatcgccgcgggcctgtgcgtgctgaacgtgctgcgccgccgcgccaccagcgtgacgcgcgaggtgaccgccgcgcaggaggccatggctgacaaggtgatcgagtacgctcgcggcatggccgtgctgcgcacgttcgccacgcccgacgaatcgctggccgccgcgaaggcgtcgttccagcagaagcgcgcggccgattaccatcaggaggccgccgcgcagggcatcctcaagctgtacgcgctcgtgttcaacctggccagctgcgcggtgctgttcaccgcgtgcgcgctgtacctgaacggcgcgctgccgctgtcgtgggcgctcacgctgctcgtggccgcgttcatgatctacggcgagctcatccacgcgaacgatgcggcgttcctcacgaagaagatcgaaggcgagctcgaccgcgtcgacgaggtgtgcgacatcccgaagcagaacgcgacggacgcgccgctcgcgcccgccgatttcggcatcgagatgaacggcgtctcgttcggttacgacgccgaccggcgcgtcatcgacgacgtgtcgctgcgcatcccgcagggcacgagctgcgccatcgtggggcccagcggctcgggcaagacgacgctcgtgaacctcatggcccgattctgggacgtggacgccggcgcggtgctgctcgggggccaggacgtgcgcaagggcacggccgagagcctgctcgcgcacgtgtcgatggtgttccagaacgtgtatctgttcaacgacaccgtggagaacaacatcaagttcggcatgccgaacgccacccatgccgacgtggaggccgccgccaggcgcgcccgctgccacgagttcatcatgcagctgccgcagggctacgacacggtgctcgaggagggcggcgccagcctctcgggcggggagcgccagcgcatctccatcgcgcgcgccatcatgaaggatgcgcccatcgtcatcttggacgaggccacgagctcggtcgatcctgagaacgagcacgagctgatcgccgccatcggcgagctcacgcgcggcaagaccctcgtgtccatcgcgcaccgcctgaacacggtggccggcgccgatcagatcctcgtggtggacgagggccgcatcgtgcagcggggcacgcacgaccagctcatgggcgagcaggggctctaccgcgacttcgtgaacctgcgacgcgaagccgccggctggcgcctggcggggtagggcgcgcgccgtcgcgcgccgcctgcgaaatgtccgatcggagtaggcgcgcggctgtttggagcggaacgggcggcccgtttctgctataccggagggaagggaaacgcactgcgcgcgcggcggccgcccgcgcggagaggaggtgcaggtgaagcagcctgttcatgagtctgccgaagactatctgaaagccgtgttggcgctggagcgcgagcacggctacgtccgcgccgtggacgtagccggccggctgggcgtgtcgaaggcgagcgtgtcgaaggcgctgtccaagctggagcgccagaagctcgtgcacgtggtggcccacgacgtgcggctcaccgccgaggggcgcgccgtggccgagcgcgtcagcgaacgccatgcgttcttccgcgctctgctgcgcgctgcgggcgtggaggccgtcgtcgccgacgaggaggcgtgccgcctcgagcactgcctgtgcgaggactcgttccggaagctggtaaccgcgctcgacgcgcgcggctgagagcgctcggttgacgcgcggcgggtcgcccggtatgatggcggcccgggcctcatggcccgcaacccaacgaaaggctctcctctcatgactgttcctcccaaccgctaaaccacgcgacacatccgtcccatccgctgccgcgccgcgcgcggccgcttcgtgatgggcgctgcccgtccgcctgccgccgctgcgagcggccgttttgcgatgggccgtccggttgagatgcacagacaatcagagaggttccctgtatgaaaaagctgaataacggcgtggtgccgcctgtgcccaccttccatttcgaacgtattcggattgcgaaggaaggcaacaaccatcatgaaaacgagtatatggcgcgtggaggcgaccgccgcgccggtcgcgctgcgcccttgtgggacctgcggtgctgacgcggagttcgcgtccacgggcctgtttcgcgtgaacgcccagaagaaacgtctggacgtgtggctcatctaccggtgcgccacgtgcggaagcgtgtggaacagcgccgtgatcagccgtgggcgtccgggaagcatcgaccgcgaagagctcgagcggttcacgggcaacgatcccgtgatggcgctgtggtgcgcgctcgacgtcggcttgctcaggcgcaacggcgcgcgccggggcaaggtcgccttcgtcgtcgaaggcgaccggcccgccggcggcgaggactgtcgggttgaaatcgacggcggcgaccttgcgggcctgcgcctggccgaggtgctgcgggccaagttgggcgtttcgcgcagcggcttggagcgcctcgtggaggcgggcgacgtgagcgccgccgacggagccgacgtcctcgccgcgaagctccgtccgcaccagacgatcctcgtgcgcgggcggcgcgagcagtaggcgggcaggcggcccgggaccacgctcccgggccgctcccggccccctgccccccc

SEQ ID NO: 8648 - DNA, 14207 bp, Unknown
  gut microbiota DNA sequence
gcgcacaggtggggtgcgaccgtgggagtgtgctatcatgacggcgaacacagcggccatgcaaaggagccatcatgtacggattgaaaaccgaggccagcttcgactcggcccacttcctgaccgattactacggcaagtgcgagaacctgcacggccaccggtggagagcggtggtgtacctcgaggtcgccgacctgcaagccgacggcacgatgaaggacatggtggttgatttcggcgtgttcaagcgcgcggtgcgcgacctggccgaagagctggaccacaccttcctcgtggaagagggctcgctggccgcgacgacgctggccgccctcgaggccgagggcttcagcctgaccgtcctgcccttccgcaccaccgccgaaaacctggcgcgctacgtctgcgaccggctgacggagcagggtttccccgtgtcccaggtggacctgtacgaaacccccaacaactgcgccatctaccggaggacggcatgaacgtttcggtcatcctggggcatccctacgacggcagcttcaacgcggccatcgcccagaccgtggtgcaaacgctggaggaggacggccatgcggtggcgttccacgatttgcacgcggagggcttcaacccggtgattcccccgtccgagctggtcagcgatgtgccggccgacgatctgacggccctgcaccaacgcgagatcaaggaggccgacggcatcgtcgtcgtgcatcccaactggtggggacagccgcccgccatcctcaagggatgggtcgaccgcgtgctgcgggagggcgtggcctacgggttcgccgagggcgattccggcggcggcctgcccatcggcctgctgaaagcccgcgcggtgctcgtgttcaacacgtcgaacacgccggaagcgcgcgagctcgaagctttcggcgatccgctgcagcggctgtggcgcgactgcatctgcgacttctgcggcgtgaccacgttcgatcgggttatgttccgcgtcgttgccgacagcacgccggccgaccgccgcacgtggcttgagcaggcgcgcaccatgacgcgcgaaagtttcccgtccgaatggaacagcgctgcccgatcggactagaaccgtctgccccgttgccgcatactgtctccgatataagtaacccttggctaacaagtaaggagaccttcatggcaagcagcgtcgcatcgacggcgagcccggcaccttccccgagcgaggggaaggtgctcaagggccgcgacctcatcaacatcggcatcttcacggccatctacttcgtcatccagttcgtgttcatgctgtgcggtggcatccatccggcgctgtgggtgttcatgccggcgctcgacgggttgttcgcgggcatcccgttcatgctcatgtgcgcgaaggtgcaaaagcccggcgccgtcgtcatcatggggctcatcgtggcgctcatctacttcgcgacgggcatgttcacgccgctcatcctggccatgatggcggcatcttgcgttgtcgccgaggtcatccgcgcggttgcgcgctaccgcagcttcctcggcaacgcggtggcgtacgcggtgttcggcctgggcatgtgcggaagccccctgccgctgtgggtgttccacgactcgttcgtctcccagatcgccgagcagggtatgggcgccgactacctggcgtcgcttgacgcgctgtccacgacgccgatgctgatcgccatgttcgccgtcaccatcgtggcgggcctcgcgggcgcgtatatcgcgcgctgcctgttcaagaagcacttcgagaaggcggggctcgtctaatgcaggccacctacgcgctcgaggatcgtcgcgtgctgggccgggcgccgcgctccggcgtgctcgacctcgacccgcgcaccatcatgggcgtgctgctggcggcgtcggtggtggccttcatgtcgaagagcctcacggttgagctgggcctcgtgctgggcgtggcgctgctgcaggcgctgacggggcacgtgaggatggcgcttgcgttcgcgggcggctacgcggtgctgtgggcggtgctcaacctcgtgttcccgcacgtcggaggcgttgcagccaccatgttcaccatcagcttcacgttctcgcgcaagatcttcctgtgcctcatggtgggctcgctgctggtggccgaatgctcggtgcaccgtctgacggccgcgctcgagcgcctgcgcgtgccgcaggtggtgctcatcccgctcacggtgaccatgcgctacttcccggcgctcaaagacgagatggcgcacatccgcgacgccatgcgcctgcgcgacatccccgcttccgagcggctggaatgcttcgtggtgccgctcatcatgtcggccaccaccacggccgacgagctgtcgcgcgccgcgacctgccggggcatcgagaacccggtgcgctctaccgacaccgagcggctgcgcatgcacgccgccgattgggcggtgctcgcggcgtccgcggcggcggtcgtggtcgtggcgctgtggggaggggcgtactgatggcggcggctcggcagtgcgctgaggcgcgcggcggcgggcgcgccgcggcgcgcggcgacgaggcgccggtcgtcgtccgcctgcgcgatgcgtcctgccgcggggccggcgacgcgctcatcctggacggcgtggacctcaccgtgcgccgtggcgaatgcgtgctgctgtgcgggcgctcgggcatgggaaagaccacggtgacgaagctgatcaacggcctcatcccgcaattcgagcccggggtcgagcgcacgggcgaggtggaggtgtgcggcttcgatccggcgcgctgcgccatgcacgagctcgcgcggcacgtgggcagcgtgttccagaacccgaaatcgcagttcttcaacctcacctccaacgatgagctggcgttcggcctggaggcggcgggggtcgacgccgacgcgatcgaggagcgcatccgggcgacggtgggggcgctgcacgtcgagcacctgctcgaccgcggcgtgacgaagatgtcgggcggcgagaagcagagcctcgtgttcgcctcggtggacgtgatggaccccgacgtgtacgtgctggacgagcccaccgcgaacctcgacgcgcgcgcgatccgcgtgctgcacgaccagatcgccgccatcctcgcgcgcggcaagacggtgatcgtcgccgagcaccggctgtacttcgtggccgatctcatcgatcgcgcggtgctcatcgaagggggccgcgtcgcgcgcgagttctcgcccgaggacttgcgcgcgctgtcggaggaggagcgcgcccgcctgggcctgcgcgcagtcgaccccgccgtcgcgatggccgtgacgtgcccggcggcccccgcgtgcgcgacgggtgcgctcgagcgcgggctgtcgctgcgcggtttcgccagcctgcgcaagaagcgacgcgtgttcgccccggtcagcttcgacgtcccgcgcggcgcggtggtgggcgtgacgggcgcgaacggcgtggggaagtcgacgctcgtgcgcgcgatggcgggcctcgagcgcgcgacggagggggagctgcgcttcgacggcgcaccgctcgatgcccgcgcgcgccgccgccggtgctcgctcgtcatgcaggacgtgaaccatcagctgttcagcgacagcgtgcgcggggagtgcgagctgtcggcgggcggcgtcgacgcggctcgcgtggacgaagtgctggcggccctcgacctggagcatctggaggcgtgccaccccatggcgctgtccggcggccagaagcagcggctggccgtggcctgcgccctgctcgccgggcgggaggtgctgctgttggacgagccgacgagcgggcttgacttcgggcatatggttgaggtaagccggttggtgaaagggctggctgaacggaacatctgcatcgtcgtggtcacgcacgactgcgaattcctcagccgcagctgcgatttcgcgtacgaattggaggcgggctgatcgatgggcgaggcgggcgatgtgctgtcgtgcgtgatggcgggtggcgaaggcgtcgtggaggagcggccgggaggggccgtgctccgtgtgaagaacgacacgggcgagggatccatggccttctgccaggtgttcgacggcgtgggactctcgttcaacgacttccggctggacgcgtacgattcggggttcgtggccggcccggacatgctgtgcatcgaccactgccgcgaggggcgcatcgagcagcccgtcgcgggcggcgcttactcctacgtggcgtccggcgacctcaagatagacgaccgctcccgccataccggcatgttcgtcctgccgctgggtcactaccgcggcatcaccgtgtccttcgacctcgcccgcgccgagcgctccatcgcccaagcgctcggcgggttcccggttgatctgcgcgcgctgcgcgatcgcttctgccgcggcggcgaccccttcatcatgcacgacgcaccgggcgcggagcacatcttctgcgagctgtactccgtgcccgacgagatccgcgcgacgtacttccagctcaaagtgctggagctgctgctgttcctgcaggtgctcgatcccggccccgtgcgcgagcgtcggccgtacttctaccgcgcgcaggtggagaaggtgaaggcggcgcgcgacttcatggtgtccgacctcaccgtcgagcacaccatcgacgagctggccgaccgcttcgatctgccgcccacggcgttcaagacctgcttcaagggggtgtacggcctgccgccgtacgcgtacctgcgcaccttccggatggagcgcgccgccgcgcttctgcgcgaaaccgacctgcgcgtggccgacatcggcctggccgtgggctacgacagcccctccaagttcaccgccgccttcaaggccgtgatcggccaaacccccaccgtccaccgccgcgaccgcgcaaggtacgtgcgatagcgcgataacaagttgctttttgactgatttgtaacttgctatttgtatgatatactcattgcgaaatacttgattgccgtcggtttcggagggatttccatgacgctcacacccacggggtatagacctcgcgttatcgatgcagaacttgcgcgttgcctcaagttgttcggtgccgtggagatacgtgggccgaagtggtgcggcaaaacatgggcaggactcaatcagagcgtcgacgaggtgtacatcgccgacccctcggatggctacgtgacgcgtcgacttgctcggctcgatccggattccgtgctgcaaggcgaccatccgctccttgtggatgagtggcaggctgcgccaggcgtatgggatgcggtacgcgcctcggtggatcgtgcgcccgagcctggtcggtatatcctcactggttcggcgcaaccgcttctcaaggacaccgtgcacagcggaaccgggcgaatcgtcagcatcgatatgcggccgatgaccctgttcgagtcgggcgactcgacggccgaagtgtcgctcgaggagcttttcgacaatcccgggaaaaagatacgagggcgctcttcccataaacttgacgacatcatcgcattggctgttcgcggtggatggccccgcgccgttggccttgatccgggggacggtgctctcatcgcgcggcgatacataaaaagcatcgtcggcggcaaggatgtggagtttgaaggcgtgcggtactcgcctgccaagcttgaggtgctgctgcgctccttatctcgcaatacggccaccatgacgagcatgtccaccattcagaaagacgtttcgagcgtcgatgcgaacggattgtcgcgatcgacagttctcgcgtacgttgattatttgcagcgcatctacatgatatgggagcagcctgcatggcggccggaattgcgttcggcaacgcgcctgcgaaccacgcccaaacgccacgttaccgacccctcccttgcggctgcaagcttgaaggcggggccgaataagctcaagagcgatttgaacacgttcgggttcgttttcgagaccatggcggcgcgcgacttgcatgtgtacgcgcagagcctggggggtcagctgtgccattaccgtgacaattcgggcttggagatcgattcgataatcgagctcgacaacgggggctatgccgctatcgaagtgaagctcggggccgatcaagaggatgaagcggctgcgaacttgattcgtttcgctagaaagatggaagcgggaggtatcgatgcccccgctttcctcgctgtggtggtgggtactggagggttcgcttacacgcgtttggacggtgtgcatgttgtgcctatcggatgtctcgcgccgtagagagaggtaagtcttagataacttcccacctgattggaacagggctggcttgatggagcggaacgtgcctgctgggagccgtatagtcaggagcgttcgcattcccaactgagaaggtggttttggtggctcctgtgacagaaacgcccgcgaaggcatcgtggctggccgtgctgctttcgtacgccggccgctgccgggggaagatggcggtctcgctgctgtgctcggtggccagcgtggcggccgggctcgtgccgttctacgcggtgtaccgcatcatcgacgaggtgatcgcccccgcgcccgacggcggtgccgtgctggcttgggtgggcgcggccgcggcgggctacgtggcgtcgaaggtgctgttcggcgcatcgacgctgctctcgcacgtgtccgcgtacaccatcctcgaatcgctgcgcgacgacgtggtggagaagctcatgaagacctccctcggcaccgcggcgtcgaaaagcatcggccagatcaaaaacgtgttcgtcgatcgcatcgagggcgtggaagtgccgctggcgcacatgatccccgagctttcgggcaacgtgctgctggcggctgccatcgcggtgtggatggcactcatcgattggcgcatcgcgcttgcgtgcctggtcaccgtgcccatcgggctggtcgtgttcgcaagcggcctgggggcgtacaacaggatgtacgccgcctacatggccgagggcaaccatgtgaacagcgtgatggtggagtacgtggagggcatccaggtgatcaaggcgttcaaccagggttcgaactcctaccagaagtacgccaacgccgtccgctcgttcaaggacttcaccctgggctggttcaaggccacctgggtcagcatgaacctcgcgttctccatcctgccgaccacgctgctgggcgtgctgcccgtcgggctggcgctgtacctggcgggagacgtcaccccggccgagctggggttggagttcgtgctggcgctggcggtggtggcgccgctcatgaagctgtcatcgttcctcaacgaggcgaaggcgatggagtacgccgtggccgacgcgagcgagtttctcgacctgcccgagctgccggagcctgcgcagcgcgcggccgtgcgcgacgagggcgtggagttggcgaacgtgtcgttctcctacgagagcggggaggaggtgctccacgacgtgagcctgcgcgtgccgcgcgggtcgttctgcgcgctcgtggggccgtcgggctcgggcaagtccactctggcgcgcctgatcgcgcggcattgggatgtgggcgcgggcgccgtgcgcgtgggcggcgtggacgtgcgcgacatgccgctggaccagttgtcgcagctcgtgagcttcgtggcgcaggacaactacctgttcgactgctcgcttcgcgagaacatccgcatgggcaagcccgacgccaccgacgacgaggtgctggccgccgcgcgcgccgcttgctgcgacgacttcatcggccgcctgccgcatggctacgacacgccggccggcgaggcggggcacgcgctgtcgggcggcgagcgccagcgcatctccatcgcccgcgccatcctcaaggacgcgcccatcgtggtgctcgacgaggccacggccttcaccgacccggagaacgaggagcgcatccagcaatccatcgcccggctgacgcgcggcaagaccctgctggtcatcgcgcaccgcctgtccaccgtggcggcggccgacgacatcgcggtggtggatcacgggcgcatcgtcgcgcacggcacgcacgaccggctgcttgccgcctgcccgctctacgcgtccatgtggcaggctcacgtgtgcgcgaaggcgtggtctgccgtttcccgaaaggaggccctcgatgcttaaagcgctcaagcgcatcatcgcgtggacgggaccgtaccggcgcaacctgtacctgggctgcgtgtgctcgttcttcatgacgtgggccacggcggcccccgtgatgctggccgcgtggatgctcgcgcaggtggtggacgacgcgcgcggcgtctcgacgctcgacccgtcggcggtgtggctgtcgctggcggccatcgtcgcgtgcatcgccgcccggttcgcgttctcgtacggcaagaaccgtctgcaggagagcatcggctacgaggtggcgcccgaggtgcgcatccgcatcggcaccatcctcaagcgcgtgccgctgggctacttctcccgcatgaagacgggcgacatcctcgcgaccaccaccaccgagctgggcatgctcgagctgaacggcatgaagatgatcgacgccgtggtgaacggctacgtgtcggtggcggccgtcatcgcgtttctggccgtgatggactggcgctgcgcgctggcggcgctggcgggcgtggggctgtcggcgctcgcgctggcgggcatcaaccgacgcagccggaagctcacgccggccacgcacgaggcttccgagcgcctgtccggcgccatcgtggagttcgcgcgcgggctgggcacggcgaagtcgtacggccgcggcagctccgcgctgcagccgatgtacgcggcgtgcgcccaggcgaagaaggcccgcgtcgacgtggagttcggcttcacgccgttcaacgtggcgcacctcgtggcgctcaagctggccagcgtggccctcgtgggcttcgcggcctgggcgtgcctcggcgggacgctgccgctgtggatgttcttggccatcgccctgctctcgttcaccatcttcggcggcgtggagggcgtggccgactcggcgcacatgctgggcgacctgaacgacgtgctggaccgcctcgacaagatcgagcaggcgcgcttcatcgacgaggacgggcgcgcgctcgacctcgaccgcttcgacatcgcgttcgaggacgtggcgttctcctacgacgaaggtcccgaggcgcgcacggtgctgcacgacgtgagcttcgccatacccgagggcaccacgtgcgccatcgtgggcccgtccggctcgggcaagaccaccatcgcgaacctcatggcgcgcttctgggacgtgagcgccggcagcgtgcgggtgggcggccacgacgtgcgcgagttcacctgcgacagcctgctggcgaacttctcgatggtgttccagaacgtgtacctgttcaacgacacggtggaggcgaacatcgcgttcggctgccccggcgcctcgcacgacgaggtggtggccgccgcgaagcgcgcgtgctgccacggcttcatcgaggagctgccgcagggctacgacaccgtggtgggcgagggcggcagcagcctgtcgggcggccagaagcagcgcatctccatcgcgcgggcgctgctgaaggacgcgcccatcgtcgtcctcgacgaggccaccgccagcgtcgacccggagaacgagcagctcatccagcaggccatcggccagctgacggcgggcaagaccgtcgtggtgatcgcgcaccgcctggccacggtggaagcgtccgaccagatcctcgtggtggacggcggcacggtggcgcagcggggcacgcacgaccagctcatggccgagggcggcacgtaccgccgcttcgtggagatccgccggcgcgccgagggctggcggatcgcgagcgacgacgcggtcgctcctgcgcccgcggaggacgcgcccatgcccgcggcgtcctagcggctccgccccggccgccgcgcctcctaccgctccagtccccggcggtactcgctgggcagcaggccggtctcgcggcggaacagctcgctgaaacggctggcgcacgtgtagcccaccgcgtgcgccacctgctcgatcgacaggtcgggcatccgcagcagcccctcggactggctgatgcggcggctctgcacgtagcgcgtgagcgtggagccggtcaccgccttgaagcactccttgaactttgtggggctcatgcatgcggcccgcgcgaggtcgtccaccgtgagcgcgctcgcgcagtggtcgtcgatgtacagcgccacggcctggatgcgctcgcggtcctcgggcgcgacggcgcgtcccgacgtgtcccggcgcgctttcgtgcgctcgacgatgagccccatggcctcgaacaccttgccctcgtaatacagctggctgcgatgctcgtcgcccgggcggggccacagcccggccagcagcgcgcgcagctcggaggagtcgccgtcgtcgctcagcgaggcgaacgcgtcgcgcacgcgctcgaactgcccgtcgtactcgcgctccaggtacgcgcgcgacatctcgggccgcacctcgatggacacggccttcacgggcacgccgccgtgcacgagcccgcgccagcccccgtcgccgctgtagaatccccagatgcttttcgcccgcagccgccgatacggcgtgaactcctctcccgaaatggactcgtaccaggccacgctcaggtattcgggcagctcgaactccatgacggtgtcgtggagcagcgtgaagtcgtggatggcgatctgccagcgatcggagggtgcgaggatgtggaagctgccggacgtttcgccttcgccccggtacgagcgccacagggggcagaagccctccggcggctcatattcctcgaagccgatctgctcgagcgacggggcgtggatgatgtcgtgcgagggcgggcggtgctccatgggttctgctccttcatgcggttgctcgcggcggcgcggcggtcggccgcagggacgtgcgccgcaggggcgtgccgcgtgcgacgatcggacgcggcggtgcgacgttcggacgcgcgggcgcgcatgcgcgacgtcgtttccgcccctccgcgtatgatacaccattgttaacctaggctatcttttccgcatgaaaatgaatcagaaggaggtctgtcatgcgttcagccatgcaatccgacaagaaggggctcaccgcccgcgacctggtgacgtgcggcgtgttcatcgccctgtacttcgtgttcatgatggtgggcagcatgctgttcgccccgaaccccgtgctgacgttcctcatgccggcgggtgcggccctgctcaccggccccatctacctgctgctggtggcgaaggtgcccaagcacggccccatcatcatcctgggcgtggtggaggggctcatcatgttcgtgacgggcatgtactggctgtgggcggtagcgctcgtcgtgctgggcgtggtggccgacctcatcgccggcgcgggccggttccgcaacaagaacctcaacctcgtgagcttcctcgtgttctcgctcaaccccatggggtcctacctcatgctgtggatcgatccgtcgggctacacctcctacctggccgggaagggcaccgagcaggcgtacctcgacacgatggtgtccacgggcgcgggctgggtgctgccgggcatgatcgcgctgacgctggtgtgcgccctggtgagcgcgctggtgggtcgccgtctgctgaagaagcagttcgagaaggcgggcgtcaccgcatgatcgatcgcgcgttccggcccgatccgcgggccaagcttgcgctgcttctgctgtgggccgtcgcggtgttcctgtcgcccgggctgtggttcgaggcgctcctgatgctgctgagcgtggcgctgggcatcgcgctggggaaggggcggctcgcgctgggcatgctggggctgtacgcggtgatgatggcgtgcatgctggccacggcgcagctggacaccggcgtgctgaaaacgatgctgtcgtcgttcttcatgctggtgcgcaaggtgttcccgtgcgggcttctggcggccgtcatcgtgtccacgacgcacgtgaacgagttcatgagcgcgttctcgcgcatgcgcgtgccacgccaggtgaccatcccgctggccgtgatgctgcgctacgtgccggccatccgcgaggactggcgcttcatctcggacgccatgcgcatgcgcggcgtgaacgccagcctggccggattcctgcgtcgaccgggcatgacggtggagtgcctgtacgtgccgctcatgatgagcgcgtcgaacgtggccgacgagctgtcgatggcctcggtggcgcgcggcatcgagaacccggcgcagcgcacgtgctacacgcatatcgagttccgcgcgtccgacgggctgctggtggccgccggcgtggccgtggtcgtggcggcgcttgcgtgcagcctgttgggcgtggggaagtgaggtcgagacgatgatcgagtttgacgatgtgagcttcgcgtaccgcgcgcctgcggaaggcgcgggcgcgcccgagggggtgcgcggcatcgacctgcgcgtggaggcgggccggtgcgtgctcgtgtgcggcgcgtccggctgcggcaagaccacggtgacgaggctggcgaacgggttggcgccctcgttcttcccggggacgctcgagggacgcgtgctggtggacgggcgcgacgtggccgacctcgaaagctgggaggtggccgcatgcgtgggctcggtgttccagaacccgcgcacgcagttcttcaacgtggattccacgggcgaggtggcgttttcgctggagagcatggcgtggcccgaggagcgcatacgcgagcgcacgcacgataccatccgccagctggggttggaggagctggccgaccgcagcatcttttcgctgtcgggcggcgagaagcagcgcatcgcgtacgccagctcgtgggcgccccatccggcgaacctcgtgctggacgagccgacgtcgaacttggacgaagcggccatcgcggcgctgcggcgctacctgctggacgcgaaggcgcagggcgcggccgtgctcgtggccgagcatcgcctgtggtggctggccgacgtggccgacgaggtggtggtcatggaggaggggcgcatcgcgcggcgcttcgacggcgcgacgtttcgggcgctgccgtcgtcggaggtgcgcgacctggggctgcgggtgcgcgctttggccgacgagcgggcgcgcgagcggcgggcgccgggcgatgcgcgcgagccgcgggcgcccctcgtgcgcctgcgcggcgtgcacgcctcgtacggcaagcgcgaggtgctgcacggcgtcgacctcgacctgcgcgagggcgaagtggcggcgctcgtgggcgccaacggcgcggggaagtccaccctgtgccgcaccatcgtggggctgcatcgggaaagcgcgggcacgacgacgatcgacggtgaacccgcagggcccaagcaacgcctgcgcgcctgctcgatggtgttccaggacgtgaactaccagctgttcgccgacagcgtgcgcaccgaagtgagcttcgggctgacggacgctgaggcgcccgacgccgcgcgcgtggacgaggtgctcgacggcctggggctggcggcgtacgccgagcgccaccccgccacgctgtcgggcggccagaagcagcgcctcgccgtggcggcctgcatcgccaccggcaagcgcctcctcgtgttcgacgagcccacgagcgggctcgacctgggcagcatgcgcacggtggcggcgctcgtgcgccggttggccgacgagggccgcgccgtgctcgtggtcacccatgacctggagttcatcggccaagcctgcgacaaggccgttcgcgtggaagccggccgcatagccgccgaagccgtcgtggagggcgacctgcaagcggtgagagagctgttggcgaaggggtgatacgagggttgccgagggagcgcggcgctttgccccccc

SEQ ID NO: 8649 - DNA, 12956 bp, Unknown
  gut microbiota DNA sequence
accagccgccctgcgcgagcagctcgtcgtgggtgccccgctcgcgtacgcgaccgtcgtccagcaccagtatctgatcggcgcgctccacggtgtccaggcggtgggcgatgacgatgacggtcttgtccgccatgagcacgtcgagcgcccggttgatctcgtgctcgttgtcggcgtccaggctcgaggtcgactcgtccaacagcacgatgggagcgttcttgatgagcgctcgcgcgatggagatgcgctgcttctcgccgccggaaagcgtggaaccgccttcgcccaccagggtgtcgtagccctgcggcagcgcctcgatgaagtcgtggcagtgcgcggcgcgggcggccgcttccacttcctcctgcgtcgcatccggcttgcccacgcggatgttgttcgccacggtatcggcgagcaggtacacgtcttggaacacgacggccacctgctcggccagcgcgtcgggcgcgatatcgcgcacctcgtgcccgcctacgcgcacgctgccgctgctcgcatcccagaaccgcgagatcaagctgatgacggtggtcttcccgctgcccgaaggcccgacgagcgcggtgcgcgtcccgggctgcgccgtgaacgtcaccccgtgcagcacctccttgccgtcggcgtatccgaaccgcacatcgtcgaaccgcacgtcgaagctcgtgaaacgggggttgccgtcgcggtacgcaagggggcgttcggcctgtattcgctcgatgccctccgccgctttggccaggtagttcagctcggggtagatcacgccgagcgtggtcatcatgctggagatggatacggcgatcatgaccgccgcgatgaggcggggcgcgtcgagctggccgtccatgaacatgagcgtgcccgccacgagcccgagcggaacgatgagcgaggtggccacggagaacagcaccgagaacggcatgatggacagctccatgcgaatggattcgcgcttcaaatcggcgaagctgcggtcgagccgctcgaagcgccggccggtgagattgtagagcttgaacgtcttgatgccgttgatgtactcgatgatgcgggatatgaccgcgtggacgctttcgcgatagcggacgccgcccttgcttgccgcgcgcccgcccaggcgcgcaagcggcagggaggcgacgacgatcgcgaggatgatcagcccgtagagccagttgatggcgaaggcgaacgcgcatgcgagcacgctgaagcagacgaccttgaagaagctcgccagcgaggtggtgatggtctgctcgaagtcgctcacgtcggtggtgagaaccgatgcgagctggccgatgctgttcttgtcgaagtaccccaggttcagcctgcgcaggtggttgccgatcgagagtctcaggtcggcggtgatgtccgcgccccggaactgcgtttgggcgtagttcgtcgcgtacagcgcggcgcgcacgacgaacagcacgacgagcgcgccgctgtagaacgcaagcagctcggcgttgaacgcgccggcgacgaggttgatgatggctgcgatcatgacggcgaacatgcccatgtgcaaaagcgagtccgcgcaggaaagcgcgatgggcagcacgagggtcttggctttgtcgcccgctacggttcggacggttttgatgagcgttatcatgccagcgactccttcttctccgtgcggtgcgtgtaggcgtcccacatgcgggcgtaggcgccgtcttgcttgatcagggaatcgtgcgttcctcgttctcgcaggcggccgtggtcgaacacgcatatctggtccgcatgcacgatggtgtgcaggcggtgggcgatcatgatgcaggtcttgttcgtcagcaggtgcgagagcgcaagctggatccggtgctcgttctcgatgtcggtgaagctggtggcttcgtcgaacacgatgatgggcgcatccttcaagatggcgcgagcgatgcacacgcgctgccgctcgccgccggacagcttgacgccgttctctcccagcaacgtgtcgtagccgttcggcaggccctcgatcgtgtcgtggatctgcgcggcccgcgcggcggcctccacctgctcgcgcgtggcgttcggtcggccgagcctgatgttctcgtacagggtgtcgtcgagcatgaaggcttcttggaacacgaaggacaccagatccatgaggttgtcggtgcgcagttcggacagggcatgcccgtcgatgcgcaccgcgccttggcgcgtttcccagaacttggggatgagctgggctgcggtcgtcttgccggcgcccgaggggcccacgaacgcggtcaggctgccggcgggcagatcgaggctgacgtcggtgagcgcgttggtctcggcggcgccgtagccgaacgtgacgtgatcgaacgccaccgcgtgcggtttcgccggatcgagcgcgagcgtgccttcggaagcctcgggcaggtccatgatgtcctgtatgcgctccatgccgctcatgatctggttgaacgtcatggcgaacgtgagcaggttcaggaggctggacaggaacaccatgctcatgatcatgaagaacaggtagtcggcggccgaaagggagccctgcaggtacagcacgccgcccaaaggcagcacgaacaggatgccgctttccacgatggccacgaacacgccgtaggagtagccctggctcttggtgcactgcttccagaactcgttgtactcggtgacggcgtcggcgtactcgcggtagcctttcgcgtccagacggtaggccttcatcacgggcatgccgttgatgaactgcatgatggccgcattgagcttggcgagcagccggtggtacgtgggcatctgcttgccggtggccgccatggcgaacagctgcacggcaacgcccagcaccacggggaccagcatgcccagagccatgggcacgttcaaggtgagcaggtagcagaacatgatggcgggcgtgcaggcggcggcgacgatgtcggggatctggtgggcgagaaacttctcgatgcgctcgacgtcctcgatgatcacctttttgagagcgcccgaggtcgtttgatcgaagaacccgaggttgaccttcgcgatgtgccggctgatctgcgcacgcacctggtacagggtgttgaaggccccgatgtgcgagcacgcgcccgaggcgatggcgaacgcgaacttgcccacgatggccacggcggcgatgatgccgtactggagcgccgcgcccgcgtcggcgttcccctcgatgaggaacagcagcacctggtacaccatgacgaacggcacgaaggagcacagggcgctcatcacgctgaacagcgcagacagcgccagatgaaggcggtagcgtcctgccaggtggagcaggtaggccatgccggagcgccgcttggcgggttgctcggcttcggggcgtttctgggtgcgggcgttctcttccgggtgcatggtcgcaccccctttctcgatggggtaggggcgttggaatcggatggcgcggtcaccgcatggcggcgagcagctcttcggcgtcgcggagggggacgtcctgcgcgacccgcccgtcgcgcaggtgcaggacgcggtcgcacgtggcaaccgcgcactccacgtcgtgcgtgatcatgaggatgacgcggccctcgtgcgcgagcttctcgatctgcctgccgacggagcgcatgctctttccgtccaaaccgctcgtgggctcgtcgagcacgatgacggaggcgtcgtgcatgagcgcgacgcccagggcgagccgctgcttctgccctcccgaaagcgttgccgggtggcggtcggcaagcgcgcccaggcccagcgcatcgagcacctcgtcggcgcgggccgtccgctcgggcgttgccttctgcccgcacagcagctcgtcgcgcacgctttcgccgaacagctggctgtccagatcctgcatgatgtaccatatgcgtcctcggcgccgtccggacgcgagcttcttcccctccacgcgcacggtgccgccgtcctctttcacgaggccggcgagcagctttcccagcgtgctcttcccggtggcattggggcccaccacggcgacgatctcgccggggcggcaggcgaagctcacaccgtcggccacgatccgctcgccgaaggacttgcgcagcccctcgacttcgagcagcggcggcacgtgcggggccgcgcaggtccgtttcctggcaggtgcggtcaggccctcgaggttcgcgctgcgcagcccgagggcctcgatgcgcgcggggtcgagggcgacgagttccgcaggcgtgaacgagtcggcgatgcggccgttggcgaggtagacgatgcggtcggcgatgccgcgcagatagtacaggcgatgctcggccaggagcacggtctttccctgctgcttgagcgcgcgtatcaggttgccgagctgctcggtggcctcgtggtcgaggttggcggagggctcgtccatgacgtagaggggcgggtcgatggccttcgcggaggcgatggccacgcgctggcgcatgccgtacgacagcaggcgcaccttctcctcgagcaagggggcgatgtccagctcgcttgccgccccgtgcacgcgctcgacgatcagctcgtgatcgagcccgtagttctcgcacccgaacgcgatctcgcccgccacctcgttcgcgaagaactggctgcgggggtcttggaacacgttgcccgccgcgagcccgcgttcccacgaagggatgtcgtcgacctcgcgcccgaacaggcgcaccgtcccggtcagctcgccttcgtagaaggacggcaccaggccgttgaccacgcgggtcagcgtgctcttgcctccgcccgagggcccggtgagcaccaccacctcgccgggttggacggtcaggttcacgtcctcgagctggggagcggagccttcgtaggcgaaggtcaggtgcgcgagttcgatggccggcgcctgcgggtcgtggttcggcatcatgtcgctcaccccaccacgatcaagatcgaggcgatcgcgaaccccgccatgagcgctccgtcgccgatccgcatgccgtgcgcatagtagctctgcttcgcgcaggggctctcgatgccgcgcacgatgcaggatgaagccagctcgtcggcgatggtgagcgagcggaacaccatgggcaccacgccgaactcgagcgttgcgagcggatgcgccaagacgtgcgccggcgagcggaggaagccgcgggtgcgcatggcgtcgcgcacgtcggccagctcggacagcatggtgggcatgaagcgcaggatgacgatgacggcgagcagcacgggggaggggatgggcagctggcgcaagcttgccatcagctttcccgagggagcttgcacgagcaggtacaccggcatgaggaggggtagcatctccaggacgaaggtgaacgccatgggcgaggggaacccgatgtcgaaacgcacgttgagggcgagccatgcgtgcgtcaccgcgaacgcgagcagaaacccggcgccggcccttgcgaagcccatcgcggccatgagcacgaaaagggcgcaggtgaacgcgacgtgcagcatcgtgctggtggacaggaaggtcacggcgcacgtgcacacgatgatcgcgagcaacgagaggacgttgacctcgcggatgcgggcgtgctgccgggttgccccgtcccgacgggtcggcgcgctcagagcggcctcggctggcgcggcagggtgcacggcgccgctcatttcacgatacccgccttcttgaagtgcttcctgagcaggcggttgccgaacaggcatccaagcacggccagcacggcggtgatggcgcaggcgcccagcaggtgcagcgggttcgacagcaggtcgagctgcatggtcagaaccggggcggtgaagccgtcggtcgtcgctttcgccacgtaggcgtcccacgcagcccagacgggcacggcattgccgatgaccatgccgaccgcccagatggtccagccgacggtgttgcgcacggggctgcggtacgcatccttgccgatcatggccagctcgcagatcgccgcgacgccggcgaagtagggaagcaggaacacgtagcctgaaagcgcgagcaccgtgccgtacacgatgccccacacgaggaagacgccatgcttgttcaggcgattcgccacgacgaggtagaacgtcgcgcagaggaacatctggatgccggcgcacaggtacagatacacgaacgggaacggcatggtcaggggtcccgtgaccatgcatacgaggaacgtcagcaccatcatggccgcgacggtcatgacgtcgcgggttgcgatgctcttcttggaggcgcgcccgcgtgcgcctcgggtggtgtcgatggttttctcggtgctcatgctgctctcctttcgggtgggcccgtcgggccgggctggtggaaatcgggcgcacgaaggaaggcccgtcgtgcgcgggtgttcgagcggactgcttttgttagtttgagctaactagtggtcatggaaagacggcatcacccgccgaagaggttctcccagccggggcggaagaagtcgacgatgagtttgatgcgcgcaacggcgtcctctttcgaggtgtcgtggcgaacgatttcgaagaatgcgtagtattccgcgctcacgagcgcatggaggtcgtcgtgggacgggctcgcgcaggcaaggccgcgctcgcgcatggcgtccaggtaggcgagcgattggctgacttcttcctctacgagatcgtcgaggaaatgctcgtagccgcttcccgccgcgtggtttatcagcaggtcgaacggctccttgtgctcgaagatgtagtcgacgatgcgggtgatcacgtcttcggaggtgctccacatgtcttcggggcgcccttcgtccagctgctcgaacccctggtcgttgcccgtgcggaagagcccgagcaggtgcgcggacacgggctcgaccagcgcggcgaacagcgcgcttttgttcgggaagcgcacgtacagcgcgccggtggtcacgccggcgttctgcgcgatgctgcgcagactcgccttctcgtatcccttgtccagaaactctcgctgcgcgctttgcagcacgagaccgcgcgtttcctcaacctgcttcacatcctgatcccttctcatcaataacaatgttatcgataacgacgttacgaataatgtcatacacggttaactctgtcaaggaaaagatgggcgatcgtcctcgaatcgcggcgtctccgttgccggtgacggaacgcttcggtacgacgatcggacggcggttgagttgcatcggacgcgcgaagttgcagtgggcaaacttccttttcgcgtgttctatccttgcagccgaacgatatgtcacaggtgcaaggagtctgcatgaacagtccgatcagattgatattgaagtgggcgggacccgaccggaagtacttgatcgcggccgtcgtgttcgcgttcgtttcggggcttatggccatggtgccgtactacggcgtgtacgagatcatgaaggcggcctacgaagggacctgcacgtgggaggtcatcacgtcgaacgcgctcgtcgtagcggtgggcgtgtgcatccagtacgcgtgcttcggatgcgcgggcgcgctgtcgcacaagggcgcgtacaacacgctgttccgcgtgcggtgccgcgtcgtggaccatctggcgcacgcgccgctcgggcagctcgacgagcggtcgaccggctccatcaaaaccgtcctgtcggacgacatcgagaagctcgagctgttcctggcccacaacatcaccgaggcgatcatgtacctgaccggccccgtcgcggcgttcatcttcctgtgctcggtgaacgtgccgctggcgctggcgacgctcgtgccgttcgcggcggcgttcgtcgtgatgggcgtcatcttcaagcgcatggccggcgtgatgccgcgcgcgagcgcggcgttgtcgcggatgaatgcggtgatggtggagtacgtgcgcggcatgcgcgtcatcaaggcgctgaacatgggctcgaagtcgtttcgccgcttccagtccgccgtggacgaggagcacgccgtgtggtgcgacatcgcgcggaaaacgggtccgggcttcgcggcgttcgtcatcatcatcgagtgcggcatgctcgtgatggtgccgctcggcggcttcctgttctccacgggagccatctcgggcagcacgtttctgctgttcgcgttcgtcgggtcgctctacctgaccgaaattcgcctgcttcaggaaatcggcagcaagttcgcccaggtgaaaagcggggcgatcaaggcgcaagagctgctggacctgcccgccttcgccggcggcgcgccgtttcccgccaagagcgacgtgcggctcgagaacgtgcgcttcagctacgacggcacgcgcgaggtgctgcacggcgtgaacctcgccgtgcagcagggcgagcgcctggccgtggtggggcccagcggcgcggggaagaccaccatcgtcgagctcgtgtcccgcttctacgatgcgaccgagggcacggtgcgtatcggtggcgtggacgtgcgcgacctcgattacgacgacctgctggcgcacgtggccgtggtgttccagaagacgttcctcacgagcggcagcatcctcgagaacatccggatgggcaagcgcgccacgctggacgaggtgcgcgaagcggcgcggcaggcgcgcatcgacgacttcatcatggggctcccccgcgactacgacaccgagatcggcacgctgggcgagcgcctgtcgggcgggcagcgccagcgcatcgccatcgcccgcgccatcctcaaggacgcgcccgtgctcatcctcgacgaggccaccagcgcggccgaccccgagaaccaggtgcagatcgacgaggccatcgccaacctctgcgcgggccgcacggtggtcatcgtggcgcatcgcctgggcgtggtgcgcacctgcgaccgcgtggccgtggtggaggacggcggcatctcggccgtggggacgcacgacgaggtgcttgccgcgtgcccgtactaccgcaaggcatgggcggactacgagcggacgcgccgcatcacgttcgggttcggcgccgcggcggcggaagcggagccgcggcagcgcgccgcaagcgattccgtccaccgtgccgccgcgcagccgcagggcgcatcgtcggcgcccgcgcaagcgccctcgagcccgaccctggatccggccccggccccggcctccgcctccgcctcgacctcggtgttcgcgaagaaccgcgacttctccgtctcggtggcgtgcaccgtcatcgagggactgctgtcgggctgcaacttcggcctcatcttcctggtgatgcagcaggtgttcagcggcgcggccgacttcggcaccctgctgggattcaccggcgcccttgcgctcgtgttcgtgctgcggctcctcatctacggctacggctacgtgcgcgggcagatcggcggggcgcaggtcagccgcaacctgcgccagtacctgggcgacaagatcaagcgcatccccctcgcgcggttcaccgagcggtcgagcggcgactacctcaacgcgctcaccgcgaacgtgaacgattacgagcagatcctcacccaccgcaccggatccgtcgtcaaagacatcacgctggccgtgatgctcaccggcttcgtctgctggctctacctgccggccggcgcggtcgtggcgctctcgttcgcgctcatcgtgcccgcgatggcgctgtcgtggcaccaggtgcgacgctacggcacccgcaaaagcgacatctgcgccgcgaacacgagccgcaccgtcgagcacgtgaccggcatgcagacgctgcgcgcctacggcatcggcggcgtgaagaacgaggccatcgtggacagcatgcgggagtactcggacgtcagcttctggtacgaggcggccctcatccccctcggcgcggtcatgtccatcatcgtggggctgtgccagccgctgctgttcctcatgtgcggcgcggcgtacctcgacggggcgctgggcgcggttccgtacctgctgatcatcatgctgccgctgttcatgaacaaggtgtggaacagcatcttcgtgaacctgacggcctacaagaacctcatgatcgcgaagcgccgcatccaggcggtggtggacgagccggaggaggcgggcagcttcgacgcgctgccggcgacgggatcgcgcatcgagttggccgacgtcgggttcgcctactgcaagggcgagccggtgttcgaggggctgcgcctgacgtgcgaagacggcaagctgaccgcgctcgtgggcgactcggggtgcgggaagtccacggcgctcaacctcatcgcccagtactaccggcccgcgcgcggcacggtgcgcatcggcggcgcggacaccgcggcctacgcgccggaaagcgtgctggcgggcgtgtccgtcgtcgatcagaacgtgttcctgttcgacgattcggtgatggacaacatccgctacgcccggcccggcgccaccgacgacgaggtgcgggaggcgtgccgtctcgcgaacgccgacgggttcgtgcgcgccctgcccgaaggctacgcctcgcgcatcggggagaacggcggccggctgtcgggcggcgagcgccagcgcctgtccatcgcgcgcgccatcctgcgcgacgcgcccatcgtgctgctggacgaggcgacggcctcgctcgacatcgagaacgagctggccgtgaaggaggccatcgccaacctgctggcgaagcgcaagaccgtggtgatggtggcgcacacgctggccatcgtgcgcggggccgattcgatcgcggtcgtcggcgacggccgcgtgctcgagcagggcacgcacgacgagctggtggccgcgggcggcaagtacgcccgcatgtgggcggccgatcgcgagctggcgtgatgccgcccgcttcccgccccgcgggagtcgcgctgaacggaaccgctcacctgcggtaacgagcgggcaacagcccttgacgcgcgttcctcccctctgcaaagcttgcccgactggatgggcgctccggcgccgtggacgagggcgcaggcgagcgaggacggagcaggcgatggcgaacgacgggcaggcggaggaggggagcgtctccggcggcggccggcaacccgccgcgggcggcggctgtccgacggctctcccggcttccgatccgccgctgtcgcggcgctcggtcgccgccgtgttcgcggggcttctggtggcgatgaccgtggggaccctgaaccagaccatcgtggccaccgtcctgcccaccatcgtgggcgagctgggcggcgtgaaccgcatgctgtgggtgaccacgtcctacgtgctggccgccaccgtcaccatgccgttgtacggcaagatgggcgacctcatcggccgcaaagggctgttcatcggcgcgctggctctgttcgtggcgggctcggccgcgtgcgcgctggccccgtcgatggaagggctcgtgatcggccgcgccgtgcagggcttgggcggcggcgggctcatggtgctctcgcaggccatcgtggccgacgtggtgccgccgcgccgccgcgcgctctacctcagcatcatgggcgtggcctacgccgtgcccatgctggccggcccgttgctgggcggattcttcgccgacgcggtgggctggcgctgggcgttctggttcgacgtgccgctcgcgctggccgccatcgtcatcgccgccgtcttcctgccgaaaccgcgccgcaccgcggagagggcgccgttcgacgtcggcggcgccgtgacgctcgtggccgccgtgaccgcgctcacgctggcaaccttgtggggcggcaacgagcacgcgtggacctcgccgaccatcatcggcctgctggttgccaccgcggttgcgagcgcgctgttcgtgctggcggagcgccgcgcacgggaaccgctcatggcgttgtcgctgttcaagaacaggaacttcgacatctccatcgtcgcaagctccatcacgatgttcgtcatgatcggcgtgctcacgtacctgcccacgtacttccagatcgtcgacgacctgaacgccaccgccgccggctacctggtggcgcctatgaacgcggcctggttcgccgcctcgctgctgtcgggctacctcgtgaacaagctgggcacgtacaagaagctcatggtggtcagcttcgccgtgctcgtggcgggcatggtcgggttcattgccgtggaccaggacccgtcggcggtcgtcgtcggcggcctgctggccgtcatgggcttcggcgtgggcctgaacttcgagatcctcgtgctggtggtgcagaacgagttcccggcctccgccgtgggcatggccacggcggcgacgggcttcttccgcaaggtggggtcggtgctgggaacctccgtcgtgggcgcgctgttcacgagcggcctcgcgcgcgccctggccgagcgcctcgcgccggtcggcggcgtcggggcgctcggcacggacgcgaactcgctcacgccggccatcgtgcacgcgctgcccccggacgtgcgccatgcggtgggcgccgcctacagcgacgcgctcgcgcccgtgctctggctcgcgttgccgctggccgtggcgggcctcgtgctcatgctgttcctgcgcgagacgcggctggccaccaccgtggacggatcggggcatggggccgacgaaggcgcggacgacccccggcggcggcagggcgcgcgacgccgctagcccgcgcggccggcgcgggcgtcaacctacgctcacaggtcaaggttgtggttgctcctgtggcttggggggggg

SEQ ID NO: 8650 - DNA, 21591 bp, Unknown
  gut microbiota DNA sequence
atggcccgcgtgcgatacgaggcgggcgcggtcgagccgctgtacgccaacgacgagttcttcagcctgctgggctaccagcgtcgatcccccgacgatttctaccccctcgacgtgcggaactcgcacggttggcgcgcgttctgcggccagctgcgcgcgcatatcgaggcaggcgagacggacttcgagatcgaggtgaaccaggagacggcaaccggcacgctgctgtggacgatggcgcggtgccgtcacgacgcgcggcgcggcacggtcacctgcctcgtgctggacgtcagctcgtggatggacacctccgagcgcctgcgcatgagcgaggacgcgtttcgcatcgccgcgcagatgagcggcaagaacatcgccacgttcgacctggccgaccgcgcgctcaccatgcagggcgcggtggagggctacctgacggcgcccgcgcgcatggtgaacgtgcccgacagcgccatcgccgccggcatgatcgcgcctgagcacgtggagctgtaccggtcgctgtaccgcgacatggagacgggcgtgccgcgcgggggcgtcatgctgcgcatgcgggacttcgacacgcggcggttccgctggtaccaggtcgattactcgctcgtgttcgacggcgagaaccgtccggtgtacgccgtcgtcgcgttcggcgacaccaccgagcggcacgagcgcgagctggtgcaaaaggcgcgggccgagcgcgacgcgctcacgggcgtgctgaaccgcgcgacgttcgaggacggttgcacgcgcatcatcgagcggtccgaagtcgaccacgggcacgcgctcatcatggccgacctcgaccgcttcaagacgacgaacgaccgctacggccacgtggcgggcgaccgcgtgatcgtggagtcggtggcgggcgtggtcagcgcggtgcgcgacgacgacctcgtgggacgcgtgggcggcgacgagttcatggtgtgcctgcggggcatctcgtcgcacctcatggtggaggccgtcgcgcaacgcatgtgcgcggcggtgcgcgaggccgccgaggcctccgacgacgaccacgggccggtgtccatcagcctgggcatcgccctgtatccgcaggacggcgtcacgtacgaagagctgtaccgcaaggccgacaaggccctgtactgcgccaagcgcgcgggcggcggcacctacgcgttctaccgcgacgagccggcggcgtcctagcgcccggcgctactcccagcccggcttccccacgccgccctgctcgatggtgtcgagcagcccttggcggtcgaacacgcccaccttgcggtagatgttgctcacgtggtgcttcgcggtgccctgcgcgatggacagctcgtcgcagatatagcgcacggtgcgcccgcgggccagcagcacgagcacctcggcctcgcggttcgtcaggcggcacatccgcgcgatggcggcgcacttctgctcgaggctggcgtcggcggtttcctcgcgcgaggtggcgtagagcttctgcacgtcggtttgcgtgaagaacagcatgcccaccagcacgagcgccagcacgcccacgaggaacacctcggagcgcagcgcctccgaccacagcgccgcgttcagtagctggtccgcggcgaacgacccgatgagcgtgccggtgcgggcgcagaggatgaccaggccgaacgacagcgccacgggtatgcgcccgcggaacgccacgtcggtggacaccagcatcatgaacatgtcgaggcagtacacgcccatgatgaccagccccgcgcccaggaagcggtacggcgcgggcagcagcagaagcaggatgagccccgccaccatcgcggggatgacggggcggtacagcgcgatgggctcggcggccgagggcgccaccaccatcgacagcgtgatggcggccagcgcgcagcccgccagcagcagcgccttcgcggtgaacgcggcatcgccctcggcgaacgtgttcaccatgccctgcgaggccccgtacacgatgctgatcacgaggatgcaggcgaaaatgcgccccacggggatggtgcgcacgtcgagcggcagcaccgagggctcgcggcgcggctcgcgcttgcaggccaccagcaccgcggccgacacgatgggcagcgccgccgtgaacgccacggccgccgcctcgggcagcgcgtacgcgacgaagaacagcacgaacgcgaacgtgtacgacacgtacaggtgccgcccgacgcgtccggtggccagcgcgctccacagctcgccccacatgatgagcagcagcgcgttgcccagcgacagcgacacggtgccggcaaggaaccaagtgaaccccgcggctcctgagcccagcgtcagcgcgatgggcagcgtcacggtgcccgcggcggtcaggccgcccgcagcgaggaagcttgcgcgatgcgtgaggaacggcgagagtcgccgtgcgagcgccaccaccacgaggtagcccacggtggtcagcacgagcacccacagcgtggtgttgcccgcgaacgggaagcggtcggtggtgggcagcagcacgtcggtgcacatgctgatcatccaccaggcttgccagaatcccaaacccagcaagcgccagccggagaagccaacgtggtcgtcatcctgcggtttcgtgcgcatcgctccccattcccatccctcgtcgcgtcgcttcaaacctagcaaaacaggcgggggagcgcaagcgggaaccctggttgaggcatgggccgcaacggcccatgttgcgggtttcggcgaaaatgggccgcttcgccagatgcccgcgcgcggccgttcggccaggatggggctatgcggaacaagggattccgctcatcgagggaaggggtttccaatgaccgacatcatgaagaacgggctgtcccgccgtgcgttcctgggcctgggcgcaaccgcggccgtcgccgccggcgcgggcctagccggctgctcgcccgcggcgagcgcaggcgatgtgaaggccggcggcgacgcggccggaagcgcggcggccggcggcgagacgcagtacgcgtgggaagtggttcccgatcccatcaccgacgtcacgtcgacggtggacaccgacatcctcgtcatcggcgccggtttggccggctgcgcgtgcgccgcggcggcggccgagaagggcggcaaggtgaccgtcgtcgagaagacgtccagctggaacggccgcggcggcggcttcggcgccatcaactcgcactacatggacgagctgggcatcgaggtggacaaggtgaacgccaagcagcactggatcgcccagtgcgcgagccgcgcgaacgaggacctcatcgtgaagttcttcaacagctccgaagaggcgtccaactggctgctggccaaggccgaggccgtgggcggctccgcgatggtgggcgcgttctacagccacgacgacgtgtacgccgagcagccgggttaccacatgctcatgatccccgaggaggccggcctcacctcgacgggcttcgccggcgccgagctgtgctacaacgacgccgtgaaggacggcgcggaattcgtgttcgattcgccggccgtgcagctggtgaaggacggcacgaaggtgaccggctgcatctgcgagggcaaggacggctacgtgcagtacaatgccagcaagggcgtggtgctgtgcacgggcgacatcggcggcgacctcgagatgtgcaaggcgtacgcccccatctgcgccgagtacggccagccgcgcagccagtacacgcccgtgggcgtgaacacgggcgacggccacaagatgggcatgtgggttggcgcgcagctgcaggacctgccgctgcccacgatgatgcacccgcaggcgttctgctggttccacggcccgttcctgttcgtgaacgacaacggcgagcgcttcatgtgcgaggacacctgggtgcagggcaagtcgctggccatcaaccgccagccgaacggcgaggcgtggtccatcttcgacgccaactggaagaccgacctcgtgaacggcctgccctacggcggcggcatgttctgggactcgttccgcccctacggcagcgaccttgagctggctccccagtacttcgagacgcagatccccgagtacatcaagcagggcaacgcctaccaggccgataccctcgacgagctggcgaagcagatcggctgcgacgcggccgtgctcaaggccacggtggaacgctacaacggcatgtgcgaagcgggcgaggacaccgactactacaagaagcccgtgttcctgaccccggtgaaggaaggcccgttctacgcgctcaaggtcggtcccgcgctgctggccatccccggcggcctgcgcacgaacaacgacttccagtgcctcgatgccgaaggcgcgcccatcgagggcctgtacgcgcttggcaacgtgcagggcgatatctgcgctgtcgactatcccatcaacgtggccggcaacagccatggccgttgcatcacctacggctacctgctgggtcacgagctggccggcgcgtaagcgcccggcgctcgcgggcgcgctcagcctgcaaccctccccgagccctgcgccacctccctcccggcgcagggctttttcgcgcccgcccgccccagcgtcccaccccaaatgtttcacgtgaaacattcgttctgatctcccgtttggaacgctatgcctgctgcgcatccctctgccgccgaaatggcgagaaatcaccggattcggcaaaagcagcccgctctacggaggcgaggaacgcctccagcgggacaaggtgtcaccacgaccaacccttatgcgagaagggatcgttcccgacgtactcgctccccgccccgaatgtttcacgtgaaacattcgttcgctggtgaggctagtttccgaaatggatgcggttgaagtcggctttcgagtggaggatgcgctcgacacacacgatgccctcgccctcgtcgatccggtagaaagccgcatattttccatcgatcggcttccggcgcagcgcctcggtgaacccgtacggcttttcgggattgcgcgcggggaaggtgcgaagagcctgttcgatttcgtcgacggcagcgtcaagtcgatcgtatgccttgtcgacggaaaacgtgaattgcacttcgtagagtgcaagattcgagacgtcttcggcaaaactatcttcaaacgagatgtcatagatcatggccggccagcttttcttcggctcgacgacgcatttccgctttcacttcttccgcggtatacgttttcggatgctgcttgttgtgctcgatggcctcgtcgacgagcaggccgacgtagcgatcgtagtcgaacgcggccgcgtccatgactacgagcgatgcacggccgttcttcgtcagatagatgggcttgcccgtttcctttgcaagcgcttcgatgctgttgtaatcacgacggatgtcggtggaggagcggatgatgggtgcagacatgatggtctcctttgcgtatatgctgaaaataaacatattataatatgttcaaaagcaaaggaaaagatgcgtcgagaaatcgaatgtttcacgtgaaacattcgttcgctggcggggcttgggaggcttggggacttcggactctttgtgcagatcgcgcgcaacgtggaggatttccgttgacttctggcgaaacacccgtatacaatgcaaaggttcgctttcgaaagccccgtgcatgcagtgagaagcggaagcgcgagcgagggagtccagacccaagatcgtgcgtcggcgtaggaacccggcatccgatcgacctgcacttttgaaaccgatcattcgccgcatcgcggtcggcccgttatcgttcgagccgccaacaggcgacggagacccgccccgcacggcggggtaggacaggatttttggaggaagatagtgaagacgtattacgcgaagcccaacgaagttgagcgcgaatgggtcttgatcgacgctgagaaccaggttctcggtcgcgtcgctgccaaggccgctcagattctcaagggcaagcacaagccgcagtacacgccgcacgtcgacaccggcgacttcgtggtcatcatcaacgcggacaagatccgcgtgacgggcacgaaggcccagtcgaagagctactaccgccacagcggtttccccggcgggctgaagtccgagaccttcgaagaggccatggccaagcatcctgagcgcgtcatcgagcatgccgtgaagggcatgctgccgaagaacacgctcggtcgcgccatgggcaagaagctcaaggtgtacaccggtgcggagcatccgcacatggctcagcagcctcgcgagatcaagatggagggttaacccatggcaggtgaagctttgtactacggcaccggccgccgcaagaacgccgtcgctcgcgtgcgcctcgttcccggcaccggcaaggttacgatcaacggccgcgacgcccttgcgtacttcggtcgccaggcgctcgtgaactacgccttgaccccgttcaaggtgacggacacgacggatcatttcgacgtcatcgccacgctcaacggcggcggcatctcgggtcaggccggcgcgctgcgtcacggcatctcccgtgcgctgctggctgctggcgactaccgcggcgagctcaagaaggccggctacctcacgcgcgactcccgtatggtggagcgcaagaagtacggtctgaagaaggcccgcaagcgcccgcagttctcgaagcgctaggatcgcgttcgcgaacagcacgttttctgcagagcccgcttcctttggaggcgggctctttttgcataaggagcacggaccctacgaagggagctacgcatggcgacgaaggcgacgttgacgatcaggcaggcgcgggtcgacgagttcgaccaggtgatggacttctacacgaagatgatcgacgagatgcgcgacaccgacttcgacgtgtgctgggagcacggcgtgcacccgtcgccggcgttcctgcgcgcctcggtggatgcgggcgaggcgtacgtgggcctcgtggacgcgggcgcggacggtgcgggcgaggaccgcgcgccgctcatcgcgtcggccatggtgctgaacggcgaaggcgatgccggctacgagcacgcgccctggcgcgtgacggccgaacccgatgaggtgctggtggtgcacgtgctgggcacgctgccggcctaccacggccgcgggttcgcgcgcgccatggtggaggcctgcatcgacgtcgcgcgcgcagccagcaagaaggccgtgcgcctcgacacgttcaccaccaacgtgcgcgcccagaacctctacgaatcgtgcggcttcgtgaactgcggcatctacgaggggttctacgacttcctcggcctctccgccgtcatgtacgagcacgccctgtaggctgcgcgcttgcggcgcggttcttctgagcccgtctcctcggaggcgggtttttcgtatgcgagggggagaaaccgccgagggaggttactttcaagtgcgttcttgcatgactcgttttcgctgtggatactaaactcaggggtcgcctaaaatggggtgctcacaaggtgctttccggggcgaacgccgtgcggcggcagccgcgggattttgaggagagaggacaacgcttctggaacgcgttcgcgtcatgccgatggaatcgctagcttggcgatcctccgtcttctctataatcaatcacgctgtccgttgaatcgctagttgagggaagtgggttgtatgcttgagagaatggacgatttaacttcatgctccctttcgtatgtcgcttcgatattgggaggcaagtggaaaccctttatcgtgtggtatctgagcatggctcccggcaagagggcgcgttacagcgagttgagaaaaagcattccgtacgacatatcgcacaagatgttcagccagcacctcagcgagctcgagcaggtggggatcatcgagcgcgttgtcgtcgaggtcaagcccctgcgcgtcgactatctgctcacggaaaagggcatcagcttcgcgaacgtcctgtacttcatccgcgattggggcgcggcgtacggcggcttttctgcggagacgctgcagcgcacgaagggcacgatgggcgagggcgtgctggtgtacggcagcgccgacgacggctccgagcagggggctgcggagcgtatcacctggcaattcgatccttcgacgttcgacgtgcgcaccggctcgcgcgaaggcgacgcacgcgaaggcgacgcgcccgaagcgtagtcttcgggcgctcaagcgagggccctgccagggcgctctcagggcttgccgaccgccttgcggcccctctcggctttctttcgattacccgtctgtctcactttcaggtaagaagcgcacttataagtgcattattgcgccagtattcccgcgtcaacagaatacgaggtaagaaccgcatctcgaaatgatctgcggtgcaaggacaggggtacgtttcagaaaggatgatcggcatgatttcaagaatcaacttgctcaaacggaaagagggactgactgctgaggagttcgccgcgtatctgacgcaggctcatggggagcttctggccacgatgcccttcctcaaagggtgcgaaacgaacgtggtggtggacaacgagcagcgctcgccgttcgaccgcggctcgacggaaatcgacgggtacaccgagatgttcttcgacagctacggcgacatggtgcgcggcatggccgctctcgaagaggcgcttgcgaccgactacgcccagttcgcggctcccggcatcccggctcttgtggcggtgaagaaggtcgacacgccggttcccgcctatctggacgacgtgaagctgatcaagcgcatgtcgttcctcgggcgaaaggacggcgtgagcgcggcggtgttccaggacgagtggtggcagatgcattccgcgctggtcaagactatgacgggctatgcggggtacaaccagaacctcgtcatcgaccgcatcgtggacggggaaacggtgccgttcgaagagctgcccatcgagggcgtggtggaattctggttcgagaacatgaaggcgttcgacgagtgctacggatctccggccttcaagcgcacgggcgcgcacggcacggagttcatcgacaacatcacgacctacttggtggaggcgcagcctatcgcgatggcgtaggccgtcgcgccgggggtttcgagagctgcaacccggaatccccggcgcgcacgttgtccggggaggggtgcgaatcgatgttggatggcagggggcatgggaggttcgagagctaccgactgaacgtccgtgaacccattgcgagcaacatgatcgtctcaggctttttcgggagaggatgaaacatggtggcagctacaaagaaaaaaacttcgttagccagggcggtgttctcggggagccttgggaatatgctggaatggttcgactacgggttgtacgggtacttcgcagcgatcatttccgcagatttcttcgttgccgacgacccgatcgtcgggctcttgctcagcttcctggtcttcggaacgggctttctcgtacgccccatcggcggtattctgatcggcgcgtacgccgacaagcacggaagaatcaaggctttgacgttgacgatcctgtgcatgggcatctgcaccatgctcatgggatgcttgccaacgtattcccaggtgggacttttggcacccatcctgctgacggtgctgcgcctgctgcagggcctggcaacgggcggcgagttcggctcttcgctgacgttcatctcggagtacggaacgccgaacaacagggccttcctgtgcagctggcagccgttcagcgtcggttgcggcctgctcctggggtccaccgcggggctgctcgtcaccacgcttctgcctgaagcggcgctgtacgagtggggatggcgcgtgccgttcctctgcggaatcctgatcgccttctacggcgtgcacatgcgcaagaacgtccccgattcccctgagttcctgaaggcgaaggcggaagtgaaggaagaggaccatacgccggtcaaagacctgttcctgcgctacaagaagtccatcatcacggtgatcgggctgctcgtcggctccagcgcgacctactacatcctgatcacctatatgccgacgtacatctcgcagttcatggggacgtcgttctcgagcgcgttcgtcgtcaatacgtcggtcatcgcgatcaacttgctgctctgtcccatcgtgggcctgctcatcgacaaggtgggaaggcggaaatgcctgatcatcggctgtctcgggttccttatcctgtcttatccggtgttctacgtgctgatccagcagaccaacgctctcttgatgatcggcttgctgggagtgctgatcgtgttccagacgattctcgccgtcgccatcgtggtggtttcggccgaggtgttccccaccaagctccgcaacagcggcatcggcttctcctacaatatcgcggcggcggtcttcggcggcttggcgccccttgcggcaacggcgctcatcgcggccacgggcgatcgcctgtccatcacctacttgatgataggttccgtcctcataacgctcttgaccacgatcttccttttgaaggggtattacgtcaagggaaagaacgcgtcgagctagcaaagaagcacgggggaggcgatcccccgtgctccctcgcgcgaggatggcggatggggaagaagggggcatgggcagcgtagggagactcgctcgcactgcgagaagcgtgatcaccttttgcttgggcataagctatatggcgaacgtgctcctcggatcgccgctgatcgacgatctcaacctggttttgatggccgttgtgatcgtcctgagcttcgcggcatcaaccgggtcggcaaggacgatcggagctctgctgttctccttgagcatcgctttgctggtctactcgcaggcgccgctcgatatctggaagcaggcgttgcgggagaacgcgtacctcatcgtcatgttcatcatggtgccgctgctggggattcccgtgcaacatggaggatacagcgagtcgttgcgcgggatgttcgctcgttacgcgagcaccggcagccggtattatgcgctggtgagcatcatgtccgcgttcgtcggcgtgctgatcagcattgcggcagttccgctgacctacgagatgtcccgagcgagccgccacagcgacgacaaaaagcttctcagctcggcgctcagccgggggttcgtcacctgcatgatatgggcgccgacctcggcgaccatcgccctggtcgttcagctgacgggcatcgattgggtggacttctttccctgcgcccttgcgtgcgcgctcgtggcgggcaccgtcggcttcctgatgaccctcgcgagggaaaagacggccgatgccccttccggcagggtggaagagcccgtcggcgctttcgatgcgaggaaagtcgtcgagctgggcgcaggcgctttgctgctgatcgcttccattgcgacggtgtcccagctgggcgggctttcgatcatcatcgtcgtcgccatggcgtcgctggtttgccccgtcgtgtggatggcgatcgtcaagcgattgccgacgtacgtgaaggagttcaagggtgactatttcaacaacaagcttccgcaggtcaagaatcagatactgctgttcgccggagccgggttcctcgcgcagagcatcggctactctcacgtgggcgatgccatggccgaggttctcttgcagctcaccgggcaaaacgtgctgttgctcaccatagcgataatcgccgtcaccctggcgacctcggccgccggcatccaccccatcgcggtcgtcgccgtggtgggaggggcaatcagcgcttcggagtgcggcgttacgcccgtctacctggctctcgtcttgtcgatcagctgggccatgggaaacgcgctcagccccgcatcggcgaacgtcatagccgtttccgatatggtcgggcagtcgccaatcaaggttggcttgcggtggaacgggccttacgtgctggtgacgacgaccgtgctgatctgcgttctcacgctttcgagggcggtgggactgctgtaggcggaggcccaaacatcgccgcccaacaggggtttaccacttacttacaggtgcccttatgactttaaagtgcgttattgaggccgatttcgaatcatcatagtatgcgggtatgcagaggtcgcgagccgcccgagctctttggacgggccccggcgcggcagccgccgcgatgcggcgatgttcatgcaggcgaggcgctgggggcgccgaaattcgtagccgttcgcacgttcgattcagggaggatgatcgcatgatcagcagatgtggattgatgcagaaaaaagacggaatgggcatggaagagttcaaggactactggctgaacgttcacggccccatcgcgagcaccatggcgaacctgcgcaagtacgaccagcacgtcgtggtcgacagcgagcaccgtcacgccctcggtcggggctccgtggtgatcgacgggtattccgagctgcagttcgacagctacggggacatgctcgagggcgtggcgtcgctgcacggcgaaggcgtggacgacatcccgaagttcgccaatccccattgtcagatcctcgtgctggccaagcgcgaggtcattcggattcccgagtacctgcgcggcaagaagctcatccagcgcgtgtcgttcctcggccgcgccgaaggcgtgagctccgagcgtttcgtcaaggaatggtggaacgtccacgatcgcttggtgcagaccgtgcccggatgcgtggggtacagccagaacctcgtcatcgaccgcatcgacggcggcgtgtccgttccgtacgaggagctgcccgtcgagggcgtcgtggagatgtggttcgaaacgaaagaagcgttcgacgagtactacgcttcccccgaattcgcgcgcgcctctgcgcacagctcggagttcatcggggcgatcaacacctacctgaccgaaacctatccggttgccttgccgtctgcataggagcctgcgatcttccgtcaaaaaagctgcgtttcagtaaagaagaagcacgagaaaaaggatcaacgatatgaaagcttacgagaagttgctagagccgataaccatcggtacccaccagtggagaaatcgcatggtcaaagcgccgtcgtccgcgatgtcgtgggatccgggccagttctgcaacgagaggatcatcggcctgtacgatgcgatttccaagggcggcgcttcggcgatcatcttgggcggcatgatctgcgacgatcctgccaccttgatcgacgatgccgacggcggcgtgtacaccgtggaaacctacccgctgggcggtttgtacgatgacaagttcattcccggcctttctcaattggccgacgccgtgcacgggaacggatgcgagctcatcgcccagatattccagaacggtgccgccatcaagaccaagggcggagcctggtgctcttccacgttgaccgcagacgagctcccgagccccgaaccgtactgcaaccctacgcgcggcctttcgctcgaagagatcgaggcgttcaaagatcgctacttcgcagcggccgagcgcgccaagaaggccggtctcgacggcatcgaggtgcacgcggcgaacggctacttcctgctgagcttcgtgtcgcgcgtatggaaccatcgcgacgatcagtacggttgccagtccgtcgagaaccgcacgcgtttggtatgcgagatcatccgcggcgtgaaggagcggtgcggcgaggacttcatcgtgggcgttcgcacgaatggccaggaatacgggcatcccgatgccatcaccatcgaagagggcgtggagatcgcgaagttctacgatgctgccggagccgactacatcagcgtgacgggttacggctacggtccggttcccatgcagttcgctctggactactggatgtacccgtctcccgacgaggatatgaagcagttcctcgatcgtctggacggcgaaggcctctccattccccccgctgccgccatcaagcaggccgtgtcggctccggtgttcggcgtcggcttcgcaacgcctgaaaaggccgaggcggcgcttgagaagggcgagatcgacctggcgatgttcgcacgcgctctgtgggccgaccccgacatgcccaacaagatcgcggaaggggcacccgaggacattcgccgttgcaaccattgcgcaacgtgcgacgagctgcgcatgaacgagacgccgcaccgccgttgccgcgtgaacccggcgttcctgcgcgagcgggaaatggccgtcgtgcctgcggagactaagaagaaggtgctggtggtaggcgctggcgccgcgggtctcgaggctgcccgcgtcgccgccgagcgcggccatgaagtcacgctgtgcgagaaggaatccgtcctggccctcgagctcaacctggccaccatggtgaagggcacggtgtgcgagaacgtccctgcgctcatcgattggctgacgtctcaggccaagaagacgccggggcttaccatcaagaccaaaacgacggtgacgcccgatttcgtgcgcgccatgaagcccgatgcggtcatcgtcgcgacgggaggcgtgtacggcgcgcccgacgttccgggcatcgacttgggtatcgtctccacggttccccagctcacccgcttggccgaaaagccgctcaagctcttcggcgcaaacgccatcaacaagctctcccagatcgccctgccgggcatcggcaagaactgcgtcgtcctcggagctcagatcgaaggcgtgcaaggcgcgatcttcctgcgcaaacgcggaaaaaacgtcacggtgctcgaagatttggacacggtgggagaggggttgccgccgcggtacaagagcaggtcgcttaagtggctgcgggaaaacgacgtggagacgatcaccggcgtcgagtaccgctcgatcgacaagcgcggcatcacgtacgtcaaggacggcgaagagcgctatctcaaggctgacagcatcctggtgttcaagtctcccggttccggcctgagcttgtacgaccagctgaaagacctggcccccgaggtgtatcccatcggcgcatgccagggacccggatccacgctcatggtcgacgcggtgggccagggccgagccgtcgccctgaagctgtaatcgcgagacgaagggaggggagtttgcatgaaaggcttcgagaagcttttgtctccgattgagatagcgccgaatttcgtgttgaagaaccggatgatcaaggctcctcagtcgtcgtggcgctggaacgaggactgcaccgccgacggcagcgatgccatcgccatgtacgagaacatggcggaagggggagttgcggctatcgatgtcgcggccatactgtgggaacctgcgggaggcatctacctgggcgcttacgacgacaggttcattcccggcatgatcgagctcaacgaggccgttcacaagcacgggtgcctcaccatcggtcagttgcatcatatcggtccttcggccggcccgacccctgacgggcctcccccgatctcgtcctctacgttgtccgaggacgagatgccggttcccaagccgtggtgccaagcccctcgcggcctgacggtcgaggagatccacgagaagcagcgcttgcagatcgaggctgccgtgcggctgcagaagggcgggttcgatgccgtcgaggtgcacgtggctcacgggtactttctcgacagcttcgtcagcccgctttggaacaagcgcgatgacgaatacggttgccagaacgtcgagaaccgcacgcgcatcgtgcgcgagatcatcgaaggcatccgcgaggcgtgcggccccgacttcgtcatcggctgccgtctgaacgggcgcgaattccatcccacgaagcagggtatcacggccgagcaagctgccgagaacgcccgagcgttcgtggaggccggcgcccagtacatcagcatcgccggatacgggtacggtcccacgccgtttcgctactgccccgactacttcccgtacccggaacccgatccgttcatggagcccttcatggacgagtaccgcggggtgggtctgtggacggccgttgctcggcggatcaaggatgctgtggacgtgccggtcatcacggcgggccgcatggacgagaacttggcagagcgcgtgctcgaagccggcgatgccgacgtcatcgcgctcggccgcacgctgtgggccgatccgtggttcgcgcgcaaggtggacgaggggcgtatcgacgagatcatgcgttgcacgcgttgcgcgagctgcgaagatccggtcacgcaaccgcgcatctgtcgcgtgaatcccaccttgggtcaagagcgccaactagccgccaagccggtggcgaagaagaagcgcgtgatggtggtaggcggcggtccggcgggcatggaatgcgcgtgcacgctctccgaacgagggcacgaggtgaccttgtacgagaaggcgggcgctttgggcggacgcatcaagctggcggccatgatcaagagcggcggatgcgaagaggtcatgcatatcttcaaccacttgaccgccatgatcgagaagtctgacgtcgaggtgaggctgaaaaccgaagttgacgagcagctcatccgccaagaagctcctgatgcggtggtcgtggccacttcgtcgccgtatcgcatccccgatattccgggcatacatcgcaagaacgtgttcaccatcccgatgatgtcgaagcttgcgcaggtaccgctcaagatgttcggtccggacaagcttgcttcgatgagcgagaagttcttccccgtaggcaagaggatcgtgatttggggtgcaggcgccgagggcgctcaatgcgccgagttcatgcgcaagcgcggcaaggacatcgtgctggtcgccgaagatggggatgtgggcggtttgattccgctcaagtacaaagaacgtatcgagccgtggttcaatcgcgcaggggttcgtgttgtacgcgatgccacggtggctgaattcggcaagcaaggggcgctgctgaggttctcgcaggggggagaagagctggtgccgtgcgattccatgatggtcatgctgcctgagcagcgcgacccggcgtttttcgacatggccgcgtcgctcgtcgacgaggtgtacgagataggctcgacgctcggcggcgagaacgcgttcctcaagcatgcgttcgccgacggacgccgcgtgggctgtcttctgtaaggcatcatcccgtgtcccgtcgtgtcaatgcgcgcgactcggcgggacacggagtgcatgaagggaaaccggaagcgacgcgaaccgagggaggtgactgccgggcgaagccagggtttcgcacgagacggaccgctgttcgtttcggaatgcaatttcgaaggtaaacaaggaggaaagaacaatgtcggttaaaacttatcgtcgcggggtcatcctgatctgcgcggccttgtgcggtgcgctgacggcgtcgttgaatatttggagcatcttccagaagcccctgatggaagcttatggcttctcgcctcagtcggtgtcgttcgcctacaccatcgttatcgctatgatcggtttgagcggtcccatcggcggatggctgcagcgcaaggcgcctgcgcatatcatcatgaccgttgccggcatcggcttcggcctgggctggttcctgacgggctttgccagcaccatcccggtgctatacatatcgttcggcctgctggtaggcgtgtgcgacggtatttgctacaaccttgccctcgctatcgctacgcggtggtaccctgacaagcgcggtttcgccaacggcgtggctctggccatcatggccatctacccgttgttcacggctcctatgggcaacatgatcatcgagaacttcaacgtgagcatcgcgttcaacatcgtgggcgtgttctgcatcgtcggcttcatcgtgttgtcccgcttcctcaagatgcctgctgctgatttcaagcccgagggttggaatccgccggccgagagcgatacgaagcgcgtgaagaactacacgtccggtcagatgctgaagaccccgttcttctggacgctgctgctgttcttcggcaccgttgcctgcaccggttgcgtgatgctgtccacggtttcgctggtggggcaggtccaagccggcatggatgctgcgacgggcgcgctcatggtgggcatcttcgccatcgccaacggcacgggccgtttgggtctcggcgccatttccgataagttggggcgtttccaaaccatgttcgtcgccgttgcggtgacggcggtcatccacctgttcctgttcgctaatgcaacgagcaccgcgatcttcatcgtggaggcatgcattctgggtatctgcttcggcggcatcatggccatcatgccgtcggtatgcgccgatgcctacggtcccggcaatgcgggccagaactacggcttcatgttcatcggctacacgctggcctcgttcatcggcccggtggtttccgccaacgcgcttgccaccacgggcagctacagttctgcattcccgttcctcggtgccctctgcatcgtcggtctcgtgctgctgtcgctggcgtggatgttcttcaagaagatgaaggctaaggacgccgctgaagcgtaaaacgcgtatgtgctggtcggatgcatcttaccaataagtgagttgcgcactttcaagtgcgttgttgaagacgcccaacagctgccggatactaaaattcccgaacgatctgaggaaggggtaggacatgatttccaggattagcttgctgaagtgcaaagaaggggtttccgaagaggcgtttcgcgagggcatgatgggggatgtgcgcgacgtgatcgcccgcatgccccagctgcggaagtgcgagatcgatttcgtgaccgatcgccagcagcgctctcatctgggtcgcggcgccatcgacatcgacggcttcatcgagatgttcttcgacagctacggcgacatgcagcaggcgatggacgaagcgggggatgctctgctggctgctctggagccgctcgtggaagagcccgtttccacgctggttgcggtgaagaaggtggacacgcccgttcccgcctacctcgacggcaaggctatcaagcgcgtgtctttctgcgatcgcgcggagggcgtcgatgccgcgacgttccatgacgagtggtggtacacccattccctgctggtgaagctgatgagcgggtactgcggctacaaccagaacctggtcatcgaccgcatggtccaaggcgcgtccgtccattacgccgacctgccggtcgaaggcatggtggagttctggttcgaggacatggacgcgttcgacgagtgctacagcacggtcggtttcaagctgcgcgcgagcgtgcacgcagcggagttcatcggcaccgtcacgacgtatttcgtcgaagccgtgcctgtggagctgcagaactagacgaagttcggactgcatcgcgaactcggcgtgatgcagtcctttttggaaggggagcgttgctatgaagtcaaagcgagcagagtttttcgatgatgccgttgtctcgggtcctgatcaaaaggctttcgaggagaagatctacgccgaagcgcaggccaaacgttggccgcgcgtagcggaaggcacgggtaaattcgaaggtcaggtggtcatcgtgaccggcgccgcgggcggccagggcgagatggaagccaagatgatcgcccagcaaggtgccaaggtgtacatggccgacatcgaagaagagggattgaagcgggtcgaggctgccatcattgccgacggcggagaagccgtggcgtttccgatggacgttgccgacgaaggctcctggcaggagctggtgaagaaggtcgtggacgagagcggtcgactggacgtgctcgtcaacaatgccgggatgtgccagaacggcaccgtcctcaccgagacccgcgagtccctgaaccgcatcatggacgtggattgctggggcgtgtacaacggcatgcactattgcgcacccgccatcatcgaagcgggcggcggcaccatcgtcaacacgtgctcctaccaaggcacgcatttcggacccgggagcttcatcggctatgccatggccaaggccgcagtcatgggcatgacgcgcgccgccgccaccgacctcgggacctacggcatacgcgtgaacgccgtgaaccccggccttgtgctttcggggatgaccttgccgcgcggccagaaccgcaagggtctggtggacgcctcgtcgatgaagcgttacgcgctgcccgaggagattgcctcagtggtcatgttccttgcttcggacgattccagctttatcaacggcgagttcattgccgccgatggcggtgccacgacgtatcttcatctggcgacggccgacgcaaagtaacggcgcgttctgcgtcgatgaaggcgtgcgccaaagggggagggttggcgcacgccgatcggcgcgctcgcggtaactcattaaggagaaggggtgtgtcatggctcggttcgataacaagatcgtgctggtcacgggtgcggcgaacggtatcgggcgttgcatggtcaagtgtttccttgcggaaggcgccgagaagctggttgccgtcgacatcgagcacgatacgttagaggatgcgttcggcgacgaggatcgcgttcataccataccgtgcgatatcaccgattacgatgccgtgcaccgcatggtcgacgaggccgtcgaacgcttcggccgcatcgacatcctcatgaacaacgcgggcatcagcatcaaggacgggcagaagtacggtatgctcacctgtcctaaagatgcttgggatcgtgtgatcgccaccaacgtgaacgggtcgttctacgtggcgcaggccgttgcccaggccatggtggcgaagaagacgaagggcgttatcgtgaacacgtcttcgaacaccttccgtttcataccgaagtaccttggcgcgtatcccgcatccaaggcggccatcgccgtgttcaccaagcagttcgcaaaagagcttgccgaatacgatatacgcgtcaacgcgtttggacccggtacgacgaaaacccgcatgagcgagccgacgcgtttgaacccgcacatgaacgagcagttcttgaacgatattcccatgcaccgctacggcgaagtgaaggaggccgtggatgcggcgctgttcctcgcttcggaagagtcttccttcatgttgggggagatcatcttcgaggatggtgggcagagcctctagctgtgcgttagattaggaggacgacaatggaaagagggcggtttgttgacaagatagccctggtaaccggcggtgccaacggtcttgggcgcggcatggtcgagcaact

SEQ ID NO: 8651 - DNA, 388 bp, Unknown
  gut microbiota DNA sequence
agcggtttgttgacaagatagccctggtaaccggcggtgccaacggtcttgggcgcggcatggtcgagcaactcgtgaaggagggtgcccaggttgccatcttcgacatcgaggacgatacgatggaagaggtgttcgggggcaacgatcacgttttctgcgtgcactgcgatgtgcgcgactacgatcaggtgcaggaaagcgtgcagaaggtcatcgatcgatacgggcgtatcgacgttttgatgaacaatgccggcatctgccatcgggagccgtttctggagtgcagcaaggagggatggctcgatgtgatggccacgaatctgaacggcgaattctacgtcggccaggctgttgcgcgcacgatggtcgagcttggcgtgaa

SEQ ID NO: 8652 - DNA, 627 bp, Unknown
  gut microbiota DNA sequence
gccggccaccagccccgtcgccgcgcccacgagcgtgggcttgcccgcgcgcgcacgctcgatgagcatccacgacacgagccctgcgcccgacgccaccacggtgttcacgagcgcaagcgccgccacgccgtcgggggcgaactcggagcccgcattgaagccgaaccagccgaaccacaaaagcgtggcgcccaacgcgacgaacggcacgttgtgtggacggtagctcaccaggccgaacccgcgccgcttgcctgcaatcaggcaaaggatgaggcccgtgaggccggacgagatgtgcaccacgtcgccgcccgcgaaatcgagggccccgatggtgtcgcccacgaggctgccctcgccgccccataccatgtgcgcgagcggcgggtacaccaccacggtccacacggccacgaacgcgcacaccgcgccgaacttcacgcgaccggccaccgcacccgtgatgatggccgtggtgatcatgcagaacgccagttggaacaccacgtcggccatcgcgggatacgcgtcgtgactcagcgcttcggacgcctcgctcacgatgccggccacaagtccttgcaggccgatctgatcgaagcccccgaagaacggaatcga

SEQ ID NO: 8653 - DNA, 6154 bp, Unknown
  gut microbiota DNA sequence
agggcgcaatggcggcccggctcgccattgcgccctggcgctttccgtatcgccccgcctttccccacgaagctgttggcagagattgcgcgctatgaacgatttgccgagcatacagaaaaaggcgagctgggagtttctcgaaccattcccgaaaagatgtcccgaaatcgtgcataccatgcgatccgtgccagagcgctttccggaatgcgcctgcttcatgcggaaccggtgcgagcgcggcgccccgcaacggcccgcgctcagcgagccaacagcgcgcggaggctcgcaacttgaacgggcgtcaggcgcagcgcgtcacgcacgtatgccggaaacccgccgacgcacccctcgacttcgtcgaagaacgcacgcaagtacgtcggccgcgcctctaaaaacgacgccagcaccgcgcgctcgtcatccgacatcccctgcgacaactgagccgtctcgtgagccgtcgtctcggcgttcgcctcgttggtggccaggtacgcagccattatgtcgtcttcggggcatccggctatgcgttgcagcacggcgcacagcacgcccgtgcgatctttgccgtgctcgcagtgcacgagggcaggcaggcgttccgcggccatcgtgcgcagaacggttcccataaggggaaactcgcgcgcataacgccggtaattgcagatcatgcgctcttccggacggccgtactcgccgatgacgccggccaccagacggcgagacgcgtccgaacgttcacgatcggtggaaggttcgaatgcgagcgttttagcgccgacgatacgcggttcgggactggacgccacctcccaacggttacgcaggtcgtagatagagcgaacgcccaaaccgcccacgacgaacgccgcctcgtgctcggtgatgcgcgaaagcgaagccgaccggaacaggcgcgcgccctcaagcggccccccgtcgatggcgcgcaagcggatgccgccgaacgacgcgacgcccggcgcgcccgcgcccgcaggcgcgcccgccctcgcgtccgtcacgactctacctcgaaagcgtattccgcgacgatatccgataccgtgccgtcgccgtcgaccgcgcgcaccttcagcagatagcggccgggccgttccggacgatacacgaaatgccagttcacgcctttgtcgatgaccgcgcctgccgtctgataggtcgtccaggttgcaccgccatccaacgagaactgcatcgcggacacattgcgctcgaaatcgtccacgtacccgtcgaactcgagaggctcccccacccgatgcgccaccgccatcccctttcaccggcaaactccacctcgtccgcgcgaacgatgcgcgcccgtccaccctaccacaagcaaacaccccgcgcaaaaccaaacaggccgcccccttgcagcagcgggcgacctcgaaaacacgggccggcagccaagggctgccggcccgcttgcgaaagacggcgagggagggccgtctttcgcatctatccgatcaggctcatcaccgtttcggcaaccaggtcggcatgcatgccggcagcgaggatcaggaagcggagcgcacacccgcctatcagagcgcccacggcgcccgccgccatcagcgcgccgccatgctgcttcataccgggcttcttcttgccgcgcttgtgtagcacaagccctgacacggccatggccaacggtatcgccaacccgcacgctgccaccagagcccaaaagcaggctgcgagatcgcccgtcagcagcagcgccgcagaagccgcagccgtcgcgcccaccgccgtctggacgtcgcctcccagcatgaccgcaaagaacgccgccaacaccgctatctcgaccagcacaagcaccacgacgatccgctccatgagcacgcgcgccttgggagcaagggcatccttcttcgacagcgcgagcgccaccagctccaccaacgccacgcccgtatcgaaggccgacaccgtgaacagcgccggcagcaacggagtgctccacagaggaacgctgccggccgccataagcagcatgcccgtgtacaccgccacgaacgcgcccagcacgatgccgatcaccgcgagcacccgccgcagcgcgacgccccgcttctcgaaccacttccacttcttcgccagccacacgcccaccgggcgcgtcgccaacaacgccgacaccgcgaacaccgccatcgccgcgaacgcgccccaggcgccgtaggtcatccacgaggtgaagtggccgaaactctgccacatcatcaggcctcgcagcggcgtgacgagctcggaaagcagcaacagcagacccaccgcaaggctggctagcgcagcccacatcgacacgcacacgatcaggcgatgacgcgtccggtcgatcaggaacagcaccgccgccatcacgaacgcgccggcgcccatgccgcccaagaacaggtacagggcgggttgccaactccatatcgtttgcagctccatactacttctccgttcccagcaccaggcaagagggaccgttcgcttgcgcgacgggaaccgcggaatggttcgtaagctccatcagctcatccaaaggcccgaattgcaaggcgccgaatttgcacacgcgcacgcaataaggatcctcccctattgcaacccccgacccttggcagcaatcgcatttgtccatggaaacggagttgtacttcggcacttcgtacgggcacgcctggaaacagtacttgcatcctatgcacacgtccggattcaccttcacgatcccatgggcgtccttcgagatggcgccggccgggcataccttcatgcagctcggatcctcgcaatgcatgcacgaagtcgagatgaagaagctcctccctcttcggcgcttgaacgaagataccgttctcctgtcaggggtatcgtcggatagattgttttccttcctgcacgcctcgacgcatcgtccgcatccggaacaccgcgcaagggcgacgaggaagccgtacgccgcgccgtcgccgtcttgccgttggtcggcctcgcgggcatgcgcctcgccgccggaagcggcaacgccgccgaggacgagcgcgcaggttcccgcagccgatgcctgcaacagcgtgcggcgcgtcacgctcacatgttctcccatttcaaacactcgctttcaagatcgaagtgacgacgagcctacgcttcaacgtcgaacaccacgctggaggcgaggggagagaccgtgccgtcctccgtgaccgcgcggacgtcgagcttgaaggtgcccgccgtctcggccacgtagtcgaagtgccagtacacccagtcctcggcgttcgaggaggaagcgtcgaacgaagtccacgtctcccctccgtccatcgagaactcaacggaggcaaccttgacgccgcaatcgtcggcgtagccctcgaaggagaccatgtcgcccaccttgaagccgccgtcgaccgtgctgaggatgttcactttggcgcggtactcgtcgtccgggccctgcacctcgggcacctcgtcggaaacggatagctcgatgtcggtgaccgcgcgggtgaagtacttggccacggtgtcgggcatccacacctgcaggcgctcgccctcggacagcttctgctcgtcgatctggtacaccagcagcgcttccttctccagcacgtacgacaggggcatgggcaggccgtagccgtccttgtccttgaacgtgatggtgttcacctcgggggcgatgtcggtcatggacagcatgtcggacaccttgacgcccttgacgctggccatggcgagggcggggctcatgccgcacgtgcagcgcatcttctggatcttggagtccatgcgctcgatctcgtcgagacccaccgtgtacaccttctcgacgttgccgccgatgttgaggtaatagctttcatgggtgaccgcatcgaaggcgtagcccggctttgcgcacagggccgtggtcgccgtgccgaacaggttgaacacctcgtcggccggagtaaccacgtcctggcagaaggtgaagtcgcccgagacgttcgcaaccttgtcgtagtccaccgcgttgcgctgcatcgtctcgacgggaagcaggctgctttgggccatcgccatgtcgagccctcccagagcgcccgcgcctcccagcagaagggtcgcgcccaccacggtacaacccagcatctttgccccagtagcgtatctcattctatccctccacattgctcttggcggtcaccatcaccttttgaatgttggttcccacgaggccggtatcggtggtgccccgcaccatcagcacgtagctgccgtcgctttcaggagtccacgtgtagtgccagtacacccacttgctaggatcggtctggcccaggtcgtacggcgtccaggtcttgccgttgtccatggagaactccagcttgaccaccgcctcgtcgtaggcgtccgcatatccctcgaaggtgaagggcttgccggtctcgatgatcatgccctcggggaccttgagcaccgtcgcattcggcttgttgatgtaggggccctcgccgtacgaattgaaaccgttcatcatccagtcttcccacggcttttcctcgtcggtcagcttgtagcccacgcactgcttgacgtacgactgggcgtcgcacttctcgacccagttgatgcaggggctgccctggctgggatcgagcggcttgccgccgatctcgtaaacgaggtacacgtcttcgaacgaagcctcggggacgccgcggttgctgtgcgtctgggcgccgttggtgcggaactcctgacgatcgaacagcacgccggtgatgtccttgctcgcgccgcccgccttctcgataagccaggtcagcgggatgcccgtgatctcaacgttcgagatgccgccgccaccgggcatgttgtcgacgcagtggatcttcgaaagcttcgtcacggtgaccccggccgcctcggcttcggagatcaggtcggccagcttcgccgtgaacggcttgttcaccaggccgtccatggtgatctcgaaattgtcgacgaagtccttcggaagctccgtatccagcacgttcttgcccatgatgtggatcaggctgtcgtagcgggaatggatccagtcgtaggtgaacatgtcctcgggggccacgacggtgtcctgatcgaacacgaactcgccctggacgtcgggaaccttgacgatgccgtcaagatggtcgtacttgaccacgtcccaaagctcggcgccctgctcgttctccgtcatgttgtggcagctgatgcatttgccgccacgctcctcgaagttctcgccgttgcgttcgccgtagtggacgccgtgcatgacggtgcccatctcgtagccgtcgtctgcgctatggcagagcatgcactggtcgaccgtgatcttgctgccgagagcgtcgttccagacggtcggatggctgtactccatgttggccagggcgtcgccgagatcttcatggcaagccccgcaaccgcggttgtcggcatcaagatagtagttgttgtacgacgtgccgccttcgtacggacggttccagtggtagcactggtactcggtcggcgtgcgctgaaccttcgtgccgtcttccaaggtgcggatttcgggagcgtactccttgttcagctcgtcctgacgctcgttcaccccgtcaagatacgcttcggcctcctcgatgctgttctgatattgaacctcggtcgaagagctctccccttccgcggctccttgctgcgcgcaaccggcggcgaacagcgatcccgccatcagcatcgcggtcgccaccatcagcttctttctcattccccttcctttctttcgctcgtttcgtgcggatcaacgcggaaatccccgcgcgccgctttcaccgtaaaggcttgctcgccttctgccttcaaaacggtaatgaacggaatatcgccccctcccttgacaggaacgctgcacgatacgaccctcccccgtcgcccgtatcgtatcataaatcatacaaatttgtgatacttgtcttacatgtttatgattctttttcgagtatagatacccggcaccgttgccgggcacagatggaaccgtggtcaaccggcatgcgtcgagctc

SEQ ID NO: 8654 - DNA, 4080 bp, Unknown
  gut microbiota DNA sequence
agaattccgcgattcccgtgccgggccgatgccgattcccgcggcaaccgccctccccgcgcaaggcgggcgagcgcagcgcccggcgtcgcggcgctacttcccctccagctgcgggatgggcgtgtcgtcgacctcgtcgaggttgccgtcgtacacgtagtggcgcgtctcgcgcgcgatcatgccgctcagcagcagcacgacgatgatgttggggatggccatgagcgcgttgccgatgtccgagatcgtccacacgatgtcgcccacgccgatggcgccgagaaaggccacggccacgtagatcacctggtacggacggatggcgtaacgcccgaacaggtacgtgatgcaacggttgccgtagtacgaccagccgaggatagtggtgtagctgaacgccaccatgcccagcacgaggatgggcgtgccgatgtaggggatcttcgcgaacgcctcgctggccagcatcgcgccggagtagacggtgggattcgccatgatggacgacgcgatgtcggggttcgccagcatcgtggacacgagcacgatgcccgtgagcgcacagatgaccacggtggaccagaacgtgccggtcatcgccacgagcgcctgctgcgccgggttgcgcgtggaggccgccgaggccacgatgggggccgaccccaggcccgactcgttcgagaacaaaccgcgcgcgcagccgaactgcagcgccatcatgatgcccgagcccaccgcaccgccgaacgcggccttcgaggtgaacgcgcattccaggatgagccccagcgcgtcgccgatgagcgcccagttgaacgcgaggatgacgaggcagccgcccgcgtaggcgacggccatgatgggaacgaggcgctcgcacaccttcgagatggactgcacgccgccgaagatgaccacggacaccagcaccacgatgatcacgccgacgacccacgcggggacgtccacgttcgaggtgatgatgccggacatggccgacgcctgcacggccgagccggtgccgatggccgcgatggcggcgaacgcggcgaacgccacggcaccgagcttcgcccaccagggagtgtgcccgccggggctcgggtcgcgcttgccctcggcgttgcgcctgaacgcgcgctcccagatgtacatggcgccgccgagcatggcgccgttgtggtcgcgcacgcggtacttcacggccgcgtacacctcggcgtacttcgtggcgatgccgaacacgccggtgatccacatccagaacaccgcgcccggtccgcccgcgaggatggccgtggccacgcccacgatggagccggtgccgatggtggcggccagcgccgtggccagcgcgccgaagtggctgatgtcgcccttgccctcggggtcgctcgacagcgacagcttgatggcctgcggcagcttgcgctggatgaaccccgtcttgaaggtgaagaacagatgagaccccagcagaagcgcgatcatcgcggggccccatacgaatgcgtcgatggtgttgagtagttcgaacataattccgctattctaccccggagttcgcccgatcaggaaaaacaacgcctgccgtccacaaacggttacccgctcgcgcgcaacgacgcttttgacggctcgcttcagcgatggtagatgaggtggcagacgtcgtcgccgcgggcgatggtcttggggaggtcgagctcgcagccgtaggcctcgccgatgccgcggtcgccgcacatggcccagtcgcaaaggttggaaatctcctcgtcggtgcagccctgcttctgccacgcctttacgagcggacagtagtggaactccaactcgaagcggtcgtcctgcacgtctttgacatccatctcgaacaccatctgcgccggcttgccgaacaggcctttcttgaggcttttcagactgttcgtgccgccgcctttcgccaccagctcggcgccctggaacagcccgcagcgtttcaccgccgccggagcgaacgcggccgggtcggcgcccgccttcgccgcctcgtcggtgagcaggtacagccacagcgctcgatgctccaacagctcgcgaatggctttgatgagcggattcttgatgcgcggctcgttgaccactttgcttgccatgacgtctcccctttccggcgcttccctcttcgtcgcaacgattatacggcatgcgaggagttcgcacgaggcgcgcgggcgcgaagctccgcctcggcactttcggccgcccaacccacaaaacctgcgcattgtccccctgctttgcgctgcacggttgccatacggcaacaaggcggctacaatgcagcgcatggattctgtttcagggcgaggtgcgattcctcactggcggtaatccggccgtcggcgaaacgccgagcgagccgggagtccgcgaccctgcaagcgcccccgatagggatcgcgtttgcaggctgattccggttggatcccggaaccaacggtatagtccggatggaagaggcagagatccgcgtcgcccgcgcctcgcgcgcatcggcgcggaccccaagaagcctgtatggaaggaattcatacgggctcgttttctctttaggccggaaaacctgacccgaacgtcatggcctgcaaagagaaaggggttgccatgaccggcaacgcaccgggcacgaacgcccaggacacgtacgaattcaccaacaccaacaagtgggacacccgccagctcgtcaccatggcgctcatgtgcgcgatcggcgtgctgctgtcgttcgtggaattcccgctgctaccaggcgtcacatggctcaaatacgacgcctcggccatgcccgccatggtgtgcggcttcgccttcgggccggccgccggcctcgcggtgggctacgtgggcgccatcatccacggcatcctcatggcggatttctcgggcgccatcatgaacatcctcgtggtcaccggcttcatcctgcccgccgcgctggtgtaccgccgctcgcgcacgttcaaaagcggcgtcatcggcctcgtgctgagcgccgtcgccgccaccgtcatggccatcctgggcaacctcgtgatcacgccgatgtggctgggcgtgccgctggacgcggtggtggccatgatcctgcccatcctcaccccgttcaacctcgcgaaggcgggcatcaacgcggtgctcacgctcatcgtgtacaagagcatctccaatctgatcacgcccaagaagaagcaggtgaagggacgctagccgcatgatcgagttcaagggaacaggcttcacgtacgacggcgagcgcttcgtgctggacggcgtggacgcacgcatcgagcggggcgagttcgtgtgcgtcctgggcggcaacggatcgggcaagtcgacgctggccaagcacgtcaacgcgctgctcgtgccggacgagggcagcgtcaccgtgctcgaccgcgacacgcgcgacgagcgctccacctacttcatccgcagcaacgccggcatggtgttccagaaccccgacgaccagctggtggcaagcctcatcgaaaacgacgtggccttcggccccgagaacctgggcgtgcccaccgaccagctgcgccagcgcgtggccgacgcgctggccgacgtggggctgcagggcttcgacaagcgcgagaccgcggcgctgtcgggcgggcagaagcaacgcgtggccatcgccggcgtgctggccatggagcccgccatcctcatcctggacgaggccacggccatgctggacccgcgcgggcgcaagggtctcatgcgcgtgtgccgcgagctgcatgaccgcggcatgaccgtggtcatgatcacgcacttcatggaggaggccgcgcaggccgaccgcgtcatcgtgctggaagacggccacgtagcctgcgacggcgcgcctcaggacgtgctcgtacaggccgagctgctggaacggctgaacctcgacctgccgttagccgccgagctgtcgctggagctgcagcggcgcggcgtgcccgtgggcatgcacatcgagacgaccacgttgaaggaggagctgtgccgattgctttc

SEQ ID NO: 8655 - DNA, 3839 bp, Unknown
  gut microbiota DNA sequence
cgcaggtcaaaccgcatgatcaatacgccgtaatcaaactaacggcgaaatgtttcaagaagttttcgaacccgaagggcagtttacagcgcctcctcggcaagctcgccctcctcctgcatgccgagcgcacgttgttcggccaccacagctgccagcagatcctgctgagagtgaatgcccatcttgcggtagatgttgcgcacatgcgttttcaccgtctccttcgacagcgtaagctcgtcgcaaatggccgcacggctggatccgcgcgcaaggagcgcgaacacctcctgctcgcgcgcggtcagatcgttgcgatggcacaccagctcgcatccgcgctcgaagctatcaggaagctcctccatgtcgccgggacgcaccatgccccagccggtttgcaggttcttgcggtcgcacatcaccagcgagcttgccagcagcacgaacaccatcaccgtagccagatcgctcgccgtctcgaccgacagcggaagcacccagagcgtcgcgctcgctactagggcgccggcgatctggcccaacagcaaaaagcacgtcgtaatggcaaacacccagttggcgggcagtccgcgcttgctgatgagcagcgcgcacagcgcccacatcatgatatcaacgaagcggtaccccatcgcttgcacgaacaatcccggcagcgcatcgggccccgccaaggccaggaacaagaagcccagcgacatgatgagaaatcccacctggtagatcagctggttgaagtccatgcggaagaacagcgcacacgtaaacagcacgagggcagacaccgcgaagctggctgccgacagggcgaccaccggctcgtcgtgtccgcccatgagcagcactgcctgcacgatgccgaacgacagtccttggacgaacgccgtggccagaaacttgcgcggcacatgaagaggagcgtccaaaccgtgcgctagcagatcgggtgtcaccggagcgtcgcgcatgagcaacgccatgcttgcggcggggatgacgagcgccgctgcccacaccgccgcctcaggcaacaacgtgatgcacacggtaagaagggcagccaccacggttcccaccacgccgtgcagaatggtggtgcgcggtcccagatcgcccaagatgcgaccccattccacatgaaggcacgccgtgcccgcgcccatgagaagaccgcccaggcacaccgccgcgacgttcaccagctccacggtcaaaggcgagaaggaaaggatgccgcacgtagtcacgccgatcgacatggaggccggcacggcaatgcggtaccatcgcccttgcggcacaatcctcctcgccttcagcagcacgcccaacaccaaaaacgtacaggcgtacgccgacagcggcacgacccatccaggcagcggaaagtcgagcgccgcgagaaacggcgggttgaaaaacgtggtttggaacacaagccacacccatgtccagaacaggccgaagcccatcgacagccgcggatgcgcgcgcatctcgcggcgaaacgagcgcagcatgccatgacgctcttgccaccccgttaaagcgcagcgcgatgcggcctccccgccgcggccatcctgtacattcggcacggtcaacatcgcccctccccgagctgcttgattccgtggttgcatggtagcacagagcaagcatgcgtcagtgtctcgcctctaccccttccgggggtagattcggtttccggcgatttaccacgcaagggggatggcgggacgcgttggaatttcagtatggtctacgccaagagctcggtcgcttccatcttgagcgaccgacgaccatcagggagagagggagttccattatgtcgaagaatgaacgcgccgcacgcacttcaacaggggtttctcgtcgccagttcctcattggagcaggacttgcaagccttggcgccgcaggagccggcctcgccggctgcgcccccagcacgcaagccgccgacgaaacagctaccgcaagcggcgcaatcgactccgcgagcctcgccggcaaccccttgggagccaacgcggccgtcgaatggtcgttcatgacgccgccggccgacatccccgccgaccagatcacgggaaccgaggacgtggacgtgctcgtagtgggctgcggattcgccggcgccatcgcctcggtcgccgcagcgcaggagggcgcgaaaacgctgtgcatcgacaagtgcaacacgtactccggacgcggcggacacatcacggcctacggatcgaagctcgtgaagcaatacgtgaatgagggttggttcaaagaggccgactacgcgcacatcgtgcggcgcctgatcgagtgggctaccggccgcgtgaaagaaccgctgctgtggcaattcgccaagaaatcgggcgcgtgcatggactggctggtcgacctcgtggccgaatcgggcttgaagcccacactgtgggccggctactacaagggccccgactacaccgaggagcccatcacgcacttcttctacgacgacaccaccgacttcgtgtacctcgacggcgtgtcgaagggcctgggcatggccgtgctcatccccgccgtcatcgagcagggcgagaagctgggcgtcgagtaccgttacgaaacgccatgcgctcgcctgctgcgcgaaggcaacgggcccgtgacgggcgccatcgtgggcgaggaagggtcgtacaagcagataaacgcgaagtccgtgatcatcgccaccggcgactacctggacgacgacgagatgcgcacgcgctaccagcccttcacttggcatgccgacagccgcctgtacatccccttcggcatttccacgggcgatctgcacaagcaggccatgtggattggcggggccatgcaggagtccgagccgcactgcgccaccatccatctggagtccggtgcgcaaagctacaacttcctgcacgtcaacaagaacggccagcgtttcatgaacgaggacgtgaacacgcagtcgaagtcgtgcgtgaagtcgtaccaacccgagggcaaggcgttcaccatctacgatgcgaactcgctggaatcgttcgcccagtcgtgcaacgacggcatctcgggcggcatctcgtccgatcagcagtaccgccgcttcggtgtgccgttcgacatggacgtagagctgaagctgcgccaggcgaagatcgaccagggtctgctgttccaagccgacacgctggacgagctggctgaaaaagcggggatcgacgccgaggggctcaaggccaccgtcgcacgctacaacgagctggccgcgaagggcaacgacgacgacttcggcaagcgcccggaaatcctgtggcccatcgatacgccgccctacttcgcaggccaactggtgtccacgctgctggcagcgtcgggtgggctgcgccaggatacggaatgccacgtcctcgacgaggagaacaaccccatcgaaggcctgtacgtgtgcggtgccgcaggcggcgaatacttctcgaacgactaccccaccatctgccccggcacgaaccatggtcgctgcctgacgttcggtcgcatcgccggcatcaacgccgccggaggagatgccgacaaggagatagccgatctcgagatcgtcagcggcatgatgcccgaggaagaccgcgtcaacaccgtgacggcctcggcgaagtagccctccctttcgatgctcgggacgccctgcgcatcccgagcatcgaatcccaagccccgccggttccctcccaccgcgcggggcttcttttcgaacgcgctaccactccacttcttcgtagtccaagccctgctcgcgc

SEQ ID NO: 8656 - DNA, 1888 bp, Unknown
  gut microbiota DNA sequence
cttatagaggaacccggcgtggagcataccggtgttgcgcccgctggtctgggtgcagacgtcgctctccttctccagcacggcgatgcgcagcttgtaccgggagagctcccgggcgatggcgctgcccaccaccccgccgccgatgatgacgacatcataggactgctgcatagggatggctcctttctccatcaaaggaacagggtcaaaatggggacggtgaccaggctggtcagcgtcgagataaacacacacttggaggcgaactgggcgtccgccccgtatttctgggccaggatggcggtggtggagccgatgggcatgccggtgatgaccacactcacgccgatggtgaggggatccatccccagcaggcgcagagctgccagacagatgccaggcagcaggaactgccgcaccgccaccaggtagaagcacctggggtcgaatacggtcttgaggggcacgtcggccaggatggcccccaccagggccatggccatgggggaggtacaggcccccaggttatccaccgcggtatccacaaagtggggcagggggagctggaagagcatccataccagccccacctccacggcgatgatgccggggttgagcagcacctttcggacggcctgcttggcgtcggccttggtaaacagggagatgccggcgctccacatgaggatgcgggtggggatgatgaacagggagcccagaaagaggccctcgtcgccgtaggcgccgctgaccacgggcagtccggcaaagccggagttggtgaccagggtgccgtactggaggatgctcttctccccatagggaaagcggttgtagagcaccttgcccagcagcagggccgccgcggccatgacggtggcgatgaggacggccacgcccccctgcttgagggactccaggctgaactccatgtggaaggactcaaagatcatgcagggcagggtgatgagcaccacaaagtcggtcagcttatcccgggccgcgtcattgaatatgcccttcttgcggcagaagaagcccaccgccatgtagatgaagaggacggtctgcacgtccaccatcttgaaaaagctgtccatactacccctcgatgggggtgagaagggccccgtccccgtcaaattccagcggctcgggctcagagcaggccgccacgccgggccatttacccgccttcacgtccctgtaataggcctcgctgagcatgatgcggccgatgtggaggctgtttgggatgcggatgatccgggcgcggctgcggtcgatgccggtgcaggtgcggatacacatctgaatagcctccctgtcgttggccaccacgcaggggatgcgggcggaggtgaggacggtagaggtgagacagttggggtacatcttttccgtgtcgattttgtcaaagaaccgctttgtgatcacgttggccaggcccacgcccagggcgttgccgtggctggccgcgctcagatcgagaaagcaggtgcgctgcacctccaccccgccgtgggcgtactcggtggaaaaggtgccggtgatgttggggtccacgccggtgcccgagtagttcttgcccgtctcgtccaccaccagcacgtcgcaggcgcccaccagcagggagggcatccgctcaaaggcgtactggagcagctccggctcccgggcgagaatgtcgtccctgtcgatggcctcgatgcggcaggtctcgtcataggcgttctcgatgcagggcagggcaaagaggatgggggccctggccagaatgaccttggcgatggaggggatgttggccccgatcttgcccatgccgtcggagtggacccgctcggcccccttctgcttgcccaggcccacggcgagcatcttgcag

SEQ ID NO: 8657 - DNA, 341 bp, Unknown
  gut microbiota DNA sequence
tgtccttcgagatcgtgggcagcggccccaggcggctgaacacgccctggaacacgccgtcgtacaggtacaatccgttcaggttgttgtacagcttcggggcgtcggacacctcgtcgtcggtcagctggtcgatgcccgtgtccggcggcagcgtctcggttttgaaggggcggatgtagcgctgcacgatgaacggggagcccgcgcgaccgttcgcgaacttgtcgatgagaccctcccattcctcttgcgacacgtagcagccggcgtacacgtcgtcggcgccgtagtggtcggtgggcttgatgatccactcgtccttgttcgcgcggatctgc

SEQ ID NO: 8658 - DNA, 1724 bp, Unknown
  gut microbiota DNA sequence
gaggaacggctcatctcggcctgcatccgctgcgagaagtgctacgagatctgcccgcgcgacgtcatcgcgcccgcccacctcgaggacggtgtgctgaacatgcgcacccccacgttcgacttctcggccaactggtgcgactggtgcgccgaagagcacgacggcaccccgttgtgcgtgagcgcctgccccaccgaagcgctcaagctgcccgacgacgccacggccgagaacaccatcatcggcaaagccgttatcaacacggactggtgcttggcgtacaagctgatcggatgccggttttgctacgacgcctgtccctacgaggccatggagctcgacgagaacaaccgccccgtcgtgatcgaggacaagtgcaacggctgcggcgcgtgcgagagcgtgtgcgtctcgctgcagaacggctccatctccgaaggagccaccgcgcgcgccatcgtcgtccacccgcttgacgaagttgaaggataaggtgccctcatgaagaagaactccaagaagctgcgcaccctcgtcgcactggccatcgtggccgtcgtcgccgtcggcttcgtcacgaacgtcgggatcggcaccatgtcggcaccgggcatctgggacatctccatcctatgcccgctgggcgccttgggaacgatgctcgcctccaagatgatggtgccgcgcgccgtaatctcgctgatcgtgatggtgctgctcatcgttctgttcgcccgcgcgttctgcggatggatttgccccgtgccgctcgtgcagaagttgcgcggcttgttcgcgaagaagcaacccgtcgaacgcggcgacgatgccgatcctgccgcggcgccgctcacgaaagtcgagatcgacgcgctgggcgtttcatgctcgaaggggtcgaagaatggcagcggatgcgcgtcctgcgcctccaagcgcggagccgcgctcgatgctcgccacttcgtgctgggcggcgcgctggcgtccaccttcatctttggattcccggtgttctgcctcgtctgccccatcggactcacgttcgccaccatcctgctggtcatcaacctgttctcacacggcgatgtcacctggtcgctcatcgtggtgcccgcgctgcttatcgccgaggtgctgctgttcaagaagtggtgccataagctgtgcccgctttcggcgttcatgagcctgatcgcgaaggcgaacaagaccttcgtgcccacgatcgacgatgcgaagtgcctggaaacggcgaagggcggcgcgtgcggggcctgcggccgcgtctgcgaggagggcatcgacccgcgccacccgcagctttcgcaggcggcatggagcgagtgcaccaagtgccgcgcctgcgtggacgcatgccctgcgaacgcgatcaccatgccgctgctgccgcggcgaacgccgtctaccgcagaacctgtcgccgtgccaacgaacgccgagaagatcgacgcggagaatgcgcgccccgttccgtaaagcccctcctgcgcgacccggctcgcagctgcagcggtctggtcgcgcatccggaatcgggccgagcccgaccccgggcaaaaggcggcttggcaagggctttgggggacgagccgccttttgcccgggagcgacatccccgctccccctccctgcgaaaagagggatgccgcttccggccttcatctgacaaccacgacgtgggaggacgaaaacccatg

SEQ ID NO: 8659 - DNA, 347 bp, Unknown
  gut microbiota DNA sequence
ggagcacggtaagggaccaggccctttcgtggcggagcggacgaaacgcagcgaggggcttgggcgccttcgtggcggagcgatctcaggagacagcgaagaactcgggcactgcagcgaggcgggcgaatctttcgcaaaaagaaacgcgctccccacccgctagggaaaggagcacgttgttcattagagtgcgttcggtcgtgaatgtttcacgtgaaacattcgttcgcggcgcaatgtcgaacgatccgacacccggccgcacaggcgccgcgcgaacaggcgacccgagccgacggccgccccgcccctagcgttcgctcatgggaacgtaatcgcgcttg

SEQ ID NO: 8660 - DNA, 232 bp, Unknown
  gut microbiota DNA sequence
ctcaacgccgaggagcgcctggcgctggtgttcggcaccgagggcgacggcctcgcgcacgacaccatcgcccgctgcgactacaccgtgcgcatccccatggcctgcggggtggactcgctcaacgtggccgccgccagcgccgtagccttctggcagctgcgccggtaggttgatgtctcgctctacaccgtgtcgccagggtggccggtgtggttcaccttcgtggcca

SEQ ID NO: 8661 - DNA, 19781 bp, Unknown
  gut microbiota DNA sequence
cccgccgtcgaggagggcaacacgggcgacggccacaaggcctgcatgaagatcggcgccgacttctggcacatggagcacgtggcgggcttctggatggccggccgcgacctcgagaacacgaagttcacgaacaaccagatcatctcgccgtgcccgaagcagtacggcatcaccgtgggcgtgaacggccgccgctactacatggactgggacggctacagcaacaagtccgacatcgcctacatggacgacccgtccgtctccgtcggcagccgccacggccatatgcagatcggcggcgagtggccgcacctggcccagccgcgcaaggcatggttcgtgttcgaccaggcaggcctcgaggccggcgccatccccgccgacaccacgagcgaccccgtggccgacaagctggcctattccgccgacaccatcgaagacctcgccagccagatgggcgtgccggcagacgagctgaccgccacggtggaccagtggaacgagtgctgcgccaacggcaaggacgtgtacttccatcgtcccgagaagacgctgacgcccatctccacgcctccgttttacgcgcagctgtgctgcccgtcgttcctcaacaccgacggcggccccgtgcgcagtgcccagggcgagatcctcgatcccgacggcaagcccattcccaacctgtactccgccggcgagttcggctcggtgtggagcggcgtgtaccagggcggcggcaacatcgccgagtgcctcatcttcggccgcatctccgctcgcagcgccctcgcgaacgcctagcgcctcgcgccgcacgccactctcgacgacgtcccttccctcccgcgcgccccggctgcctcccagccggggcgcggtgcgtttcggtcggatgccccgcacggggacagcccccgtccccctgggggacattcacggcgcgagggagcaacgggcgcgagattccgcgacgcgcgagcgcctacagcgccttcacgaaatcgatgacgtcctgcttggagtgcacgtcgagcttctggtagatgttcttcacgtagctgcgcaccgtgttgtcggacagcaccagctcgccggcgatgtaggacgagctgcggccctcggccagcagcatgagcacctcggcctcgcggttcgtcaggccgtagcgctcgcgcacgtacgcctcgcggtcgaagggcggctcgatcgcagctgccggggccgtcgggacccgcgaggccgccgaggctgtcgccgccaccggagccgcggcggccagcggggccgccccgtgctcctccgggcgccacacgcgctcgtccacgctggtcagacgaccttcgcgcagcgccgtctccgtctcggcacggaaccggcagcgcccgcacacctcggcgaacagcggccgaacgcgcgggatggaatcggtcagcaagaagcccacgctcacggccagcaggcagatcatggtggccacgatgagcatctgctcggccccgcccgcatcgccgagccaccacatcgccaaccgaccgctctcgcggaagaacaggtgcaggaaccagaagaatcccaggatgagatacggcggcagcgcgcgatggcgcgccacgtcgtacgacacgaaccacaagaaccccacttggaacaggttcgtgatggcgatgagggtggcacccacctcgctgaccagcggatcgagcgtcgacagcaagatcacgcccaccgccagcgcggcaagctgcgcctgccacagcacggcgaacttgaacccgcgccccttcacgagcgtccaccagatgatgccgaggccggcggccgtcaccccgaggtgctgcacgaggtggaacacgggcgacagcttgatggattcgccgaacgggaacccgcgcgacacgcccagcacgaagctgaacagggcgatgcccaccacgagccgcacgatggtggaacgcggctcggcggcgtacacgtcgtcgggcggcggcgccacgatgccgcgccgctcgcgctcgtcgagcgtcttctgcgcctggaagtacatgaccagcgtcaccatcggcagcagcatgctgacgaagaacgccgtgctctcctccacgatgccgatgaagatgccgatgacggtggacagcgccagcgacgcgaaggccgccagcagcgcctcgcgcaaccccagccggatgtagaacgtgatccacatgccgccgccccatgcgagccccacgcccgagcacacggccgccaccagggtgaacggcaacgacgggaacagcgattgcacgaagaacagcaggctgcccagcgtcatgagcccggccgagatccagccgagcacgttctcgaacctcggcgagaacgcacggtgcagcgccacggcgcccagcacgacgatgcacccgcagcgcgcgaagttgatggcgaccgtcgtcagcccggaatcgacccagatgtagcgcgcgtacaggatgcactgtatccacacgagcacgaggcccgttcccagaaacgagaacgagaagcccggcaggtaccgtgccgcgaacgatttgaaatcccaagaaggcacctgctgctcggtcgcgctcaatccgccaccccgctcccctcgaacaccgcgcgcacgaggtattccacgttgccctcgggccccgtgatgggcgattccaccacgcctgccacgccgaaccccgcagcgaccagcgccgcacgcacctcgtccaccgtgcgccgccgcacggcctcgtcgcgcaccacgccgtgctccgtctcgtcgggccgcgactcgaactggggtttcacgaggccgatgaacacggtgcccggctgtgagaaccgcgcgaacgtgggcgcgagcgccgcgaggccgatgaagctgaggtcggccacgagcacgtcgaagggcgcgcccagttcggccgggtcggccagcttgatgttcacgcgctcgaacaccgccacgcgcgggtcctgccgcagcttccacgccagctgcccgtagttcacgtcgacgcacgccacgctggccgcgccggcctgcagcaggcaatcgctgaaaccgccggttgacgagccgatatccaggcagcgcaggccttcgacgcgctgtccgaatgcgtcgagcgcgccctgcagcttgtggccgccgcgcgacacgaagcgcttgcggttcttcaccacgacctccgcgtcgggcgccaccttgagcgccgcgctcgtggcatacacgtcgtccaccttcacctcgtgggcgagcaccgcgcgcagcgccgcgccggcgtccgcgaagtacccctgctcaaccagcagcgtatcaagtctgatcttcttcatgggaaacagtatagagcaaaccacgtccgcaccgacgaaggcggcgcatcgccccggctatcgttttgcgcaggaaatatcaagattcgtcgcgcccttcgggaccagctccatcacccgctccacgagcacgtcctcctcgaccgtcagccccttgtccacgaatagcgcggcgagggggatgcgctctgcgtcggcatccgacggcggtgtcagccatcgatgccgattgtggcagaaaaatcgaggtaggtaaataattcgaccattttctgcgcgctcatatcagaaaatcccaggtcgcgatttttccaatgcgcatattatttacctacctcggtttttctgcaagattatcgaacaaggacgacgagaagtcgccgtcctcaccgagccgcggccgcccgaaggcggccgcatggagggaggaacagcaggagttcgagctgcgcttacaatgcagccaggtcgcgacccagcaggtaggacagggtgccgcacacggcgccgaggttctgaccgggcatgacgaagttgtaggtgttggcgtagaagtcgccggtcatgatgcccgtgttgtacagaccctcgatgggcgtgtcgttctcgtcgcacacctgcatgttctcgtcggtgcgcaagccgccgcacacggtgaggaacgtggcgcccgtgatcttcgtggcgtagaacggcggcgtggagatggggaacaggatttcgggattcacgtggaactgctcgtcgagcccctgttcggcgtattcgttgtactgcttgatggtggccagcgcctgctcctggtcgatgccgtccatctgcttcaccagctcttcgatggtgtccgccttgtagtacgtggcgcccgtgccgatggactccttgccgccctcggcgttcttgtcccacgacgcgatcacctcgtcgggcgtgagcggcatgatgccgttctcgtggtcgatgcagcatccgaactgctcccactcgtcctgcgtgtaggcgtacgccttatcccacacggcgtaggcggtcttctgcggaagttgcagcaccgagatggcgccgtacgcgaagttcgtgcactcgttctggtagcgctcgccgtggatgtccatgttgagcccccagaagttggagatcacgccgtgggccgggcccgacgcgccgccgttgatcatgggcggcaccgggtacgtcttctgccaggcggcacccacccacaggcccatcttctggccgtcgccgggcatgaggcccgagtacacgagctcggcatcgtaatccacgtcgccgaacgagagcgcgtccttgaagtgctcccacgcccacgggctgtacttcgccatcatgtcggggttcttcgagaagtcgcccgtggccagcaccacggccttgttcgccacgtacttgacgtacgagccgtcctcgcgctgcgccacgacgcccgacacgcgcccggtgttgtcatcctcgcggatgaggtactgcgcgacggttttgtagtgtatctcgccgccgaaatcgcccgtgaagatatcggcgtacgcctgcgcttcgagcggcgcgccgtacagggcgccgaaaggctgctcatcggtgtagaagttgtgcgacgcgggcgggacggtgatggtgccgtcgggatcgtagtagcccggctcgaggcagcacttgaggccttgcttctccatatggtcgatggtccagtcgatggactcgcccgagtggttgatccagcgctcccacttcttcttgtccatgaggtacgtgccggcggtctgctcggccttcacgatctcgcgcgcggtttcgggcgaataatcgatgcccttcgccttctggtacttcgacccgatggcgtggttcgagccaccgcggctgatgggcttgctgctagccgagaacacgatgacgtcggcgccctgctcggcggccgacaccgccgtgcacaatccggccatgcccgcgcccaccaccacgatgtcgtgcgtgatggtctcggcgatgtcggcatcggccaccggctcgggcggaatctcgaagctccacttcatctgctggtagctgtcggccgtcagcacgtcggacgcgcccgctgccgagcccgcgctggccgcgccggacgcagcgccgcccgaaggcgaacatgccgcgagcgcgcttcccgtagccgccaacgcgcctgttgccaaagcccctttgagaaaatctcggcgattcagttccatgcgatttccctccttgcgatcggttgcggaacacgggctcagtcttgcacgaacgcgggcggcgcgcgttcacccgcgcttggtgtttcgctcgaaaaggggtcacatagatcaggtgaattggcaaattcgctgatcatcggcacgcctttttgggcgtcggccatcgaagcgtcccctgatttcgcctacaatatgcctggggaggggttatggcgcatacgaagaaaactcagctgttcttggtggccacggggttcgcctgctttttggcgatgaactcgttctcgctgtggggcttctcgttcctgccgcagttcgcgttcggcgcgagcgcgcaggacagctggagcacgccggtgtcgctcagcaacatcgtcgcgttcttcgtctacttcctgggatcgacgcgctttccgcggctgttcgaccgcgcgccgttcttcgaggccgtgctgctcatcgcggcgggcatgatcttcctgctggggttcttcgtcacgtcgtcggccgtcatgctcaccgtgtcggccgtgctcgtgggcgtgggaaccacgtgctgcttcatctgctgggagacggtgctgtcgctcagcgagccgcgcgagacgaagaagcagatcatcctgggatcggtgctgtcgctgctccccttcgggctgttcttcgcgttcggccaggccgggctgctgttcaccgagtcgctgctggcgttctgcaacctcgtgctgctgttcttcaccctgcggttcgagggcggcgcgcccgctacggcgcccgtcgccacgccccctgcaggcgcagcgccgcgcgtgccgctgctcatccgcagccgcttctggaagcccctgctgtgcatcgtcatgatcggcgtgatctcgcccgtcatcggatcggtggcgttctccgacgacctcgcgttcttcgagagctgcgccatcgtgttcgcggcgaacctcgtatcggcggcgatcctggccgtcgtctggctggcgctcgacaaggaaacgaccatctcgaaggcgtacgtcgtgttgttccccgtgctcatcaccgcgttcctggcgttccccttcgtggccgagcagtaccgcaccctcgtgctgttcgtgggcagcttcggattcacgctgttctccatcgtcatgatggtgtcgtgcatctccatcgcgagcgagcgcggcctcggactcgtgttcgtgtacgcgctgttcgcgggcgtcacatacgcgtcgcgcctgatcgggcaaggtttggcggccgtgatcggacgcagttcgctgtcgcaggagacacagatcgtcaccagcgtgttcgtgctgctgtacggctgctcgctggtcatgttcatcctcgtgcggaagagcgccgcgcgcccgaaggaggccgcccccagcggcgtcgacgtgctgcagcaggcgtgcgcgcagctggccgccgagcgcgggctgtcggcgcgccagaccgaggtgctcgacctgctggcgcacggctacgacgtgccgtccatcgcgaaaaagctgttcatctcggaaaacaccgtgcgcacccacacgaagaagatctacgccctgctcgacgtgcacgcgaagcaggagatcgtcgacctggtgaacgcccgctgcggaaaggacgcgcaggacgagtagggcgtccgggatgtgcggcgtctttgcgcaatgttaacgtgcggggcgcgtctttcgcatcctcttaacgcgcgcgtccgtatgctgcttctcgaacggaaaggagcatgcatggacgcaatcgggatagcatccctcgtcatcgccgggtgcgggtacacggccgcggcgctgttcttgctggggctgctgttcgtcgacgtgacggaaaccggctggcgcatcagggcgccgtggcgttgaaaccctcccgcaacgcacggcggccgcccaagggcggccgccggagcaagctcgctgcgcgctctcgcgctacggcaacagcagctgcgcgatctgcacggcgttgagggccgcgcccttgcggatctggtcggcaaccacccacatggccaggccgtggtccaccgtgtcgtcgcggcgcaggcggccgacgtacgtctcgttcgtgccggccagcaggcccggcatggggtacgtgttcgtggcgcagtcgtccatgaccacgatgccggggaacgcctcgagggccgcacgcgcggcctccacgctcacctcgtcggcgaactccacgtacacggcctcggcgtggcagcgcagcacgggcacgcgcacgcacgtggcggccacgcggatgccctggtcgcccatgatcttcttcgtctcgacgaccatcttccactcttccttggtggaatcgtcctcgaggaatttgtcgatgtgcgggatgcagttgaacgcgatgcgatgctggaacacctcgacggtcagctcgtcgtcgggcgtgccgccgaggaactcgcgcgtctggtcgtacagctcggccatggccggcgcgccgccgccgctggccgcctggtacgtggacaccaccacgcgcttgatgggcgacaggtcgtagagcggcttcaaagccaccaccatctggatggtggagcagttcgggttcgcgatcacgccgttgtgccacgccacgtcgcccgggttcacctcgggcaccacgagcggcacgtcctcgtccatgcggaacgcgctggagttgtcgatcatcacggcgccggccgcggctacggcttcgcgcatctccttcgacacgcccgcgccgcacgagaatagcgcgatgtccacgccttcgaacgactccggcgtcatttcctgcaccgtgaggtcgcccgccggcacctggccgcagcccaagaacggcagcgccttgcccgccgagcgggcggacgcgagcgcgcgcacctcggccgccgggaagtcgacgtcgtgcagcacctgcaagaactcggcgcccaccgcgcccgtggcgcccgccacggccaccaccgggttcgccggcatcctctttgtccaagtcatcgtcagtcccctatctacccttgttcatcttcgcggcgatttcctcggcgctcagctgcgtctcctcgaacacgctgtcggaatcgaggtcgaacgccttgtgcaggcagcgcacggccgccgcggcctgcgcgccgtccaccacgacggacagccggatgggcgacgtcgagatggccaggatgttgatctggttctcgccgagcgtcgagaacgcgcgcgccgccacgccgggcgacgacttcatgcccgtgcccacgaggctcaccttcgcgatgtcctcgtccacgtcgtagtcgcgggcattgatgtcgggtaagatgcgctccaccgtctccttcgcgcggggcaggtcggcaccggggcacgtgaagctgatgtcggtgatgccgtcctccgagatgttctggatgatcatgtccacgctcaccgtgttgcccgccagcgccgagaacaccttcgcggccacgccggtcatgtcgggcacgccgcggatggtgaacttcacctcggacgtgtcgtgggcgatgccggtgatgacggcttcctccatcatgtcggtttcctccttgatataggtgccttcggcgtcggagaacgccgaacgagaatgaatgaccacctggtacttgcgcgcaaactccacggcgcgcatctgcaacacgccggcaccggagctggacagctcaagcatgtcgtcgtaggagatgacgtcgagcttcttggcgcgcgggcacacgcgcgggtcggccgtgtacacgccgtccacgtcggagtagatctcgcacacgtcggcgtccaggccgtgcgccaccgccaccgccgtggtgtcggagccgccgcgaccaagcgtggtgatgtcgccgttggcgtcgatgccctggaacccggccactaccgcgataacgcccctgttcagagcctccatgatgcgctcgttgtgcaccttcacgatcttggccttggcgtgcgtgccgtccgtctcgatgccggcctggcggcccgtgaagctcatggccttgtagccgcgcgcttcgatggccatggccagcagcgtcatggacacctgctcgcccgtggacagcagacggtccatctcgcgcgccggcgggttgtcgttgagcgaggcggcgaggcctacgagctcgtcggtggtcttgcccatggcggacacgacggcaaccacctggtgccctgcctgcttcttcgcaatgagcttcttcgcgaccatctggatgcgctcaggcgaagcgacggacgtgcccccgaattttgctacgattagcgacatggtgctctttctcgtcaggttgaacccaatcggctgtccactataccaaacggtcgcatcgtcgcctatagaaagcccgttaacaggagctttttacatggggaaaacgaagagaacgagcagtcgcccgcatgatgcgctcgaaaccgagcagatcatgcgggcgacgtcccgaaccgaagacagcttcgacgttgctctgcatacgcttaccccgcctggtagatcgtctccagctcgccgctctcaacgagcgtgcacaacgcattgctcgcctgatcgctctcgatgcccatgtgctcgaagcgcttcgccagcttaaggcaatacgacaggtcgccgggctccaaagacagcagggcggacgcagcttgctcgttcagttttccaaacatgagatgctcctttccttttcgatgcatccagcgtactgcaccaaggaaagatggcttttggacgaatggagaacctcgccggtcggttttggccgatcgtacaaacaagcgtcccgacagcttcaaagcgcctccgttgcctcgtgagacagcggcgcgctgcgacttgattcattaccaaaaccatcatggacaaaatatgccgtttttctttattctcattttggaatagcttttcatcacctggggtttcttcgacctctctttcctgctcgctcccattacgcgtcgaaaactactgaaaagtggtgctttttgtccatgattatttaaatcatattattgcaggcggactggccgagaaagcatcgagcgccgcgtagcgagccgccgccccctgcccttacggctgcagcaagggattcgtgtagtccagatacacgaggcccagcaggaacgcgaactcgcgatcgggggaatcgggcatgccgagcacgtccttggccttgcgcaggcggtagcgcacggtgttcggatgctggtgcaacgcctcggccgccagacgcaggtcgccgtaggcgcgcgcgaccgcctcggcagtcgcggcaagctcggtgccgtgaagatcgtcgtgctcttccagcaaggccctgtgcagcgcggccgtgcgccagaacaagcgcccctcgttggcggccgcacgaaacgcatcgtgatgcagatcggcccagcacaccacgcgatcgccctcaacctgcgccgtcttcaacgcggcaagcgcctcgcgcacgctcatgtcgccgtcggaaagcggcgtctcctcgcccactcccagatgcacctggcccgcagccaaaaggcgcatcgtcaggtcgctttcggagcgagttcgcacgccggcaggaggctgcgcgtacgacaccagcgcaagcaacgcgccatggtagcggaaggcgaacaccgcctccaccacatcgtcccaatcgcgcttgaactcggccaacacgacggtcatcgcgtcgagcatggcgtatagggagcattcgtcgtccgctttcggggacgccgctatgcattggacggtcgatccggtcgcccccgccagctcgtacaacgccgcacgggcagcatgcggatcgtgcccagaaagcaagccgtccatgatgcgtcccttatcggattgctcgctgtcgcgccgaatcagatcgagcgcctgatatgccaccacttcgtggtagccgccgtcgtacaagtacattggcacgcccgccgcctcgctggcagcccgcacgcggtcgctgacgatggggcgatacgctttcttcagcgcaatacccgaaacgccgcgcgctatcagaaccagaagcgatcgctcggacaattccggatcgtcgtgcgcgaaccccaggttcgtcacgatgaactcgccgggaatgtacgattcgtagccgccgtccttatcgggagcgcaatcgaggatgcccacgttgtgaacttctcgcaactcggctccttcgcacagcaccagcggctgcacctgttcgaacgccggcaacgcaagtatgtccgcaaccgtgatcacgaggagctccttccgaaacctgtcacggacatgatacgacgagtcgccgtcctgcgccacttggcgcatcctgccgttcgacacgaagcatccaacccgactcgcgagaaaaatggacgcgaaagcgcacccatgacaattcccgaggcgttttcatgccgctcgcgccgaccgacccggatgacgttcggcataatgcctggtggcgattttccgcttcggaaaatcggcggttcgccatggcgaactttgtcacagggggccgtttgcgcccagaacgcgcgcagcgagggagggccgtacttgcgacggccctccccccgtttcgccctacacctcgttgaccagcttgaataccttctccttctcgcctttcaggaaatggacgatgttctcgcagctcaaacgctctagatcttcgatagccgtggtcgagtaaaacgcagaatggggcgtgatgatgacgttgtcgcgtcctaccagcttgttcgaagccagatccggagtctcgtcgtacagcacgtccgcgccgaacgcacggagcttgcccgcatcgagcgcgtccacaagcgcttcctcatcaacgcacaggccgcggcccaggttgatgaagataggacgtcgcgccatcaagtcgaacgccgcctcgtcgaaaaagcgcacgttgtcatcggtcaagcacatgtggttcacgatgatgtcggcatgggtcagcagctcttccttgctcacgcgcgtcactccccgttcggcgaacgcagcgtcgtcagcgtgcggatcgcaggctatcacgcgcttcacgaggcccatcgccttctcggccgtgcatttgccgatcttgccgaacccgacgatgcccagcacctgatcctccagacgcggccactggggtgccgcggcgtaatcccacttgtgccgctcgtcgatctccctctggtagaacttgaagtgcttgttgagcgcgcccatgtacgcgatggcgctctcggccacgtcccacgtgcagtactcgcccaccgggcagaccccgatgccccgcttcgtggcctcgtccaggtcaacctggtcgaacccggtagagttcagcgaaaccaccttgagcttcggcgcgcgatccatagcctcggcatccaccgtgacgaacgccgtcagcaacgcatcggcatcggccacatgctcgtagaattcatcacgcttatcgtcctcgtactcgagaacctcgacctccacgtcctcgcccaggcccgcgcgcagggtttcgatctccagcgcgtggtcgggcatcatgcaatcggcgtgatcgcagatgagaaccttcatggcaacccttctttcgtctcgacgaagttacggacgctcgatgggctgggtcaggcagtgaggaccgccgcccgcatgcaggatctgatcgagcggcacgtcgatcacgtccaagcccagcgcgcgcatcttgtcgttgatgtgcttgttcttctcgattgccaccactttgccgttgccgatgcactgcacgttgcagccgtgcttgtacatatcttcgctggccacggggatcagctcgaaattgcgacgcttcagcatttgcaggaagttgtagggcagctggtcgatgcaagccagcgccacctgcggggccacgatgttgaagatcatatcgagatgcaggttgtccggcgggcacggcacgcccaccacggtgtagccgaacttctgcagctggtcgcgcaggttgtccacgccggcttggtcggtacgatccacctggccgaacgccagcgtgtgctcgtcgatcatccagaagtcgccgccttccatgcagcccgcgttcacgcgcgccacgatgggaacgcccatctccttcagcttctcctcgtacgccacggcctccacctgacggaccgggtggcggaagtggccgatcacggcgccttccttgatcatgcaaccgtagtcgcgggcgaacgtcatcacctcgaactcggggcgcgcctccacttcgaccacttcgataccgttgtctttgaacgcatccaccagcatctgccactcggcaaccatgacgtcgttcttttcctggtcgcccttcttcatccactcggcggtgatcacgttgatgccgttgaactggtagtaccgcggcgagcacatcatcactttcttcagcgggttcgttgcgttggacacgtagaccttctcttcttcagccatgataggctcctttcgtttgacaggttgtttgggaagcagtttgagaaaccggggcgcgcggggcgccccgggggcagcgcggagggttacagcatcacggccacggtgaggaacacgcagcacaccaggaacaggaagcccacgatgggtgcggcgcgcttcacccagtcgccgtagctcatgtgggcagccgaagtacaggtcatcaccacgatggacgtaggcgagatcatcttggccagacccagcgccatgcagtagatggtcaccatgatggccacgtccacgccggcgaactgcgacagcgccgccatgatgcccatggtcgcggccgccagccccgtcgacgagggaatgaggcacgcgatgaggaagtagcagatcagcgccacaatcacgaacgcgacgggaggcagggccgacagcgtgctctcgcacatgtgcaagatagtgggcgtgatctgcccgccgtccatcaccacttggatgcctcgcgccagcggcacgacgaacgcggtggacacgagcccggcagcgcccttgatcagcgtgtcgatgatcttatcggccttgtagcgcatgacgatgcccgcgagcaacgtcatcaccatcacgagcatggcgatctcggggaagtaccacgaaccgaacggcgtgatgtcgctgcccagcacctcgcgcagcaccggcgtgacgccgatccacgacacgaactgctcgaagaacgtccaatcagggttgatggaagtccacggcacgcaccccaccaccatgatggcgaacgtgaggacgaagatggccagcacgcccttctgacggccggacagctccaagttctcgtcagccgaaaccgggaactcgataagatcgagcttgcgacggaagaactggaccgacttctcgggatgagccttcaccttgtcggcgtagcggttgatgatgaagatgacgagtcccgtgaacaccaccagcatcagcacgcgcatgcccatgccgtcgccggccgagatgcccgcgatacccgacgcgatacccgtggcgaacgggttcaccgtcgaggccaggcagccggcctgcgtgcccagcaccacgatcatgatggccaccacggtgtccagccccagcgccaggatcaccggcacgaacatgaggaagtacacgattccttcctcgtaggcaccctccaaggtgccgaggaacgacatgaggcatacaaggatggcgataagcaggtgcatattgttctggttcttcatggtgatgcgcttgagcgccgtcttcaccgcaccggtttcctccatcatctcgaggaagctgccgaacagcaagatggtcagcgagatggcgatggcgccgctgatggcgcccgaacccagcatgcccgtgatgggcgccatgaacacgtcccacaacccttgcgggttggactccacgatgtggtacgtccccgaaatagcgtcgccgttggcgttcagctcgtacgcgccgcccggcacgaaccagctgagcacggcgatgaagcagatgaccccgaacaggatgacgtaggtgttcggcatcttgaatttcttcttgcccttctcgggctcgttgtctgacatggatgctcctctcctcgacgcttccggcacagcggggcgcagctgcccaagggtgccgcagaagcggcatcctcgcagacagagcctgccgtgcgaccctgcgcagagccgcacggcgtaccgggaagcgtgtttagacgcaggggatgtacagatcgcccagggtggccgccatgatggccttgatggtgtgcatgcggttctcagcctgctggaactggcggccgtggtcggaatagaacacctcgtcggtaacttccatctccttcacgccgaagcgctcggccatatcggcggcgtactcggtctccgcattatggaaggccggcaggcagtgcaggaagatgtagtccgggttcttcacgtgcgacagcagctcggcgttcacctggtagggcgacatgagcttcacgcgctcggcgaactgggactcctcgcccatggccgcccacacgttcgtgtagatggcgtcggcgttcgcaacggcctccaccgggtcgttcgtcaccgtgatggtagcgccgctctcggcggcgaaggcccgcgccacctcgacgatggccgggtcgggctcgagttcggccggcgtggcgttcacgtagttcacgctcaggatggcgctggtgatcatgagggagttctgcacgttgttgcgtccctggccgcagtaggccagcgtgaggccctccagcgtgccgaagttctccttcatggtcatgaagtcggccagcatctgggtgggatgctccttgtcggtgaggccgttccacaccggcacgccgctgtacttcgccagatcctcgacgtgctcctgcttgaagccgcggaactcgatgccgtcgaacatgctgcccagcaccagcgcggtgtcgcgcaccgtctccttcttgcccagctggatgtcgttcttgcccagatactcggggtgcgcgcccaggtcgatgcacgcggtggtgaacgcggcgcgggtgcgggtggacgtcttctcgaacaagagcgcgatgttcttgcctgcgaggtagcgatgctcgacgccccacttcttcaggtctttgagatgttcggcgaacccgatgaggtacatcagctcgtctttcgtgtagtccctcgtggagaggaggctgcgtccctggaataccgactcggtcatgtgaagctcctttcgatggatgctcttgcgccctaatccccgacggacgccgcgcccgatggtgcgacccctcctggcaggccaggttacgagaagcatcatacgcagcggcgagagggagcccctctggacagtcggacaaaacccgagccgcgcgctttgtccgaccgaacaagggacacagggcaacaggaatctaggatgaaagcgcgcaagcgggttcttccaacggagcgggggtcgcagatggttctatcgcctatcgactacgtcatcatcgcgttgtacttcatcgtcatcgtggccatcggcttcatcgcggcgcggttcgcgaaaacgaaggaagattacctcgtggccggcaggcggctgtcgtttcccctgttcttcggctgcatggccgcgctcacgctgggcggcggctccactatcggcagcgcccagctgggctacgagttcgggctcggcggcatctggctcaacctgagcatcggactggggctcgtcgcggccggcttcctggttaccagcaagctttcgaagctgcgcgctctcagcgtgaacgaggtggtggagagcagctacggccccatcgcccgcgtgttcagctcggcgctcacgctcatctacacgctcacgctgagcgtggtgcaggtcatctccatcggcaccatcatcaacggcgtgacgggcatcgacgccacgctgtccatgctggtaggaggcggcatcgtcatcctgtacacgttcgtgggaggcatgtggtcggtcaccatgaccgacatcgtgcagttcgtggtgaaaacggtgggcatcctcatcctggcccccatcttctgcatctcggcggcgggcggctgggacgcgctcgtcagcaaggtgcccgaggcgtacctgtcggtgggcagcatgggcttcgacaagagcttcgcctacctcgtgctgtacgtgccggggctcatcatcggccaggacatctggcagcgcatcttcaccgcgaagaacgagaaggtgtcgaaaacgggcaccgtctgcgcgggcgtgtacagcgtattctacgcgctggccaccgtcgtcatcggcatgagcgtgttcgtgctgctgccccacctggacaaccctcagaacgcgttcgtggtgggcgtgtccacgttcttgccggtcggggtgcgcgggctgatcttggcggcggcgatggcggccacgatgtcggtgtcgagcggcaccatcctggcgtcgtccaccatcctgtacaacgacctgtacctgcggttcgtccgcaaaggagcggcccagggcacggcgcacctcaaggaagtgaccatcacgcgtctgttcgccctgctcatcggcgtggtggtgatggtgtgctcgctgtggatcaacgatgtgctggtggggatcgacatctgctacgggtacctgtcgggctgcgtgttcgtgccgctggtggccagtttcgtgctcaagcggttcagcccgaaagcggggctgtacgcgctgggcgcgagcaccgtggcggtgacgggctgcttcgtcgtcgtgggaacagcaagctcagtccccatcgtcgcaggcatggcatcggggctcgtggcgtacgcagcggcgaaccttctcagcaagcagaaggtgccctcgccgtttgaatgaggcgttaacccgttcccttgcctcaccccaactcgggcaggaacaccaggctgagcaggttgatgaacaccttgtcgtcctcatggggaatgcccaacacggccttcatcttgcgcatgcggtaacgcacggtgttcggatgctggtgaagctcctcggcgatagccttcacgtcgccgtgccagttcaccagcgcctcagccgtacgcacgagctcagtgccgtgctcgtcgtcatagccggccagcatcgagcggtacagctcgctcgcgctcatgaacaggcggtcgtagcgcgcggcgctggcgaatgccgacagatgcaggcccgaccagcgcgccagctgctcgccgtggcgctgcgcactcgcggctgcggcaagcgcctggcggatagccaggtcgccatcgcacaggtgcaccgcctcgctcacgccgcagtgcaggctgccttccaccgaggtcacggcgatgcagcggcgctcggcggccgcccgctcctcatcgctggccgagccgtaggatacgaacgccaggatatgatcgcggtagcggcacacgctggccgactcgacgatcgcgcacccgtccctcaccgtccccagcccagaggacaccgagtcgagcatggcgtagaacgagcacgggtcgcccgcgcgcagggcgaacgcgaagcactgcagcttcgagcccgtcacgcccacgagcgcgctcagcctcgtacgcacccggtcgccgtcgtgggcggtcagcagctcgtcgagggccttgcccttgtccagctcgtcgcgatcgcgctgcagcagatcgagcgattggtacgccaccgtctcgtggtaagcgccgtcgtacagataaagcggcaccccgcgcgccgtgctttccttgcgcacggcgtcgctgatgggaggctcgtagacggttttgacggcgatggcggccacgtcgcggcgcagcatcgtcagcagcgacttctcggccatgccagggttgccgaacgcgaacccgaggttcgtgaggatgagttcgcccgccacgtatacactgtattcgttgtagtcgggaggacagtcgaggatgcccacgttgcgcacctcgcgccgctccgctccctcgcagggagcgaccagctccacgttcttgaacgccggcaatgcgataatgtccgcaacggtaaccaacagcccctccgtcccatcgcgcatgagaagcgatcttccaagaagatgcaatacggtacgcatgataccgcatcgcgaggagcgcgttcggacgaccggccgcgcttgacgagaattacgcgtgcgaaccgaaaagcccccccccc

SEQ ID NO: 8662 - DNA, 6644 bp, Unknown
  gut microbiota DNA sequence
tgcttcccatgacaatttcgcaagcgttttcgagctgctcgcacccgcaaacacgggcgtcacccaccataatgcctggtcgcaacttcgctgattcgagaattcgccagttcgtgacggcaaactttgccatgggtgccgctttgcgcccagctccgcacacagtccgcaaccgccccgagcgagaggcacctgaacgggaatcctttcgacagagggcggaaacgtcgcttccccacgcgacctcacacctgcgctttgccgggaaccctcgtcttacgaagacgtaagctgagtgtaagcggcggtcaaggtgtccgtcatgcgctcacggtatagttgaacccgtgaacgcacgatacgaggagatcgctatgagcaaaccgttgagcatcgcctgcaaagccgtcggcgcaaccgtcatcataggagcattcgtgctggtggcctgtctgttctcggagagcagccgcaccatgtatccgatcagccgcacccgctgagccccaaccggcgaccagccgcccgcgccgcggaggccgtaaaacccgcgcgccgcatgctgcgcgaacccgcgcgccgcgcgctctactcctgcttttcaggcatcctccacagcagcacgaagcccagcacgaacagcacggcgatggacagcacgcccaacgacgagttgcccgacagctgggtgaagaagctgaccaggaacgtgcccatgacggcagcgtacttgccgaagatgtcgaagaagccgtagtactcgttggcgtgctccttcggaatgagcttgccgaactcgctgcgcgacagcgcttggatgccgccctggaacaaccccacgcagatggccagcatccagaactccgcggcctcgcgcaggaagaacgccgcgaacagcgtgatgcagaagtacgcgccgatagctaccagcagcatgcgcttcgcgccgaatcttgtggacaggcgcccgtaggcgatggccgacgggaacgccacgaactgcgtcaccaacagcgccaaaaccagctgcgtcgcatcgatgccgaggtcggtgccgtagcttgtggacatctttataatggtgtgcacgccgtcgatgtagcagaagaacgctagcatgaagtagcgcaggcgacgatccttccaaatacgtttcagcgtgcggaagaggccggcgaacgtgtcgcggatcaagcgaggagcacgttccttgtagtgcgtctgatgcacatcgcggataaggggcacgctgaacgccacccaccaaacggccgtgatcagaaacgcgatcttcatcccgatgtccatagggatgcccacgctgggccctgccaacaccacgatcaggcacaggatgaacggcacgcacgagccgatatagccccaggcgtaaccctgcgacgacacctcgtcgtaacgctcgtcggtggtggcgtccacgaggaacgcatcgtagaacaccatcgagccgttcagcatgatggacgcgacgacgtagatcacgaggaaagccagcgcagccgacgggatgcccagcgccgccaaggcgatggcgcccgtacccacagttccgatgaagaacttcttcttattgcccttgaggtcggccaggctgcccagaaccggcatgagcagcgccagcagaagcgacgccaccgtctcggcatagccccacgccaccacaaccgacgaacccggttcggctagcgtcttgaaatacacggggatcagcgccgtcgcaagcagcacgaaggccgaattgcccacatcgtagaggatccagcttttctcctgcttggtcagcttgcctgccatggccttgcctctcgtctcgtttgcgtcaacttgggattccttcttcacaagtgcgaaaccgaaggttaacaagtccccgctcattgtatatgatagcgcgtagcgtcaccggtaaaattcaagtcagaacggagcgtcatccccatgcccgcactcatcacccacgacttcttcgggcgcgacgtctacgaccgcctgtacaccttcataggcggctcgcgcgacgaagccgacgccttcctgttgggcaaccaaggccccgaccctctgttttacctggtgctcagtccgcagttgcgcgcgcacaaccgactgggctcgactatgcacaataaaaagcccagcgagcttctaaccgcgctcaaaaactccctcggcatcctcaacagcgccgagcgtgaagtaggtcgcgcctatgcgttgggtttcctctgccactacacgctggactccacgatgcacccgttcgtgtacttccacgagtaccggttgtgcgacgccggcgttccaggcctgacgcgcgccgacggaagcgaagtgcacgggacgatcgagagcgaactggacgaactggttctgtttgagaagcgcggcgagaccatcgccacgttcaacccctccgccgaaatcctcaacgccagcaacttcacgctgcacgtcatctcgaagatgtacgcctacgtcgccctcaccgtgtacggcgagatcgtccccgccgacctgttcgagacggccgtgaaggacttccgcgtggcgcagcgcgtgttctactcgccctccggccgcaagcgcgccctcttcggtcgcgtcgaggagctgctgcgccccttctcgttctacaagtcgatgagccaccgccccgtcgcgcttaccgaaagccagttcgacaaccgtgcccgcgaggcgtgggagaacccgttcacgggagacatgagcaccgcaagcttctgggatctcttcgacgaggcgctgggaaaagcgcaagacaacctgttcgcattcgacgaggacggattcgatctcgcagcagcgcgcgccatcaccaacgagcgagacttctcgggcgaacccgttgtggcgctcgtggtgtcggtcgaggacggcgctgccgacgcgcagccgcagcccgccgacgaagcgtaagcgccccatgctggacgtcgccctcaccatccccttctggctggagcttgccgctgcgctgaccggcggtttgtccggcgccatgagcgcagtgcgcgcacgctacgatatattcggcgtggcgtgcatcgccattatcaccggtttggccggcggcatcatgcgcgacatcctgctgcagaactacggtatctacgcgttccagaagcctacgctgatcatcgcctgcgccatcgcgggcgtggtggtgttctacttcggtaagctggccacctatctcgaccccatcgtcgacttgctggacaacctgtcggtagcgctgtgggccgtgatcagcgtgagcaagagcctgtcggcggggctcgacatcatcccgtccatcatcctgggcaccatcaccgccgtgggcggcggcatcctgcgcgacatctgcatgaaccgcgagcccgaggcgttccaggccggcgcactgtacggcagcgccgcgctggtgggctgcatcgtgtacgcgttgatgagccagaaccacatcctggacaactacgccgcgctgtcctgcgtggtgctggtgctggggctgcgctacgcgtcgctgttcttcggctggcgcacgaagccgccgcgcgactactccgacgtggtgacccgcgcggtatcgaagccggtacgctcggtggcgaatcgcgtgcggccgcccaagggcaaggtggagcgcgacaaggagcggcacggttacgagaagctgcgtgcgttctgggcgcgcatgaacggcgagtacgtggccgagcgcagcaaggacgacaagcttgccgcatccgactcgcaagcggccagatcgtcggccggcaccgccgcagccagcgaccccagcgaccgcatcatcgtggaccgcgaggagctccaccgcatcatgggcggcgaggaagagaaacctcgcgaccccttcgagccaagaagctaaaaccaagccaccgtgtccagcgcgtgtcaaagggacgggggatctgacacgctcgcgacaccgcgcctcgcaaaacgggaaaaagcgtgtcaaatcccccgtccctttgacacgctttccttcggttacacgttcttcagcaggatggagttcatcgtgtcggcggcgtgctcgcacgagtcgcagcacttctccatgcggtcgaatatctgcgaccacaccagcacgcgcatggggttctcgcggtcgtgcgtatgcagtttgcgaatgaccgtcatgtacagctgatcggcctcttcctcgtaatcgttcacgtcgatgatgagctgcttgaacatcttggacttcttgaaattgcggaaatcctccatggccttgtccagcgccacgcagctcttcttgatgaggtgcgcgaactccagcgcatcatgatggatgaaatgcacgtcgtacatgtagaagcgttgcatgacgtcttcgatgtagtcgatgatgttgtcgaggtactgggacatgttgatgatgtcctcgcgctcgataggcgtgatgaaatcggtagcaaccgtcttgaagatggcgtggttgatctcgtcgcccttgtgctccagctcgtgcgcgcgctccatgacctctttgagatgctccgcctcggtgaagctttcgatggcctcgatcagcagctcggcttcctgaacggcaacttccgtctgtttctcgaacgcatcgaaataatcgaacttgtccctcttgcccacagggtcctcctttacgagaacattaagaacaggtgggcgaacgcgaatccgagcagaccgcaccccggaaacgtcagcacccacgttttcaccatatcgattgcaattccccacttcaccgcgcttttccgcttcgctgcgcccacgcccatgatggcggtcgtattcgtgtgcgtcgtggaaaccggcaagccggcgaaggtggagagcataaggcagaaaaacgttgccacgctggcggcgaatccttggaacggctcgagcttcaccatatccaggccgacgctttttatgatgcgctcgccgccgacggcggtgcccaaccccatgttgagcgcgcagaagaacatgagccagatgggcaggatcatttgatcggcctgccccacgcccgtggccaacgtgatggccagcacgaagatgctcatgaatttctggccgtcctgcgcgccgtgcatgaacgccacgcccgcgcccgaggccacctgagcccaacggaagaagcgcgaagtcttcttgcgatccatgttgcggcagacgcgtccaagcgctttggagttcagccaacccagaaagaagcccagcagcgtggacaaaagaatgccgtacaccaccttgatccactccgcgccgttgatggcgtcgaagctgccctgcagcgcgatggccgcgcccgtgaggccggcgatcagcgaatggctttggctggtgggaatgccgaaataccaggccacggtgccccacacgatgatggccaccatggcggccatgagagcgatgagcgactgctgggagtcgcctccgaaatcgaccatattgaatatggtatgcgcaacggcggcggtaaacagagaaaccaccagcagccccaggaagttgcagacagccgccatgacgatggcgggcttcggcttcatagcccttgtcgatacgacggttgcgatcgcgttcggagcgtccgtcgccccattcacgacgatgacgccgatgttgagcagggtcacaaccacgaggatcgggttggacgcgagcccagcgatgaacgaagcccactctatggtcacgaaatccctctcgacaacaacagcaaaaaggttcagcattccccagtttaacgtaaatctaacaaagcgaaaggggctcttttctcttttcacgttggattacgggcgaaacggcaaaatacaggtaaagtcacgccccggcaccgcctacgggtaaaacccctgcaatcggtaggagttaacccccgctctatcgatacgtgataaagtaaccgttacgcaagaagaggtttccgcgtcgccgcgtcgcaagcacggctcgacgacgcctggggggaggaaatcgaaatgagaaggcgcttccagctgcccttgcagaccgcggatctgatcgccggattcatggtgtgggtcatcctgtcgtcgctgcttccgtacatcaagcaggacgtctatatccctcccgaccagatagccctcgtcaccgccattcccgtggtgttgggatcggtgctgcgcgtacccttcggctactgtgcgaacctgttcggcgctcgtgccgtgttcctggccagcttcatcgtgctcgtggtgcccgtatggtttttgagcgaggccaccacgtatcagggattgctcataggcgggacgtttctgggcatcgccggcgcagtgttctcggtgggcgtcacctcgctgccgaagtactacccgaaggagcgccacggcttcgtgaacggggtatacggcttcggcaatatgggaacggcgctgaccacctggttggcgcccgtggccgcggttgccttcggttggcgcatggccgtcaagctgtacctcgtgctgctggcggcgttcatcgtgctgaacttcgtgctgggcgatcgcgacgaaccgcgtgtgaagacgccggtcatggagcagctgcgcgccgtctggagcgacgcgcgcctgtggttcctgtcg

SEQ ID NO: 8663 - DNA, 1197 bp, Unknown
  gut microbiota DNA sequence
actgccgaagtactacccgaaggagcgccacggcttcgtgaacggggtatacggcttcggcaacatgggaacggcgctgaccacctggttggcgcccgtggccgcggttgccttcggttggcgcatggccgtcaagttgtacctcgtgctgctggcggcgttcatcgtgctgaacttcgtgctgggcgaccgcgacgagccgcgtgtgaagacgccggtcatggagcagctgcgcgccgtctggagcgacgcgcgcctgtggttcctgtcgctgttctacttcgtgacattcggcgctttcgtagccttgaccgtatacctgccgaactttctcacgtcgcactacgggatggacggcgtgtcggcaggcgtggccacctcggtgtttatcgtggcggcggccgccatccgcgtgctgggcggctggctgggcgaccggttcgactgttatcggctgctggccctcgtgttcgcaggcctcgccgcaggcgccgcggtgctggctacggcaccggggctgcccgtgtacctggcgggcatctatctggtcagcatcgcatgcggcatcggcaacggcgtggtgttcaagttggtgcctgcgtacttcacgaagcaagccgggattgccaacggcatcgtggccatgatgggcggcctgggcggcttctttccgccgctcgtactgtcggcatcgacgctgctgttcagcacgagcgtccccggatttgccgccttcggcgccttcgccctcgcctgcctggtgatttcgctggtcatgaggaggaagactcggtcatcctgagggcacggagcgcgcaatccgtctcctgagcgtaagccgcgaccccctacgcgtagtaagcgaacacccttttgcgttcgttgccgatcttggtggtgctgttgtggccgggcaggaccaccgtctcgtcgggcagcacggccaggcgcttcagcgagcggcgcatagcgttcatgtcgcctccctggaaatccgtacggccaatggagccgcagaacagcgtgtcgcccgaaatcagcaccggcgcgccttcagggttcgtgccgaagcgcgggtcgatgaacaggcagataccgccctcggtgtgacccggcgtcaggattaccttccacggcatgtcgccgatcttgagaatgtcgccgtcgttcactacatgatccaccgggcacggcgtg

SEQ ID NO: 8664 - DNA, 468 bp, Unknown
  gut microbiota DNA sequence
agtcgatgaacaggcagataccgccctcggtgtgacccggcgtcaggatcaccttccacggcatgtcgccgatcttgagaatgtcgccgtcgttcactacatgatccaccgggcacggcgtgaagcgcatgtcgtcgcgcggcagcttcttctcgcccgaaatgatgggcgcgtcgatggccgaggcgatgaccgtggcgccggtcttgtcgcgcagctccttcgcagcgcccacgtggtccgaatggcgatgcgtgaggatgatggcgtcgaccgaaccgcccgccgccttgatgatctcgtcgggcttgcacgtgggatccaccacgatggtggccttgccgtcggaaatgatgtacacgttgttctccagcatgccgagcacgaggtactcgacgggcacgcacgtgcccttcaccttattggtcatgcgtcgctcctagtctttttcttgccgccgccggcctt

SEQ ID NO: 8665 - DNA, 5516 bp, Unknown
  gut microbiota DNA sequence
accatgccgtcgcgatgcgacgtggtggagctggacagcacgttcgccccctgctccgacaggatgatggccacgtcgcgcagcaggttcatgcggtcgagcgcgtccaagaacacctccaccttgaacgacgtgttcttcggcagatcgttctcccaggccacctcgatgatacgctcgggggtttgcttgagatcctgagcgttcgggcagtcggcgcggtgcaccgacacgccgcggccgcgcgtcacgaagccgagaatctcgtcgcccggcaccgggttgcagcaccgcgacaggcgcaccagcacgtcgtccacgcccttcaccaccacgccgttcgacgtgtgcgcctcgtgcttcttcggcgccttcacgctggtcagcatcggcggcatcttgccggtggacatgtcgcctgccacgtagtccatggcggtctcggcctcgtggcccttgtccacgaggatcttcagcagacggttcgccacgtgctgggcgctttccttgccggtgccgatgtgcacgagcatgtcgtcggcgtccttgtagcccatgtggtcggccaccgacttgagggcgcgcatcgactgggcgctggatatgcccagaccgtgcttgcgcatctcgcgggtcagcttgtcgcggccgaattgcaaatcgtcgctgcggctgaccttgctgaagtacgagcggatcttgctgcgcgcgctgggcgttttcacgatgcccagccagtcgcgcgaagggctggcgcttttctgcgtgaggatgtccacgcggtcgcccagctgcagctcgtaggtcagcggcacgatggcgccgttcaccttcgcgcccacgcagtggttgcccacctcggtgtggatggcgtaggcgaaatcgaccggcgtcgaaccggcgcgcaggctcatgacctcgcctttcggcgtgaacacgaacacctcggtgggcgcgagatccactttcaggtccttcaggaactcgcgcgaatcctgcgactcgtcctgccagtccaccatctggcgcagccacgccagctgctggtccagcgcgtcgccgctcttgccgcccttctccttgtagcgccagtgcgccgccacgccgtactcgctttgccggtgcatgtcttcggtgcggatctggacctccagcggacggcccgccggcccgatgaccgtggtgtgcaggctctggtacatgttgaacttcggcatggcgatgtaatctttgaaacggccgggcatcggatgccacagcgtgtgcaccgcgcccagagccgagtagcagtccttcaccgacttcacgataacgcgcacggcgatgaggtcgtatatctccgaaaagcccttgcccttcttcgtcatcttctggtagatggagtagaggtgcttcgggcggcccatgatctgcgcctggatgttcaccttttccatctcgtcgtgcaagatggagatgatctggtcgagatagccctcgcgctcagagcggctttcagtcaccatgcggctgatctgcttgaacttgttcggttccagatagtagaacgacaggtcctcgagctcccacttgatgttgttgatgccgagacggtgcgcgatgggcgcgtaaatctccagcgtctcgcgcgccttgaagatgcggcggtcttcacgcagcgcgcccagcgtgcgcatgttgtgcaggcggtcggccagcttgatgacgatgacgcggatgtccttgctcatggctacgaacatcttgcggatggtggcggcctgctcgtcggtgaggctttccacctcgatgcgcgtgatcttcgtcacgccctccaccagctgtgccacctggggattgaactccgcttccacctggtcgcgcgtcacgctggtgtcctccacggtgtcgtgcagcagcgctgcgcacagcgtttccacatccatgcgcaagtcggccaggatgatggccacctccacgggatgtgccacgaacggctcgccgcttttgcggcactggccctcgtgcgcctcgcttgcgaatcggaaggccttcgccagcatggcctcgtcgtcctcggacaggtacaccgaggtcaggcgctgcagctcggcgaatcgctcctcgggcgtcttcggcgcgagggcgtccttcttggcttcgggcgcgaacgatttctcggccacgtgcggccggcccagcaggttgtcctccacggtctgcttgttcgacgtcgcctcgggcgcgccgcccagcagctcctcatggttgttcttgcccattttggtcgtcctccctatgccctagcgctcgcgcgcgtcgcccgccacgtcacccggcaaaatgggccgcgacacgcgtatatggagggtagcagaatcgctcttcatcgcccagtcccggaacgcgtggaacacctcgcgctcccccaaaccttcacggtagcgtacgctgtccgtcaactccaccttgtcctgcgtctccaccacgtggatggagcgcgccatgccgtcggcgccgaacgcggtgtgcgtctcgataagcccgagctcgcgaaacaccgccacgccgcacgctgccgaggcggggctgatagggaatgcatcggtgctggccgccgcggccagatcggcgttgcccatggtgaagaagcactcgcccatctctcgctgcagactgcgcaggcggcggtacacctgggccaggcagtcgtggtcgggcgtcatgtcgcgcaggatgcgctcgttgagcgagcagtcgccgcggttgaacagtaggtggatgcccgcgggcttgccgtcgcggcccgcccggccgctcatctggttgaactcgatctcgttgaacggcaggtggtacagcaccacgtggcggatgttggggatgtccacgccctcgccgaaagcggacgtggccaccagcaccgacagcgcgtcggtgcggaacagctcttcgatacgcttgcgctcggcgcgtgcgaggcccgcgttgtagaagccgatgagcggcgccagctggggcacccgcttgcgcagagcgcgcgccacggcaaccgactgctcgcgcgagttcacgtagatgaccgtcttgccgcccgacgcgatgagattcgccaggtagtcgtcgcggttcttgaggttgcgctggtcgtccacctcgaggttgggacgcgaagccgggtcgtacacgcaggcgtccaccggcagctcgcgcttgatggcggccgccacctcgtcgtcggccgtggccgtaagcgccagcaccgcgggagcctcgccgccgggcccagccagcttcgcaatggcggcgccgatggtggcgtaggccacgcgctggcccgccttcgccaggccgatatggtgcgcctcgtccaccacgacgaagcgcacgcggcccgcggccgcgaactcgtcggcgtgccacgcaaggaactcgggcgtggtcagcacgatgtcgtaggtgccgtcggccagacccgcgaagccctggcggcgctcgtcgggcgtgctctcgcccgtcagcgtgatcacgccgatgccgaacgcgtccagcgcctcgcgcaggtggaacgcctgatcagcgatcagcgcgcgcagcgggtacacgaacaggctggcctcgtggttcgccagcgcgcgcgtggcggcgtgcacctggaaggtcagcgatttgccgcgccccgtggccatgatgcccagcgtggagcgcccggcgcgcagatgcgcgaggatctcgcgctgcgcgtcgtgcagcggcttgtcgccgatgatggcacgcacgacggcctgctcgagcgccgcggggtcttccgcggccttgcgctcccagcaggcgcggttcgccgcgcgggccgcctcgtaggcctccacgtcctcggggcgatgcggcgcgttcgcgcacagctcggcgtcgctcgtggcgtacaggtcggccacgaagctgaggttctcggggttgaggcaggcctccagggcgccgcaggtgcgcgcgggagccagcgactgcagcatggccttcaccgacttgcggccgcgccattcgtcgatctgcacctcgaacgcggcgttcaccacgctgtcggtgcgcatgagcgattcgatgtccgagcagtggaacatgatgcccgacaccgtggcgcgcccgtcggacagcgagcacgagaagtggttcttctcggcgcccaccgcgcggcagttcgccagcatcacgtcgcgcgccaggtacacgggcacgggatgctcctggccgaacggcgccagcttgtccagttgcgccacgttgtccagcgtcagctcgtcgaggctgacgcacgagtcgatttccacgagcggatggaacgcgccctcgggcagcgcgtccatgtaggcgcacaggcgccgctcgaactccggcagcttgtcggccggcagcgtgacgcccacggccgcatcgtgcccgccgaagcgcctgagcaggtcggatgcgctttccacagccgagaacaggctgacctggcccacgctgcggccgctgccgcgcgcttcgtcgccgtcgatggtgaacagcaggctgggcacgccgtacgtgttcaccaggcggcttgccacgatgcccttcacgccctcgtgccagctctcgcccgacaccaccagcgcgcgctggccgtggtagatctcggcggcctgcgccttcgcgatctcggacagctcggcttcgatggcgcggcgctggtcgttcaccgattccagcttcgtggccaggcggttcgcctcctcgaagtcgtcggtcatcagcaggtcgagcgccagctgcgcgtcgcccatgcggccggcggcgttgaggcgcgggatgacggagaagctgaggttcgtggcgctgacgggcttgtcggcggcgccgctggtggccagcagcgcggcgatgcacgggcgcggcgcggcgttcatgcgcgcgatgccgtcggacacgagggcgcggttctcgtcgcgcatgggcatgaggtcggccaccgtgcccagcgtggcgaagtcggtgaagtcgcgccataggtgcggctggcccagacggccgcccagcacctgcaccagcttcagggccacgcccacgcccgccaggatggagctggggcagttcgcgtcgcacttcggatcggccacgggcacgccttcaggcacaaggtccaccggctcgtggtggtcggtgatagccaggcccagacccgcctccaccacggccgcggcctccgccttgcaggcgatgccgcagtccaccgtgacgatgaagtcggggccaaacgagcacgcgcgcgtgatggcggcctgcgacagcgcgtagccctcctcgaaacgcagcggaatgaagggcgtagcctgcgcgccgagggcgcgcaaaccgcgggtgagcacggtggtggccgagatgccgtcgaggtcgaagtcgccgaacacgaggatgtggtcgccgcgcttgacggcggcttccagggcatcggccacgtcggacaggccggggatgatgtaggggtccagccagtcgcgctcgagcgacggcgcgaggaa

SEQ ID NO: 8666 - DNA, 1927 bp, Unknown
  gut microbiota DNA sequence
cattctctgccaccctgccccttccgctgttgcgccgattccgtcgcgagcctgccgaagcggccgccgaaggccaatcctgaaacgtcccgcgactcactcccccatcgcgaggacggttgcaggctctttgcgaagagcggcgagcgtgggcacgagcgtcgcggcgaggacgaggacgaagcccgcgagcgagacggccaagccctcgccgaaagccaacccgtcgaacagcggcatgcccacggcgcacgcggtgacggcgttggagacgaccacggccgccatgcccgccagcgttgccgtgacggcatggatgaaggcttcgcacacggccgcggccagcagcgttcgaggccgagcgccgccggcaatgagcagggccacgtcgcgggtgcgcgatttcgacgtcatgaccacgctgaccgccgccccgatggcgcacaggaggacggggcctccgagcaggaggatggtcgaggtgaaatcgagcgaggtcttgtagtctagcaagccctgctgctgcgcgtagaacgccagcatgttgctgagcgaggcgacacccgccaacaggtcgaacccgaccatgactggcgtttccaccgaggtgctgagggacaggccgtagcgcgcggtatgccgcgccagataccaggcgttccaacgcaattgcggcatgatggacgtccatgccctcatcagcgccgaaagcaccaccggggcgacagtcgcgagcgttgcgaccgcaagaaggggcacgaacagcgcattgctcagtgcggcgtacgactgcgcttcgaccatgaagacggagagcgcgcaggtgcccgtcgccaagctcgcgaacaggatcgccctcaaccacgtcatacccctgcgcttcggttcagaatcgcgcagggcttccaaaggaggcgtttcgcctgcgctgcgggcgcccttcaatcctccgacgagggacacggccgccaccgcaagccacaccgtgggcatccgcgaagcccccacttcgagaaccacctgatcgatcggctggtagaacggtgagctgaacacccaaggaaacaaaggggcgtacgtgaccgattcgacgagcgttccgcatgcggcacccagcgtcgccacgacggcgagctgggcgagcaccaccgcgctcacgcttcgcgggctgacgttcgcgatctgccacaaagcgtacgatcgccgctgcgcagacaccgtgaggttcgccgccgacacgagaaccaccgctgccgcgaacgaggagaacgcgaccatcgtccaaaccagggtttccaagttccgatacgtttccgtagtcgtcagtatcgacaccgcccagccgccgatgtagccgcagcccacggccacgaggaacgcccctatccaggtggctgcgtgatcgcgcagatccgagaacaccaagcgcatcatgccggcacctccccgtcttccagcgctgcaaggatctgagcgggcgtcgagcgccccatctctcgtgcaacctgcccgtcccgcagcaccaggatgcgatccgccatggacgctgcttccaaatcgtgcgtcaccatcaccaccgaacgtttcgggtcgtcggcgatgcgccgcagcatgctcagcaccgcgcgaccgttccgggaatccaatgcgcccgtgggctcgtccgcgaagatcacgtccgcgccacccgcaagcgcacgagcgatggccacgcgctgctgctcgccgccggacaggtcgccggggcggctctttcccttgccgtcgaggcctacgcttttcagcaccgcgctcgtctgcgccttcgcgatgggacgacccgccaggcgcgcgggcagcgacacgttctcccccacgctcagcgacgggatgaggttgtacgattggaagatgaagcccacgtggtcgcggcgcgttctggacagcg

SEQ ID NO: 8667 - DNA, 448 bp, Unknown
  gut microbiota DNA sequence
ggggggggggggctcattcgggccttctgagcacgacgccctctcgggtcttctaaaccgcagcggattcaacgtgcgcgtgcgcgcattgatcgacgcccatcccgatgaggcgtatgttcttgtgtacggcgacatcgatcgcttcaaggcgtataacgatctgttcggcacttcggcgggcgatagcctgctcgctgatatcggcgagatgatccgccgcaatctgccgagcaatgcggcggcggctcggttgcgcgccgatcatttcatcggctgcttcccgcgttctctgttcgacgccgatcgcatgctcgccgtgttcaacgactggttcgctgcctatcgtcaggacttcaccttcttcgttcgcataggggtgtattccatcgacgatcccgagctggacgtcaacctcatgtgcgaccgtgcgctcttggcgctgcgc

SEQ ID NO: 8668 - DNA, 1440 bp, Unknown
  gut microbiota DNA sequence
gggggtgtattccatcgacgatcccgagctggacgtcaacctcatgtgcgaccgtgcgctcttggcgctgcgcgccgcgaagagcggttctgcgggcagccgctatgtgctgtacgacgagacgctgcgcgcgtcgctgctgaaggaacagcagatggcgggcgagatgactaccgcgctcgaccaggggcagttcgtgccgttcttccagcctcagtactgctatgcgaccggccgtatgatcggtgccgaagtgctcgcgcgctggaagcatcccaagcgtggtctgctgggtcccgccgagttcattcccgtgttcgagcgcaacggcctcatctcccgcttcgattactatatgtgggatcaggcgtgccgctgcctgcgcgcgtggatcgacgcgcacggtcgcgacgccgtgccgcatctgtcggtgaacctgtcgcgcgccgacatctatcgatccgacctgtgctcgtatctcaaggggctcgtggagcgctacgatgtgccgcccagcctgctgaacctcgagatcaccgaaagcgcgtacatggaatcgcctgaccagctggttggagccgtcatggaactgcgccgcgccggcttcaccgtggagatggacgacttcggcagcggatactcgtcgctgaacacgctgaaagacgtgcctgtggacgtgttgaagctggacatgggcttcctcgatgcgcacgagagctcgcgcggcggcctcatcctcgcctccatcgtgcgcatggcgcgctggctgaacctgcccgtcatcgccgagggagtggaaacccagaagcaggcagcatacctggccagcatagggtgcgagtacatgcagggctatttgttctcgcgtccggtagatcgcgagacgttcgagcgcatgttgatggacggcggtcgagagtccgtcaagcggccgatcattgagaatctgcaggacgatgcatccgagttttggaacgcggattccccggtaacccattttttcaacagctacgtgggcgccgccgccatcgccgaatacgacaaccgaacgttggagatcgcgcgtgcgaaccatcagttcgctgagctgttcggcatgctcgatgatttggacgcggcggagaggatacgcaaggacctgctgacgcagctgttggacgaggatcgtgccgcgctgcatgaggctattttgcgcgcggtgcgcgatcgcggcgactccgagagcgagctgcgtttccgcagcggcggacgagggcgttggatccgtgtccgcatccgtctgctctcgcgcgcgggcaatctcagcaacctctatttgcttgccgaggaaaccactcaggagcaggctttgcgcgatcggctggctgccacgcgcgacaccattccgggcggtctggcgttctacgaggtggcggatcgcattcgtctgttggatttcag

SEQ ID NO: 8669 - DNA, 1546 bp, Unknown
  gut microbiota DNA sequence
gcgagggcgttggatccgtgtccgcattcgtctgctctcgcgcgcgggcaatctcagcaacctctatttgcttgctgaggaaaccactcaggagcaggctttgcgcgatcggttggctgtcacgcgcgacaccattccgggcggtctggcgttctacgaggtggcggatcgcattcgtctgttggatttcagcgatgccgctgccgatatgatcggctacactcgcgaggaataccaggcccgcacgttggacgacgcgcttgcggtggtgcatccggaagatcgcgcacgcgtcgaagcggtggctgccgaactggatgcgggtgcgtcgcggtcgtcgtgcactatgcgcgctatgcgcggcgacggcgaggtggcgtggctgcatctttcagcgtcgacgatgtatcgagacgagacggcgctgtacgtggtggccgtgctcatcgacgtgacgaacgagaaggagaacgagcaacgcctcaaggcgcaaagcgagctgcagtgccggttgagcgattccgttccgtgcggcatcgtgcgctatacggtggacgacgagccccgcgtgctattcgtcaaccgtacgggatgcgagatattcgggtacgccgatttcgctgcatatcgtgctgggacggcgggcggtaagatcgtacccatccacgatgacgacgatgagctgcatgccaagacggttgcggcgctcaaggccggggcggcgcccatcggcttcacgtatcgtttcgtgcgaagcgacggctcgatgggatggatcgagggcacgtcggcgctggagcgcgatatcgacggcaggaccgtcgtccaaagcgcgttcctggatgtgtccgaccgccagcagaagcgctacgaacaggatatacaccgttattcgatggtgttgtgctcggtgtacgacgagatcgtcgagttcgatggcgagaacaagacgtaccgctcgctgtactcgtcgggcaggacgctcgccgacagaaccatgcccatggaagaggcgctcaagttctggaccgaccatctgcccgagccggacgatcgcttgcgcctacgtgccgcgatagacgaatgccttgcagacgacggcgccagccctatcgcctgcacctaccgaatggcgttcgaagataggagctgctggtaccagagcattctgctgcgagtgtcggagtcggccgtgctgtgctgcagcaaggacgtgacggaacacgtgtcgaacgaggatcgcaggatcatgatgcgcgtgctggacaccatgggcaagctgccggtgggcgtgggcgtgttcgcgaagcgcgatggcgaggtgcggctgcgctatgccaacgaccgactgagcaccatgttcggcgacgggcttccgggtgcgcccgataatcccgattgggatgcaccgcttgagctgagcgaagaggtgaagcggctcgatcagcgttgcgtcgaccagggattcatcgcagatgggaacgaattggacgtaggtcttcgtgcggtgcgcgataacggagaggcgattgacgtgcggatccag

SEQ ID NO: 8670 - DNA, 1329 bp, Unknown
  gut microbiota DNA sequence
gccgcttgagctgagcgaagaggtgaagcggctcgatcagcgttgcgtcgaccaggaattcatcgcggatgggaacgaattggacgtaggtcttcgtgcggtgcgcgataacggagaggcgattgacgtgcggatccagggtcgcgtagcgcgcgagcctgacggcgagctggttctgtacgcagtggtcagcgacgtgacggcggagctgcgcgatcagcgtgaacgctcttggcagaatgagcgctaccgcctgctcagcgagatgacgcacaagatgagcttcgactacgattcggattccgacacggtgcttttgtacatggatcgcacgggcaagggcatggaagcccaggttatccctcattatttggaaacgctttcggaaactcgcggcaaaatcatccatcctggcagcatggacgacgtgcgcaagatgttccagcatgcacggtcgggcgccaacgaggtgagcgccgagtatcaggcagactacttcggcaagggctacgcctggtaccgcgccaatctgttcgttgcccacgacgtcgcgggcgtgtggcatctcgtagggttgatagagaatatcgatgatgagcacgatctgcggttccgtgcggaaaacgacgcgacgacggggttgagcaaccataccgccacgcaggatctggttgcctcggcgctcgccgacgcatcggtgcggcggcacagcgtgtgcgtcgcgctcgatatcgacgacttcaagcaggtgaacgacacgtacggtcacattgagggcgatacgttgctgcatgaggtgggcaaggtgctgagatcgagcttccgcgaaagcgacgtgctgggtcgcgtgggcggcgacgagttcctgctgctgctgaaaaacatcgatctcgaagtggcactggacaagctggaacaggtcaagcgccagcttgcagccgtgaaggtcggctcgcagggaaaagccctgtcggtcagcatgggcgtgtatgtgccggaagacgatgacctggcgtaccgcgacgtgttcgtgaaggccgacgaggcgctgtatcgggcgaagcgttcggggaagaaccgcatctgcgtccacggccgctagggtcttttgcgacttccgtcattccgattgcaagcgccaatcgctgatctccttgccatcctgagcgcaggaggcggagccgccggagtcgaaggatccggcgcaccgccagccctctccgcctggcgcatctgatgattgcgcgggattcggcagccggaacgccgttgacgtgacggctcggctatcatgggatcggtagagccgtgcttgaaggagtattcgtt

SEQ ID NO: 8671 - DNA, 1108 bp, Unknown
  gut microbiota DNA sequence
cgcaagcgccaatcgctgatccccttgccatcctgagcgcaggcggcggagccgccggagtcgaaggatccggcgcgccgtcagccctctccgcctggcgcatctgatgattgcgcgggattcggcggccggaacgccgttgacgtgacggctcggctatcatgggatcggtagagccgtgcttgaaggagtattcgttatggcagacgcatcgcagcagccgtccgatcgtcgacttgcagtcgaggcgcagagaggcgagggggccagccgctttccctttttgttgaccgacgacctgcgcagccccctggacgatctgcagcgtcttcgtgacgccgaggtgaaaacccgcgagatcatccagaagtaccaagctgccatgcgcgagatgatggtgcgcttcgagatcctcgaccaggatctcaatctcaagaagcaccgcaaccccatccatcatctggagtcgcgcataaagaagcctgccagcatcttcgagaagctggagcgctacggcaaagagcccacgttggagaacctcgagcgctacatcatggacgtggccggcgtgcgcgtgatctgctcgtacatccacgacgtgtacaacctgctggagctgctgcaaaaacaggatgacctggagatcgtcgagatcaaagattacatcaacaatccgaagctgaacggctatcgtagcctgcacgttatcgtacgcattcccgtgtactttcttgacaagaaggaactcattcccgtcgaggtgcagctgcgcaccatcgccatggacttctgggccagcttggaacacgatctgaagtacaagtcggtgagcgaggtgcaggggatcgactcctacgacgagctcaaggattgcagtcgcatcatcgaagacgtggagtcgcgcatgcagatcctcgctcgtgcgttggagatggaagattagcggccggagccagctgcatgggctgatggcccgcacccgcgcgccttctgcgcggctccgtcagcatcttccgaaagaggcaagccgactttccggcctgcctctttcttgctctagttctcgaaatactccgagaagcgggcggtctgcttgttctcgcgaatg

SEQ ID NO: 8672 - DNA, 1806 bp, Unknown
  gut microbiota DNA sequence
ttccgtcagcatcttccgaaagaggcaagccgacttttcggcctgcctctttcttgctctagttctcgaaatactccgagaagcgggcggtctgcttgttctcgcgaatgacggcggcgctcttcggctcttcgatgcgcatgaagaagaagtgcaggtaatggatgaacacgtatcccaccatgaccaccgacaccgccgcctcggccgcgaacaggacgttcagcacttcgggtaccgcaaggccgttagcctggaagaacgcgagcgccttgccgagcgccgtggccgtgatgacgaaggggaacgtcatggccgcgtagctggggtagaaccgaaggcgcagcagaacggggaggcgcgacagcaccacggcgaacagcacttgcgccaacaccagcatcgccaggacgaacacgaggttcggctggggagccgtggccaagtagcctacaagggacaggctcatgggagcggtgtagatgcagaacagcgggcgtgcgctttcggggatctcgtgcttcatgtagcggtacgtcaccaagcccaaaagcacgacgtagcaggcgaatccgaaccagaacagcagatggcccactgcctccatgccgaacgtcggagaggtgacggacgctacgacgatgcccacgtagcagatgaagtaggttggaaacacctcatgcagtttgaagtgcgagatgaagcgagcggtgaaccagcccatcagcgcgaggtgcgccacaacggccgccgaccatagcgcaaatgccggaatgtacgcgaagggggccaggtagccggccagctgcatgagcgtcatgaagagggtggcgctgacgctggccatgatggagttatgcaggtcgtcgcgaatcatatcggggaacagcgcgatcttggcgccgagcatggcgatgagcaccagcgacaggatgccgcagacgatgtgaacgatctcggtgtagggctgcagcaagttgcccaacgcggctaaaccgagcgcaacgcctgcggtgggtatggggacttttctgatgatctcgcgcacggcgctacctttctactgtcgcgcatcttactctttgatgcgcacgatggaggggtcccgctcgatgttccatctgaaacacgcacgggggtctgtctgcggcttgcaagcctgcgacctgggaaggctcgggacttgcgagtcgctgcccattcttccattcccctacgaaaaagaaaacttctaaatacttatgttatgattaatatatcttatggttattatttgtcctgatagaggtcgcaatgctggatttccgtgtcgaaacgtttctgaccgtttgccgaacgatgaactacacgcgcgccgctgaggagctgaacatcacgcagccggcggtgtcgcagcacatcgcgcaccttgagcgcgattacggcgtgccgttgttcgcctaccgcaacaagaagctgcagctcaccgacgcgggcgcgctgctgcgcgacgcgctgtccacgatggcgcacgacgagcgcctgctgcgcgaccggatgcgcagctcggccacgggcgcgcgcgtggagctgtcgctgggcatgacgctgacggcaggggagtacctggtggctgcgccgctggccgactacctcaggcgacatcctgaactgcatgtcgccgtgcgctcgggcggcacgagcgagttgctggcgttgctgaacgcaggcgaaatagactgcgcgttcgtggaaggctttttcgacaagaatgcgtatgcgtgggacgtgttccgcaccgaacggctggtgtgcgtgtgcgcggcc

SEQ ID NO: 8673 - DNA, 500 bp, Unknown
  gut microbiota DNA sequence
ttgaacgcaggcgaaatagactgcgcgttcgtggagggctttttcgacaagaatgcgtatgcgtgggacgtgttccgcaccgaacggctggtgtgcgtgtgcgcggccgatcatgagtttgccgctcggcccgtgcgcgtggaagatctgttcgacgagcggctcatcgtgcgcgaaccggggtcgggcacgcgcgcggtgctcgaacacgcgctggcggctcagaaccttacggtggacggcttcgcgcaggccagcgtggtggagagccttgacgtcatcaagatcctcgtggagcacgatctgggaatttcgtttctgtacgaggcggctgtggcgcgcgagctggccgccggcacgctgcgagtcatcgatctggaggggctcgccatcctgcatgacatcgcattcatccgcctgaagaacagcgttttcgagcgagagttccagaacctgttcgccgatctctgatcgaaggcttcgacgaagcttgccggtcc

SEQ ID NO: 8674 - DNA, 373 bp, Unknown
  gut microbiota DNA sequence
ctccatgccggccacgaacacgcagtcgaactcgaggcctttcgacgagtgcacggtcatcatggtgacggcatggccgtcctcggccaccgtgtcgaggtcggtgcgcaggcgcacccactcgatgaagtcggccagcgagtcgccgcgcaggacgcgcacggggctctcctcggccggagccgcaagctcgttcgcgcccgcgaaggcgtagaacgaacccgcgggggcgtcggcggacgaggggacgggggcgagcgcgggggcgtcggccggctcggccgtgggagcctcgtacagagcgtcctcgtcctcgtgggtttcggtgaactcgtcgacgacgccgaggaactcctggatgttctcgatgcgg

SEQ ID NO: 8675 - DNA, 145 bp, Unknown
  gut microbiota DNA sequence
cgcgtattccgacgaggagataggcgcgttcatccttctgccgcaattcttcttgccgagcgccgccagcgatggcaacgccttcgcagaactgaacgagataggctgcatgctgcagcgcatcggcgggcgcggcacgatgcgc

SEQ ID NO: 8676 - DNA, 847 bp, Unknown
  gut microbiota DNA sequence
cgattcgcgcatgcagcggatgaactccacccagccgcagtcgtattcggtgaagtcgcggatgccgttgggcagccgggtgacgtgggggacgagcccgatgcgctcgtagtagcgaatggtgtcgaccgagattccgtagcgtttcgcgacttcggcgatttgcatagcacgcctcctagcaggtcgtggggaagtccgttcatcctgctgtcaacataccgcgctgctcaaccgatagcaatgcttatattgaaaggttcaccatgcttgggaggcatgaagaacctcaagcagcccttgagttggccggcggccgtgcgccgtctaaaccccgcatcccatgaggcgtgcgcggttgacttcgtgcaggcgcttctcgatggcgcccggcgcatcgactcccgtggcggtcaccacgcccacgaggcgtgcctgctcgaagcagtcgacccagccttgcagtcccttcgtcgccccgtcgaacgcatgggcgtcctcgtcggccgccgtggccaacaggtacacgtcgcgaaacgcaggatcggcggcataggccgggttgctgcggtcgagcagggtcttcatctgaccggccatctcgaagaagtagatgggcgtggcgaacgcgatggcgtcggccgcgacgatgcgctccacgatggcggccgcatcgtctttcagcgggcatgcggcgccggcttggcaagccaaacacccgcggcaaaactcgatgcgcttgccgcgtaggctgaccgtttccacgtcgtggcccgcctcgcgcgccccttcggcgaacgcgagcgcgagggcgtgcgagttgctggtcgggcgcaggctggccgat

SEQ ID NO: 8677 - DNA, 716 bp, Unknown
  gut microbiota DNA sequence
gggcatccggcagcttgcgttgtccgcatcataccagaccggcgcgcgttgctctcatatcatcgagaagagccatctattcgtcgatcttagcgtcgacgaacgtcgcaaacaggtggcacacctcgcttttcccgatgggcttcacggcgaatccgtccatcccggcgtcgagcgcgcggcggcgatcctcctcgtaggcgttcgccgtggtggcgatgataggcggccgtgcgcgacctgcttcccggtagcgttcgacaacgagtcgcgccgcctcgaggccgtccatgccgggcatctggatatccatgaacacgaggtcgaagcgcccttcgggcgcgccttcaagcagatcgagcacatccaggccgttccaggcgcgctcgaccgtggcgcccgtcgaagcgatgatctcctccgctatctcgccgatgatctcgttgtcttccgcaagtagcacgtgcacatgctgccaggagcatgacaccgccgaaaccgcagcatccgagcgctcggcctcgatggactcctccaactgcagtttgcacgcatccccttcgcaagcttcgaacggtagcaccaacgtgaaacgcgatccgcgccctcgctcgctttgcacctgtacggtaccgcccatgagatcggcgaggttcttaacgatggacaagcccagaccagtcccctccaccgataagcgcgtaggcacctcctcg

SEQ ID NO: 8678 - DNA, 420 bp, Unknown
  gut microbiota DNA sequence
cagcaccaacgtgaaacgcgatccgcgccctcgctcgctttgcacctgtacggtaccgcccatgaggtcggcgaggttcttaacgatggacaagcccagaccagtcccctccaccgataagcgcgtaggcacctcctcgcgctcgaacgggtcgaacaaacgcgacatgaactctttcgacatgcctatgccgtcatcttccacgatgaagcggatcaggcgaatacgcatatcgaagccgtcatggctggtcggctcaagcgaaagaccgtgctgggcggcatattccacgcgctcgtcgcccctcagctcctcgacggcaaggcttaccgtcccgctcggctcggtgtacttgacggcgttgccaagcaggttgatgagcacctggttcacgtgcatctcgtcacccagcacaagccc

SEQ ID NO: 8679 - DNA, 117 bp, Unknown
  gut microbiota DNA sequence
acatatcgaagccgtcatggctggtcggctcaagcgaaagaccgcgctgggcggcatattccacgcgctcgtcgcccctcagctcctcgacggcaaggcttaccgtcccgctcggct

SEQ ID NO: 8680 - DNA, 139 bp, Unknown
  gut microbiota DNA sequence
ctcttcgacgtcgacgcgcaacaccgagaacgtcagatgcttcgaatcggcttgcggacgcacgatggacccgagcgtttccacgacgacatgcaggtcgaacggcttgcagcacaggttgatttgaccgctttcgatt

SEQ ID NO: 8681 - DNA, 457 bp, Unknown
  gut microbiota DNA sequence
gtcttcgacgtcgacgcgcaacaccgagaacgtcagatgcttcgaatcggcttgcggacgcacgatagacccgagcgtttccacgacgacatgcaggtcgaacggcttgcagcacaggttgatttgaccgctttcgattttgctcatatccagcacgtcgttcacgagattgagcaggtgatgcgacgacagctgcactttgtcgaagcattccttcacgcgatcgcgctcatcgatatgctcgacggctatgtcgacgagtcccatgatggccgtgagaggcgtccggatgtcgtgcgacacgttcgacaggaagcgcgacttcgcttcgctggcatcctgcgccttctccatcgcgcaccgcaggctttcctgcagctcgcgttcttgccggttcttgcgcttgatcaccgcgaggaacagcaccagcgccaccatcacggccgtcataagcacc

SEQ ID NO: 8682 - DNA, 2037 bp, Unknown
  gut microbiota DNA sequence
ctcttgccggttcttgcgcttgatcaccgcgaggaacagcaccagcgccaccatcacggccgtcataagcaccgacgccgtgaacatggtatcctggcgggttttgccgaccgccttgtacaactggtcgaaagaacgggcggcggcggatatgatggcctggttgtcttccagcatccgatcgatgcgcgggtcgatttcactcgccagaaaagcggcaaccgcctcgtcgtctgcgtcgctcaagctgagggcgataagccgatcctgcaactcgctgaactcctcgtagttgcttaccaggtcctttactttctcgggattgccgtgatggcgctgttcaaccaccctgaacgctgtgcgcaggtcctcgtcgatggaggcgaactccgttttaacgcttgcgacggtctccggcgtgcgcgcgaacgctaagcggttgtccagcgttcgcacttgcatgagcagcgtttcggctcgacctgccgcaacggtgaccgcgtagggatgttccttgagatcctcggttttcgtatcgatggcgttcatattcaccaacagaaccgcgtagaacgacacgagcagcgccatgagcgcaagcgccgcgataagatagaccgggtcggaatcgagcacgcgaccgaatcgatcgtgcttccgcgatgaaaccttcttcatgaagccgctccgatagacgggcgcaggatccacggcggcaagacgcctctcagcgaagctagcgcgcacggccgccagcacgaggcgccaagatagcgcagcgaaccctacgcaaaatagttttcgacgagcgccgcgcagagacgcgacgctcgttgaacttggctagaactgcaccttgggagcgacttccgcgcccgccgtcgcgtcgaagctatcgcgctgcttgaagcccatcatgcctgcgatgagcactgcagggaacgtctggatcgcagtgttgtacttcatgacggtgtcgttgaagctttggcgcatgtagctgatcttgtcttcagtgttggacagctctgcttgaagctgctggaagttcgtgttcgccttgaggtcggggtaggcctccgcgacggcaaacaggttcttcagcgcaccggtgaggaagccgtcggcctgcatcttgccttcgggcgtaggcgcgttcatgacggcggtgcgagccttggtaacctcctcgagcgtgccgctttcgtgggcagcatagcctttgacggtctcgacgaggttcgggatgaggtcgagacggcgctgcaactgcacgtcgatctgcgcccaggcgttatccaccatgttgcggagcttgacgaggttgttgtatagcccgatcacggccacaaccagcacgacgacgatgacgaggatgatgatcaatgggatgctcatagctctcctttgctgttacgtggctagcattctaccatcgtgcatgccattcaggaaatccgctaccgattggtaaaccgaatcgtaacacttagatttcgcgaatgcatcgggctgccgaaatttcagcggttcggcaccacggccgcacgcgccgagccaaacatggtagcacgcgcccaccagccgcgcatgcgcgcctcggcggccacgcgacctgcatcggcgaacgtggcgcactgcatgaacacggccgacccgctgcccgacatgagcacgcgctgcacgtcggcgcgctcgctagcccacaagcggatgtccacgagcgccggaagcaggtgctcggaaacgggcacgaggttgttgcgcagcggcacgtcggcggcgcgctgggcttcgagggctgcttcgcgatcggcctcggaaatggccgtgggatgctcgtcgaacgcgcggtacgcggcagccgtggacacgccgccctcgggcttcacgagcacgacgttgccgttcatgggcgcaagggcatggtcgaacgcatcgcccacgcccgtgaagcaagcgcagccgccatgcaggaagaacgccacgtcggcacccaggcttcgtgctgcttcctcgatacgcggatcgtcggca

SEQ ID NO: 8683 - DNA, 324 bp, Unknown
  gut microbiota DNA sequence
gccagcaagcgcacggccttcgccacgatgttgccctctacgggcacatcgagcatcgcgagcccttcgcgcgcaacgcacgagagatcgacggatagaccttctccgcgtcccggcgccagcttcatgcgtaaaacgtcgtgcagcatgagcgcatgcatgatgctgacggcctcgtgatagccgtccgcacgcttcgcgccgatgtcgaggaacagattcactttcgccggtgccaccagcttgacggcgtcggggccggcgaagcccgcgatgtccacgccctgcgcgatgcgagccacggccagcatgtctacggcgttt

SEQ ID NO: 8684 - DNA, 4897 bp, Unknown
  gut microbiota DNA sequence
gcgcttcgcgccgatgtcgaggaacagattcactttcgccggtgccaccagcttgacggcatcggggccggcgaagcccgcgatgtccacgccctgcgcgatgcgagccacggccagcatgtctacggcgttttcgccgttcttgctcggttgcgtcatttcgattccattcgtttcttgcgcttgcgcgcgaagaagctgcgcagcagctcggcgcattcatcgcccagaacgccggagacagcttcgaaggtgtggttgaggcgctcgtctgcgttgaccgcgtacagcgtgccgagagcgcccgccttcgggtcggccgcgccgtacacgcagcggtcgacgcgcgcttgatgcataaggcccgcgcacatcacacacggctccagcgtcacgtacaccgtgcagccggttaaccgccacacgcccaaacgctcggccgcctgcttgagcgcgatgaactcggcatgccccgccggatcctgcgtagtctcgcgcaggttgcacgcgcgcgcgatcacctgcggctcggccaaggggcggcgcgttccaggatcgatgggctcgtagacgacaacggccccgatggggacttcgtccagttcttcggcgcggcgcgcttcctcgattgccatgcgcatgtagtcttcatcggtcatgtcgcttattatatgccaaaatacgcatcgagttcgctttccttgccgtacggcgctagcagatgacgcgccaccgcacgcgccatagggcgtagcgcaggggcgaacaccagcatagagtccatctcgatgggcgcattgatcagcggtctcatgcaaacctgatcggtgaccagcatttttgcgtactcggtttgaataataaagcagcctttgctgattgaaacctgagccaacataaggttcttgtcatgcataagcaacgtcatgttgatgccgtattttcgaaacgtcgcctcgtacagcctgcctttgcaagggctcgtctggatgaccgtcttccccctcaaatcagtctcgaagtcgatgaacctcttgcgcgacaacgggtcgctggccgacagcaagaccgacaaaccgtcgtcgcatagctttattgagggcaatcccaaatcatcaggaggctttatggaaaacgcaagctccagctccccttccgctatagctttccagaatgcatcatggtcgccgtcgaccacttcgatctttacgcgcggatcatcttggaagctcgccagcaaccctcgcttctggctgtaccccacgtacatgctgagcaaacccacgcgcaccagctcggaatccgtttggctaaccgaacggatatcggcaacgcacgcatcccacagccgaccctcttcgtgcagataacggagaaggatcctgcccgccgccgtcagctcgacgcccttcttgccacggacgaaaagctgcgcgcctagttggctttcgaggctcttcatgctcttcgacaaaccttgccgcgaaaggtaaagcgactgcgcggctcgagtgatgctgccctccgagcacagcgtgcaaaaataccttttctgatcgacatccatacgaaactttgccatggttgttcccctcgcctatggccttcgcgcgtcccctcgaccgctcccgacaagtgacgacgcggtcggatcccccttttctcagtatagacaaaacgactgcgcttgaagcctacaaagttgcgctcctcatcgcaagataagtcgatgcgcatgacgtacacccttttgacctggtattaccgatatacgtcgacttctagttgacgcttcatggcatataagagtttcttttcgcacccgcacggtcaaacgtatagtgctccaagagcgggccgggatgcccgcaccgttacaggaaggggattgtcatgggaaatctgacacgcagggaccttttgaagggcttggggttgggatcggtcgtgcttgcctcgggaggcgcgctcgccgcttgctcgcccaacgagaacgagaccgggggcgcagcaaaaacctcgtcgcaaggtagcagctatcaattcgctaagcgcaagagcgacatcgccggcatgacgcaaaccgaaaccgacgtgctggtcatcggcggaggcggagcgggcctgtgcgccgcgctcagcgctgccgagcaaggcgcgcaagtgacattgtgcgagaagacaagcgttctgggcggagccaccatgctttcaagcggcaagattcccgccgtaggcactcagcagcaaatggacatgggcgaaaacgacagcgtggacgcatgcgttatggacatcatgcgtccgaacaactacagcgttcgacccgacctagtgcgcaccgtgaccgaacaatcaaaagacatcgtcgagtggaccgagaagcacggcgcggtgtggaccatcgaccaagcgctgtattacggtcagactgcgcaccgcatgcataccaccgccgatgccggcaagggactgaccgatgcgctcgtcgcaagcatgagcgccaacgacgcaatcacgcagatgctgtcatgcgaaatgcagggactggtgctcgcggacgatagcgacgacgtcgtaggcgcttacggcaaaatgggcaaggacgagctggccatcctggcaaagaacaccgtccttgcatcgagcgggttcgccaacaaccccgacatgctggcgcaatactgccccgaggccgttgatgctttcaaaatggtggcgccaggagctaccggcgaaggcatcctctgggcgcaagagctgggcgcgaacctccagaacatgggcgcttaccaaggccatgcgtttcacggagtagacaacggcaaaacgcttgaacaaggcattgcgaacaacggcggcatcatggtgaaccaagaaggcaaccgcttcgccaacgaatacaccggctattccgaactgtcccctcatgtcatagcgcaatccgacaacatcgcctacctatgcttcaccgacgcgcaggtagcgaagagcgcgaaatacgctgagtgggaagcggagggcatcgtaatgaaaggtgcatccagtgccgagctggccgccgccatcgggacggacgccgcgacgctggaaaagacgatcacagagtatcaggccgccatcgaaaagggcgaggataaattcaaccgatcccatctgccggaaagcttcgatggcccgtattacgcagtgaaggttacaggcgagattcgccatacgcagggcggcatggcaaccgatctagcaggtcacgtgctgcgcgcagacaagagcctgatcaagggattatatgcagctggcggctgcaccgaaggattctcctcacgcggaggtgcagcctacatgagcggcaacggcctcattcaggcactcgtcttcggcaagatagccggagccgccgccgcaactgaaagccccgagagcgcaaccatcgtggaatgagccgaaagcgcaaaggacgcttacgagcagccgacacggacgagcgatgcggcttcgtgcgatgcgcggtcaatttcttgtcgcattgcgattgactgcatgatatcctaaacgttgcgcacacgcgcaaaccccatgcggaggcgtggccgagtggttgaaggcggcagtcttgaaaactgttaagccgcaaggcttcgtgggttcaaatcctaccgcctccgccagaaacgcagcgcgcccggaaccagctggttccgggcgcttttctttgttcggtcctgccttccggcttgaactccctgctcacgagcgaatgtttcacgtgaaacattcgggaggcggccgcttcgcgcgcatggagccggcttcggccgtgcatgatcgggcagctcatgcgcagcaaaatcgccggtttggcagactgagcccttctccgtccataaagggaaacacgcgacctggcgttttaccggcaggcacggcgccgagcgtcctcaaactgcgctgaaaccaggaaaagactgccaaaaactcgattttgctgcagaaggctgcgcaaaaaacgtccatgagccgcgagcgccggcgaaccggacggagcacggtaagggaccaggccctttcgtggcggagcggacgaaacgcagcgaggggcttgggcgccttcgcggcggagcgatctcaggagacagcgaagaactcgggcactgcagcgaagcgggcgaatccttcgcaaaaagaaacgcgctccccgcccgctagggaaaggagcacgttgttcattggagtgccttcggtcgcgaatgtttcacgtgaaacattcgttcgcggcgcaatgtcgaacgatccgacacccggccgcacaggcgttgcgcgaacaggcgacccgagccgacggccgccccgcccctagcgttcgctcatgggaacgtaatcgcgcttgccgctgcgaatggacttgtacgcaggacggatgatgcgcttgccggagacgatctcctcgaagcggtgcgcagcccagccggacatgcgcgcgcacgcgaacagcggcgtgaacagatcctcgggaatgcccatcatcgagtacacgaagcccgaatacatgtcgatgttcgcacacatgtccttgctggtgcccttttcacgcagaatcacctcgggcgccaggcgctcgatgctttccagcagacgatactcggcctcgaactccgtgcccacggccagcttctcggcgaactgcttgcagatgatggcgcgcgggtcggacttcgtgtacaccgcatgccccatgccgtacacgagacccgtcttgtcgaaagcctccttgttgacgatcttcgccaggtaatcggccacctggccctcgtcggaccagtcggctacgttctgcttgatctcctgctgcatagctagcacctgatggttcgcgccaccatgcttcgaccccttgagc

SEQ ID NO: 8685 - DNA, 1578 bp, Unknown
  gut microbiota DNA sequence
gtcggccacctggccctcgtcggaccagtcggccacgttctgcttgatctcctgctgcatagctagcacctgatggttcgcgccaccatgcttcgaccccttgagcgaaccgatagcgccggcgtacgtggagtacggatcggtgtcggacgaggtcagcacgcgcgtggcaaacgtggagttgttgccgccgccatgctcggcatgcaggcacagcatgatgtccagcatgcgcgcttcctcagccgtgaactggcgatcgggacgcagcatggacaggatggtctcggccgtggactgaccgggaatgaagcgatgcatgatcatggagccgttgttgtatcgagcctgcttcgcgtagtaggtcagcaccatgatgcgcggcagacgcgagatcagcgagatggcggtgtggatctcgtgatgagccgagcgatcctcggcgtccgcgtcgtaggcgtacagcagcaggatggtgcgctgcagcatgttcatgatgtcgggcggggtgtcgcgcatgatcatggaggcagtgaagccgtcgggcagttcgcgttcggcatcgagcgcggcgatgaagcggtcgagctgctcctgtgtgggcagctcgcccatgagcagcaggtacgccacctcctcgaagttgaagcggcgatcggccacgctggtgtccagcaggtcgtacacgtcgtagccgcgatagcgcagcataccctcgtcggctaccttctcgccgtctgagaccacgtagccgtgaacgttggcgatgttcgtaagacctgcgatgacgcccgtgccgtcggcgttgcgcaggccgcgcttcacgtcgaactggtcgtagctcgcggtttcgatggtgttgatcgccttgaagttctcgtacagagcgatctggctttcagttgccatggcgcatccttcctgccgcgcgagcgcggcccctcttccgaaataccatgctgcacgcgatgaccgcccttgaaacacgcggtctctggtggatatggcgaatgggaaaatacgtctctctttattatgataaagcgcagcgacccactgcgcaatcaatgcatgccagtcacccggcgaaaaccacaggcagtacccgggaatccaccgtctcgtggcgattaggtaacacgaccgccttgccgcgcccaagcaccgacacttgattacaatgttgacgaagtctgtaggatttaaccatgcagtccgcatctcaaccctcgacgtagcgtccgtcaccacgtgcgaaagcgaggattcctcttgattctgaccgaaaccctggccttgctcgttgaaaaacgcgattggtttttcgagctccttctgcagcatatcggcatctcgctcatatccattgcactggcggcgctcatcggactgtcgctgggaatcgccatcgccacatggaggcgaggggcgaagcccgtgcttgcgctggtcaacttcgtgtacaccatcccatccattgcgcttttcggcttccttatccccataacgggcatcggcgaccctaccgccatcgtggcgctcaccgtgtacgcgctgctgccgatggtgcgcaacacc

SEQ ID NO: 8686 - DNA, 4072 bp, Unknown
  gut microbiota DNA sequence
tttcgtgtacaccatcccatccattgcgctgttcggcttcctcatccccatcacgggcatcggcgaccctaccgccatcgtggcgctcaccgtgtacgcgctgctgccgatggtgcgcaacacctacaccggcctcaccaccatcgaccctgccatcatcgaggcggcgcgcggcatgggctccaccgaccgccagctgctgtaccgtatcgaactgccgctggccgcgcccgtcatcatgagcggcatccgcaacatggccaccatgaccatcgcgctggccggcatcgccacgttcatcggcgcaggaggcttgggcgtggccatctttcgcggcatcacgacgtacaacctggccatgaccctggcgggcagcgtgctgatcgcgctgctggccatcgtggtggacctgctgctgggcctggccgagaagtccacgcgacgtcacctggagccttcgagcgcacggcggcggaagcgttcgggcgcgcgtcgggtttcgcgccgcaagctggccccggccatcgcagcgggcgcggccgtggtgctgatagcgggcggggccttcgcgttcgcgaaccgcggcggcggagagaacgtggtgaacatcgccacgaagcccatgaccgagcagtacatcctcggcgagatgctgaacacgctgatcgagcacgataccgacctcaaggtggagctcacgcagggcgtgggcggcggcacgtcgaacatcgagcccggcatggagaagggcgacttcgacctctaccccgagtacacgggaacgggatggaacgccgtcctcaagcacgacgacacctacgacgagtcgatgttcgacacgatgcagcaggaatacgaatcgcagctaggcctcacctgggtgggcatgtacgggttcaacaacacgtacggcctcgctgtgagccgcgacgcggccgagcgctacaacctgcgcacgtattccgacctggcgggcgcagcgggcggcctgacgctgggcgccgagcccgacttcttcgaccggcaggacggctaccccggattgcagcaagcctacgacatggacttcggcaccacgagagacatggacatcagcttgaagtaccaggcgctgttcgagggccaggtggatgccatcgtcgtgtccaccaccgacgggcaggtggccgacgagcgcctcgtggtgctggaggacgaccggcacttctatccgtcgtatctttgcggcaacgtcgtgcgacaggacgcgctggaaaagcaccccgagctgcgcggcgagctgctgaagctgcaaggggccatcaccgatgccgacatggcgcgcatgaacaacgaagtggagacgcaagggcaggagccgaaagcagtggccgacgcgttcctggccgagaaggggctgatgtagcatggagcatgcattcgcgcagacgcacagcgcggaatccttccctaaaggactagcttcgcgtcgcgactccggcgacttcgtcgcctgcgctcgggatgacagggcgggacgttccgagggtttcgcgatttgtcatcctgagcggagcgcgcagcgcgaagtcgaaggatcccgtgcggcgccagcagaagaaggctccacacccgccgtcgcgttcgagcacgtcagcaagcgattcggcgatgccgtcgccgtggacgacgcgaacctcgacatcgacgaaggcgcgttcgtcaccatcatcggcagctcgggctgcggcaagaccacgttgctgaaaatggtgaacgcgctggcgatgcccgacgatggacgtgtgctggtgcacgggaaggacacgagcggcgtcgaccccatcgagctgcgccgaaacatcggctacgccatccaaggcagcgtgctgtttccccacctcaccgtggagcagaacatcgcgtacgtgccctcgctgctgaacagcggcgacgagggccgcaccgaggaggccgtcgcgaaatggatggacatcatcgggctgccgcacgacatcatggatcgctatcccgccgagctgtcgggcggacaggcgcagcgcgtcggcatcgcccgcgcgttggcggccagccccgacatcctgctggccgacgagccgttcagcgccgtggacgccatcacccgcggcagcctgcaggacgagatcaagcgcatccatcggcagacgggcatcaccgtgctgttcgtgacgcacgacatcgacgaggcactcgacctgggcgacaaggtgctggtgatggaggccggccgtgccgtgcagttcgccgagccgtgcgacatcctgcgcaaccccgccaccgagttcgtcgaccgcctggttacgcgcaagcgcaccgtgtacgcgcgatagcgcgccgccccagatagccgccctcagcgagaaagccgtcccgagtcgagggagccgcccctcccaccactatcccgagccggtcctagcacgccggaagggccctcgatggcaaaaaaccatcgaattcggaagtctcaagggaggcgaaggcaaccgtcttgaaagacagggacgacgctgtcgtaaaacgcctggtcgacaaggtactgaaaacgccgcgcttcgtagccttcgaccaatccgttttgcggtttccgaattcggccacttttcgccaaaagcaccggggttcgctgcaccgccgtacccccgcactcagctcaaggtggctcgctgcacagccgcacccgaccagaagcgcaccgccggcatcgcaattcgccgcccgatcagatcgcctcctcgtatcccacgggcagtccgagccgccttctcaggcgcagcttgcgggcatgccagtcggagacgttcgttcgcaggcgcttgccgaggtgacgacgaatcgcttcggccaccgcatcggtagccgcaaggctgttcagctcgtcattggtgacgccgagcactgtccagcccatggccgccaacgcgttagcccttctcgaatcccggatgcggctgagttcaccttcgtgattctccctgctttgatactccacgtcgagcctcgcttctggccagcagagatcgcagcgaaagcttttcttcccggaaatcgcgcgcgccgccggacttgcgaccacctcgtagttcatgcggggaaagcccatgccgtaacctccgcggaaaggactgaatcccaggacaagcgcgaatttcgtctcgcgcgacgatgcggacccgtccacgagaaacggaagaatacgcgcgaccttctgcgcaccgccgagcgagctgttgcacgctacgtagtcgcgcaaagcccgaacgcttgtcagcggctcgacatcgtatccaaccgaaacgccagtacgcctcgtctgatacgacccgcacaactcccaccccaactcaagcagcgaaacctcgttgcggatccgcgttgccatttgaatgaatgcaagctcgggtttgctgaagaacacgtcatcgcccaatcgaaagaacgaggaacgcgagaagcccctcgtgcacacatgaggaacgcaaagctcccccgcccgaccgttcggcgtgctcaccagcacgtgactaggcctttcgaacctcagacccggatgatccccttctatgcgctcaagcgccgagctgagctctttggtgcgcggggcgcgctcggggatgcttggttttccgctcctcaccgaagctagctcgcagggttgggccatgcgcagcatctgcaaggccgtgatgtatccgaaaacgatacgtgattgcgaggcacgtgcgatcttctgcacaagacccccttatttgccctgggcggagaggatcttgcagacgtggtaggggaagacgagggcatcgcttccagcaatgggctactcgaacgatggagagcgcctgcactggctctgtagtgaggctgattctatcatgatcgggcagttcatggcagcagcagtggcaatagttggtcgaattcggaaaaagaaaaaccgggaaagagccggcagttttcgcgagctggggtttttgctgcaccttgggcgcttgccgaaagcgcaggggcgatcgcgaacgtgcaggcttccgaattcgcacactatttgcca

SEQ ID NO: 8687 - DNA, 760 bp, Unknown
  gut microbiota DNA sequence
ggtcaacggcggcaggaaaggaggcggcaatggacgaccgacatgcgaaattcgagagccttcccgaagagcggcgcgaggccatcgtcagcgccgccgtggaaacgttcggcaagaacgattacaagaacgcctcgaccgagacgatcgcgcgcagggcaggcatctcgaagggccttctgttcttctacttcaagaacaagaaggagctgtacctgtacctcatggagcatctgatggaaaaggtgtccaacctggtgctggacgaggggtattgggagatcgacgacttcttcgaactgctcgtctacgcggcggaaaccaagtccaaggtgctgagcaagtttccctacctgctggagttctccatccgggccttctacccggagcacaaggacataaaggatacgatggacagctggacgcagcgacaactcgactttatgttcacgacgtacttcaagaacgtgcggtttgaccggttccgcgacgacatcgatccgaagtacgtgctcaacatgctgatttggctggccgacggctatctgcaccaacagcaagcgctgcatcaacgcatcgatttagacgccatgatggacgagatgtaccgctggtgcgacatgctgaaagcctattcgtacaaagaagagtaccggaggcgatgagatagcaaccccatccctttgtctccctttgtctcattaaggaggaataccgatgagcgaccccgtgatcgaactcaaggggctcaagaaagact

SEQ ID NO: 8688 - DNA, 367 bp, Unknown
  gut microbiota DNA sequence
ggacgccatgatggacgagatgtaccgctggtgcgacatgctgaaagcctattcgtacaaagaagagtaccggggacgatgagatagcaaccccgtccctttgtctcattaaggaggaataccgatgagcgaccccgtgatcgaactcaaggggctcaagaaagactacggcaacggccgcggcgtgttcgacgtgtcgttctccgtggaacgcggcgaggtgttcggcttcctggggccgaacggcgccgggaaaaccgtgaccatgcgcaacctcatgggcttcattcggcctgatgagggcaccgtgagcatcgacggcctgaactgcttcagccagcgcagccgcatccaggagcgcctgggc

SEQ ID NO: 8689 - DNA, 775 bp, Unknown
  gut microbiota DNA sequence
tgggaaaaccgtgaccatgcgcaacctcatgggcttcattcgccccgatgagggcaccgtgagcatcgacggcctgaactgcttcagccagcgcagccgcatccaggagcgcctgggctacctgccgggcgagatcgcctgcatggacgagatgaccggcgcggccttcctggaattcatggcgcgcatgaagaagctgcgcgaccgcacgcgcatgaaccagctggtcgagtacttcgagctggaccccgcgcggcgcatccgcaagatgtcgaagggcacgaagcagaaggtgggcctggtgtgcgcgttcatgacctcgcccgacatcgttttgctgaacgagcccaccagcggcctcgaccccctcatgcaaagccgcttcatcgacctcgtgcttgaggagaagcgtcgcggcgccactatcctgctttcatcgcacctgttcgacgaggtggagcgcacgtgcgaccgcgtcgcattcatccgtgcgggcaggctggccgccgtcgagcgcatgaacgacgtgaggaagagccgcaagcgcgtgttcgcggtgacgttcgccgacgagaccacgcgcgaccgctacgcgcaggcgcatcccgacgcacggaaacagggcgcggctagcgtggaggcagccgtggccggcaaccccgacgcgttcgtgaaagacttggccgcctacgacatcgtggacctcgccgcgcgcgagcaaacgctggaagagctgttcatgcacctgtacggcacgacgaaccaggtggagaaa

SEQ ID NO: 8690 - DNA, 382 bp, Unknown
  gut microbiota DNA sequence
ggcgccatggcgtatctgctggctacgccgaacagccgcacgcgcatcgcgctgaccatggtgggcgtgatggtgaccattctggtggcgctcatggcagtggtgacgtcgctcgaagcaggtttcgccgaagcgctgttcccgggcgagctggatatgcaggcgctgatgcaggtgaatgcgggattgttggccctatggctggcgatggccgggttgtgcttcctgtccgcatgtctgttttcgaacgcgacggccgccctgtgggtgggaggcggcctgaacatcctgttcttcctcatgcagatggtatcgcaggtgggcgacaagttcgagttcctgaagaacgtcaacccgctgacgctgttcgactactacggcc

SEQ ID NO: 8691 - DNA, 1731 bp, Unknown
  gut microbiota DNA sequence
agccttgttcgccaaagagctgcgcgcgaacctgttcgtcagcctcatcatcgcggcggtgctggccatgtacatcggcgtgatcgtcagcatgtacgatccggagctgggagaaagcctggatgccatgatgcagagcatgcccgagatgtttgcggcgttcggcatgtcggtacaggccaccaccctcatcgacttcatgctgaactacctgtacgggttcttgctgaccatcttcatcctcgtgctcatcctgatcgtggcgaacaagctgatggtgcgctacctcgatcgcagcgccatggcgtatctgctggctacgccgaacagccgcacgcgcatcgcgctaaccatggtgggcgtgatggtgaccattctggtggcgctcatggcggtggtcacggcgctcgaagtgggtttcgccgaggcgctgttcccgggcgagctggatatgcaggcgctgatgcaggtgaatgcgggattgctggccctgtggctggcgatggccgggttgtgcttcctgtccgcatgtctgttttcgaacgcgacggcagccctgtgggtgggaggcggtctgaacatcctgttcttcctcatgcagatgatatcgcaggtgggcgacaagttcgagttcctgaagaacgtcaacccgctgacgctgttcgactactacggcctggccgcgggcgacgcgtcagccgtcggcggcgcgatcgcgctggccgttggcgcggtggcgctgttcgccgtggcggttgcggccttcgatcggcgcgacctcagcatttagagcagtccgcacgagaaagggcgggaacggcgctcggccgtccccgccctttgatgtttacgcctgctcttcaacctgcgtgaacgcgccgttttcaaccgtcgcatgcagcacgacggtcttgtcgctgtccgacgcctcccacgaccgcgcatacgtgaacgtcagcgttgcctcgcccgagccgtcggctttgaagttgaacgtgtgcacgccgccttcgcccgtcttgggctgggcgccgtcgctcgcggggacgaactcgtcgccgtcgggctgcacggccgagccgtcgatctggaaggtccactcgtaccccgtcgtggggttcgcgtccagcttgaccacgaggtcgccctggctgaactccgccgacccttcggcgatctggacctcggatcccggcgcagccgaacacccgacggcgaacgcgatgaaagccgccatgcacgctcctgctatcacgagtttcagacgagccttcatcgcgcactccttccgagcggtttcgctttcccgcagtatagcggggggcgcgctactcctgcacgctcacgtccgtgaacgtgccgttctgcaccgtggccttcactacgatggtggtcttcacatcgttggcattcgacgtgttcgccagtttcattgtgatggtggactcgccgttgttctggtcgtcggccaggaacccgaacgcgtgcatgccggccgcgcccacgacgtcctgggagttctgatcgttgaagccggaggacggcaggtcggcgtcggtgtccttcagcacggtgttgccgttaacctcggccgtccactggtactggacgtcggcgttcgagtccagcagcacgagcatgtcgctctgggaataggcgacccagccgttcggaaccttgaggacggtgccttcgccgatgctgctgccgtcgcccatctggttgccgttg

SEQ ID NO: 8692 - DNA, 126 bp, Unknown
  gut microbiota DNA sequence
ctcttgtcgctgtccgacgcctcccacgaccgcgcatacgtgaacgtaagcgtagcctcgcccgagccgtcggctttgaagttgaacgtgtgcacgccgccttcgcccgtcttgggctgggcgccg

SEQ ID NO: 8693 - DNA, 256 bp, Unknown
  gut microbiota DNA sequence
aaggttgctctggctgaactccgccgacccttcggcgatctggacctcggatcccggcgcagcggagcatccgacggcgaacgcgacgaaagccgccatgcatgctcctgctatcgcgagtttcagacgagctttcatcgcgcactccttccgagcggtttcgctttcccgcagtatagcgggaggcgcgctactcctgcacgctcacgtccgtgaacgtgccgttctgcaccgtggccttcactacgatggtggt

SEQ ID NO: 8694 - DNA, 625 bp, Unknown
  gut microbiota DNA sequence
attcgagtccagcagcacgagcatgtcgctctgggaataggcaacccagccgttcggaaccttgaggacggtgccttcgccgatgctgctgccgtcgcccatctggttgccgttgttgttattgccgttgttgctattgttgttgtcggcattgttgttgccgttgttgttgtcgccgttgttaccgttgccattgtcgttgttctcggtggcagggttggcgttgtcgcctccgttgtcgttgttgcccgcgttgtcgcttgagcagccggcaacggcgaacagcgccagcaccagagcggcaagcacgccgatcatcgaccatttcgcagtcttcgtcataacagcctcgctttcttcgttggattcaagacgcgttccgcctcatcctagccacgcgcacgcacgaagaggccgggcatgcccgcttgtaatcgccccgcaatgcgggcgaatgtttcacgtgaaacatcgacgcgcaccggaagcgccccgtactcggcgcagtgcatgacgaacaggcggccttcgtccgacttttttctcgtttcgccagttcaaacacctatttcgcgcactattcccaaaaagtctgaaaaagtcgttgacagcatggggcaatacc

SEQ ID NO: 8695 - DNA, 1492 bp, Unknown
  gut microbiota DNA sequence
gcggttctgcaagtttttcgactttgtggcagaatgactttcgcggccgatcgtcccaccaggccttttgacccagaggctcgaaagctttccgcaggcttttccttaaggcggaagaaacccctgatcgcaacgatccgaacttgccacgaagtcgaaaaacttgcagaaccgctgcgaaaaacgacgctgcctgcgatccgacaagtcagctggtcgcggaacagcttcgcctacggttcccggaagaattcaagactggccgattccgcagaaagcgcgccgagctccttatacggtgcacgacgaacatgcggcgttcgttcgacaaactaaccatttatgcagttcaaacacctatttcgcgcactattcccaaaaagtctgaaaaagtcgttgacagcatggggcaataccggcataataacttttgctgtttcgacgtgcgccgttacctcagctggatagagggactgactacgaatcagtacgtcgggggttcgaatccctcacggcgcaccatttcagcttctaattccgcaacgactggcagcagcacgtgcggattttttattggtcagggaaaggaacgtacttgaaggttcgaaaatcgaagcctcacagtaagtagttcttccttcgtcttcccttacgtcggcagtcgaaggaacgactgcggcggctcatggcttgacacacattttgcattgcgcgcgacgcgcgcgtctttgcacacggtatcatgaggtgtacggccatgggcatgacagtaagggataccaccatgctctacctctctcaaatgatggggaaacccgtcgtggacacccagggcgagaagatcggcaccatctccgacctcgccatctccaccggcgaagtgttcccgcgcatcaccagcctggccttccaggggcccggcaaggttccgttcatgatctcgtggcgcaagtacgtcgacacgttcgacgaggacgggatcaccctcaacgccgaggcgcacgacatccgcttcagctatctgcaacctgacgaagttctgctggcgcgcgacctgctgaaccgtcagatcgtggatacgcaaggcctgaaagtggtgcgcgtcaacgacctcaagctgtccgtttcgggctcgcagctgcgcctgctgggcgccgaagtgggcgtgcgcggcatcctgcgcgggctggcctcctggctggagcgcgccgtggtggccgtggcgaaggtgttcggcaagaagatcgacgagcagatcatcgcctggaactacatggacctgctcgatcgcgacctgtccgaagtgcagctgtccgtcacgcacaagcgcctggacgagctgcaccccgccgacgtggccgacatcctggagcagctggacccccagcagcgcgccaacgtgttccagcacctggacgacgcgcaggccaccgaggccatctccgagatggacgacgagtaccaggccgacttcatcgaagacctcgacgac

SEQ ID NO: 8696 - DNA, 784 bp, Unknown
  gut microbiota DNA sequence
actggacccccagcagcgcgccaacgtgttccagcatctggacgatgcgcaggccaccgaggccatctccgagatggacgacgagtaccaggccgacttcatcgaagacctcgacgacgcccgcgccgccggcctcttgggcgacatggacccggacgacgcggccgacatcgtgcgcgacctgtcgtacgagaaggccgagacgctgctgcgcctcatgggcgtggaggacgccaccgagatccgccgcctgctgggctacaaggacggcacggccggcggcatgatgaccacgcagttcgtggccgtgaaggccgacaacaccgtgggcgagaccatcgaggtgctgcgcgagctggacgacgaccaccccaccgtgcattacgtgtacgtgctgaacgactacgacgagttcgtgggcgtgctgagcttgcgcaccctcgtgctcaccgacgacgcgcggcccgtgcgcgacgtgatgttcgacgacgtgatctccgcgacgccggacgagaccgaggaggacgtggcggccgacatcttcaagtacgagctgcccgccatgcccgtggtggacgagcacggcgtgctgctgggcatcgtcacggtcgacgacgcgtgggacgccatcgaagaggacgtgagcggcgacaagacgaaggctaccctgctcaaggtgctgggcggcctcgtggcgtccatcctgttcctggcgctgtacacgctggtgctgctgcagatcatcggctacgccgggaggtagcgccatgatgatgaagaagaa

SEQ ID NO: 8697 - DNA, 362 bp, Unknown
  gut microbiota DNA sequence
caccctgctcaaggtgctgggcggcctcgtggcgtccatcctgttcctagcgctgtacacgctggtgctgctgcagatcatcggctacgccgggaggtagcgccatgatgatgaagaagaacgagaagctcgaagtgcgcgacgtcgccgtcgacgcgatcgagtcgaccgagctcgtcgaagctcccgagaagaagcagcccaaaaagatctggctgctgctggcagcgctgggtcctggcatcgtcacggccatggccggcaacgacgcgggcggcatctccacctactccaccgtgggcgcgaagttcggcttcgccacgctgtgggtcatccccatcatgtgcgtgctgctgatcgtg

SEQ ID NO: 8698 - DNA, 1027 bp, Unknown
  gut microbiota DNA sequence
gctgcgcgacgtcgccgtcgacgcggccgagtcgaccgagctcgtcgaggttcccgagaagaagcagcccaagaagatctggctgctgctggcagcgctgggccccggcatcgtcacggccatggccggcaacgacgcgggcggcatctccacctattccaccgtgggcgcgaagttcggcttcgccacgctgtgggtcatccccatcatgtgcgtgctgctgatcgtggtggagatgacggccgcgcgcatgggcgccgtcaccggcaagggcttcgccgcgctcatccgcgagcgcttcggcatccgcctgaccgcgctggccatgctggcgctgctcatcggcaacgtggccaccacgttctccgagttcgccggcatcgccagcggcatggagatgttcggtgtgtcgaagtacctggccgtgcccgtggccgccgtggccgtgtggcttctggtggtgggcggcagctacaagcgcgtggagaaggtgtttctcatcctgtcgctggtgttcgtcacctacatcgtggcggcgttcatggccgagccgaactgggaagaggcgctgaccagcaccgtcgtgccgcgcatcgtgaacgaccagagcttcgtgtcgctggtcatcgcgatgatcggcaccaccatcgcgccgtggatgatgttcttcaaccagagcaacgtcgtggaaaagggcgtgtcggtgaaggacctgttctcgcagaaggtcgacgtgatcgcgggcaccatcgccgcgtgcctcgtggcctggttcatcatcgtgaccacgggatcggtgctgttcccgcagggaatcgagatcgagtcggccgccgacgcggcgcgcgcgctggcgccgttcgccgggcactacgccgaagcgctgttcgccatcgggctgatcgccgcgtcgttcttggcggcctgcgtgctgccgttgaccacggcgttcgttatctgcgaggccttcggctgggaggcgggcgtttcgttcaagtggaaagaggcgccgctgttcaagagcatc

SEQ ID NO: 8699 - DNA, 1729 bp, Unknown
  gut microbiota DNA sequence
cgtgtcgaagtacctggctgtgcccgtggccgccgtggccgtgtggcttctggtggtgggcggcagctacaagcgcgtggagaaggtgttcctcatcctgtcgctggtgttcgtcacctacatcgtggcggcgttcatggccgaaccgaactgggaagaggctctgaccagcaccgtcgtgccgcgcatcgtgaacgaccagagcttcgtgtcgctggtcatcgcgatgatcggcaccaccatcgcgccgtggatgatgttcttcaaccagagcaacgtggtggaaaagggcgtgtcggtgaaggatctgttctcgcagaaggtggacgtgatcgccggcaccatcgccgcgtgcctcgtggcctggttcatcatcgtgaccacgggatcggtgctgttcccgcaggggatcgagatcgaatcggccgccgacgcggcgcgcgcgctggcaccgttcgccgggcactacgccgaagcgctgttcgccatcggactgatcgccgcgtcgttcttggcggcctgcgtgctgccgttgaccacggcgttcgtcatctgcgaggccttcggctgggaggcgggcgtttcgttcaagtggaaagaggcgccgctgttcaagagcatcttcacgttcgtgatcgcgttctcggccgtggtggtgctggtgccgaacatcgacctcatgggcgtgatgctgaccgcccagttcgtgaacggcctggtgctgccggtgctgctggtgttcatggccatcatcgccgcggacaagcgggttatgggcgcgtaccgttcgcgcatcgtgtcgcgcgtgctgatctgggtcaccgtgggcatcgttaccgtgctcaccgccgtgctgctggtgatgcaggtgctgggcatctagacgcctcggcggcggcgcggcgaaaagagcgcagccgccgggctgcgtcgacgctacttgacggcgtcgagcaggcggcggctttcttcctgcagtcgttcggccaaaaacgtgcggctgttgtcgccgttgcgggcgcagtcgagcagcatctgcaccgtcaagctggacagataggcgtccatgctctcttcgatgagatcgtagacctgcttgatctcctgcaccatcgcgccgcccttgcgcgcatcgcgcttcgcgcgcgtggactgcttcgcatcgtcgtcgagcgcttccatgatctccagcacgttcgtgtcggccggatccttcgccaggcgatagccgccgtgcttgcccggacgggcctcgatgatgcctgcgttgcgcaacagctgcgccagctggatgaggtagtcgcgcggaatggacatgtcctccgcgatatctttcgaggagcaggtggtaccttgcgcagccaagtacaagatggcgcgcataccgtaatcggtggatgccttgagttgcactgctgtctccttactctatgtcgcccggcatgcatgatgcctggtgagcgacctacttatatatgcttggtagtcaatttctccttagaaaacaacaaacgacgcatacgcagcgtcgtttgaggtggtgcaccccttgcgactgcgagggagagctatctaaggtggtccgagtgtacccaatgcaaaacgattatagcaaggtcaatgatgggtttgcaggtcaaatcgaatggaaacggttacgtttgcgctaactccccacacctccgccattatcgtgcaacggcgccgttacgtcgatgctatactgcgg

SEQ ID NO: 8700 - DNA, 5063 bp, Unknown
  gut microbiota DNA sequence
tgttcggaatctttcgccaggtcgaaggacacttccaccggatgctcgtcggaaatggcctccgaggccctgagcgagacgggcttcgcgtcggcgcctaccacctcgtcgaggctgccggacgccacctcggtgccctcgcccggcgccgcctcgaccgccgcggggggcagcgagcgcgccacggtggcctccaccgcgacgcgatcgaagctggacacggccgtctcgagatccgcgagcgacaccgtgccgtcgccgttcgcgtcgcaggcggggcttgccgcgcccgcctctatgtcgtcgatgatggcggaggcgtccgcatcgtcgaccgtgccgtcgccgttgacatcgccgggcacgagcacgccgatgcgcgccggagcctgcgggtcggcggccaggtcgcccacgtacagctcaacggcggaggaatcgcccttgacgtcgatcttctgggagtacggcgcgatgccgggcgcgcgcacgctcagcgtgtaggaaccgtcggccagaccgtcgaatcgcgcgaccgaccaggagtcgccttcaagggaaaggttcagctgctgcgcgccgacctgcacgccgtcggagtcggcgagggccacctcgtaggcggtgccggccgtcgccgccggacggccctcggtcagcgtcacgcgcagctcgcctgccggcggggcaacggcgctgcgcgaagcgttttcagcttgcaggggcgaagccgtaggctccgttgcgttttcggttcgggtttgagatttggatccggaagcctcggcggtgccggatgcgtccggaacctcgtttccaggcccgtgatcggcttcggggctctgattcggcgccgtctcgtccgcctggacccgtccgggaggggcgggttccgcatcgctttcgacggcgtatgccgggatggtgcacaacgaagacgccaagacgacggcaagcgccgccgacaaggcacggtgggtgcgtttcatgttcgtttccgtttctcgccagccattacgtaggttgcgggaacacgcccgcaaatatgcgacgagaataataacatacggtgacggagacggtggccgaattgccggcgaaagcggggagaatatcgagaacgaggcgaaagtgggactgggagatggagctgacgactcgtttggccgcaaagcgagtcttcagccccgtccccctgcctcattcgggagggccgcaccggaatacgcgccctcccctaaaaagaacggcttgctacttgcctgctcgcaccagctcttcggccatttcgcgcagcttgaacttctgcaccttcatggacggggtcatagggaaatcgtccacgaagaacacgcgcttgggcaccttgtagcgagcgatgcgcggaatggcgaaggcgcgcacatcgtcctcggtcatatcctcgtaaccggggcgcacgcggacgaacgcgcccacgagctcgcccagcttcggatcaggaatgcccaccacctgggcgtccagcacgccgggcatggtcaagaggaagttctccacctccaaggggtacacgttctcgcctccgcggatgatcatgtccttgatgcgcccggtaacgcggtagtagccgtcctcgtccaccgtgccgaggtcgcccgaatgcaggtagccgtccgcgtcgatggcacgcgccgtctcctcgggcatcttgtagtagcccttcatcacgttgtagcccttgcagcacagctcgccaggctcaccaggtccgcagatgcggccgtcggcggggtcgatcacgcgcacgtccaccggaggatgcttgcgccccaccgtctcgcacttgtgctcgatgtcgtcgtcggcgctggtctgcgtgaacacggggctcgtctcggtgaggccgtagcagatggtgatctccttcatgtacatgcggtccatgacctcgcgcatggtctcgggcgggcaggggctgccggccatgatgcctgtgcgcaggctggacagatcgaacgtatcgaagtcggggtggttgagttcggcgatgaacatggtgggcacgccgtagacgctggtggcgcgctccttatgtacggcctgcagcacgagccccgcgtcgaactcctccacgatgatcatggtggagcggtgcgtaaggttcgccatgacgcccagcacgcaaccgaagcagtggaagaacggaacgggcagcgtcacgcggtcgtcgggtccgagcttctggccttcgccgatatagaagccgttgttcaggatgttgcggtgcgtgagcatgacgcccttcggaaagcccgtggtgccggacgtgtactgcatcatcaccacgtcgttgttgtcgaaatgggtttccgcctctgccaacgcctcttcgggcacatggcttcccagcagcacgagctccggcacgctatagcagccgcgatgcttttcgggacccatgtagatgatgttcttgaggaaggggtagttctcggactccaggtagccgcgctgctgcgtgagcgtctcgggcacgagatctcggatgatcttcagatagtccacgtcgcgataggcgtcgatgacgcacagcgccttcatgtccgactgcttcagcacgtagtcaagctcgtggctcttgtacacggggttcaccgtgaccatgaccacgccgatcttggccgtggcgtacatgaacgtcagccagtcggggatgttgcgcgcccacacgccgaggtgatcgcctgggcgcatgccgatggcgagcaagccgcgcgccaggttgtcggtgcgctcgtcgaactccttgtacgtccaacgcaacgcgcggtcgggatacacgacgaactcgtgatcgggatctacagccacctgatcgcggaagtagcggccgatggtcttctcggagtgcagcgggtagtctggatcgcccgggacgggggcggtgatggcttcggtcgtcatgttccctcccctagatcggcgtgtacacgacggccaggaacttcgccttctggccgtcatgggcacgcacctgatgaggcacgatggagtcgtagtagatgctctcgccgggatgcagcacgtacagctccttgccgtactcgatctcgatgcagccctccatgccgtagagccactcctctccttcgtgccccaccagctcgtgatcggcttcgccggagggatccaccgtgatgacgaacggatccatgtgacgcgaagggcgcccggctgcaaggctgaagtagctcaagtcgccgcccgaagtcgtttcgaggctcttcgtgcgctcgacctcctccatctgatcgcggtcgatgtacgcggggcccagattctcgtcgtcgtccatgagcgtgccaagacgcacgcccaacgctcgggtgatcttgatgagcggcgcgagagatgccggcagctcgccgcgctccaagccctcgatgaccgagacgtcgcatccgcaacgatccgccagatcccggctcgacagatggtgggcggtccgcagggtgacgatcttctctccgagcctgttgtcatccgccatagtgcgctccccttttctctcgtcgcaacaatgcatccggataattatcccccgttcgcgtgccgtcgcaacgaaaaagcgccgaacggccatctttcgcttggtcaaacgcttgcgagaaggcttggaaacgcccggaaaactcgcgaagcgtcccgcatgcgaccgaaggcccttccatcctcgctctcacaggatggaagggcctctggaccgacccggggcgatgcctttgggcggacggaagctagttcttgaaaagctcgtgtttgagctcttcctcgtccttgatggacagcgaggtttgcagcacgtcgccgccgaacggtcggatggcgtcgatgaacttgtcggtggtcatctcgtcgaccaccatgaacacggcggcgctgtcgtcggtgctcagcaggttgcgcacgcgatcctggaagtccttgtccacgccgtgcttgacgatggcgcccgtcagcgcgccgatgcccgcgcccagcgccgcgccgacgatgggcacgaagaacagcaggccgaacagcacgccccagaacagaccccacaccgcggaggttcccaccttggagccgggcgtcaccacgtcgtacttgccgtcggcgcgccgcgccacgactgcgacggactgcaggctgacgatgaggttcttgtcgagatcgaggatcttctggtaggcggacttcgcttccgcttcgctcgggtaaccgagcacgatgagcgtactcatatgatggagctcctttcgatgcgttcgaatacggctccactctaagcctccgcaagcccctacggcgagaagtgttgccgttcgccatcggttcgataccgtcgcgtaagccggccgctggccgcatgggaaggcatgaggccgagacgcgcttgcacggcggcatgaaaacggccccgacgatctttcgatcatcggggtcgcgaacatcttgcaaacgattccgtcaggacgtgcggttcctacccgaaccggtactccacgcccatcgtgggccgggggttctcccacttcttgacgatggtgccctcgcaggcgatgcggcaggtgccgcactccaggcagcccgcgtagtcgaaggacttcttgccgtcctcgtcgatcttgtagagcgccgccgggcacacgcgcacgagcttcaggaactcctcgatgtcggggtcgtccacgagctcgatgtgcgcgctctcctcgtccacctcgtacttgtcgagcgccaggtactcgtcgacgttgaccgtgatctccttgacctcgctcacagcgacttcaccgccttccgaacctcgccggccagcttgaacaggccgcgctgcttgactatgggcatcatgcgcttcatcagcggcttctggggcttcccgtccacgctgaacatggcgttgaagacgtcgcgcgccatggccgggtactcggtgaacatgcggtcccagccctccatgacgtgcggccacttggagaaggtgcgcaggtcctggatgacgaaggagccctccatcgcctccttgtaggagg

SEQ ID NO: 8701 - DNA, 264 bp, Unknown
  gut microbiota DNA sequence
gaaaaagccaagtagaaaaagcttagagtcgcaggatcttctgtcatcctggcgatctattccgcttggtagctaccgatgacgaagcggttcttgccggcggctttcgcacggtagagagctttgtcggcttggcgataggcgctctggtacgaggcgattttaccgtgcagttctacgccgccgatgctgagcgtcacttcgtgttcggtgccgtactggtcggtgaacgtcacgccgcgttttacgatgccggcgcaagcg

SEQ ID NO: 8702 - DNA, 1640 bp, Unknown
  gut microbiota DNA sequence
cgggcgcgtcgcggccgtagcccgcctcgaggccggccgcgtcgagcgcgggggcctcgtcggcggcgcgcgcgcccgacgcggcggagccgtcgccgcggcgcgccggcgacacgcgcgccaggtcccaggcgcgcaggcccagccgcgcgcgctcgtcctcgccgatccgcgcgaaagcggcggcgtccgcgtcgcgcacgacgcgcccgccccgcatcaccaccacccggtcggcgatgcccgcgagccaccacagccggtgctcggccacgagcacggtcttgcccgcggccttgagccgcgcgaccgcctcggccagctggagcatggcgcccacgtcgagcgacgccgtgggctcgtccagcacgaagacgtcggggcccatcgcgcacaccgaggcgatggccaccatctggcgctggccgcccgagagcgcgcggatgtcgcggtcgcgcaggtgctcgatgcccagcagggcgaaggcgccgtccacgcgccggtgcatctcggcgcgcgagagcccgaggttctcgcagccgaacgccacctccgaggtggtgtccaggttgaagaactggctgcgggggttctggaacaccgagcccacgcgccggcacagcgcgtccatctcccacgaccccgcgtccttgccggcgatgcgcaccgaccccgcgagctccccgtcgtaggagacggggatcagcccgttcgccaggcgcgtgagcgtggtcttgccgcagccggagccgccggtgagcaccacgcactgccctgcgggcacgctcagggacacgtcggcgagggcgggctcgcgggcgccggcgtaggtgaagcccgcccggtcgaacgaaagcgccgcgtcggcctgcgcgctcacgcgatcacccccagcttgatgagcgccacgcacgcgaccacggcgccgaacagggcggcgaacagggcgtccgccggcccgaagcgcagctcgtagtaggacgtgcgcgccgccgcggagtcgatgccgcgcacgatggccgcgttcgacagctcgtcggccacgatggccagccggctcatcacgggcaccatgaggttctccgccgtcagcgccggatgccgcagcaccgtcgcgggcgacagcgccatgccgcgcaccttcatggcctcggccaccgacgagaactccttgcccatcgtggggaagaacctgagcgccacgcacagcgccaccacgccgccgcgcggcacgtgcgcgcgctgcagcgccgaggccatctcgcccacgcgcgtggtggcgatcatgttcgacgcgaacatccccacgcagaacacgcggcggaacacgacgatcatcgcggcgaacgacgcggtcacctcgttcggaaaggcggcgacggccatgctggccccgaagacggccgcgtaggccgccagccagcgcagcgccgccgacgcgcggccgcaccagatcatcgtcgcggcgcacagcgccacggccgccacctcggtccacggcttcgtcggcgcgaacgcgatgaggttcagcatgagcaggacggcgagcgacgtgcgcgggtcgagccggcggcgcgcgcccgcccgccgcgcgctcgccgccgcgcaggccggggctgccgaggctgccggggcgcccg

SEQ ID NO: 8703 - DNA, 39904 bp, Unknown
  gut microbiota DNA sequence
gcggagcgcaggacgccgtagctgacgctgcccagcatgccgcgcagcacgccgaggccgcgcgagcccatgacgatgaggtcgcagccgtgctccttcgcgaagtcgttgatgccgtcgacgggcgacggcgcgttgacggcggcgatgtccacgtcgttgggcatgccgtcgagcagccctccgatggcatgcttcatgtcgtccttctcgcggtcgagcgccgcctcgacgagcttcttgtacaggtcgggctggatgaccagcggcggcgcgctctcgtacgggttcgcgtcgagacctagcgcaggcgggatgtcggagacgaacacgaccccgatgacgtgcagcttgatggcgggatcctcctccgccaggcccttggccagggtcaatgcatgcaatgcgtggtcggatttgtcgaacggcacgaggatgttggtgaacttcatggtatacctcctgatcgtcgctgatcggatggataaagtatagcacgcggcgcgcagcgcggcgaagcggcaaggttctggcgacggaccgtcaccatcgtccctctcgcgaaacgcaaccgaaacaccggcgagtataatggtggttcgagagagaaaggatcgtccgatgaccgtgacccccgagcaagacttcgtcctgaaaaccatcaagagccgcgacgtccatttcgtgcgcttctggttcaccgacgtgctggggcgcatgaagtcgttcgcggtcatcccgagcgagctggaggacgccttcgccgacggcatgggcttcgacggcagctgcatcgagggcttctgccgcacgcaggagtccgacatgctggcgttccccgatgcctccacgttccaggtgctgccctggcggccggagtccaacgcggtggcgcgcatgttctgcggcctgcgcacgcccgacggcacgccgttcgagggcgacccgcgtcaggtgctggcccgcacggtggagaaggcgcaggagatggggtatgcgttcaacgtcggccccgagctggagttctactacttcaaggacgccgagggcaccgaggtgctcgaccgcggcggctacttcgatctgaccagcctcgactacgcttccgacctgcggcgcgacaccgtgctcacgctggagaagatgggcatccccgtggaatactcacatcatgagaacggcccgtcgcagcacgagattgacctgcgcttcaccgacgcgctgtccatggccgacgcggtgatgacgtacaagctggtcgtcaaggagatcgccatgaagcacggcgtgtacgcgtcgttcatgcccaaacccatggcgggcgagccgggcagcggcatgcacgtgcaccagagcctttacgacctcgacggcaacaacgccttctacgatccggacgatccccagggctaccgtctgtcgaaagtggccaaacgctacctggcgggcctgctcaagtacgcgcccgagttctgcgccatcacgaaccagcacgtgaactcgtacaagcgcctcatcgccggcggcgaggcgcctatctacctgtcgtgggctcgctcgaaccgctccacgctcgtgcgcgtgccgggctaccgacctgcgagcgagggcgcgtgccgcctcgagctgcgcagccccgaccccagcgcgaacccctaccttgccttcgccgtcatgctggcggcgggcctcgcgggcatcgaagaggagctggagctgcaggagcccaacgaggaccaggatctgttcatgctgtcgcgccaggatctgcgccaacagggcatcgccacgcttcccgagagcctgggcgaggcggtggagctgttcgcggaatccgagctgatgcgcgccacgctgggcgaccacatccattcgtaccttgtggccgcgaagcgcgccgagtggaacgactaccaggggtacgtgtcgcagtgggagcgcgaccgctatctcgcggtgctgtgacgtgcgaaaggagggggcatgcagcgcaagcaggtgatattcgtcgccgacagcctcgacaacgcgcataagttccagcaggtgctgtcgagcctggacgtggacgtggcagcgggatcctccgcccagttcaagaagctgctcgggcgccatcccgcatgcgatctcgtcgtatacgaggcgcgtggcggcgcctcggaggacgtggccggcatcgaggcgctgctgctcgaggacggaacggcatcgctcctggtcatcgtgggggagggccagctcgcgcgctttcgtctgcctgtgcaggtgaagagcgacttcgtgatgcgaaacgcctcgcccgaggagtgcgcggcgcgcatccgccagctgctgtggcccggcaacgaggccgccacgtccgactgtcttgttgtggagaacatgacggtgaacctggcaacctaccaggtcaccgtggccggcgagccgctcgacctcacctacctcgagtacgcgctgctggccttcctcgtcacgcacccctcgcgcacgtactcgcgagacgcgctgctgcgccgcgtgtggggcttcgactactacggcggctcgcgaacggtggacgtccacgtccgccgcatccgcgcgaagctgggccccgaactggcccagcacctggaaaccgtccgcggcgtcggctacctctggagcgcataggtcgagcagtccgccacccgcccaaacctcccaacaagaacctcctccaccaaggtagcatgagagcgttgccgcctcgcaggtcgtccccgccaggcgcagccgccgcgcgtacgatgctttcgaggagatgccggcagctcaggggcttcgcgcggtgcccaccaagcgagtttccccttcggggacttgctccgctccgcttcgcggcgccgcacccatcgagccaaacagcccagtgggctgtttgcgcgagcaggactgtcgagcgactgggcattgtgcgaagccccggagcggacaacgtcacatgcgctatactaatcccccgaaaacaccacccgacggaggacagcccatgccgaagaagatcgccgtcatcgacggcaactcgcttatgcaccgcgcctaccatgccgtgccccaaaccatgaacgcccccgacgggcgccccaccaacgccgtgttcggcttcatcgccatgctcctcaagttcatcgacatcgcaagccccgacgcgctcatctgcgcgttcgatgcgggccgccccgcgtttcgcatggaagcgctcgagcagtacaagtcccagcgccctcccatggacgacgacctcaaggtgcagttccccatcatcgaggagctgttggaggccatgaacgtgcccgtggtgcgcatcaagggctgggagggcgacgacgtgctgggcaccatcgccgcgcgcgacgaggagctgggctacgagacgctgctggtgacgggcgacaaggacgcctaccagctggccaccgacatgacgcgcatcgtcaccacgaagaagggcatcaccgacgtggccatctacggcccggccgaggtgctcgagcgttacggcgtgcgccccgaccagttcatcgacttcctcggcctcaagggcgactcgtccgacaacatccccggcgtgcccggcatcggcgacaagaccgcggcgaagctgctgcagacctacggcagcctggagggcatctacgagcatgtggacgacctcaagggcaagcagaaagagaagatcgtcgacaacaaggacatggcattcttgagccgcgacgtggccaccatcgtgcgcgacctcgacttcccgctcgacctcgaagcatgctcgttcccctcgttcgattcggaaaaggtgaccgaagcattcaagggcgtgcagttcaacgcgcacctcggccgcgtgctcaagctcgtgggcaaggagctggagaagaaagcggctccgcttgcggtggagccggtggtctcggggtcagaggcgcacgcgctcgtggacgcggccgtcgcgcgcggcgagacggtgggcgtggcgttcatcgagcccgagcaggtgtcgctgttcaacgcggggctccattgcgcggtgaacacgagcgagggcacggcgctgttcgaggacgacgagggccgcgaggcgttcgcgcgcatcgtgcgcgccggctcgttcgccgccctcgatgtcaagcgcgaggtgcatcgcgtctatcccgccgacacggccgagatcgcgcttgtggaggatgccgagctcatgggcatgcgcgcgttcgacctgggactggcgggctacgtgctgaactcgtcggtgtccgagtactcctacgacgcgctgctcgacgcctactgcggcggcgtgctgcccgaggccaaggacgaggccggcagtgcggccgcgcaagccgcggcggcccgcatgctggtgaagccgctcaccgacgcgctcgggcgcgacgagagcaagcgcgcctacttcgacatcgatctgccgctcgtggcggtgctcgccatcgtcgagcgaacgggcgccgcggtggattgcgaccgcctggccgagctgggggcgacgacgcaggccgagctcgacgagctgcgcgcccgcatcgtggagatggcgggggaggagttcaacctcgacagccccaagcagctcgggcacatcctgttcgaggtgctgggcctgcgcacgctcaagaagaaccagcgcggctactccaccgacgccgccgtgctcaaagagctgtcgaacgaccacgagatgccggcgctcgtcctgcgctaccgcgagctggcgaagatcaaatccacctacatcgacgccctgccgcgcatgcgcgccgacgacgggcgcgtgcacacgtgcttcaacgagacggtgaccacgacgggccgtctgtcgtcgtcggagccgaacctgcagaacatccccgtgcgcaccgagttcggccgtcagatccgcgagtgcttcgtgccgctggagaagggccacaagttcctgtcggccgactattcgcagatcgagctgcgcctgctcgcgcacctgtcgaacgacgagcacctcgtggccgcattctgctccggcgccgatttccacgccgccacggccagccgcgtgttcggcctgcccgtggaggacgttagccctgagctgcgcagccgcgcgaaggccgtgaacttcggcatcgtgtacggccagcaggcgttcggcctgtcacagagcctgggcatcccgttcggcgaggccaaggagatgatcgagcgctacttcgaggcctaccccggcgtgcgcgcctacctcgaccgcaccatcgccgaagcgaaggagaagggctatgccgagacgatgttcggccgcaagcgccatatccccgagctcaaggccgcgaacgccacgcagcgcggcttcggcgagcgcacggccatgaaccaccccatgcagggcagcgcggccgacatcatcaagctggccatgaccgaggtgcagcgccgcatcatggagcgcggcttcgaagcgaagctgctgttgcaggtgcacgacgagctggacttcagcgtgccggaaggcgagatcgaggagctgtcggccatcgtgaaagacgtgatggagcacatcgtggatctgcgcgtgcctctcgacgtcgacgtctcctatgccgataactgggcggaagcgcactgaggttacgtcgactcggcggccgacgctcagaagccgcatcattgctcgctgattttgctggacttgtgatgtgtaaaaaaatcacaccacgccgccgcgtgtggctagagtatctgctatcatataaacgttgtgctctgtggaggcacagcgtaggaagagtgcgatgatacgcgtggatcgtgcataagatcacattgacttgctacggtcacgctggtaagctatcgccttgcgtttattcatatcaaggagacactcatgtacgcaattgtaaaaacgggcggcaagcagtacaaggtcgcacccggcgacaagctgaacatcgagaagcttgacgccgccgtgggcgacaaggtcgagctggaagccatctgcgtcgtcgacggcgccaaggtggaagccgaccccgcgaaagcggccgcaacgaaggtcaccgccatcatcctcgagcagttcaagggtgagaagcagctggtcttcaagttcaagaagcgcaagaactacaagaagctgcgcggccatcgccagcagctcacgcgcgtccagatcgagtccgtcggctcggccaaggctgagaagccggccgtcaagaaggctgcgaagaaggacgatgccgagaagaagccggctcctgctaaggccgccgacaagcccgcgtccgaagacgccgagtaagcataaggagggaataccatggcacacaagaaaggtctcggttccagccgtaacggccgcgattcccgcgcacagcgtctcggcgtgaagatgttcgccggccaggctgtgaagacgggcaacgtcatcgtccgccagcgcggcacgcacatccatccgggcgagaacgtcggtcgcggcaaggacgacaccctgttcgccctgtgcgacggcaagctggagttcacgaagggcgccaagcacaaggtgcacgtgcgtcgcgaggcgtaaggttccgcctgcccacgactgcgtgacgttatctgttttcgcatgccccctgctcgtcagggggcatttttcatatacaatccgagttgtcgtgttcaagcgagcaacccgttgcgcccctcgaggcgcggatcgaaatagaggtaccacccgtgttcatcgataaagtacgcatccatgtcaaaggcggcaacggcggtgccggctgcatgtcatttcgccgcgaggctcatgtgccgaagggcggtccggacggcggcgatggcggtcacggcggcaacgttgtggtcgaggccgatgccagcctgtcctcgctcatcgaataccgcttcaaacaccatttcaaagccgagcgcggcacgcacggcaagggctcgcgcatgcacggagccaccggcgaggaccttgtgctcaaggtgccgatgggcacggtcgtccacgagtatttcgaagaatcgaaggaagtgggcgagctcatcgccgacctcacgcacgacggcgaacgcgtcaccgtggccgagggcggcatgggcggccgcggcaacatccacttcgtgacgccgacccgacgcgcgcccgcgttcgccgagctgggcgagccgtcgcaggagcgctggatcgagctggagatgaagctcatggccgacgcggccctcgtgggcatgccgtcggcgggcaagtcgtcgctcatcgctaagatgagcgcggcgcggccgaagatcgccgactacccgttcaccacgctcgtgccgaacctcggcgtggcgcgttcgggggactacagcttcgtcgtggccgacatccccggcctcatcgagggcgcgcacgaagggcgcggtctgggacacgagttcctgcgccacatcgagcgcacggcgctcatcgtgcacgtggtggacctgacgggcgactacgagggacgcgatccgctggaggattacgatatcatcaaccgcgagctggcgctgtacgccgacgagctggcggcgcgcccgcgcatcgtggtggcgaacaagatcgacgtgcccggcgcggaggaggtcgccgaccggctggccgagcgcgtgcgcgaggactcgatcgcggcagcgggcggcgacgagttcgccccgagccccgtcgatccgaagctctaccgcatcagcgcgctcacgggcgagggcgtcgacggcctcaaggccgccatcgcgaccaaggtgcacgagctgcgcgaggagctgcgcgcgctttcggaggccgacgtgcagtacgagcacgtgtgggagcacaagcgcgaggaacgcgacaagcagttcaaggtcgtgccgctcggcggcggggtgttccgcgtcgagggcccgcaggtggagcgcatggtggtgcagaccgactgggagaacgaagaagccatcgcgtttttgcagcaccgcctcaagcgcctcggcgtggagaaggcgcttgagaaggcgggcgccgtggacggcgacgagatccgcattgtcggccgagcgttcgaattcgagtcggttcgcacggcggaggatctgttcaaggagctcgacctgtgatgaagccggctggatgcgcgcatgccgccgatcatggcaagcgcctcgtgataaaaatcgggtcgtccacgctcaccacgtcggagagcaagatcgactacgcctacctcgcggaggtgaccgaccaggtcgcgcgcgtgcgcgccgccggttggcgccccatcgtcgtcacctcggccgctatcgcctgcggcctcgagcgcttaagcatcgagaagcgcccgcacgacatgcccagcctgcaggcggccgcctcggtggggcagagcgcgctttccacggcgtacgccgaggcgttcgcgcgccacggcatcgtgacgtccacggtgctgctgacgcgccgcgacacggccgaccgccgggcgtacctgcacgcgcgcgacacgttcgaccgcctgctggagctgggggtggtgcccatcgtgaacgagaacgacaccatctcggtcgagcagatccgcttcggcgacaacgatacgctggcagcgctcgtggcatgcctcgtggaagccgacctcatggtcatcctctcggacatcgaggggctctacgatgccaacccgcatcaccatcccgacgcgaacctcatcggccgcgttgaggccattggccccgagatcatggccgtggcgggcgaagccggcaccacggtgggctcgggcggcatgatcacgaagatcaaggccgcgcgcgtgctcatggtggccggcatcccgctcgtggtgtgcgacggtcatcgtgcggaggccatcgtggacgcggcggcgggcgaggacgtgggcacactgttcgtggctgcgaagaagccgcacgagatcacgcccaagaagctgtggatcgcgctcggcgatgccgcgcgcggcgcgctcgctgtggacgacggcgcgaaggcggcgctcatcgagcgcggcagctcgcttctgtcggtgggcgtgcgctcggtggaagggcgcttcgaggcgaacgacatcgtcgacatcaaggatgcgacggggcatctgttcgcgcgcggcaaggtggcgttcgctagcgacgaggcggcgttggccatcgggcgcacccgcgcggagctgcaggcgaaccgcctgctggcaagcttggccgacaagccgctcgtccatcgcgacgagttggtcgtcttcgaataggggggaaccatggaacgggaaacggtgcgggaccaggtgcggcgcatcgccgaggaggcgcgcgcggcgagcggggcgctcgcgcagacgagcgcagacgagcgcaacggcgcgctggcctccatggcggcggcgttgcgctcgcatgcggccgccatcgtcgaggcgaacggctgcgacatggacgcggcgcgcaaggccggcacgaaagaaggcctcctcgaccgcctcatgctcgacgaggaccgcgtcgaagccatggcggccgcgctcgaggacctcgtcgctcttcccgacccgttgggggcggtgcagcaaaagcgcacgttggaaagcggcatcgagcttcagcgcgtgagcgtgcctctgggggtggtggccgtcgtgtacgaggcgcgcccgaacgtgacggccgatgcggccggcatctgcctgaagtcgggcaacgcggcggtgctgcgcggcggcagcatggcggcggcctcgaacgaggtgatcgcacgcgtgctgcacgaggcggcggtggaggcgggcatgccccgcggctgcatcggcgccgtcacattggccgaccgcgcggcggccgacgagctcatgcagctgcacggcgtggtggacgtgctcataccgcgcggcggagcgggcctcatccgccactgcgtggagacgtcgaaggtgccggtcatcgagacgggcacgggcaactgccacgtgtacgtgcacgagagcgccgactacgataaggcgcgcgccatcatcgtgaacgcgaaatgccgccgcctcggcgtgtgcaacgccgccgagacgctgctcgtggacgaggccgccgccgagggcttcctgcccgcggcgctcgccgagctggccgcgcgcggcgtgacgctgcacgccgacgagcgcgcggccgccgttgccgcggccggcggcacgcccacggtgcccgccggggaagccgactgggagaccgagtaccttgcggccgacctggccgtgcgcgtggtcggcggcgtcgacgaggccatcggccacgtgaaccgctacggcaccaagcattccgaggcgatcgtcgccgaggacgaggccgctgtcgaggcgttcctcgcgcgcgtcgacgcggccgccgtgtacgcgaacgcgtcgacggcgttcaccgacggagccgagttcggtctgggcgccgagatcggcatctcgacgcagaagctgcatgcgcgcggcccgttcgcgctcgatgcgctcacctcgtacaagtacgtgctgcgcggatccgggcaggtgcgcgcgtagtgggacgcatctgcgatcatttcgacgacctgggacgggacggcggacgcgcgcgcctcggcatcatgggcggcacgttcgaccccatccatatcgggcacctcgcgtgcgccgagcaagcgcgcgaggcctacgacctcgacggcgtggtgttcgtgcccgccggcaaccccgtgttcaagaaggaccgccccgtcacgccggctgccgagcgtctggagatgtgccgcatcgccacgcgcagcaacccggcgttcgacgtgagcgccatcgagatcgagcgcggcggcgacacctacaccgtggacacgctacgccagctgcgcgcgcattaccccgataacgtggagctgcgcttcattacgggcgccgacgccgtgtaccatatcgtgcagtggcgcgagagcgcggccatcgccgacctcgcccgcctcatcgcggtcacgcgccccggctacgcgctgtcggaggagcggcgggcgttcatcgccgagcacggcaacttcgccatcgactacctcgaggtgacggcgctggccatctcgtccagcgacctgcgccgacgcgtagcggcggggaagtcgatccgttatttgacgatgcagggcgtgctcgactatattcaagagcgaggcctgtaccgagccgatccccatcacgaaggaggcgtgcgatgagcgaggacgtgctttcggatgcgttcttcgatgcgcgcgagcgcgatctgaagaaacggttgaagcccaagcggttcgagcatgcgcgaggcgtgtcgaagacggccgcgtcgttggccgagacgtacggcgtcgacgtgcgcaaggcgcgcttggccggcctgctgcacgattgggacaaggagtacggcgacgacgagatccgcgagcgcgctcgcgcgctgggcgtggacgtggacccgtacgtgctggacacgatgccgcgtctgctgcacggccccacggccgcggccgagctcgtgcgcgcgtaccccgacctgtccgccgacgtggtccaggccatcgctcggcacacggccgcggcggtgggcatgagcgatctggacatgatcatatacatcgccgacgccatcgagcccagccgcgacttcgacggcctcgacgagctgcgcgccgccatcggcgcggtgccgctcgaagagctcttcatgatgacgttcaaccatatcctgctgacgctcgtggagcgccggcgacgcctgcacccggcaaccgtcgaggtgtggaaccattacgtggcccgatcgcgcgacgcgaaggccgagaaaggaacagcgtgagcacaacgacgaccgagaagacttcgagggaatgcgccctcatcgcggcctgcgcggccgacgagaagaaggccaccgacatcatggtgcaggaggtgcgcgacctcatcggcgtgacggactacttcgtcatcgccacggcctccaacaaccgtcaggtggaggccatcatcgacgagatcgaggatgcggtgcgcacgaaggcgcagatgaagcccctgcatcgcgagggcacgcaggacggcacgtggtcgcttctggactacggcagcttcgtcgtgcacgtgttccagcccgagacgcgcgagtactatcgcctcgaggcgctgtggaacgacgcgcccgtcatcgacctcgccgccgaagcgggccttaccgacatcgagtactccgaccgcatcgccaagatgctgggcaaggagtagctttcgcgcatcgccgctttgatgcgtcctgcgccgccgccttccgcggcggcgtttttttgtttcgtcaaccttccgcttgctcggcgcgcaaggctttcggcagcgggacggcggcgccgagggccgcggcggccagcatgacgacgatgcccttcacggggaagcagaggaacagcagcagcacggtcatgagcggctggcgcatgacgcctcccacgagcgcggccgtgcttgcgcacaggcagaacacggggtcggcgccggtgagcatggccatgccgtagccgatggagatgccggcgaagatgacggggaagaagtggccgccgcgccagccgaagcggatgcacaaaggcgtgacgagcaccttgccgaagcccgtggccaaaagcgcgaacgccgtcatggtgccccagacctctcccagctgctcggcctgcgtctcgccggcgaacatcgtgaacggcaaggcgatgcccatgagcgccagcacgagcccggcgatgagcgcctttgccacgggacgctctcccatgcgttcggacaggcgctcgaacaggccgtcgaacgcacagaacagccaaccgcctgccgcgcccaccagcgcgagcggcacgagccacagaagctcggtcgctcccacgtggatgtcggtgaaacgaggcagcgacagcccgccgccgaacagcgcgcccagtccgaggaaagccgccagcgcaccagcgatggcgcacaggtacacgacgatcttcgacgacttcggcagcgtgatggctgcctgcgcgcccttcgcctcgtcgccgttgtcgtacagcggcgcggcgaacccgaagaggggcgcggtgaagatggccgacagcgccgccatggtgccgaccgacgtgagctgctggaagtccgagccgaagcgcttcatgcgatcgcccacccacgtgcagatgcccgcgaccgccccggtgaggcccgcctcggggcctaccgacccgccgaagaacaggggcagcagcgcggaaacggacatgacgcccagcttgtcgtagtcgtagcggccgtcgcgcttcaccttcgccatcacctggttcaagtcttcgggatacgatccgaacttcttggcgaacagcccgatgaccaggccgcccaccaggcaggcggccaaggggaagtacgggccgaaatgcgcgggcagccggtcccagatgaacgtgatgcccaggttcatggcgaacaagagcagccacacgaacgcgccggcgatggcgccggtcacgatcaccgaagcgacgaacagcgttcggttggcaagctgagcccctttcatgtcgccctcttcctaacaggagacgaggtcgcgggcggcgggcaacccgtaggcgccctcggcctgctcgaccgcacgcacgacggctccctgcatggcctcggtggcaaggatggcgaacgtatcgtagtcggcttccacctcgccggatgcgaacgtgaacacggtgtcgccgtcgccggaagtgtgcacgggcttgatggcgcgcgcgtaggcgtcgtggacggtcgaagaagccttcgtcgcctgcgccttcgtcagacgcgcgttcgtcagcacgacgccgatggtggtgttggcgcacggacctgcggcggggtcggcttcctgctccgcatgcgcggccgcctgctgcgcgaggacgccgaacgcctcgaggggatccatgacgcgcccttctccgtcgcggcagccggcgatccaggcaccgtccgcgctgcgcacgttgccgagcgcgttcaccgccacgacggcgcacgccgtgagctcgcccaggcgcaatccgcagattccgagcccggctttcatggcgcgctcgccgccgaggagcttgcccaccgatgcgccgcatccggcgcccacgttgccttcggccagcggttccgccgcctcgcgctcgaacgccgccctcgcagcagcgcgccccatggcggcatcgggatgggcgttctgcccgaccagcagatcgaacaggcaggctcccacgacgatgggcacgcgggcgctctccacgggaaagccgatgccgcgtgcggccagctcgtccatgacgccggtcgcggcggccagcccgaaggcgctgccgcccgacaggaccacgccgtgcacggcctggatcatgttctcgggcttgagcagatcggtctctcgcgtggcaggaccgccgccgcgcacgtcgacgccgcaggtggccccgtcaggagctatgaagacggtgcagccggtgcccgcgcgggcgtcctcggcgtgcgcgcagaggaatgcgggcaaatcggcgagcgttgcgggttgcagcatggcgttctccctagcgacggggcggatcgattcgcttattgtacaccgcggatcgcagcggagtcgaaccgatgtcggcttgcgcgaagctggtttcggtagtaaggtcgattcctctctcgctacgcactcccctcgaagaagggagtggatcatatgccggaattcctcaagaaggcgtcgtgccgaggccgtcgtccgctgcatctcgtcccgcggcgccagatacctcgccccaacctcatcgctaagcttttgcgcgagcggcacgtcgcgcggttcatcgtcgcgcccgacggcttcggcaagacgggtcttgcgatggaatacgccgatacggtgttctcgttcgagcatgtggtctggctcgacggccgcagcccgtgcttcttgcgcgatctcgatcgcggcgtcatagcgcgcacgcttttggagggcgacccgcagccgttcctcgtcgtcatagacgatgtgccgctgctcgatcctgagcgcgccgagctgttatccgacgagctcgatctgctgctcgaccgcgattgcgaggtgatggtggcctgcatgccatcgcgcgacgccttcgcgcgtcatcgcgaccgcatcaagctcacggccgtcgacctgctgctcaccgatgaggaagtggacctgctccgcacaccgggggagcgctcgagcgatcccgcatcgacgattgcgcccgcgtgccgcgtcgccacgttcgtatgggggtcggacgaggagcgcgcggggttcttgtccgccgtgcttggcgaggagcttccggccgacctgctgctgccgctgttcgtgatggcgtcgctggggaaggggacgttcgaggacgtggcggcgttcggcccgttcggccccgatcaggacgcgctgctcgccgagcagtacccctatctcggcatcgactcccgcagcggccggttcgaggccgcgccgttcgaggtcgaagccctcgccggcgcgtttgcgcgcaagctgggcgcgttggccgatcggtcgttgttctccgatgcgagcacgctcgtcgtgcgcttgggcgatgcgctcgcgatgcgcggcgagcacgaacgggcctgcgatttcgtacgtttgctggcgtcgcgcgccccgcgagcgtcctggctcgcgaaacacggggcggcgttgctcgaagccgcttgcctcgtgccggcctgcgaggtgcaccgctccttatcgggcgagacggcggggaagggcgctctgctcagcgcccacgaggcggttcgccgcgcgcttttgggggatcgacaagcggcctgcgttgccgcgcgcaaggcggtgcgcgacaggaacgcgccgtcctccgtgcagatgacgggcgcgttggtgctcgcgcaatgcgcggaagcggacgagcggcggcgcgccgacaagctcgtcgtgtcgctgctcgcggccgcgggcatcgcggatgcggccgaagcgccccgtgaggccgtctgcgcgaaggcgccggaagatcggggatggctcgctgcgggatgcgtgcatgcgcagctgcggaaagcgggctgccccgaggctgctcgggtatggctcgattggcacgacgacggcgcgcgcgggagcttcctcaagcagtcggccgccgaagtgctgcgtcaagctgcggcgtcgggagccggcgaggcccgatcgatcgagctcgaccgtttgggcgccttcgtgcgcaaggaggtgtcccaggcgagccgcggcacgctcgggctcggcgacgctttggccggcatcgcctacgagcgggcctgcgagcgcggggcgatcgccgttcccgcgctcgacgcgcaggcggccctcgccgtcaggcgcatagagatgcgcctgttctcccagcgcaacgcgtgcgagcggctggagctggagcgattggaacgcgagcgcgtattcgtcgccacccatcccgacgcataccgtgaagagggtcgcgcgactcgcctgccgaagctgccgtcctccgtgcccgcgctcaccgtcaacctgttcgggggcctcgacgtgctgatgggggatgagcgggtggatccgtcgctgttcagccgccagaaggtcaagacgctgctcgccctgctcgtgctgcacaacggccgcgagttctcgcgcgacaagctggtgggtcttctgtggcccgacagcgagatcatgcacgggcgcaagaacttctacggcatttgggcgatgctgcgccgcgcgctgacgctgccgtcgggcgagtgcccctatctcattcgccagcagcaggggttgagacttgacgcgagcctgctgacgagcgatgtggcgcagctcgaggacgtgtgccgcacgctgctgttcgagcggcccggatacggcggctgggcgcaggtgtactcgcaggtcaacgatcgcttctcggacgatcttctgcccagcgagaacggcaacgacgccctcgcgtcgctgcgcgtggactaccgcaaccgcctcgtggacgcgctggtggccgcctcgacgcgcctcgtcgctgcaggcgaggcccaggagggactctggttcgcccgtgcggcgctccagcgcgaccgctcgcgcgaagacgcctacatctgcctcatgcaggcccagctggccgcggggcagcgtacggccgctctcgagacctactttgcctgccgccgcttcctcaccgacgagctgggtatcgacccctccctcgaaacgatgcgcctctatcgcagcatcatcgaaaccgaaaccgatttcgagtgacggacggggaacggaataacgagcatagattgcgaaaaaggtatattatggatataattactatatctttaggttcaatactgacgttcgaatgcgatccgaagaagagcgtggcgaaccttcagaagcacggtatcgacttcgatgaggcgcagcagctttgggagggcatctacatcaaggctcctgcgcggaaaagaggagagcgacgatatgcggtggtcggcgtcctgcgcggagtccattggacggcgatcgcgaccgataggggcgaccgcattcgaatcatctcggtaaggcgagcgacggaacaagagaggattcgctatgagcaacgaaaagataacctctgagaatctcgaagagctgttcgacgaaggctgcgacgtgaccgggttcttcgatttcgattccgcggtggtggtcgaggggagaaccgagacgaagcgcgtcaacgtcgacatgcccatctggatggtggaggcgctcgacaaggaagcgaagcgcgtgggcatcgggcggcaggccgtgatcaagatgtggctcgccgaacgtctcgacgaggaggcgcgccgcagcgcttgagccggcgggctgcggcatgcgcggcggatcggcggcgcttgcgttcccgatccgccgctgcgcctcgcgccgcgccttgcgtgccctgtgaatttcctttgaggtcaggcgcgatatgctagagtagcaagtgctgtattcaagtgaacaggcgcgcatcgccgcgctgcaagccacgaaaaggatggcgcatacatggcaggatttctttccaagctcctgacgcttggcgagggcaagcagctcaagcactacgaagccaccgcggccaagatcaacggcctcgaatccgagatgcaggcgcgctctgaccaggagcttcgcgcgctcaccgccgcgttccgcgaacgcgcccagaacggagaggatctcaagagccttctgcccgaagcgttcgccgccgtgcgcgaggcctcggtgcgcacgctggggctgcgtcacttcgacgtgcagctcatcggcggcatggctttgaacgacggccagatcgccgagatgaagaccggcgagggcaagacgctcgtctccacgctggccggctacctgaacgccctgcccggcaacaacgtgcacgtggtcaccgtcaacgactacctggcccgtcgcgacagcgagtggatggggcaggtgtaccgcttcctcggcatggaggtgggcctcatccagaacggcatgcgccccgacaagaagatacccgcctacaaggcggatgtcacttacggcacgaacagcgagttcggcttcgactacctgcgcgacaacatggtgacgcgcgcagaggcccgcgtgcagcgcggccaccacttcgccatcgtcgacgaggtggactccatcctcatcgacgaagcccgcacgccgctcatcatctcgggagcgggcacgcaggcggccgagacgtacaataagttcgcgcgcgtcatggtcggcctcgtgcccgaggccgacttcgacatggacgaggcgaagaagaccatcaacgccaccgagagcggcctggagaagatcgaggccatgctcggcatcgacgacatctacgccgacccgtccggccagctgccgaaccacttgcagcaggcgctcaaggcccagttcctgttccaccgcgacgtggactacgtcgtggtgaacggcgaggtgaagatcgtcgacgagttcaccggccgcatcatggaaggccgccgctactccgagggcctgcaccaggcgctcgaggcgaaagagcgcgtgctcgtgcgcgaggagaaccagacgctggccaccatcacgctgcagaactacttccgcctgtacgagaagctctccggcatgaccggcacggccatgaccgaggacgccgagttccgcgagatctacaagctgccggtcgtggccatcccgccgaaccgcccagtcgcccgaaaggacgaggacgacctcatctaccgcacggtggaggcgaagttcaacgccgtggccgacgacgtggccgagcgcaacaaggcgggccagccctgcctcatcggcaccgtgtccatcgagagctccgagaagttgtcgcgcctgctggacaagcgcggcatcaagcacgagaccttgaacgcgaagaaccacgagcgcgaggcacacatcatcgcgcaggcgggccgcgtgggcgccgtgaccatcgccacgaacatggccggccgaggcaccgacatcctgttgggcggcaaccccgacgtgctggccgacgacgtgctgcgcgagcgcgggctcgatccggacgccgaacctttgaccgaggacggcgagccgaacccggcccttcccaccgacgagcagcgcgcggacgcgctggccgaggcgaagcgcgtgtgcgccgaggagcacgaccaggtcatcgcggccggcggcctcaccgtcatcggcaccgagcgccacgagtcgcgccgtatcgacaatcagctgcgcggccgtgccggccgtcagggcgaccccggcgtgacgcagttctacctgtcgctcgaagacgacctcatgcgcctgttcggcggcaaccgcatggactccatcgcccgcatgatggagaagaccgacatgcccgaggacatgcccatccaggccggcatggtgtcgaaggccatcgaaggcgcccagcgccaggtggagagcatgcacttcgccgcccgtaagaacgtcctcgagtacgacgacgtcatgaacctgcagcgcgtggccatctacagtgagcgcaacgccatcctcgacggcaaagacatggacgagcgcatccccgagatcatcggcgacgcggtggaagccgtcgtcgcggagaactgcccggccaaggtgcccagcgacgactgggatgccaaggccgtggagctgtgggccgccaacatgacgggtcgcgacgacttcagcgtggccgaggtcgaccacgacgacgaccccgccgtgctgtccgaagcgttggaagcgtacttggaggacgtgttcgcgagcaagtccgagcagctgggcgagccggtgatgaagatgctggagggccaggtcatgctgcgcatgatcgacacgcgctggatggcgcacctccaggagatggattatctcaaggccggtatcggcctgcgcgcgttcggccagcgcgacccgctggtggagtacaagaacgaggcgtacaacgcgttccagaacctgactgcgggcatgtacgaggattatctgcgcacgctgttgcggctccaggtggctgtgaagcaggagcagccggcgttggcggaggacaagagcccgctcgacggaaaggtgagctactcgtctcccgagcaggctctcgagcagacgggcgtgggcgccgcgcgcaagcaggcggccgcgtcgccgagcggcgccccggcggctccgcccaagcccgcggcggcgaagccccagacgtacacgaaggacaaggacgatcccttcgccaacgtcgggcgcaacgagccgtgcccctgcggctcgggcctcaagtacaagaagtgtcacggacgagatcaataaggaatcatggctgatagagacgaaaaagacttggagaaggtagcccagcgcgtcgaggcggcgcacggctacctgcacatcgacgagcgcgcggcggagctggcgaagctcgacgaggagatcgcgcagcccggcttctgggacgacgcctcgcatgcccagagcgtgtcgaagcaggccagcgtgctgcgcgacaccatcgcagagtacgacgaggccgcagcgttgttggacgatgcgcgcgccgcgttcgacttggcatcggaggacgagctgttcgccgaggaggcctccgcggctctcgacaagctcgacgagctgctggacgcgctcgagatcagctcgtggttctcggagcgcttcgacggcggcgacgccatcctgacggtgaaccccggctccggcggcctcgaggcccaggactggaccgacatgctctaccgcatgtacgtgcgctacgccgagaagaaggactggaaggtcaccgtgctcgacgtggtcccgggcgagggcatcgggctggacaaggccaccatccagatcgaaggacgcaacgccttcggcatgctgaaaagcgagagcggcgtgcaccgcctcgtgcgcatcagccccaccgacgacaagaagcgccgtcacaccacgttcgcgggcgtggaggtgctgccggtgctgcccgacgacatcgaggtggatctcaaccccgccgacgtgcgcgtggacgtgtaccgctccagcggccccggcggccagtgcgtcaacaccaccgactcggccgtgcgccttacgcacatccccacgaacatcgtggtgacgtgccagaacgagaagtcccagctgcagaacaaggaagcggcgttccgcgtgctcaaggcgaagctctacgagcgcgaggagcagaagcgccaagaggagctggccgagctgcgcggcgaccgcatggacaacaccttcggcagccagatccgcaactacgtgctgtacccctaccagatggtgaaggacgtgcgcagcggcatcgagaccggcaacgtcgacgccgtgctggatggggagttggatgagttcgtaataggctaccaccgttggcgagtatctcaatgacggttgctggatgacggccggctgtggcggcgcatcttgcctttcagaacccgcgcggcttcgcacacggcccatcaggccgcttagctcagccgcgcggaaccttcaaggcaacctgcaccaccacagccaacctgttgtttacattgttgagttctagaaaggaacaggcatgaccgaacttgaacggcgggcgaacgagatgcgctccgacatcgtgcgcatgatcgcggaggcgggcagcgggcatcccggcgggtcgctgtcgtgcgccgacatccttgcggcgctgtacttcggcggagtgctcgatcatgatcccgagcgacccgattgggaagagcgcgaccgcttcatcctggcgaagggccatgcggctccggctttgtacgccgtgctcgcccaggcgggctacttcccccgcgaggagctgctcacgctgcgcaagctgggcacgcgactgcagggccatcccgactcgaacctcgtgccgggcgtcgaggtgtccacgggctcgctcggccagggcctgtccgtcgcggcgggcgccgcggccggtctcaagctggacggcaagccgcagagcgtgttcgccttgctcggcgacggcgaatgccaggaagggcaggtatgggaggctgccatgttcgcggcgcatcgcaacctcgacaacctggtggccgtcgtggaccgcaactgcctgcagatcgacggcgacacggccgatgtgtgcgatccgggcgatctcgcagcgaagttccaggccttcggctgggatgcgcgcgaagtggacggccacgacatggccgcgctcgtggaggcgctcgctgcggcgaaggccgatcgcgcgggcaagccccatgcgctgatcgcgcgcacggtgaagggcaagggcgtgtcgttcatggagaaccaggcgggttggcacggcaaggcgccgaacgccgagcagatggagaccgcgctggccgagctggcggcgccgagcggagaggagtccagccgtggttaagctggcgaacgaagagcagtcccaggtcaaacgtgccacgcgcgccgcatacggcgccacgttggccgagctggcgaacgagggtttgcctgtggtggccgtggacgccgatctgacgggctccaccaccacgaagaagctggccgacgcgggcttcgccgaccgtctgttcaactgcggcatcgccgagcagaacatggtggatgtggccgccggcctcgcggccaccggccatatcgcctacaccggctcgttcgccgtgttcggaacgggtcgcgcctacgaccagatccgcaacaccgtgtgctacagcaacctcgacgtgaagatcgcccccacgcacgccggcatctccgtcggccccgacggcggcagccatcagatgctcgaggacgtttcgctcatgcgcgggcttccgaacatgcgcgtgctcgtgccggcggactacgccgcggctcgcgcggccatccgactggctgctgaaacgccaggccctgtgtacgtgcgcatgggccgcgcatcggtgccggccgtctatgccgacggggtggagctggagctcgggcgcgcctacgtgctgcgcgaaggctcggacgccaccatcgtcgcctgcggcgtcgaggtggagcaggcgctgaaggctgcccagatgctggccgccgagggcgtcgaggtcgaggtcatcgacgcgttcagcgtgaagcccctcgacgaggacaccgttctcgcgtcggtggggaagacggggcgcgccgtggtcgccgaggagcacagcgtgtacggcggcctcgggtcggccgtggccgagacgctcgcgcgctcgaatccggctccggtcgagttcgtgggcatgcgcgaccagttcggcaaatcgggcgaattcgaggagctgctcgactacttcgacctgggttccagggcgattgtcgaagctgtgaagaaggtcatggcccgatagtgcttctgctagaatcaacccgtctcagtaccctactattcgaacggagcactctgtgacgaacgacataagccaaggggttcccgcgcgtcccgcacgacgcggcggcgcccacgcggcgcccgcgcggcagaccacgtcgcagctttctgcgtcgctgccggtgctggaagtcgatgacattccccagcaaacaggcacgccggtcatcacgttcgaccatgtgacgaaggtgtacccggctcagccgaacaagccggcgcttaacgatatatccctgcagatctacgcgggcgagttcatcttcctcgtgggccattccggctccggcaagtccacgttcatccgcatgctcatccgagaggtgaagccctcgcagggccacatctacgtcgcggacgaggacctgaccaccatgcgcaactggcgcgtgccctacctgcgccgcaacatcggctgcgtgttccaggacttcaagctgctgccgaacaagaccgtgttcgagaacgtcgcgttcgcgctcgaggtaatcggcaagagccgccacgtcatcaagacgcaggtacccgaggtgctgcgcctcgtcggtctgcaggacaagctcaacaagcgccccgaccagctgtccggcggcgaacagcagcgcgtgtccatcgcgcgcgccatcgtgaaccgcccgccgcttctggtgtgtgacgagcctaccggcaacctcgacccgcagacgtcgcgcggcatcatggatctgctcgagcgcatcaaccgcacgggcaccacggtgctcgtggcgacgcacgaccgcgagatggtggacaacatgcgccgacgcgtcatcgcgctcgaccgcggacacctcacccgcgaccaggatcggggggtgtacggtttcgatgtctagtttcttctactttatcaaggagtccctcaagggcttcacgcgcaacctgtcgacggcgctgggatccatcgtgaccatcttcctgtcgctgctgatcatcggcgtgttcctcgtcggcggcttcgtcgtcgagaagctcgtctcgtcggtggagagcgaggtgtccatcacggcctacgtgtccgacgatgcctccgatgccgatatccagtcggtcgagaacttcatcgaggggctcgacggcgtggcatcggtgggcttcacgaacaaggagcaggcgctcgagaagttccgctcctccacgacgtccgacatcatcgacacgctggacgggcagaacccgctgccgcgctcgatcgacgtcgagctgtccgacccgcagctggtcgagcaggtggccgatgcgatccgcggcaactccacctaccagcagatcatcgggtacgacacgcccgagcagtcgctcaagtacggccagcagacggtcgaccgcctgttcacgctcacgaactacgtgcgctacatcggcatcgcgctggtggctctgctcatcttcatcgccatggtgttcatcaacaacaccatccgcctggccattctggcgcgccgcaaggaaatcgccatcatgcgcctcgtgggcgcgtcgaacggcttcatccgcgggcccttcctcatggaaggcgcgctgcacgccatcatcggctcgcttttggcggtgggctgccttgagcttctgcgcacgctcgcgctgccgaagctgcagagcgcgctcatgttcctcaacttcgacctgagcctgaacaccttcctgttcatctacgccgtgctggtgggcgcgggcctgctcatcggcctgctgggttcggcgttcgccatgcgccgctacctcaaggtgtaaccggttgaacggccatggccaagcatactgacacttcgcatgttgcggcgtccgcccgtcgagcgcgggcgcgcaacatgcgccttatcaaggcctgcatcgtcgtcatcgtcgtgagcgtcgctttcgtcgcgggctttactgcgcgaggcgacgcttctcttctcgagtcgctcggcttcacgtcgcttgtggtggacgtcgaccgcaatccgggatccaccacgtcgggcgacacctacgactccctcggggcgcgcgtggaggaggtcgagggcatcatcgacaacgacagcttggactcctacgatttgaacatggccacgaccaacgtgctgaacgcgctttcggacacgacggaagacgcgtatctgcgctattacgatcctgcgcgctacgccgcgctcatgcaggacagcgccgagcagtcggcgggcatcggcgtgctgttctccgaatacaaagggcgcgcttacgcggccgacgtgttcgagggttcggccgcccagatggccgacgtgcgcagcggcgatttcgtggtggccatcgacggcgaccgcggacacgagtggaccacgaacgaggtgacctccgcgctcaagcgcgaggagggcgagaacgtcgtcatcacgtggcggcgcgccagctcgctcgacgacgagggcggcgaggagttcactacgacgctcgtgtgctcgaactacgcggtgaagaacgtggagaccgagctttccgacacggtgggctacatcaagctcaagcagatcacgcagaacgcggcagacctcgtgaagaacgcggtcgccgacctcgagtcgcaaggcgccacatcgttcgtgctcgatatccgcgacaaccccggcggtttcctcacgcagtcggtggatatcgccagcctgttcgtgaagagcggcaccattgtgaagatccagacgaaggccgaggagacgtccaagaccacctcgcgcccctacgtgacggagaagccgctggtcttgctcgtgaacggcaagacctccgcttccgccgaggtgctggccgcgtcgctcaaggacaaccagcgcgccacgctcgtgggatccacgacgttgggcaagggctcggtgcaggtgacgcgcgatttgagtttcggcggagcgctgcgctacaccgccgcgttctacaagagcccgctcggacacgacatcgaaggcgtgggcgtcacccccgacgtgatggtgggtttggcggagggcgaggataaccagaaggctctcgcgctcgaaaccgcccagtccctcgtgaagggctagccgtggggcggacgcgttcccatacgcgccggcatccccgtagcaacccgcggggcgtgctgagcgtgcgcggaggcggcttcggcttcgtgcagacggcggagggcgagttcttcgttccggaatccaagatggcgggtgcgttcgacggcgatctcgtggaagtggcgccgctgcccgtgcagagcggccgcaagaagcagccacatgaacgcaaagcagatcttcgcgcaggagagaagccggcggcgcgcgtgctgcgggtcgtcgaccgtgcgcacgacacgctcgtggggcgctacgaggtggccgaacctttcggcgtggtcgtgcccgaagatgcgaacatcccctatgacatattcaccatgcgtgccgaccggcccgacatcgaagacggatcgctcgtgcgcgtgcgcatcacgacgtttccttcgcgcaacacggcggccaccggcgttatcgaggaggtgctcgggctcgccgacgacgagcacgcggccgtagacgtggtgatcgcccgtcacaagctggagacggtgttctccgaaggggcgctttcggaggcgcgaagcgcggtgctcgacgaggacggcgcgttggcgtcggggtaccgcgacttgagggagcgtttcacgttcaccatcgatccggccgatgcgagggacttcgacgatgcggtcagcctggagcccgtttcgacctgcggggttggaaccggcatccgcgtggtggacgagcgcgggctcggggtggcgcgttggcggttgggcgtgcatatcgccgacgtggcgcactacgtgccgtggaattcctcgctcgacctcgatgcgcgcaggcgggcgaccagcgtgtacctcgtcgaccgtgtgattcccatgctgcccgacgagttgtcgggcgatctgtgctcgctcaagcccgacgaagtgcgtcgtacgatgacggccgacctctacctcgacgatcgggcgcggctcgtggcctacgatctgtatccggcgctcatccgctcgcatgcgcgcctgtcgtacgaggaagcgcaggcgctgctggaccgttgtcatcctgagcggagcgccgaaggcgcggagtcgaaggatctcgtgcggcgcgacggcgcttgcgcgccgggcgacgggctttccgaccgcctcgccgcgctgtcgcgcctggcgaagcagcggttcgcctcccgcgagagggcgggcggcctcgacttcgactcggtcgaggcgcgcgtggttctcgatgaggaggggagtccgacgggtatcgacttgcgcgtcaagaccgacgcgacctcgctcatcgaagaggccatgatccttgcgaacgagaccgtcgccaagcacctgcgcgatgcgaagttccccagcctgtaccgcgtccacgagcagccttcggccgacagcttggcggcgctcgtgcccgtgttccaggacttcgcgtggttccgcgacatcgatcaagccgacttcatcgcgggcgatgcgcacgtcgtccagcgcgtgctggaggcgagcgcggagcgtcccgagggcgagctcgtgtcgacgctcctgctgcggtcgatgaagcgggcggtgtaccgtcccgactgcgctgcgcactacggcctggccagcggggcctacacgcatttcacgtctcccatcaggcgctatcccgaccttgtggtgcatcgtatgctcaaggccctcatcggcggacgcccggagaagttcgaccaggaaaaatcggcgctgccatggatcgccgagcactcctccgacatggagcgcatagccgagaaggctgcgcgcgagtcgcaggaggtcaagctcatcgagtatctcgagcggttcgtggggcagacgttctcggcgacggtgtcgggggtggcgacgtacggcgcgtacgtgcgcctcgacaacacggccgaaggtttgatcccgtgcaagaaccttggttcggagtacttcgcgctcgatcctgtgcagcatcgtctgaccgggcaggacacgggcgcgtcgtatcgcctggcgcagcggctcgccgtcgtgctcgtctctgccgatccgcgtgctcggcgcttggactttcgtcctgcccgcgacgagcgatagggcgccggcatgggacgggtgcgcgaggtcttcgcggccatgggtcgcgagatgcgcaagaacaaagggtcgtttgcggtatacgtggtgctgcgccttatcgtgttggcatgcgcggtcggctcgctcgtcttcgacaactacgaggcgttcttcctgtgcctgctcacgctcgtgctgtttctcgtccccacgttcatagaggtgaacttcagcatctccatccccgagacgctcgaggtggtcatcgcgctgttcatcttcgcggccgagatactgggggagctgctccacttctacaccatcttcccgttctgggatgcgctgctgcatacgttcaacgggtttctggctgccgctataggccttgccctcgtgtccatccttaaccgctcggatcgcatcgcgttctctctgtcgccgttcttctgcgtggtggtggcgttctgcttttccatgaccatcggcgtgctgtgggagttcttcgagttcggcatggacgagatgttcggactcgacatgcagaaggacacggtgatgaccggcatctccagcacgctgctcgatccgtcgggctcgcagcatccgcaacgtatagaccgtatcgaatccgtcgaggtcaacgggcaggagctaggtgtcggcggatatctggacatcgggctgcgcgataccatgggagacctgttcgtgaacttcgtcggagcgcttgcgttctcggtcatcgggtaccgctacctcaaaagcaagggcgagggccggttcgtgcgacgtttcgtgcccacccccgcaccgcccgacgatgtcgaaactttgactatctaactacatacggtatgatgcggccgatgtgaaacgacggacgaggaggcggggatcgtggacggttcgaacgagacggcgagcgcttctcaaagacggcgcgaggaaatcgacgacctgctgtccggcacgttcaactccatcctgcgcatcgaggagcagtcgctggacaaccgcctgacgcacgggctcaccataaccgaggtccacaccatcgtggctatcggcctgcacgagcgcaatccgatgaacgtgatagccgcgcgcctgaacgtgaccttggctacgctgaccacggcggtgaacaaactggcgaacaagggcttcgtggaacgtacgcgcgccgaggacgatcgtcgcaaggtgctggtctcgctcaccaagaaaggcaggcaggtgctgcgcgcgcacaacctgttccaccatcagatgatcgacgaggcgttggccgatcttaccgaggaggaggagcgcgtgttcgccggggcgctcaagaaggtgaagggcttcttcgacgcgcaggcgtgaggagtttgcgacctgcggggcaggcgtgagcggtcacgcagctctcctcgcacacgcagcgattgctcgtcgcactgcatgaccgctcacgccctgttcgcggttgggctattcggctggatgcgtcgagggggcctgtcttgggtgcgcctggaacggggcggtgggaataagaggaagggcgcagaaatcgtggagggcgcatggcggctcttgcaatcggagtcccgtcaccataccattacttccggagaaatactttgactatcaaactaaattgcatgaagcgaaaggaacgcaccatggctaccatcgacaccgtgaaggaagtcctcgtcgagaacctcgatctcgaggccgagaagatcaccgaggaggccacgctggagtcgctcggcatcgactcgctggacatggtcgagctcatctgcgacctcgaggagaagtgcgacgtcgagttcggcgagcccgagggaatcgagacggtgggtcagctggtcgcgcacatcgattcgctgtaacgcgcgttgatcgggccccgtacggggcccgcttgtatgacggggcccgaacggggccgtgggttcgaggaagagagagcatgagcatgaagacgcgggtaacggaactgctgggcatcgaggtgcccgtcgtgcagggcgcgatggcgcgcatcgcggatgcgagcctggccggcgcggtgagcgaggccggcggcctcggcatcatcgcatgcggcggcgcgccgctcgactgggtcgaggagcaggtgcgcatcgcccgctcgattaccgacaagcccatcggcgcgaacgtcatgctcatggatccgaacgcgggcgagacggccgagcttctggcgaagctgcgtgttgacgtcatcacgacgggcgcgggttctcccgcgaactacatgcagctgtggaaggacgccggcatcaaggtggtgcccgtggtggcctccagcgcgctggccgcgcgcatggagcgcctcggagccgacgccgtggtggccgagggcaccgaggccggcggccatatcggcgagctgaccacgatggcgctcatccccgcagtatgcgacgccgtgtccatccccgtgatcgccgcaggcggcatcgccgacgggcgcggcatggccgccgccttcgcgctgggcgccgagggcgtgcaggcgggcacccgcttcctcacggtggacgagtgcaccatcgccgacgcgtacaaagagcgcgtgatcgccgccaaggacgccgacaccatcgtcacaggccgcggcagcgggcatcccgtgcgctgcctcaagaacaagttcgcccgtaccgtgcgcaagctcgaaggcgacgtcgccgccaacggcgacgagctggaggctatgtacgtgggttccctgcgccgcgccgtggagggcgacgtggacaacggcaccatgatggcgggccagtcggccgcgctcgtgcacgagcgcgccacggcggccgaggctatcgctcggatgatcgaagaagccgaggctctgggcggtctcgacttggaagcactggctgcgctgagcgcccggcgcgggcgtgcgatctagggggctcttgatggatgaggaaaaagggcttcggaagcctgtgggtgtggagcgaggaggggcggcggcgtccaccaagcgagttccgcagcgaagcgaggactgtttgagcgactggacgttgccgcccctcctcgcgcgcgcgcccgtcttcatgttctcggggcaaggggcgcagaagcccggcatgggcgcggacctgctcgatattcccgaggtgaagggaacgttttcctgcgcgtccgacgtgctggggtacgacgtggccgatctcgtgctcaatgccgatcccgacgagctcaacgacacgcgcaacgcccagccggcgctgtgcgtgctgtcggtgggcatcgcccgcgcgctcatggcgcgcggcgtgcagcctgcggcggtgctgggcttctcgctggggcaggtgagcgcgctggccgtgtcgggcatgctgagcgacgaggcgacgttcgcgctggtgaaagcgcgctccgagcttatggccgaggccgctgcggcgcaccccggcgtcatgagcgcgctgctgaaggtcgacgaggacggcgtggctgcgctctgcgagcagtgcgccgagggcgaggtgctggtgcccgcgaacttcaactgcccggggcagatcgtcatcgccggtgcgcccgcggccgtcgagcgcgccgaggcggcatgggccgaggcggggaagcgctcgtcgcgtttggccacctcgggcgcgttccatagcccgctcatggccgatgcggcggcggggctcgcagcttacttggataacgtcgagttctcggaggcgcgcatcccgctcgtctgcaacgtcactgccgcgccgctgtccgccgccgacgcgcgcgagaacctcgtgcgccacctcacgagccccgtgcgcttcgatgcgagcgtggctgcgttgaccgccgcaggggcggacatgttcgtcgaagtcggcttcggcggcgttctggcgaacctcgtgaaacgcatcgacaagaccgcgacgcgcgcctgcgtgcaggaccgcgcgagcttcgacggctgtctggccgtcgcttccgcaaccgattccgaataggagcttctactcccatgaccaacgaaaccgaaactccgcgtcgaagcgcggtcgtcaccggctcgaaccgcggcatcggccgcgcggtggccgaggagctggcgcgcgcgggcttcgacgtgtgcgtgaactgctcgagcgagcgcgggctggacgaggcgcgggcgttcgccgcagccctggaggccgactgcggcgtgcgcgccatcgcggtggccgccaacgtggcggacgccgccgaggccgctgcgctcgtcgacgccgcccaggaagcgttcggccgcgtggacgtgctggtgaacaacgccggcatcacgcgcgacgggctgctggcgcgcatgaaggacgaggacttcgacgcggtgatcgacgtgaacctcaagggcacgttcaactgctgcaaggccgcggcgcagcgcatgatgaagcagcgctacggacgcatcgtcaacatgtcgagcgtcgtgggcgtggcgggcaacgcgggccaggcgaactatgcggcctcgaaggccggcgtcatcgggctcacgaagtccatcgcccgcgagctggcggcccgcaacgtcacggccaacgccgtggccccgggcttcatcgccaccgacatgactgacgcgctgtccgagaagcagcgcgaggccatcgtggggcgcatcgcgtccaagcgcctcggggagcccgaggacgtggcgaagctcgtgcgcttcttggccagcgaggacgcgggctacatcaccggacaggttgtctgcatcgacggaggtatgtcgctatgagcgagaacattgcgaacgcggcgagcacgcgccgccccgacggcacgcaccgcgtggtcatcaccggcatgggcgcggtgtcgccggccggcgtgggcgtgcaggcgctgtgggacgcggtcatgggccgcgcctgctgcatcggcccggtcacgcgcttcgacacggccgactacgacgtgcacatcgccgccgaggtgcgcgatttcgacgctgccgagcacggcatcacgaagaaggaggcgcgccggttcgagcgcttcgtgcagtacgccatcgtcgcttccgacgaggcgctggcgcagtcgggcctgaacctcgaggccgaggacaccgcgcgcatcgcgtgcgtgttcggcaccggcatcggcggcatcgacgagctgcaaagcggcttcttcaccttggccgagaagggtccgaagcgcgtgagcccgctgttcatccccacgatgatcggcaacatcgcggcgggcaacctctccatccgctacgggctgcgcggcgaatgcctgaacgtggtcaccgcctgcgccaccggcgcgcactccatcggcgcggccgtgcgcgacatccgccacggctacatcgacgcggcgctggccggcggctcggaagagtccgtgtcgcccatctgcctggccgggttctcgaacctcggcgcgctgtcgaaggccgaggatccgacgcaggcctccctgccgttcgacgtgcgccgcgcgggattcgtggcgggcgagggcgcgggcgcggtggtgttggagtcgctggagcatgcgctcgagcgcggcgccacggtgctggccgagatcacgggcttcggctccacgggcgacgcctaccatatgacggctcccgagcccagcggcgagggcgtggcgcgcgcgatgcgccaggcgctggaggagggcggcttcacgccggacgacctggggcatctgaacgcccacggcaccggcacgccggcgaacgacgccaccgagtccaaggcgctgctggcgctgtgcggcgaagaggcgggaagccggatcccggtgacgtcggtgaagggcacgacgggccacacgctgggcgccgcgggcgctatcgaggccatcgtcacggctttgtccgtgatgaacgactgcgtgccgcccacggccggcttcgccgaggccgatccggaatgcccggtcagcgtcgtcatcgaggcgaagacgggctatcctcagaaggtggcgctgtcgaactcgctcggattcggcggccataacgcgagcttggccgtttcgccgtatcgcgcataggttgggaggagccgaaccatggacatcgaatacccttgcggcaaggacgtcgtcgaggcggtgctgccgcatcgcgacccgttctgctgggtgagccgcatcgtcgcgtgtgagccgggcgtggaggtgacggccgagctcgacgtcgacccggagctggcgctgttcgcggggcatttcccggggcatcccgttttgccgggcgtcatcatcatggaggcgctcgcgcaggcggcatcgttctgcatcctcgtcgagcgcggagccgagggctccatcgggttcctcaccggcatcgacggcgcgaagttccgccgccaggtggagccgggcgagacgctcacgctgaaagggcgcatcgtgaagtcctcgtcgcgtctgtgcgtcgcagaggtggaggcgagcgtcgacggcgcggtgtgcgcgtcggcgacgcagaagtacgtgctggcgaaagcggaagcttaaaagagcgagaggccgttcgatgaagagtgccaagcagaactacatcaccatcggatccgacggaacggtgctgccccagggcaagccgcgcaaggcggccgagcctatcggcgaatcggccgacgtggcctaccgccttgcgcgcatggccgaggaggccgccgcttcgcttcccatagcgccgaacgcgcacgatgctgccgacgcggccgactacaccgccgtgccgcgggcgttggccaccgccgccccgcgcacgccgaaaggcgccggggggatcgatgcgggctccaagcccgtcgcgctcgtcatggcgcgcccgaaaaccgcgaagcgcctgatgcaggccgtgggcgatgcgggtttcgccgcctgcgcagtgtacacgcaggatcatcggggcgatagccacatcaagctcgcccaaagcgcggtgagcctgggcgagaagtactccgacgcgctgttctgcaacggccatgccgtgctgacggccatcgactcctgcggggcttcggtggttctgctgtgcgacgaggcgctgccgctggccgaggtggacagctttctcgctcgcacggcggctcgcggcgtgcgggtgttccgcccgctcagcaatgacgcgccgcttctgggctgggtgctgtgcactaccgacaaacccgctatcgacggcgattcgtggcgcgcgtgcccgcactgcggcctcaagttcgacggccccagcctggccgccggccattacgtgtgccccgcttgcggcggttacctgcgcatgtcgtcgagcgagcgcatcgacgacttgctggatgcggacagcttcgtggaatggaaccgcacggttcccgaaaccgacccgctcgagttccccggctacctgggcaagctcgaggctcagcgcgagaagacgggtctggaggagggcgtgcgcaccggcgtcggacgtatcgcgggcttgcgcgtggccatcggcatcatggagtcgcagttcttcatgggctcgatgggctcggtcgtgggcgagaaggtggcgcggctcgtggagcgcgcgaccgacgagcgtctgcccgtggtggtgttcaccgcgtcgggcggcgcgcgcatgcaggagggtctcgtgtcactcatgcagatggcgaaggtgtcgtgcgcgctggagcgccatgctgcggcgaagctcccctacatctcggtgctcaccgatcccacgacgggcggcgtgaccgcgtcgttcgccatgcagggcgacgtgatcctggccgagccgcgcgcgctgatcggcttcgcgggccagcgcgtcatcaaggacaccatcaagcaggagctgcccgaaggcttccagacggccgagttcgcgctggatcacgggctgatcgacgccatcgtggagcgcggcgagctgcgcagcgtgctggctcacttgctggcgttgcaccttgccacggcatcggctgtgcgcggcgagcaggagcacgagccgggcgatcgcgatatcctcgtcagctacgaggcggtgcgcgagaacctggccagcggcaccgatacgtacaacacggtgacgtacggcgatttgaccgtgggcggcggcctgcctttcgccggaggggtggactcggcgcgcgccaagctgcgcgggcgcatggcggccgtcaccgagcgcttcgaccgccgcggctcctccatgcgcaagcgtttggagaaggcgctcagcacgggcggtttcgatgcggaggccggcgtgtctttggaggacgcgtccgctgcggcgcgcgaggccactgcgcccacgtcgaaccgcgcatgggagagcgttcagttggcgcgcaacgtgcatcgtcccacggcgctcgcctacatcgactcgttcgtggacgggttcatcgagctgcacggcgatcgcatgttcggcgacgacggcgccgtggtgtgcggcctcggctggatcgggggtcgcgcggtgacggtgatcgcgcaagagaaaggacgcgacctcaaagagcgcatcgcgcgcaacttcggctgcccgcagccggagggctaccgcaaatctttgcgcctcatgcgtcaggccgagaagttcggccgccccgtggtgtgcctcgtggacacgcaaggcgcgttctgcggcatggaggccgaggagcgcgggcagggcaacgccatcgccgacaacctgctggcgctcgcgggcctgcgcgtgcccgtggtgagcgtgctgttgggcgagggcggctcgggcggcgcgctggcgctggcgctggccgatcgcgtggccatgcaggagcacgcggtgtactcggtgctgtcgccggagggcttcgcgtccatcctgtggaaggatcgcacgcgcgccgccgaggcggccgccgtcatgaagatgagcgcggccgaagcctgcgagatgggtatcgtggacgccgtgctgtccgaaggagcgggccctgcgcatgagaaccccgagcaggcggccgagggcgtgcgctcctacgtgtgcgccacgcttgacgagctatgcgcaacgccgaccgacgagctgctgcgagcccgctacgaacgcttcggcaagttctaagccgcgcctcatccgtccagcaaatcgagcagctcctcctggctcaggctcgccagcgacacgccgccggcgccgatcacctggtcggcgaggtcggtcttcgcatcctgcaaatgcaggatgcgctcttcgacggtgtccttcgcgatgaccttgtggacgctcaccacctgcgtctggccgatgcggtgcgcgcggtcggtggcctggttctgcgcggcggcgttccaccaggggtcggcgtgcaccaccaccgacgcgccggtgaggttgagtccggtgccgcccgctttgagcgatacgaggaacacgggcgtgtcgtcgtcgttgaacgcgttcaccagatcgagccggcgcttcttcggcgtggctcccgtgatggtgaagtagggcacgccgcgcgcgtccagcacttcggcgatcagcgaaaggaagcttgtgaactgggagaacacaagcgtcttctcgccggcgtccatggccgattccacgatctctgcgatggcgtccagctttgccgcgtgcccggcgtagttctcgtacagaaggcgcgggtcgcagcacagctggcgaagcttcgtcagctcggcgagcacctccactttgcgctcgtggaaccgcttgttgttgcggttgttcttctgcagggtcagcgcgtcgcgcagctgctgctcgtgggcggcgtacaggcgctgctgctcggcctccatggggacgtacaccaccgattccagcttgtcgggcaagtcttgcagcacgtcggccttcaagcggcgcagcatgaacggtgccacgagggagcgcagacggcgggcggcgtcctcgtcgcctccggtgatgtccagctcgaagtgctcgcggaagcgcatgtaggatcccagaagcccgggcatgaggaagtcgaagatgctccacagctcgctcagacggttctccatcggcgttccggtcagcgcgaagcggtggcgcgcccgcacgcgcttcgcggcgcgcgccgtcttggtggcgtggttcttcacgtactgcgcctcgtcgagcgcgcagcagtagaattcgcgccgggcgaagtcctccgcgtcgatgcgcagcaggtcgtaggaggtgatcagcacgtcgcagcagcgcccgtcgcgggcaagctcgctttcgcgtgcgtctctctcgcacgcctcggcgcggatgcgcatgcgctcgcgcttggcgcccaccgcggcgcgcacgtctagggtcggggcgaagcgctcgaactcggccatccagttgtacacgagggaggcggggcacacgatgaggctgggcccaacggcgcgcgcctcgctctggcgtgccagcagaaacgcgatgagctgcaccgacttgcccaggcccatctcgtcggccaggatgccgccgagatcgcggtcggccaacgcgctcatccagcgcagcccttccgcctggtaggggcgcagcgtggcggccagctggtcgggcaccgggcacggctcgccggccgatgcccggaagctttccaggtagcgcatgaacgagcggttgcgctctgcgccct

SEQ ID NO: 8704 - DNA, 459 bp, Unknown
  gut microbiota DNA sequence
ggccctgaccgatgagcagaaggccgaaatggcaaaggcgtccgaccagctgggcgcgctcatcgtcagcgcggacgcgtcggtggtggacgcggcgaccagcgagaaggccgcgcacgagggcaagctctccgtgtcgttctcggtcgacaagcgctacgaggggaagagcgtctggatggtccaccggaaagccgacggctcgctcgaagcgacgaaggctgcggtggaaggaggtctcgcgagcatgaccgtcgatgagctgtcgccgttcgccgtgttcgagcaaaaggcagccattcccggcgacgacgggaacgtgcccccgtccggcagccctggcggcgaagagccctccggcgacacgcaggtcgaaccgctgcccggcaaggcgctcgcctccaccggcgacagcgcggcggcacccgctgccctcgcgctggcgatagccgccgccgt

SEQ ID NO: 8705 - DNA, 1038 bp, Unknown
  gut microbiota DNA sequence
ggataaagaaactgttgaaatgttccagcagtttgcgaagaagatgattgagcaggcaggaacaaagtgataaatttgaattgtgagggaaaatacagatgaatcaaggaagaattattgtgattacaggctcaccggggacaggaaaaacaacaactgcgtcaattgtcgcaaaggaatcagatatggataaatcagtgcatatgcacaccgatgacttttttcattacttaagcaaaggcgcaataccaccacatttgccagaatccaacgagcaaaatctggttgtcattgaagcctttttagaagctgcaaagcgatatgctcgtggcggatatgatgtaattgtagatgggattgtcgggccatggtttttggagccatggaaagctcttgcccaagaagattacgaggtacactatattgtattaagagcgagtaaaaaagaaactatgaagcgagctgtggaacgctcaaaattagatagaaaaacaaatattgaattagtggaaacaatgtgggagcaattttccggtttgggagtatatgaatcaaatgtcatagacacaactacattcacaattaaagatacggtttccgcaataaaagaaagagttgcatgtgggacgtctttactatcttagacattcccatttgtcaggaagatagcaaagccagccgagccagtcaacggtcaagatgaacggcgcatttcatgcgccgccgttgacagtcccgcccgtctttgctaaagggtaatcaaggcgggaaagccctaaaatggcttcacacctatttcaataattggaggagataaaaatgagatcagaaaaggaagtttatgatattgttttgaattttgcaaaaacagacaaacgcattcgcatggttactttggaaggatctagaacaaatacaaatattccgcctgatgattttcaggattttgatattactttttttgttacggatatggacagcttcacaagtgatgataaatggctagatatatttggtgaaaggttgattctgcaaaag

SEQ ID NO: 8706 - DNA, 837 bp, Unknown
  gut microbiota DNA sequence
agcgctccgcgtctcagcacaggaacgcccatgacatccaccgacacgcgctctctcatgaacagcgcgtcggcgtacccgatcgaagagacgatatgcgaccagttcgcatgacgtccggcaacggtggaccgaaccaccagcgaatgggcgaccgagcgcgccacccggtcggcgtcggcctcgtcgaaggctccgacgacatgcacggtgatcaggcacgatacacattgctcgtcagacgctatgcaacgcgcgaggcggccgctcacctctttcaaggcctcggagaactcgcgaaacgcctgggtgccctcgcgaatgggctttcccggcttcgcgccatagccgctggcaagcaggaagcagctatcgttcgtggacgagccggcatcgacaatcaccttgttgaagcttgcggaagccgactcctcaagcgcccggtatgccagcgcaggagaaagcggcgcgtcagtggtcagcaccaacagcatctcggggcctttcgccatgccgcctacggtgaacgtgcagccccggtacgcagcatcggtgctgcggtacgaaacggcagcttccttcgggtgcgcgccggaggtcaggatggcgcgcgccgcatcgtggccgccgtcgcgcgacgcccgcctgcacgcaagaggaacaccgcgctcgaacggctcgacgggaaggtgcgaacccatgattcccgtggaagccaccagcacctcgtcctcccggcagcccagctcgtccgacgccaacctcgccgagcgccgcgccacctcgaggccgttctcgccggtcagcgcgttggcgttgcccgagttgatcagcacg

SEQ ID NO: 8707 - DNA, 4347 bp, Unknown
  gut microbiota DNA sequence
agcgagcaggaagcagctatcgttcgtggacgagccggcatcgacgatcaccttgttgaagcttgcggaagccgactcctcaagcgcccggtacgccagtgcaggagaaagcggcgcgtcggtggtcagcaccaacagcatctcggggcctttcgccatgccgcctacggtgaacgtacagccccggtacgccgcatcggtgctgcggtacgaaacggcagcttccttcgggtgcgcgccggaggtcaggatggcgcgcgccgcatcgtggccgccgtcgcgcgccgcccgcctgcacgcaagcggaacaccgcgctcgaacggctcgacgggagggcgcgagcccatgattcccgtggaagccaccagcacctcgtcttcccggcaacccagctctcccgacgcgaggcttgccgagcgccgcgccacctcgaggccgttctcgccggtcagcgcgttggcgttgcccgagttgatcagcacggcgcgcacgaagccgaacgagacgcggcgaagatggtcccgcgacacgtccacgggcgcggcgctgaacgcgttgtgcgtgaacagcgccgcgcaggggcagggtacgtcagccgacaccagcgcgcagtcgaggcggccgccaccctcgtagaagcccgcatgcacgcccgaagccgtgaagccgagggcggaagtcacgcctccttcgtcgatcgtcgcaaggctcggcatctcatgatgccgcaccgccctcggccgtcccatcttctccgctccttccgtaccctcgaacagattgcgctacgcgcgctcgaacaccacgttgccgttcaacacggtcaactgcacctgcgtctcatggatcagtttcggatcgatagcgaagatgtcgcgatcgagcacgataaagtcggccagcttgcccacctcaagcgtgcccttgcgatgctcctcgctgcaccagtaggcggcgttcttcgtcaccatctccaccgcctggtacacagagatcgcctgatcagcaccgagagtcacgtcgtcgcgaccgacggcctggcgggtgaccgcacattcgacgccgtagaagggattcactgtgcacaccggcgcatcggttccgccagccacgatgagtccggcatccatcatgtccttgatctggaacagacggttcgcgcgttccttacccaagcgcagctcgccgaagttcacgaagttctcaagccacaccggctggatggctattacacagggaatcttggccgcacgctcgatgaaagtgttggacaccaacgtggcatgaacgaagtagaagcggcgcgcgtcgcccactgcaggatcgtaggcgcgctcgaacgcagtgagcaccatatcgttcgccgcgtcgccgatagcatgaatcgaaacgtcatgaccagcgtcgtaggcggttttcaccagctcgtccaactcttcctgcgtgtagttgcactcgcctcgagtccctaccggattctcgtaatcctcgagcatgagcgcaccggccgatccgatgccgccgtcggtaagcatcttgatggcgcctagtttcaaatcatcatctccgaatcccgtcaccaaaccgcggacattgggatactcgggataccaattcagcgtaaggtggcaaggcagccccttctgacgacgcatctcggtataaagacgggcaccgaagggtccgtcctcctgattcacctcgagctgggtaagtccaagtgaagagcaatactgcaaatgctcgtgaaccgcatcgacgcattcctgcaagctcatgcggggtatgacaggatcaacatgctcgggatacaccacttcgcgtacgacgccgtccggacgaccgtcatcgaatcggcccacatgatcagccaccatcggctgaaaagacgcatcgatacccgctagcgccagtgccgcagagttcaacacatgaacatggtggcagaaactgccgatgcaaataggaatttcagaagaaacgctgtcgagctcatcacagttcggaaaacgcccctctttcaagaactcgaggtgcatgttctcggcagtaagccactgaccaggtttgatgctttcctttcgctgttcgagaaggctcaagatttctggaatgctatggcacccgcttaggttcggcgtaatacggcccatgcaatcatggaataggtgcatatgggtgtcagcgaaaccgggaagcacgcttcttccctgcaggtcaacgtactcgcacgcgtcaattgcacgcatctccttgctcgtaccggcggccacaatggttccgttatgaacggccagcgcctccactgtatcaccttcggacaccatggttcgaatgacgccgttgtaatacacgcgatcgatcttcatagctcaactcctatcctagcttcgttttcatgcgctgtcgaactggacggtgcacgcttacaacaaggtattgatgatgacgagcatgatgggaacggtaatcaagaacaggatcatggtctgcgttgtggcacgcgaagcgaactgggggttagttccatactgctgcgacaggatcacgttcaaagttccgcacggcatagccaaaagaaaaacgagaaccttcaaaacctcgtgatccacaggcaggaacatgaagataacgcacacgatagtaggaattaccagcaaacgcaggagggagacgacgtacgcccagccgtcttttatcaaatcaagcaccttcatgttggcgatctcgtgaccaataatgagcatagccagcggagtcatcatgttgccggtcatagtaaaagcggtgccgacgaaggaaggaaaacggaagggagcgacgtacaacgccagcatgaccaccgtgcagatcaagcacgggtcggttaggaccgacttcacgcttaccttgctctcgcccgacaggatcatcaaaccgtagctaaacagggcgatgttaaaagccacattaagcgagaaggcgtacatcaaacctgtaggcccgaagaattgcgtggacaagggaatcccgatgaaaccaacgtttccgaacacacacagcaacgggaaaacacggtcggcgttgtccttcaaaggaagcctctttgccaccatacgcaaaataaacaggaacacaaagtagaatacgaacgatatgaccagagtgataccgaaaccgctgagggtagaggcatcataggcgatctgtgacgaacccaagatgctgatgggtagaaccaatttcaacaacagagtggaaagaccgttcttgatgtccgacgtgagaatcttcttcttcgtgaaaaagtaaccgaacgcgagcaggatgacgatctgcaggaaaatcccccacatttccggtgtcatgaaaacctccttataaagacgatgcggaacacgaaccgcctcgcctccccgatcagggcccctcaggatcggaaacgcggattcggttcgcgtgcgcactcattctttacaaatcggcaaccgaaagcttgtatattttcacactcgccattaaaaagctgtcgaaggtcaatgaaacaaaaccgtcgagcggccggcacgaatatcgccagggacgagcgtcgtgtactttttaaattcccgatcgaaatgcgattgatcgtaataccccaaaccggtcccgatatcgagtccggtcacacccctatatcgactgtcagagagaaacctgatggcattctgagtgcgaatgatgctggcgtacgtcttcatggtgcagccaaccgcttctttgaacctcttggaaacataggtatgactgtaacccgtgcgctcgaccacgtcttccacacgcaccaccccaaccctgtccaagatgaccttcgttataaaagataccagtgagtccgactcgcagaaaagctccgagtgactgcttgcggcgaaatgagacgccgccaaccgagcgcgctcctcaaaaggcagcgagagatgaacgatatcccttagaacatcgatatccacatacgccgacgcttcgattcttcgattaaatagcgcctgtgcatcgagcttagagaaacaacatttgggtcccggcatgaacttaataccaaaacaacgctcataacaagaagaatcgcttctatggcctttgagaaggcttcctgcaacgaaacactcctcttgcgcaccgcttcccaagaattgcacgtcgacacagccgtcgggtatacccaacgtggaggaccgcgctgctggcgaaaacgttatctcgtacactttgttgatcaaggagtcgtcaacgatcaactcttgataacccagacctgcacgcgagcagaacgatctcagattcacccgtccccctttccggcgacgaagacggcaccccccccc

SEQ ID NO: 8708 - DNA, 443 bp, Unknown
  gut microbiota DNA sequence
ggttataaaagtatccaaaacgataactatagtaaccgttttgggaaagagatcgcaataccctgtcctcatgaatgagaagtacaaatcaggattcggcgaagcggtgaggatgcagcgcgcggtgtgcaacctcacgaaagaacgcctgtcccttatggtgggcatcaaccgactcacgctgaggaggatcgaatccggagacgcaaatccgaccttggatgtcatgtatcgcatatccgaagggctgggcgtcccattgagcgagctcatcgcacaagctgaggaagcggagaagagagacgggacttccagcaaaaccgactaacgcaaccggcgagtttccgcgcccctcctacggtgctcgaagaacagcgaaaactccgagtcgttttgcgcgaagctctgcaaacacggcaaattggaaaagccgaccccccccc

SEQ ID NO: 8709 - DNA, 1553 bp, Unknown
  gut microbiota DNA sequence
gcgcaacggcgagaagccgcagctgaccacgcgtcagaagcacacgcgcgagtgcttcgtcgtggccgaggagggcgccgacctggcggccatcgagaaggccatcgtcgagatgccgaactacttcgccgactacgacaccacggtgacgttcatctcgcaggaggagctgaaccgcgaccatgccggcatcccacacggcggctccgtgttccgctcgggtgtgaccggtcagaacggcgagcatacccacgtggtggagtactcgctcaagctggattcaaatcccgagttcaccggcagcgtgctggcggcctgcgcccgtgccgcgcaccgcttgagccgcgagggcgccgtcgggtgcaagacgatgttcgacatcgcccctgcctacctctccgcgaaaagtgacgagcagctgcgcgccgagatgctgtagcgattcgctcatccgatatgtcgaaggccccgtcgtttgcagcgacggggccttttcgatgccttagatcaaaacgccgttgcagtggtcgatctcgtgttggatgatctgggcggtgaagccggtgaaggttttgactcgcggcttcatggcgagatcctggtagctcaccttgatggtgcgatagcgcgtcgcggagcgcgtgcccgaaagcgacaggcagccttcttccgcctcgtaggtgccggcgcacgagatgatctcgggattcagcatggccacgtgcgagccgccgtcgtcgaagacgatgatgcgtttgagctcgccgatcatgttcgccgccatgccgacgcaggaatgacgatgcgcctccagcgtgtccagcaggtcctgcgcgatgggcaggtcggcctcggttgccggtgccgacgcgcgctgcagaaccaactcgtttctcatgatgggacgaatcatcgccaaaaacctctccacgtgacgagcctttgccgtttggtgcgacaaggctcgctttcctacactctcttggtatagtgtacgtgaacttgacagacgggaggcgcagatcgtggacgcagtcgcattcatgcgtggcaatagagcgtatttcgaggattttataacgaggagcacctatcattcgaatgccatcgaaggcagcacgctttcgtacgctgaaacgtatgcgattctctggaatgacaactcgttgcaagtgaccgctactgcacgagagttgtacgaggccatcaaccacaaatatgcgttgagccttgcgctcgaagatatgcaggcacccttgagcgagaggctcgtcaaggagatcgcgcgggctatcaacaagaacatcaatgaaatcgggggttacagaacggtttcggtgcttataatcgaattggcaaaaagaaaaccaagtttataaagagtgaggaattaaataaaaaatatgccccctgctgaaaagccaagggggttatttttttgtgttttaagagttggattacatgagccaactctttgttttttgtatcagctaattgcaccataagggtgcgctgatactcggctcaaaagagccgacagagccgtctgcaag

SEQ ID NO: 8710 - DNA, 5847 bp, Unknown
  gut microbiota DNA sequence
catttccaacgaaaacactattcgcaacatgggcgaagagaatcgataggggatcgtgctgattttctagaagatagtccagagaaaatgggcccgaaaacaaaagatacgtcattgcttccgtgtcgtatccgacgttcaagcccctcaggccaattagtacggcaggagaaagaacgacgaccgtgcgaaaaaccatgcggacaaatttgttttccagttcccccttatcctttgaattttggtaaaggcctgcgagcaaaaccgaaaagatgaatacacagagatacaataacaaagtcagcaaaacacatgcaccaatctaaagatcactgccctcaaaatggaattatgcaatggatctaacagcagaagagctgccttattttctcattctcgtgcttttcgagttctgttcgtagtcggctctgcctggcgcaaggaggagcagcgtaggcctttgagcacatatctagaatcaatctcatctcttccttcgacttcacataatcgaacccccaatattttttacaaatggacagctgctgttccgtgattgcttcttcgcagcttgaaaaggcgtctcttaccacctcttgctcgaaaagctcaccttgcgcttttgccgtatctttttcgctatgtaaaacgatgtcgtattcataccattgcttgaaggaataatggggctttcccatatagacgcagtacccaacgtgggttcctatgctgtttgacatagtgaaatcagcaagcttgattaaggttctttgccgttctagaaaatgacaatcctctctatatccgcatgtcacaacaacaaagcccgcgtcttcgaaaatagcagcatccccgtttagtatatcttggtaatacaacatcacaaggatagtctgcgcgttgatagcatttttaacacgccggatttcgtttatgaaatccttgtagtcatacgataccgttcctcctctaactgaatggctgggaatcgctaggatggtttttccaagccgatcccgaattgcctcaatgctcttgttgtccagataatctttcgaatatgcgatataaggcccaacgatgcacacaggaaccgaagatgcttttcggatctgctcaagtcgatacgggctaagcgtaaacagcgcgggcaattcgctcttgtcagtctcgctctgattcacgtattccccaaaatgaactccatgctctatgcatgctttaggcgagtcgacaactccacaataattgcgaagcaccctccccaaaccgtacagagcgttaccacggtatacttccgatgaaaaatctattctgcatttcattgcagtacgccaagacatcaagctcttgatatcgtttgcggctttttttcgcattgcgttatgagccgcaatcttaagttggtagtatcgaacaacaagcagctttctcgtcgcttcgcttcctatcagcgctcttgagagtcggttcactccatttcgcgtacgaacgagtgcgttattgattgcccttttcattttacctctgcgcgcaagaacgttttgtaagcgaatgcccttagccgattcggcaacaagcaaacaatagcgtgggggataattgaagtggtgtattcaaaggcgttgatatcccttctttttaagcacgttgttcgaaaatagaccatttttttcaagtagctagggtcaccgcgtctttgaaaaaagctcctgtcgacacccacgaaaacaagaggttcggcaatgttttgaaactttgccccggcgctaaccatgcgcatataaagatcgtaatcctcgaacaggggcatctcttgatagcctcccgattgaagaactacgcttttcttatacagcaacgtcggatggcgaaacgggcatcttctttttccgaagcgaagtatatcctcatggttgctaggcaggtcgacgagcgacacctgattgtccaacgatccctcgaattcgattacgtttgtgccgacgcagtcgatagaggggtcgttgcgcatcacggccagttcttgttcaatgcgatctgggcaagaatagtcatcggagtccattcgggctaccaattcattagagcactctccgagacccatgcgcaatgcgtaccaaagtccttggttgcttgggtagcccacgattttcatcacgttcggatgcttcaaagcataatcggcaagcagtttgtccagagctggcggcaaaccaccgtccttcactattacgatttcagaagggggaaccgtctgtccaagcatgcaatctatgcttctactcagttccgaagctttggttttttcatagatgctcatgagaaacgaatatgaaccattgtcgcacgacacttaagatctcctacttgaatgcgaagacgctattgcgaaaacgcgcatagcatctgccccgtaacaccattcgaccgtcgttcgaacaccttttccggcccgaagactgagcaatgcatcaacttttgccgctcgtccgcaacaacccatctcagcacgcgcctttgccatcgagcatcgtcacaaccgtcttcgctatcaccttgaggtccaccagaaacgacctctcctcgatgtaggcgaggtccatggccaccatgtcgtcgaaggtcgtgtcgctgcggcccctcacctgccagtagccggtgaggccgggcttgacggacaggcggcgcatggcgcgctcgtcgtactgggccacctcggaggggagcggcgggcgcgggcccacgcaggagagctggcccatgaggcagttcaggaactgcgggagctcgtctatggagtgcttgcggatgaacttgccgatcctcgtcacgcgagggtcgtccttgatcttgaacagcgggccgtcggcctcgttgagttcctggagctcggacaggcgctcgtcggcgtccttgtgcatgctcctgaacttgtacatgtcgaacgttcgcacctcgccgctcctcccgatgcgcccgacgcgcttctgggagtagatggggcagcccggggactccaggcggatggcgacgcacaggatgatcgaggggaccagcagcacggctatcgcgcacagcgagaacgcgatgtcgaacgcccgcttcacgaagcggtatcccagccgcccctccgccggcgcggggacgggcacggggccctcggcctccgacaccagctcgggcgccaggaacgccacgtcggaggcggccatcggctcggcatccccgaccctcgcgctcgactttacataaccgcgcttatcagacattgggggcgtggaaatctcctcttgctcccccgctgttgcgaagtcgtctaccagcgcgacggctccgtcggcggttacgtctattgatttgtcagggtttctttcgaacaatctctaatccgactttgacggttttcacacgaccaagaatctctatctccagatacgccaggcgcttgtggcgatcgagcttcttgatgagacccgtctggttcatcagcgggccgttgaggatcacgatctcgtccccttccatcacgccgctcgagaactcgaccacgcggtggtcaggcttggtgaacgcgttgatgaaggcgacttcttgatcgtcgagaggagtgaacacatcgttgttgccgaggagcctggtgaacttggggacgcttcgcaacgcctcacgcagctttccaggctggtctgttattacgaaaatataaccaggtagcagcacttctgaacgcattttccatacgccctggatgcgctttttgacttcgtactgggggatgaaggattcttggatgagctcttcgtcgacaagcttgttgatcaggtcaagcacgtgcttttcctggccgccgaccgtttgcacgacgtaccacaatgccatcacctccctggcaagacgaaataaagatacggcttcgccctagccattcaggccaaaacgcaacaacgatatgcatcctcttgatcgatccggaacgcgcacccagcgacgatcccgctttcctcaagatatgtatgctgccgtgtttttcacacatcgccctgtcgtatccagagcttgcagcggtgcagtttcctgccgttagatcacaggtcgaacctgtggcctaacggcaggaagccgtcaaaccgaacctacagacgcgcatgcgctcctcgcgttcggtacgtccgcttcgcttcggcgaagtagccgtagtgctccacccgatgcgcatcgcttgcgatgtacgcgtacaggttctcgtcgaacaggcgcttggcgggcttgcgctcggctcccatgcgaccgccggcaatgaaatcggccgacgcttgcagcttgcaacccatcttcaccagaccgcgcgccacctcgacatcctcctggatggcgcgatagcgctcgggatgagcgatgatcacttggtagcccatcccctgcagttcgaagatggtccgttcgtatatctcgaagtcgggcttgcccgccctcgtagacagctccaataaaaactcgttcgtgccgtcgaagtgcagatgctcggcccattccatgcccaattgcataagcttggaatggttcacctcgaagcccatcgtcagcgggaacccgtcagcgtgcgccacgagcaactcgtaagcatcccacatcgcgtcgtagtcgaagtagggatcgcgcacatgcggggtacacacgatagacgtgattcccgcagccttggcagcctccagcatggccagagactcgtccaggttgcgcgcaccgtcgtcgacgccgggaaggatatggcaatgcaaatccctcatcaggccctacgccctcttcctgccacgggatccttagcgaatccgccgcgaccgcctgcaggaacggggctgccctgcgcaccgcggggcgcacgacgcccggccgtgggaaccggcgtgcgcgtctcggcctgcagcgcggcaacatcgccgtcgtccttcaaccgtccgccgtccttggtatagtacgcgtaatagtattcggaaccggtgccttcgcagaacgtggcgcagatgccgaggatgttggcatcggccttcttcagctgctcgcacgcgtccaccagctcggaacgcttcgtcgagccgggcttgaccaccaacaccgtgccgtccaccaacgtggacaggatggcggcatcgacgaaggtgccgaccggcggcatgtcgtaaatcacataatcgtagctgtcctccagcgtggcaaccagcttctggtaccgcttggacgagatgatgtcggccgggttgggtatgttcggctcgacgtcgaggaagaacaggttgggagtctgcgtcggcgtgacggccgtcttgagcggtgccgcatcggtgaggacggcgtacacgcccgccgcaggacgcacgttcagcaggctggcaagcgtgcgacgccgcatgtcggcctccacgagcagcaccgtcttgcccgacgtggcaatagcgcgagccagctccacggagcacgtggacttgccctcgttcggcaccgaactcgtcatgacgatggagcggatggggttgtcgggcgacatgaagcggatgttcgcaaaaagcgtcttcgccgcgttctgcacctcgagcatgttggacgcctgcttctttttcttagccatggcctataccctcctaacccttgatcgtggggatacggccgatgaccggaatgcccagcagttcttcagcttcttcagggttgcgcacccgcgtgttcaacatatccagcaccaccacgatggccactgccaggaagatgcccgcgagaaacgcgaccgccgtgtacatggcgcgcggcgggcccgagggatccgtgggaacctcggccgcgtcgaccacg

SEQ ID NO: 8711 - DNA, 1267 bp, Unknown
  gut microbiota DNA sequence
gcatatccagcaccaccacgatggccactgccaggaagatgcccgcgaggaacgcgaccgccgtgtacatggcgcgcggcgggcccgagggatccgtgggaacctcggccgcgtcgaccacgttgacgctctcgacgcccatgacgctttgcgcggtggtggacagaacggtggatatctcattggcgacgatggcagccgcatcgggcttgcccgccgtcaccgagatgctgatgacgcgcgtggtggtgcccgcttcgacggaaatcttgtatccgctgagcgaagacatgccaagagcctcggccgtgcgcttctgcacggtctccgacttcgccaaagtcgctatgtcgttcgccatgagctggctggcggtgaggtcgttgtacgcggtggtgctcgaagagctcgcgtcgtccttcgcagtcagcacgtacacggacaccgtggccgtgtactggttctgcatgagaccccaactgaagcctgccgtcgcgatcgcgagcacgacgggcagcaccaccaccagggccaggtgcttgcgcagcagtttgaatagttcgagcagtgtcattcgttcgtctttctcttcagcgtcgtacgtacgctgcttgcttacttgccgttaacggtggtctcggcagcttcgggattctcgccggcgtcgaccgccttcatcagtgtagcccaaccctcgggatcctcgtagcacagccacaggccgccgtattcctccatgaagtcgcccttgtacggaccggtgcacgtgtagatggtggggttgcccgcctgtgcgaaatcggtcgcaagcgagatcatcgtctgcaagtcgatgctcgtagacacgcactgggagaggttttggatcaggccggggatctcgaccggaggagcttgcagcacgttcttcatgagcgccatggccatcgcacgcacgttcgactggcgaatggcctcctggtcgtcgccataggcggtgcgcatgcgggcaagcgccacgcactgctcgccgttgagcagctggttgccggcctcgatatggacgggcgcctgatcctgcgtgtacacctggtagtcgatggtgtagggcacgtccacgtagatgccgccgatcgaatccacgaactcggccaacccggcgaactcgatttccacgtagtcggagatcttcacgccggtgaggtcctgcaccgccgtaacggcgccagccgccccgttcacggcgaacatctggttgatcttctcgaccttgccgttgtactcgtac

SEQ ID NO: 8712 - DNA, 846 bp, Unknown
  gut microbiota DNA sequence
tacgtagtcggagatcttcacgccggtgaggtcctgcaccgctgtaacggcgccagccgccccgttcacggcgaacatctggttgatcttctcgaccttgccgttgtactcgtacggcgtgtcgcgcggaaccgacaccatggtgatgacgtggcccaccggatcgatgcgcacgagcacgagggcgtcggagcgctccccgtacgtctcccagttgtccgagcccaccagcagcacgtagaacggctccatctgggaatcggagggggcgagaacgctgctcaactcgctttgctcctgagcgtcgagcgccatgttgctggcgaggctgctcgtgtaccaagcgccgtacgcggcgacgccgcccacgagcaccacgacgacggcgagcgcgataagcgccgcccgcttcagcttggtgtgcttcttgcgcttcttgcgcacgcgcacgatctcgtcagcttgcgaagcgtagccgtagttcgccggtcgctggtttggatacggcgtctgccccgtcgggcgcgaagcgtacccaccgccctgcggataaggccggctgccatggggagcctgaccgaaaccgtccgcgggaggttgcccataggcgtgagaacctccgcgcgaagcggaggcaccatggcgacccgaagccgtctgtctgttgttgtcgtcgaatcccatagggaaaatgcgtttcctaaccgtccgtctcgctcgtcgcgaatctcttcaacactcaattgagccggagcgctcgtctgttccgtcctcatgataatagcacggtttcagtttagcaacagaaaaatcggtcttcggtgaagccccccccccccccccccc

SEQ ID NO: 8713 - DNA, 723 bp, Unknown
  gut microbiota DNA sequence
aagctccttggacatcagatgaacataaggggctgcagacgtttgaaagcctaccgatcacgttaaaaaacagtccgttttgatggatttcggtacatattctcagtcaatttttacattttcctttactttcctcaccgacggctggcataatagtcagtcgctttacacgaaattctttcctgtttcttttcgcgcaatgccaacgaatcagaaagcggctcgagtcaagcgcaatgcacgccgcaggagcgggtgcgaccgaaaagcgcgcatcgagcgcgcacgaagagaaacggaaacgaataatgcagaatttcgccgacctcggcttgtccgaggctgcccttgccgccgtcgaacgcctgggctacgagaaccccacccctgtgcagctgcaggccatcccgttggtcctggaaggccgcgacctcatcgcagccgccagcaccggcacgggtaagaccgccgcgttcctgctgcccatcctgagcaccctgccgcgcggcaagaggggcaagcgcgcgccccgcgtgctggtggtcagccccacccgtgagctggcgcagcagatctcgcagacgtgcatgcagatcacccgcaagacggggcactacgtgaccaccgtgttcggcggtacgccctacggcccccagatcaacgagatccgacgcggcaccgacgtgctcatcgccacgcccggccgcctgaacgacctcatga

SEQ ID NO: 8714 - DNA, 9085 bp, Unknown
  gut microbiota DNA sequence
atgcatgcagatcacccgcaagacggggcactacgtgaccaccgtgttcggcggtacgccctacggctcccagatcaacgagatccgacgcggcaccgacgtgctcatcgccacgcccggccgcctgaacgacctcatgaacaaaggcgtcgtcgacctcggcggcatcaagtccctcgtgctggacgaagcggaccgcatgcttgacatgggcttcctgcccgccgtcaccaccatcgtagacgccacccccgccgatcgccagacgctgctcttctcggccacgatcgaccattccatccagaagaacctgggctcgctgctgaacgacccggccgtcgtggaaatcgcccgcaacggcgagaccgcccagacggtcgagcagttcatgatgcccatcgccaatttcaagaagcccgagcttctgcaggcgctgctggaggagaagggctccgaccgcgtgatcgtgttcgcgcgcacgaagaaccgcaccgaggattgcgccgaggcactgtgcgacgcaggctaccgtgccgagtccatccactcggacaagtcgcagggccagcgcaagcgcgccctcgacaacttccgtcgcggccgcacgtcaatcctcgtggcgaccgacgtgctggcgcgcggcatcgacgtgcccgacgtggaccacgtcatcaacttcgacctgcccgacatgcccgaggactacgtgcaccgcatcggccgcacgggtcgcgccggagagcagggcttcgcggtctcgttcgtcacgcgcgagtcgcgccgcacgatgagcgacatcgagaagctcatcggcaagaacgtgcccctcatggagctcgagacctacgagctggacatgaccgtgctggaaaagggcaagaagggcgctccgaaaaagggcggctacaagggcaacaaaggctccggacgccccgcgggcgccaagcgctccgacaagcgcggcggcgagaagcgcgacttcgagcgccgttcggacagccgcgccgagggccgctcggacaaccgccccgggcgcggcaagcgcgccgagggcaagcgatccttcgacggcgtcgccaagcctgacggcccgcgcagcaacaacatggatcacgcgaagcgccgtctcgaaatgaacgagaagaagcgcgagaagtccgctccgaacgcgaagggcgccgccaagcagaacggctccaagaagaaggcgggcgtcggcggctacaactacagcaggttcgcgaacaactaaggcgcactcggggcgagctgatccgacttcgtatctcccatatatataggtaagcgccgcgcatcgtttcaagatgcgcggtgcttcttcgtttccgaaagggaacctcttcctagacgatgcgctcaggatgcgcgtacacgttgaagacgtcgcgcttggcgaatccgactagcgtgacgccccaacgctgggccagacgcatcgacaagcttgtgggcgcaccgggagacgcaacaacagggcagccgagacgaatcaccttcacgatgatctcgcgcggcacccggccgctgaataggagcatcttatccgacgcatccaccccgttcaagaagcaccagccgaccagcttgtccaaagcactgtggcgcccgatatcctcgaaccatgcaaccaccccgcactggtcgaccagaaccgcgctgtgcacgccgcccgtgcgccgaaacagcagcgagcggtcctccagaagagccatgcgctcgaccacctgagccgcttgcagcgtgagatcggactccaccggcaagaacccttccgcatcgcacgagggatctccgccgtcaccacgctcgaacactccggaaatcaccaccccgccgtcgcgcagcgtttcgacgtgtcggcgacgtcgacgcgaagccccggcaacatcgacacgcaccgacaccgcacccgaatccagatcgacgtctatagcgctcacctgctcaggatccgtgacaacacccgccaagaacaagttgcctgcgaccagctcgcgcacatcccaaggcgaacatgtcgtgtcgcactgccgtgcgccgttcacgaacacggtcaactccgcctcctggatgaccgaatcgtcccgcttcgaaaagcgcgcgtcttcgtaccgcacgataggcatatgcgtgcatgccgaaaccttggactccgtatcgacaagggcaaacgaacggctgcggatcatggagcacctcttttcaaccgatcgcattcgcaactccgagcgggcggcgacccgaaaaggccgccgcccggagagggagggaaggcgagatcaggcattcaccttgttgggaaggtaccaaaccgaaggattcgccccttcgtcgggaagcagctggaagccggcggcggattcggcctgctttttcagcgtttccaagtcgccgaacacgcgcgcgccagccggacatgcagccacgcacgcctgaggctcgttgccgcctgcatcgatacgatcgacgcagaaggtgcacttgtcaacgcgcccctgcggcatggcggtatacatgacggcttcgtactcgttaagttcggtcccgaaatagccgtcctcgttctcgcggtaatagcgcgcgccgtaggggcaagccatgatgcaggatttgcagccgatgcacttctccttgtccaccaccacgatgccgtcttcgcgtttgtaagtagcgccctcggtcggacacgcctcgacgcaaggcggattctcgcaatgcatgcacagcatggggacgatatgcatcgttgcgtctggatactcgccctcaaactctcgcttgacatgggagcgcgttatacccggaggggttccatgcgcctccttacacgctacggcgcatgcgtggcatcccacgcatttcttcagatcgatcagcattccgtaagccatggttcactcctccctttatgcgatcttctcaagcttgacgcgaatgcactggtcgaacgccgagcacacatgatccatgcggtcaggggtctgaccgggaaccagatgcacaacgggaacgcccttgtccttcgcaatgggcatataggccgacttcgaaccccagtgcccgccgatgacggccacgcattcggaatgcacgccctcggacgtagccagcacgccctccaccgatacgccgtcgaccgtgacaagcctcaccttatcaccgctggcgaaccctttcgcccgagccgtagcggcgttgatctcaatggtgtagccgtaagggttctcttcattgatctcgttgatccaggggttctccatgagccacgagtcggtgttgatcgcatcggtgtaatacacggggaggatgtcgaagccaggatcggtcacctcatacccgcagccgggcttccaatcgggaagagcctggtagtcgtcgacctcccacggaatgcccagctcggcgaccttggcctccaccttgctcttcgcctccaacaggaagtcgaagtacagcggcacgcggccaggttcaccgtttgcccagatgtacacttcgtcaacggtgcgaggatgatcgtacacagcatgctctttcagccatgcgaagtcgtgctcttcgtcgatgttggattttaagatggaatcggcgaaagcctctacgtcgagcttctggtccatgggtaccgaatactcgtccttcacgcggaacatgccgttaagcgtggcgatgaattcggcgttctttccggcgcgacttgccaattctgcgaacagctgccagctggaaggcgcgccgtccttcggctcgacgaccttctgccacacgggaacggtccacggattttccaaaccgccgatgacacgatggttgcctgctgcatgcggcagcggctcggtgcgctccagatagcagcattcgggcaagatcacatcgtagaaataggacgactcgttcagaaacatatcgatgcctacaacgtactcgtaattcttgaagatttcagcctgttcgtcgtagttgccccaccatttgatgggattgcatgcatagcagagagcgacctcggcggcctgcgtgcgatacaggtcgggatgagcctgggcaatgtgctcgaagtggttgtcgtcggacatgggctggagttccatcatgcccatggtcgtaggcgtgtaatcgccttcgtacacctttttatagtaagagttcgggaatgcaagcagcagaccggcgcagtcgatgagcccctcgggctcccataaaccggggcgccacgacatggtcgggttgtcgtcggcccagccgttgcagatgggatcgaaaccgcagaagccgccgacggagttcgtcgaaccgatgaggttgttcaggctgaacacggcccagcagctatggaaagcgtgcttatggcgcgtgatgccggaaaacgcgtcgacggcagcagggcgataaggcaacgtcacgccgtcgatctcggtggtctggccgatgcaggccgcttcgccaagctctttggcaacctggcggatagtggccgcgggaaccgtggttatgctctcctggtactcgggcgtgtaggtcttcagatgctctttatacagggtgaatcctgtcgagcactgcctgccgtccacctcgaacgtaccctcgagttggggggcgctgcaccgatcgtaaggcttcgcctcgccgtcggaatccatgtacagcgaatgccctgtcttctcgtcgaagacgatgcgcttggtatccaggtcgaccagagaagggccgttggtacgattcgcaaggaactcgatgtcgatgaggttttcctcgtgaacgagcacgtacgcgatggcaagcgccgcagcggcatcggtgccggggcgaataggcacccagagatcggctttctctcccgcagcgcccatatgcggatcgaacaccacgtggcgcaaaccgttcttgcgacgctcagcgaaaggctcgacggtcatgttgtatccatgacgggtagccgtgcccgcattggtgccgaactggacgacgtagttgcagttgacatagtcgggacgcgcattgcccgtccccgtgaacaggtattctatctgatggaccccggctccgcagatatcggagcagctgccttcggcgttgccgtagatcacgccgagtgccgtatggcgcaccagagagccgatctggctagccaccatggacatgccggtgacggcgtgcgggccgctgcgctcgatagccgccttcatgtgctcgtccaccaacccgtaggcctcgtcccagctgatctcctcccaacccggatcctcgtcgaagcccttcttgggattcgtgcgcttcagaggcttggtgatgcggttgggatcgtagagttgcatgatgcccgacgcgcccttgccgcatatatgcccgcggccgatggagctgtcgggattgcccgtcagttctaccacaacgccgtcgatgacatgcgctttaatggagcagttgttgaagcacatgttgcaggtagtggggatccactcgcccgctttcggatcgtaggccgttttctcgacccccgccgtatgctcggactccttttcggcgcctggcgcgcaaccgacgataccgcccgctagccctacgccgagcgcagtcgcccccccgcccgccacaaaaccccttcggctgattcccatgccgttctcgctcatggtgctacccccttcagctcgtctacgagggcacccgcaacttcagcggctgtcccctccgacaccgcttagtgtctgctgtcaaggtactctatagttctatgacagtcaatcactttaattatcctatcttgagcatgaagaagagtgtgcgtagccccgctgcctgcgcgcatcggccatggaaatgctggaccaagcgacggtccaggcagcgtacgcgattcgaagcagatgcttcatgaaacatctgcgctagtttcgccctacttcaagaagctgtcgatattgttgaacgcttcgccgaacgcgctcggggcaatgacgagaccgcccttctctttgacgctctcatagatgaggttcatcgtgcgaagttggagcgccttgtcgttgcgatcgtagacagccgccgcatcgacaaacatctcggagatgtctttttcgatttctgcgagcaagagtcgcgcgttgcgctcgcgctccgcctgcgcttccttggacatggcatcctgcagctctttgggaatagcgatgtcgcggatctccaccgatacgaccgagatgccccacgaacgcgtcttttcgtcgaggatatccttgatctcaccgtccagctgctctcgccgcgtggcaacttcggccagattgatgcgccccaccgcatcacgcagcgctgtttgcgcggcccaccaaatggccgacgcgtagtcctctacctcgacgcaggcgtctttgggattccacaccatccagaacagcacggcatcgatatcgagcggcacaaggtcggcggtcaacgcctcctccgccgtgaacggcgtggtgatcatgcgctggtcaatgtgcgcagtagcatgttctaccacgggaacgacgaaataaagcccagggccagcaatgcggttgaagttgcctaaacgcagcaccacgacacgctcccactgcggcgcaatacgaatgctgaacgcggccaccgcgccagccatcaccgctacgataaccaccgtcgaggtaagcatgctccaaagcgcagcgagaatggcacccgcaacgataaggaataccgatgccgcaaaaatgtatacgctgttgcgcgaggttttccgcccgacgggcgcaaccatacctttcggccgaacggccgactccacgcgcttttcttcgtttcgcttcgatttgcttcgcatgatggctcccccgttgccccaaccccttggcccgcgcccctaggctccgccccctaacagcaatatctgttcgctcaccaggtcatggatatcctcggatgtcaaacccttagcaagagcctgctggacgaaatcgattgcaagcgcctcgacgtcttggccgacagccgacagatcgacatccttgaggtcagacacatacgtgccacgtccgcgcttcgtgaagatgtagccgtcacgctcgagatcctgatacactttgttgatggtgttgtagttcacacccaattgaacggaaagctcgcgtacggaagggaggcgctcgccacgttcgtactttcctgaagtgatgaggaacacgagccgcttgcgaatctgaatccacagagggacgccgcttctttcgtccacttggaacgaacccatggcgtcgaacgctacttctctttcgatagtcttctcaatcatagtgattgtcatagtatcacatatcgcaatgacagactggctacatccagaacgatagcagactcatgtcgacgagacagaagcgctcggcggccacgagaagggagaaccgcaggcagatgcctccgagcagcgtgctcgcagcccccacgacgaacagtgaagggttgggcgaacgcaggcattcgacatccaccgatagcggcaccacgatccccgccagcacgacacccaaccaaaacagcattgcagaatgtcccgatagcaactcagcagccgaatgagcggcagcttcgtcgcccatgagcgaaacgatgatgaacgccgcaatggcgatagcctcgatcgcaacgagaaccgcatcgagccgaagcagactagcgaaacccccgatcgtttcatcgcgcgaaaacctgaagaagcctatgatcgtcagcacggcagctccggttgccaacgccgacgcgacgaacacgatcggcacaagcggtgagttgagaaacggcacggccggatagagcgagagaaacacgccggcatacagcaccacgaacagagccagcaaagcggcgaagacactgaccacggtttcggcaacgcgcaaacccggtccatcatccgagaaccccattaaaaacgccgcgaacgccgtcgcgcagaacaacgcaagtgcccacgcccccgctgaaagcagactgccggacggggtaaggaacaatcggaaagcctgatcgggagcccctaaatcgagcgtaagaaacaccgttccgagcgcgacgagtaccgggccagccagcaaacccgcatccgtcaccgcgctggcgccgcgcagccacgatcgattgctgacgcgcagtgcaaagtccacgaacgaaccgagcagaaatgcaccccctcccgcacccgcaagaaacagataccacgcgatatacgaactgaccatgacgagcgcgctcccctcggcgatcgatgaccccctgcgcccattgtacgccatctgcacggcagacctcaacgaaacggaaaagcgacgaagagccgcacgggtgccacctcgtcgcagtaaagaaccgggccgcaagatgcgacccggttctttactgcgcgtccacgtcgatgggcgcgttttccgcgtcacccttgcggcgcttgcgatcgcgccaccagcgggacaggctatgcacgagccactccactacgggaatggtgagaaaggccacccaggcgggatgcggctggttcagcacgaacgccatccagcagaaccaggccaccacggcgatggggtacgcgcccgagatcagcggcacgatgcgcttgcggccgatggcgtgccctaccatataatagagcgggatggtgaggaacaggaacagccccatggcccaggcgccgttgaggatgcccagcagcaggtagacgatgatcaccacgagcgggtacgggaacttcacccacgacttctcgaagtcgcgcaggtagtgcttgcgcacggggatggacttccccacctcgtcgccgtacttcgcgcgggcgtcgtcgaggttgtcgaagcgctcgccctgcacgctgtaggcgcacggctcgtaccagcgctcgtcctgatcccacccgtggcggtatcgctcgtgggcgtcttgccagctgtcgaactgctcgccgttgatgaccaccttggcgccgtcgacgagcacgtcgtcgtcgcctgcgctgttgccggggctcttcacgtgcacgccgtcccaacccacgtgcacttcctcgcccttc

SEQ ID NO: 8715 - DNA, 622 bp, Unknown
  gut microbiota DNA sequence
cgcgatgggatacgcgcccgacaccagcggcgcgaggcgcttgcgcccgatggcgtgacccaccatgtagtacaagggaatagtcaggaacagaaacagccccatggcccacgcgccgttcaaaatgcccagcagcaggtacacgacgatgaccatgagcggatacgggaacttcacccacgacttctcgaactcgcgtaggtagtgcttgcgcacgggaatagacttccccacttcgtcaccgtacttggcgcgagcatcgtcgatgctgtcgaagcgctcgccccgcacggtgtaaccgcacggctcgtaccaacgctcttcgcgatcccatccgtgatggtaccgtgcatgcgcgtcctgccagctgtcgaactgctcgccgttaatgaccaccttggcgccgtcgatgaccacatcatcgtcgcctgcgctgttgccggggctcttcacgtgcacgccgtcccaacccacgtgcacttcctcgcccttcttggtgtctttcacgtgcacgccgtcgcgccacgacacgtgcacgtactcgtctccatcctccacgtgaatcccgccgggaccgatgtgcaccttgcccttcttgccggacgatgcggcttcggttccg

SEQ ID NO: 8716 - DNA, 736 bp, Unknown
  gut microbiota DNA sequence
cgtctttcacgtgcacgccgtcgcgccacgacacgtgcacgtactcgtctccgtcctccacgtgaatcccgccgggaccgatgtgcaccttgcccttcttgccggacgatgcggcttcggttccgcccgacgcatcggaggccgcagccgcatcggcgggcgctggcgggggatctgcaggggaagccgtcgcagtctcctgctcggcctggcgcttagcggcgcgatcggccgcctcgaacgtgacgtcgtcgcggatctcttcgtcgacgtacagcagatcgtccagcgacagaccgtacagctgagccagcgcgatgaggttgtcggtgtcgggggacgactcggagcgctcccacttcgacacggcctgccgcgacacgcccagacgcgcggcaagcgcctcctgcgaaagccccgcctgcttgcggcgctcggccaagcgttgcgcgatctctacgttcatggtgtgctgcctttctcgtttcgtccatagtagcgtaccgaaaagactacggttgcgaggaagcgagcgcgacctatttcagttggaattttccgcaattattggttgcggaacgtttgaactgggaaaagagaagctccccggcgctacagcttgcgcttgctgatgtcgaagaccacccataccgacaacacggccgcccccaggtagccgaagaacgcgagcaccggcacgcccagcagacgcggctccatcgacgacagcgacagc

SEQ ID NO: 8717 - DNA, 366 bp, Unknown
  gut microbiota DNA sequence
ctgcgcttgctgatgtcgaagaccacccataccgacagcacggcagcccccaggtagccgaagaacgcgagcaccggcacgcccagcagacgcggctccatcgacgacagcgacagcatgctcgatccgatgaacagcccggctatgatgatgccgatggtcagtcggttgatgatcttggccagcttcgacagcggcgcctcgctgcccagcacctccatgttcatcttcagctggccgcgcgtgagcatcttgagtgtttcgccggaataccgtgccgcgtcgagcgcgccgtgcgacgacgagcgcagcgcgagagccagatcctgcatggcctgcacaagctcgtcgccctggttcttcgag

SEQ ID NO: 8718 - DNA, 700 bp, Unknown
  gut microbiota DNA sequence
cgtttcgccggaataccgtgccgcgtcgagcgcgccatgcgacgacgagcgcagcgcgagagccagatcctgcatggcctgcacaagctcgtcgccctggttcttcgagcgctggatatgggcgttgatgatggacacgacgttctggttcgggatgaacggcgcgatggtaccctccagcgtgacgatgccgcgcgacacgctggtgatggaagacggcagcgtcaccttgcacgaccgcgtgagcatgaggatgtcgttcaggaacgccccgatgtcgatatcggccacatcgcacgagccgtaatcgttcaatagcaggtcgaggtcggccaaaaagcgcgtatggtcgataaccgaattgtccttcgcgatggcaaaggacaatagcgcatccttgagctcggacgagctctccatgccaaccgcctggatgatattgccgaatccggcgcgatcgcgcggcgacaaacgacccatgatgccgaggtcgatgtagacgatcttgccgctgcgaacgagaaggttgcccggatgcgggtcggcatggaagaacccgtgatcgagtatctgcgaggcgtagttgtcgaggatcttctcgccgatctcctcgaggtcgtagcccgctttccgcagacggtcggtcgccaggatgggaatgccgtcgatgtattccatgaccagcacgtactcgccgcac

SEQ ID NO: 8719 - DNA, 3322 bp, Unknown
  gut microbiota DNA sequence
gatctgcgaggcgtagttgtcgaggatcttctcgccgatctcctcgaggtcgtagcccgcattccgcagacggtcggtcgccaggatgggaatgccgtcgatgtattccatgaccagcacgtactcgccgcacagctcggtatgcactttcgggcaatcgatgaaggcgacgcccttgttcaggcgcgcgaactcctcgaggttagcggcttcgcgctggaagtccgtctcctcgaggaacgtggcccacagctcttccaccacgtcgcgcaagtcgagcatctgctcgtccttcatgaaacgcgcagcgtagcgcgccaccatgcgcatgatatcgatatcctgggccatcgtggtcttcacgccggggcgttggatcttcacggccacgatctcgcccgtgacaaggcgcgccttgtgcacctgggccagcgaggcgcttcccagcggcgtgggatcgatggcgtcgaacacgtcgccctgcgcgtcgccgtagatgtcgtcgagcgcctcgaggatggcctcgaacggcagcgggtcgcactccatctgcagcttcgccagttcgtcgcagtacgccttcggcaaaatctccgagcgcgtagacagcgtttggccgatcttcacgaagctggggcccaggtcctccagcatggcgcgaaaggcctcgggcgtgaaacccttcaggaagtggtgcttccgcaggatatcggatatttccttgaggcgccgcgtgcgcgtcttccgattcagatggaaccgatcctcgggatcaacctccgaaccggagctgaaaaaatagcgcagcagcgtgttctccggcatggacgggcagctcgcagccgtgcgctaggcgcccggcgtttgcggcgcggcagccgaagccgcctcgttgtcgacggacaccgcggaagcgtcgcccacttcagcctcggaagccgacttcgcgttcgccttctcggcgaactcggcagccttggcgacgaacgccgcacgctcctccggcgtcatggcggccatgcgagcctccagcacgtcgtagcgcacgcttgcagccacgtcttccgccttatgcttcaattcggtgttgatctgcttgccctgatccacggtgagctcgcctttggagatgagctgatcaaccagatccttggttttttcgccggttatggccatcgcgccgatgccggccaggaagatgtctttgaatccgtcgctgagggtagccatacgagcctcctatgcttgcgattcaccgtccgcgacgcggacggcctctgcatccatgatgcaccaaatcgacgaaaagggcaatgctcgcaacgcgagcatgagcgaagccgtcaaaggaaggttgccgcttgttcgccttgcgaccgccccgccgaggtcgacggggcggcaggcttcgaccggagtcagccgatcgtcagccgcgcgtcatatgcggcggcctgcgtccgatgtcggagcgatacagctcgcccagcagctgcgcaacgctcgcctcgctcgtcgagctcccgcctttcgcgacgcgatcttcgtcgcgagcggacgcctcggccatgccgagctgcttcatcagattcttcgcttcgtcattggacaagggtttcgatgccatcagacatgcacgctcctcccgtatggcgacaagctgtcaaggcagttgttactaccttagtactataaagaaggatcgcgggatgacgggcgagcaaccaacaatcggttagacgtggccagacgaaaggagcgtttcgcggaagcttcgctcacagacggcagaaacgaagcggcgagcggagaccgtccgctcgccgttcaggatgcgaacaggggaaccgcatgcagaaaagacgctttaggccgcgcgctcggaagcgaaagaccgacgctcggaaggcgcgaggtgaggcagctccactcccgccagagacgattgagcgccgaactccgcgccttcgaaccacccttcctccaacgcgagcgcatgctcggcctgcggtgcgggcgaagccgcaggcgcgctttggcgaccctccacccatgtggcggctacgacgcttgccacgatgaccacggcgccagccataccagccgcagaaagcgcttcgcccagcagcatgaacgagaacgccgcagtgaacaccggctcgcctgtgagcagcagcgacacggtggaggacggcaactccgtcagcgccacgttctgcagcatgaaggtaaggcaggtgctgagcagcgccagaaaggcgatagtgccccaggctacgggctgcacggccgccacgttcacgggcggctcgaaaaccagcgcgcacgcaagagccacgacgaacgaggcgactatctgcgttcccgccaccgtggtggcgtccagctgctccaagccgcgctcgccgaacacgagcgcgccagccaacgccacggaggacagcagcgcgaggatctcgcccaagccgaacgaaggagctcccccgttgctgcacaagaggtagagcccgaccacgaccgccgcctggaacggcaggaaggccaacggataacgacggcggttcaccagacacgacaacagcggcgcgaacaccacgggcaacgccacgaggaagcccacgttggtggccgtggtcaagtcgagcgctacattgcaggtgagatacgccagcgccatgcaaagcgctgcgggcatccaggcgccgatacgcgcgccctttagctggcgcacgatgcgcgggccgaagaagatcgcgaacacgagcgcggccaagccgaacctgatggcgaggcaccacatgggcgtgatgctctcgtacgccatcttcgtgatagcgttacccgatccgaagataacggtctgcagcacgacgcacgcgacatagggccagcgcttgctacgagttttcacggggtgcctcctttcgatccgcagcttgcacggcgctcggcagcgcaagactctcacgtcccgccctcgcggaacttcactggatgatgttctagggttgctggcacatggtatgggttctcctgataaaagtaaaatgagattatctttttaagattttaagagtttcttgttattccttttcaagctccgtatagtgacatacatcgaagaacggtgtgaagatattgtgagcaagagaaggagcgatctgtgggcaaccagaaatacgatgcgttcctaaaggtggctgaaacgggcagtttcaaacaggccgcccacgacctaggatacacgcaagccggcatcagctacctcgtgagcacgctcgaacgagaactggacgtgccgctgttcgtgcgcgactacggc

SEQ ID NO: 8720 - DNA, 641 bp, Unknown
  gut microbiota DNA sequence
aggcagtttcaaacaggccgcccacgacctaggatacacccaggccggcatcagctacctcgtgagcacgctcgaacgagaactggacgtgccgctgttcgtgcgcgactacggcggcgcgcacctcacctcggacggcgccgatctgcttccctgggtgcagaacgtgtgcaacagcgagcgccagctggagatgcgcctcgccgagctcaagcacctcgaaagcggcatcgtgcgcgtagcggcgttcacgagcaccgccatccaatggttccccggtatcgcgaagcgcttcctcgcacagcatccaggcatcgacttgcagctgatctgcgtcgacgacgaagatgcactggaagaggccgtgtggcgcggcgacgctgactgcggtttcttcgtctaccccatcaagcacgacctgcacgccgttccgctgcggaaggatccgctcctcgtggtgctgccgcccgaccatcctctggccgacgcgccgttcgtgccgcgcgaggcactggcggaagagccgtacatccgcctggaaagcggcacgtcgtcggaaatggaaacgttgttccgagcgaacgacgtggagcccaacgtgcggttcaccatcgacagcgactatgcggtgatgagcatgg

SEQ ID NO: 8721 - DNA, 936 bp, Unknown
  gut microbiota DNA sequence
gctggcggaagagctgtacatccgcctggaaagcggcacgtcgtcggaaatggaaacgctgttccgagcgaacgacgtggagcccaacgtgcggttcaccatcgacagcgactatgcggtgatgagcatggtcagcgcgggactcggattcagcgtgctggccgacctcatcctgcgcgatgcgccgtttcccctggccgtcaagcagcccgaagtggaaacaagccgcgagatagccatagcgctgcgctcgctggaaacagcttcaacggctacgcgcgcgttcttggacgcaacgcaagcctggatagccgatacgtacgaggagtgaaaggactgccatcctgagcgaaggcggcaggctgtcatcctgagcagccagatcaggatggcaacttgctagcagccaagcagcggcggaacgtccgtgccgtgggcgcacacgtaagtaggacgctccgcttcaagcacgatctgagggaacataccccatagcgccgccgcggtggcgcagcccgcgccgcttcccgactgcatgtcgaagggactgtcgcccacgtacaggcacgtctgaggagccagccccagccgttcgcagccgtgcgccacgggaccgggatgcggcttgtgctccggccagtcgtcggagccgatgaggaagtcgaagtatccggtcaggccgaacaggtcgaggccccgcatggccacctcgtgtcgtttcgacgtgaccacggccagcggcaaacccgcttccttgaggcgttcgagcatgggcacggtgccgtcgaacagcctgatcatgtcgtcgtgcacctcggcgttgtattcccggtacacacggcacagctcctcgtgcacggccgagtcatccgtgaaatcccacatctgggtgttgaggggctgtcccaccttggccatgagacgctcgtcggggat

SEQ ID NO: 8722 - DNA, 9040 bp, Unknown
  gut microbiota DNA sequence
atcatgcacctcggcgttgtattcccggtacacacggcacagctcctcgtgcacggccgggtcatccgtgaaatcccacatctgggtgttgaggggctgtcccaccttggccatgagacgctcgtcggggatagcctcgcgcagcaccgtgcgcgccgtgtagcgaaacgtggcgagcagcagatcgtgcgtgtcgagcaaggtcccgtccaggtcgaacagaacggcttgcatatcgtgtgataccataccatccttcatttccgttatgcgattcgcgcgaagcgcgaacaagaactcgcaggttggcgcagtaaatcagcgagaggcgccctgacgcccgagatcgcggggagggcgagggcgaagcgtacttcggtacgcgagtcctcgacctcgccacgagatcgggtgccagggcgcatcgcagcgtcggccggttccgcgtgccgtcaggcacgcggaacacccctactagaacaggccgccgaacagggacagctcggagccccagaccttggcgttgcgctgggagaacgccagcgcgtcggtgagggccgccagcgggatgtcgcggcgagcgcccgtgctgcggcgcttgatctccaccttctgctcggccaggccgcgcttgcccacgatgacctgcagcggccagccgatgaggtcggcatcggcgaacttcacgccggcgcgctccttgcggtcgtcgatgaccacctcgaggcccagcttcgccaggtcgctcgccagcttctcggccgcaggctgcacctcgtcgtcgcccaccgtcagcgggatgacgcacacgtgcgcgggcgccaccgtgagcggccacatgatgccgttctcgtcgttgtgctgctccacgatggcagccatggtgcgcgagatgcccacgccgtagcagcccatgaggaacagctgctcggagccgtcttccgccatgaacgtggcgcccatggccttcgagtacttgtcgcccagctggaacacctgcgacacctcgatgccgcgcgcgccttccagcggcagcccgcacgacgggcagctgtcgcccggctgcacgatgcacaggtcggcccactcgtccacctggaagtcctcgcccagacgcgcgcccacgtagtggtagccgtcctcgttggcgcccacgacccacttcggcacggcctgcaggctgcgcgccgcgatgacgtaggcttcctcgggcaaaccgacggggcccatcgagcccttgtgcaggccaaaggcctccatgtcctcgtcggtgagcagcgtgaacccgccggccacgcgcgcagccttcagctcgttgagctcgtggtcgcccgggatgaacatgaccaccagcttgccctcgtcgttcttgccggacagggccttcaccgtggacgactcggggatgtcgaggaacgcggccagttcggcgatggtgtgcacgccgggcgtggcgaccttctccatcggcacgtcgtagacggtggggcgcgccaggcagtcgccggcttcggtgttggccgcgtaaccgcaggtgcagtgcacgagctcggcttcgcccgcttcggcgagcgccatgaactcgcaggtcacgctgccgccgatctggccggggtcggcctcgacgggacggtagtccatgcccatgcggtcgcagatgcgcccgtacgcctcgctcatgtcgtcgtaggtcttctgcagcgattcctgatcggcgtggaagctgtaggcgtccttcatgatgaactcacggctgcgcagaaggccgaagcgcggacggatctcgtcgcggaacttcacctggatctggtacagcgacagcggcagctctttgtaggagcgcagctcgttgcgcacgagggaggtgatgagctcctcgtgggtggggccgaggcagaactcgcggtcgtgacggtcgacgaggcgcatgagctcggggccgtagtcgttccagcggccgctctcgtgccacagctcgccgggctgcagcgccggcatcatgatctcctgcgcgccgatgccgtccatctcctcgcgcacgatgttctccaccttggccagcacgcgcttgcccagcggcaggaaggtgtacacgcccgatgccgtcttgcggatgaagcccgcgcgcaaaagcagcctgtggctggcgatctccgcgtcggcgggatcctccttgagcgtgggcgcgtacagctggctcatgcgcatgatattcacgttcgtcatagctttcctatctcctccatcaaagcgtccacgatggcgctctcctccaccttgcggacgacgtttcccttcgagaacaccacgcccgatccaaccccgcacgccacgccgatgtcggcgtcggcggcctcgcccgggccgttcaccacgcagcccatgacggccaccttgagcggcttgtcgaggttcgcgatgcgcccctccacctcgcgcgccagcccgatgaggtccacctggcaacggccgcacgtggggcagctgataagctctggagcgcgccggcgcaggtcgagcgctgaaagcagcgtccagcacgcgcggatctcctgcacggggtcgtctgtgagcgagatgcgcagggtgtcgccgatgccctcttccagcaggatccccaaaccgcaggcgcttttgatggcgccttggaaggtggtgccggcctcggtgacgccgatatgcagcggcacgtggggcagctccttgctgagcaggcggtacgtgcgcacggtagtcatcacgtcgtgagccttcgcgctgaccacgaggtcgtggaagccgcgaccctcgcagtagcgcacgtagtcgacggccgagcgtgccagcttctccgattgcgagagatcgtcgcgtgcagccaactcgttgtcgagcgagcccgcgttcaccccgatgcggatggggatgcccgcctcgcccgccgcgtccagcacggcatcggttttggccaggcccccgatgttgccgggattgatgcgcagcttcgccgcgccgcgtttggcggcctcgatggcgatgttcgcatcgaagtggatgtcggcgaccaccggcaaaggcgaccgctcgcatacagcctggaacacgtcgaggcttgagcggtgcgggatggccatgcgcacgatctcgcagcccgcttgcgcgagcgcgtcgatctgcgcgaggttcgccgcgacgtcggtcgccggggcgttcagcatggactgcacgacgacgggcgcgccgccgccgagcggcacggagcccaccgacacccggcgggtagcctcgctaggtttggcatgcgttgccacaagagcctcccgttctccatcccccaccgcgtgcaggcgcggtgctggaacagcgtctcaacagcccgcaggctgcacgcgcccaagcgcgtcgccggctattttacctctgattacccggtttccggccaaatgcacagggatttcgcgggcgggcgcacgacaacgaacgcacgcgagggcgcgggagggaaaacgagcgaacgagtcgcacgcgccgacgcgccatcgaaccacccgaaccgcactggagggcgcgtgcagcgaaaaacgcccgaatctcccaagttcgcgagttatgcgcacctccgtcatcccggaacgaccgtttcgggcgcagtcgagcgtttccgctcaagaaaacgccaggtcagaagttttctttgacttacttcggtcacgcagtccggtttcgaagtgcacataactcgtggacatggtgcttttcaagcgatttcgatgacggaagcgcgcacaagtcaaggacttgcgcgccgaccgcaacgccgaacggttcgcgagcgctgcgcacgctggcgcgggcagcgcgctctaaccgccgaaacccgcacccgagatgatgcgctggatatcctggttcgccatgaacaggaagaaaccgatgaacaggatcatgccggccgcgctcaggtagttgagcgcgcgcatggtcacgaccttgcgcgagatcttctggaacacctcgatgacgaagcggccgccgtcgagcggcgggatgggcagcaggttcataatgccgagcgacaccgagatggaagccacgaacgagatggcgctcgccaaccccagatcgaccgcctgcttcgacatggcggcgatcccgatgaccgacgtcgagttctgcacgacctcgcccgccgtcgacggattgaacagccccgcgataagctgcaccaccatgccgatgtacatgaagcccatctggatcgcatcgagcgggttgacgttgacgtgccggatgtcgcccgcgctggtctgaacgtccacgccgatgagcgagaacaacacgacgaacagcaggaccgcgaacagcaggttcacggccacgccggccacgaggatgaccgagcgcttccagaacggcaggctgcggtactgctgcttgtactcgctttcgaacagcgcatgcgcgtcttccaccgggcgcgcctgccccagctcgtaagcgacggctcctgcggctacctgcttcttgctcggcttgaccacgggggcgcggtacgtgttgtacttgtcttgcttggtggggccggcgatgctgccccattcgacgagctcgtcgagcgcctcgtacgcctcgtcatcggtgatgccgcagtcgcgggcgatgtcttccatgttcgcggttccgcggcggtagagcgcggccagcacgggctcgaggtgcgggctcatctcgcccggctccatcccgcacaccttcgcgtagccgcccagcagaaacggcgtgacgccgaacttcgtgccccatttcgtgaagccaatgttgggaccgggaagccccagcatgaactcggtcacgcgcacgccgaacgcacgcgccgccagatagtgaccgccttcgtggatgaacacgagaaagcccaagatgagcgtggcgtagacgatcatgagaacaatatccataaactcggttccctttcggtcgcgaggaatgcttctttcgtgctctcattataaagagaagggcgagcggcacgggcgctgcgaaccgatgtgcgaaaaaactacaagggctgcgcgatgcgcgcacgatgcgagagcgtttgcacgatttgcggaggctcggcgggcgtacggcgcacacggtccgcaagcccgtcgcgcacgcacgctgggaccgcgttggattcgttggcaaagcgcgtgcaatccgcgttggaaacaggggcacgccacgtggaaaacgcgctggaaccgcgttggattcgcaccagatccgagaggaattcccgctagacccacgccaacaaaacgtaagatggcgtcgtcacaatggaagagcgggcccgcgcaaacaaaacaacgaaccggaggagcctttggagaggatcgccatgccagaaatctgcaccttttacggcatcagaatcacaatcaattgcgagaagaacgctccgcaccacaaggcgcacttccatgcttcctacggaggcttcgaggcggtatactcaacggaaggagagctgcttgcgggcaagcttcctccccgccagacgaaactcgtcatagcatgggcagcgctgcacaagcccgaacttgacgacaattggtaccttgcaagctcgaacggaacctgttttcgcattgacccgctgatctgaggagggcgcaatggagtggcatctcgacaagaagatcatcgacttcggcttcgacgacgaagatacgatcgtcatcgactggaacgacggcagaagaagcgcgttcgacccgtatccctacatgaagggcgccatggagaagctgctggacgaagactacctgaaattggcgtacctcaccggttacgggcgaggcatcgcgtggcccggcaacctggacttcggcgtgcagcttctctacgaagcgtccgttaccgacaactccgaagcgcccctgccgccacgaggcccgcacatgcgatggagccccgaggcgctcatcgtccgccttaagtttgccgagaacggcaagatcctggtcgattggagcgacggaaccgtccgcgagttcgacgcatggaaccatgcgagcgacgacgacatcgaaaagttcgtcgatccgacctaccttgcgcaagcgcgcgtcacacccgagcgggatgccatcgtctggcccgacggcgaacacttcgatgccaagacgctctacgagcgctcagccgtcgtgggcttcgaaccctcggcgaagcatctcgcgcgcggagcccttcgctagcgcacgttcctgcgcgcttccgctcgcgcccaggcgtcgagttcttccagctggtcgaggctttccacgcgttggacgccttggcgctcgtgagcgtccatgacggcctcgacgcacgcggcgatccccaggtagctgccctcttcggcgaggaaggcggcgacggccacctcgttcgcggcgttcatcacgcagggcagcgtgccgccgcgctcgccggccgcgcgagccagcgccaggcaacggaacgtgtcggtgtcgggagcggcgaattcgagggtacccagcttcgtgaagtcgagcggctcgaccggcgcgtcccagcgctcagggtacgacagcgcgaactggatggggatgcgcatgtcggtggtgcccagatgggccttcacgctgccgtccgagtactccaccatggagtggatggcgctctgcggctgcacgaccacgctgatgcgatcgtaggacatggcgaacaggtggtgcgcctcgatgacctcgagacccttgttcatcagcgtggacgagtcgatggatatcttcgcgcccatgttccacgtggggtgcgcgagcgcctgagcgggcgtgatatcggccaggtcggctcgcgtgcggccgcggaacggtccgcccgacgccgtcacccacaagcgcgacacctcgcgcgggtcttcgcccagaaggcactggtagatggcgccgtgctcggaatcgatgggcatgaggcgccccggctcggcagccatcggcatgatgaggtcgccgcccaccacgagcgactccttgttcgcgagcgccagcaccttgccagctgcgagcgtctcgtagctggcgcgcaggccggccgcgcccaccagcgcgttcaccacgatgtcggcctcgggcaggcgcacgaggcccaccacggcgtcggcaccgaacccgagcgacccttcgccgcccgcgttgtgacgcgccacggcctcggccagcgacgacggcgcgctcgctggctgctgcgtgcctccgtgcgatccgctcaggatggcgtttcgcagctcgtcggcaatcggctgctcagccaggcgctcgtcgcccaccgcgaggtggcgcacgccgaactcgcgcgcttgcgccagcagctcgcccgtgcgcgtgcccacggcgaggcccaccacctccagcttgtccgcatggcgacgcacaacgtccagcgtctgcgtgccgatggagcccgtggagcccaagaccactatgcgtttcatgcacgcctcctagaaacaggtcgaacgtaaaccgtcggtagggttggctgcggcgcccgaggcctgccgccgtcagatcagcggaaccgggaacgggatgcagccgaaacccaaaagcagtatcgccgaggtcaccgccaccaagaacagcgagtcgcagcgatccagcaggccgccgtgacccggcatgatggtgccagagtccttgaagccggaattgcgcttgatgcggctctcggccaagtcgcccagcacgcccatcagcccgctgatgagcccgaacgccatcgcttgcgggatggacatcgtcacgccgggaatgagggtcatcaagcaccagaacgcggccgatcccacgagccccgcaatgaacccctcccagctcttcttcggcgaggtgcgcggcgccagcttgtgcttgccgaacttgcttcccaccagataggcgaacgaatcgttcgcccatacgctgaggaagatgcccagcgccagcacgccgccccatggctggggcagcgccgtgcggacgaccacgagccccgacagcagcatgccgcagtacgcagctccgaagaagctcacgcccacgtcgggcacgcgcgcccgcatccagaacacgtaccacacgatcagcgccaacagcaacgcgaggctcacgtacagcgcaccgttcagccccagcagaaacacgctgagcggatacagcatggccgcgatgatgccgagcatctcgttgggcagcttcgcgtccgaacgcagcatatagtagaactcgcccgccgtgatgcccgccgtagccaccaggaacgccacggtggtccagtcgctgacgaggatgcacaaaaccgacagcgccacatacacgaatcccgtgcggaaacgcacttgcaagtcggtggcgttcttcagcttctcgggcgtcttctcataggcgaaatccttgatgcgccccgtgcgcgagcggtcatcttccgcctcagccttttcgtcgggccgcggcgccacctatttcaccgccccgaaccggcgatcgcgcgactggaactccagcagcgcgcgcaagaactcgtaacggtcgaagtccggccacagcgtctcggtgcacacgaactcggaataggcgatctgccacagcaggaagttcgacacgcgcatctcgccgctggttcggatgagcaggtcggggtcggggatgtccgcggtgtacaaatggcgagacagcgtcgcctcacttaaaggctcgggttcgcggccctcgcgcaacgcggcatgcgcgccgtccatgtaggaccgcatagcgtcgagcagctccacgcggccgccgtagttcacggccacgaccagcgtcatcccgtcgttgtccttcgtcttctcccacgccttcgcgaaggcgtcgcgcgtcttcttgggcagctcgtcggtgcgcccgatggtcatcacgcgcacgtgctcttcgtgcaggccgtccacctcggccagcatcgtggtggcgaacaggttcatgaggccgatgacctcgtcctgcgggcgcttccagttctcggacgagaacgagtagatggtcag

SEQ ID NO: 8723 - DNA, 3988 bp, Unknown
  gut microbiota DNA sequence
atgatgacggccacatgctgcggcaccgccgcagcatcgagctgcgacggatcgagatccgccggggggttcgggaatatgtagtcaagcggtttgttcaaggctacctcacaaaagacgagaagccgacggcctcatggccgccggcttcggagatttaattcggcttcgccgaattaaatctccatgacctcggcttccttcttcttgaacgcctcgtcgacttcggcgatgtacttgtcggtgagcttctgcacctccgcctggccgcggcgctcgtcgtcctcgggaaggctgtcttccttgacggcgcgctcgatggcgctgttggcatcgcggcgggcgttgcgcacggctacgcgggcttcctctgcgtagcccttacactgcttcaccagctcgcggcggcgctcctcggtgagcgcggggaacggcaggcggatgactgagccgtcgttcgacggcgtcacgcccaggtcgctctggaggatggcatgctcgatggcgcccagcacgcctttgtcccacggctcgatgaccagcatgtgcgcgtcgggcgtcttgacgcccgccatctggttcaccggggtgggcacgccgtagtagtccaccctgatgcgatcgagcaccatggcgttcgcgcgcccggtgcgaacggaggcgaatgcgtcgcccagcgagcccagcgccttctccatgcgctcttcggcctgcatcataatatcgtcgatcatcccggttcctttcaccctgcgtttcgcaacgcgtccgccgccgacggaggcgggtgcgcgcgttttcgttattctactgcgattctaccgtggttcccacgtcttcgcccttcaaagcgcgcgaaatgttgcctttaacggtaaggtcgaacacgatcatgggaacgtcgttgtccatgcacagcgacgtagccgtggaatccatgacgttgagccccttggagagcacctccatgtagctaacgcggtcgtagcgcttggcatcggggttcttcttggggtcgctgtcgtacacgccgtccaccttcgtggccttcatcagcacgtccacgtccagctcgcaggcgcgcagcgccgcggtggtgtcggtggtgaagtacgggttgcccgtgccggcggccaagatgaccacgcgacccttctccatgtggcggatggcgcgtcggcggatatagggctcggacacttcctgcatgttgatggcgctctgcacgcgcgagaagatgccgtggcgctcgaaggcatcctgcaaggccaacgcgttcatcaccgtggccagcatgccgatgtagtcggcctgcgcgcgatccatgccctcggccgaaccggccaagccgcggaagatgttgccgccgcccacgaccacggccatctgcacgccggcgcgcacgatttcggcgatctgatcggcaaggtcgtccaccaccttcggatcgatgccgtagccgacgtcgcccgccagcgcctcgccggacaacttgagcagcacgcgatcgtagcggtatccttcagacataagccttatcctctcggtggtcgttcatataggttgctctaaccgttcatcttacccgaaaatgaaaacgaccgcgccctgctcgcacgcgttttccggcatttcacgcaaaggacagacggaatgcggggcgcaccggaagctctagaaggcggcggacagcgcgttcgctagcgccgcgcgcgggcgatggcggccgtgaacgaccggccgcgcagctcttcggcggcgtcggagccgtcgggttcgacggggcgctcgcgctcgaaagagcacgaggagaagccagcgcgatccacggcgatgcgggcgaattcggcttgagagcgagcggcgccgaacacgttgcccgcgcacgcaaacgcctgcatgacggcggtcggaagcggctcgtccgcgaacacgcccgcatggtagaggaagccgtccggcgcaagggcgcgcgccgcctcgcgcagcgccccttcgagatcccatgccagattcagcacgctgttcacgatcacgacgtcgaacgacgcgtcctccacgcccgccgcgcgcaggtcctcgaagcacccgcgcgcgaacgcaagccgctcggcccacgcggcgccctccgcgcacgcggccgcggccgtcgcctccgcgcgggccacgcaagcggcggaagggtcgacgcccagcacgaacccgtccggccccacccgatcggccagcttgcacgcgcccttgccgttgcggcatcccaggtccagcacgcgcatgccgcgcagatcctcgggcaggagcatctcgcacctgccgctgtacccgtcgcgcggcatctccgcgtagtgggcctccgcatgccgaagctcgagttcgtccatgttcgctccttcccttccgaccggcgccccgcgcgcacggcctcggcgcgcggcgacggcctgcggccggcggccttttgcgggaaggcggtcgacgctaccccgatctagcgcaattctaacgcggatcttacgcaaatttggcgcggaaccaacgcagatccaacgcgttttccatgcggtttccacatctcgttacgcctggtaaacagcatcgtctcccggtcgatgaggctgaatcccccatgttatttttcacttcatggatatctatctgagtcatagttcgtcgctgacgttctggtcgtctttcgaaatcagctcgggtgcgctcgcgcgctgtcaggactccagaagcccttcctggagaaaagacgaaccgctgccctcagaatgcaaggtcaccgaactcctgatccgcgagcttgccagaatgccggagctcgagggcatcgcgctccccctgcacgtcatcgtgccgagccaagcggcacgcagcagatgcgggaaagtcgcctgccacgtgagctccgcaatgtttcccagaggatcgttcgtacgcatcgcccgcaacgtgcttgcaagctcgcccgagctctgcttcgtgcaaatggcttcggagctgtcgcttcccgcgctgatcaggcttggattcgagttgtgcggcacatatggagtggcaacggttggaaaagcggacttccggttcgagcgccccttcaccactcccgcccgcctcgcgcgcttcctggacaaagccgcgaacatgccgggaaccgtcaaagcccgaaaagccctcaagcacctcgtcgcaggctccgcctccccgatggaaacgaccatggccatgctgctctgcctcccgctccgcatgggcgggtacgcgcttccccaaccgcgtatgaaccacgccgtgaaccctcgagggcgatcgaggctcgcagtcgatgacaaatgctactattgtgatttgatctggccgaacgcgaacatcgcgcttgaatacgacggccgcgagcaccatggaaccgtcaacaagatggccgacgacgcgacacggcgcaacaacctgctcgaccgcggcgtctccgtcttgaccgtcacgacgagaacggtccgaaacctcatcgagctggaccatatcgcacgcaccctgtcgaggcagctcgggttccgtccgcgatgcgaccagcaggcgtggcgcgccaagcagcacgagctgcacggcgaactgctgggcgcctctttcatgacggttgccccgcgaggggaaaatccccgtctggtggtaaaaacgaaacggtttggcaatctcgaaccctaggaaaagcgcgctcgagagcggcgcgttaaagcaaacggagcataaccccaggtggcggaaaaatcgatcggcgaagacggtccggccgaattaccaaaccgatcgatttctaccgcacagggcgaaaaagtgcgacacgcgcgcaagagcgccgctaagagacgggaaagacgagggcgacaggacgcgcagaagcgcgaaggcagcgcgaaggcgggggaggcgctgcggggaaaagatgacagggacgaaagatgccgcagggacgcgcagaagcgcgaag

SEQ ID NO: 8724 - DNA, 763 bp, Unknown
  gut microbiota DNA sequence
ggcagcgtcctgctgggagctgccggagccgccgccgaacaggcgctcgagcatagactcctgcgcgctgttctgctgggtcgacgcgctctgggagctttcatcggagccgagcgtgacctcgacttgcttggtctcgccgttgcggttcacgtcgagcgtcaccttgtcgcccgggttcttggagcgcacgtccagcatgaggtcgctggcggatgcgacgtccttgccgtcgaacttcgtgacgatgtcgccctcctgcaagccggcttcggccgcgccggagccttcgctgacggccgccacgtaggcgccttcgtcaacggacaggccgtagcgcttggcgttctgcgcgttcacggtggagagggacacgccgagctgcgcatgggtcggggtcttgccgtcgatgatctgctgggcgaggttcaccgcgtagttcaccgggatggcgaagccgacgccggagtagttgccggagtacgacgtgatcagcgtgttgatgccgatgagcttgccgtccgcgtcgacgagcgcgccgccggagttaccggggttgatagcggcgtcagtctggatcatattcgggtagatggtggattcgcccgtgctgttgccgtactgatcggtggaggcgttcacgatctgagaacggctcgtggccgacacgatgccggtggcaacggactgctcgaggccgaacgggctgccgatggtcatgacccactcgccgatgacgagcttgtcggagtcgccgatctcg

SEQ ID NO: 8725 - DNA, 2066 bp, Unknown
  gut microbiota DNA sequence
gtcggtggaggcgttcacaatctgagaacggctcgtggccgacacgataccggtggcaacggactgttcgaggccgaacgggctgccgatggtcatgacccactcgccgatgacgagcttgtcggagtcgccgatctcgatgggcgtaaggccgctggcatccttggccttgatgaccgcgacgtcggagctgggatcgctgcccacgacctcggcgtcgtaggtctcgcccgcgatggtgaccttgtacgcgctgccgccttctacgacgtggttgttcgtgatgatgtagccgtcggcggtgagcacgacgccgcttcccagcgaggacttcgtcagcgtgccggcttcagatccgttgccggccccaaaaccgtacatgccgcccgcattggactggttcgtgtacacatcgatggcggccacggagggaagcgccttctgcgcgacagcctctgccagcgtctggtcggactcggcgtcggtagcgttgatgctgccggagttttgcgaacccagctgcgtcgcagacgaagaggatccggaatcgttaccgcccgcagtggcttgccagatgccgaagccgcccaaaccgatggcgcaggcgacggcggcaccgcagaaggcgagcaggaacgtgcgtccgccgtgcgacttcttctcgacggtcactcctcctgccggatgctgcgggtgctgaggctgctgatagtactgctgttgctgctgataataaggctgctgccccatgggggcggcatgctgggcatgctcgtcgccctgcgtcggcggcacggggccgttgccgggggtgctgccatgcgtatcggtcatgtgcttcacgctccttcgattcgtgctggtctatgatcgccaagcttttcatttttgaatgccgtcaccttagcacgctccttcccagatcagagacgcttgcgagcaaatgtcacctttgcgtcatggaattacaccatttggtgtacggaacgcaaccgagttgtacacccgcaggcgcacgcgagcgacgcatgccgcccgaacagccgattttccgaagaactttgctacgcgaagcaggcggcgcatgtaagatacgaacgaacaacgatgccgtcggaggagatcgcatggctgaatcgccgcgaccgcgccgcagcgcgggaacatggttccaatccctgtacgtccgcgtgctgttgcggttgctgccgcatctgatcaacgtcttcaagcacgtgtcgcccaagatccgcgcggaggttgattacctcgagccgggctatacgttcatgttatccgtgaacgggacggatctggcgtgcgcatgccgccgcaccgcatccggctcgttcaagcgcgttcctcccgccgccatcgcctcggacgtggagcccggcagcggcctggccagcgccgacgcgcaggccttcaccgtcgactacgtcatcgcgttccggtcgctggcctatgcgttcgcctgcttcaccggcggcgtgacgctgaaggcggcgctcgcgcagcgtgcgttctccacgcgcgggcccaacaacacgggcgtggccctcacctatatgttcacggcgctgctgaagctgttcttcggttggcgcgccgcgtaccgcacgccgaagccgctcgcaccgtccgccccgcgcgcctagcgctatccaacctgcaaggagaagcccatgcaaggattcgaattctgttgccccacgaaaatcgtctgtggcgcgcatgcgctggacaagctgcccgacgaggtggccgaccgcggcatgaagcacccgctggtgatgaccgacgcgggcctcgtgaagctgggcgtggccgcgaagctgaccggcgtgttggatgccgccgacgtgccctacgaggtgttcgaccaggtgcctcccgactcgtcgatggacgtggtaaacgaggtggcgcgcctgtacgccgaacgcggctgcgacgggttcgtggccatcggcggcggctcggtcatcgatacgacgaagggcgcggccgcgtcgctggcctgcgagggcgtggacttcgccacgctgcaaggctcggagatt

SEQ ID NO: 8726 - DNA, 148 bp, Unknown
  gut microbiota DNA sequence
gaacgaggtggcgcgcctgtacgccgaccgtggttgcgacgggttcgtggccatcggcggcggctcggtcatcgacacgacgaagggcgcggccgcgtcgctggcctgcgagggcgtggacttcgccacgctgcaaggctcggagatt

SEQ ID NO: 8727 - DNA, 112 bp, Unknown
  gut microbiota DNA sequence
tgccgacacgcacaagcatgcgaagctgtcgttcacctcatacaagctggtgccgcacgtggccatcctcgaccccgcgctcacctcgtcgctgccgccgaagctgacggcc

SEQ ID NO: 8728 - DNA, 5893 bp, Unknown
  gut microbiota DNA sequence
ctgaaggccgacctgccgccgttcatcgccgtgcccacgacggccggcaccggcagcgaggtgacgctggtcgccgtggtggccgacacgcacaagcatgcgaagctgtcgttcacctcgtacaagctggtgccgcacgtggccatcctcgaccccgcgctcacctcgtcgctgccgccgaagctgacggccaccaccggcatggacgcgctcacccacgccgtcgaggcgcacacgtccatccagaagaaccccgtgtccgacgcgttcgccgcgaaggcggtcgagctgatcgcggcgaacctgcccacggcctgccgcaacggcgccgacaccgaagcgcgcaccagcctggcgctggcttcgcttatggcgggcgcggcgttctcgaacgccatggtgggcatcgtgcacgccatcggccactcgctgggcggcctctgccgcatcccgcacggccaggccatgatgatgctgctcccccactgcgtgcggttcaacctggatcgaggcatccacgccggactctacggccagctgctggacgtcctcgcgcccgctcgcgccgcggccttgggcgccggcgcggcgccggaagcgctcgatcgcgcgttcctcgacgagctgaccgccttgaacgacctgttccaccgcgagtacggcgtgccgctcacgctgtccgagctgggcgtgtcgcgcgacgacctgcccgccgtggccaagcaggcgcgctacgacggcgccgcgctgtacaacgagaccgagatcacgctggaggacgcgatggccgtccttgaagccgcctactaaagcaagcgaaggagcccgcatgaccgccaccccctcctacgagagcatcgccgacgtcgaggccgccgcgcagaagatgcgcgacttcttcctgaccggcgccacgctggacgtcgactaccgccgccaggcgctcgcgaaactgaaggcgtacctcaaggcgaatgaagagcgcatcctgtccgcgctgaccgccgacctcggcaaagcccctttcgaaggctacgccaccgagctgggcctcgtctacgacgagatcaacacctgcctcaagcacctgaacagctggtcgaagccgcgccgcgtgcccacccccatcgtgcacttccattccacgtcgaaagtgtaccccagccccttgggcgtggtgctggtgctgagcccctggaactaccccgtgcagctggcgctcgtgcccctggtggacgccatcgcggccggcaactgcgtggcgctcaagccctcgcgcacgtcaaagcacacgagcgagctcttgctcgatatcctgtcaaacgtgttcccgcccgagttcgtctgcggcttccccggctccggcgcgatgaacgactggctgctggaggtgcgctgggaccagatattcttcaccggcagcccgaacgtgggccatgccatcatggaggcggcggcgaagcacctcacgcccgtggtgctggagctgggcggcaagagtccctgcatcgtggacgaaacggcgaacgtgaagcgcgcagcgcagcgcgtggcctggggcaagggcatcaactgcgggcagacgtgcgtcgcgcccgactactttctcgtgcacgagcgcgtggcggacgacttcgtgcggcagctggacgcgtgcttccaccagtattacggcgaggacatcctcgcgtgcgacgaatggccgcacatgatcagccaacgccacttcgaacgcgtgatggggctgatcgaacatcgcaacccggatgccacggtggcgttcggcgggcgcggcgacgcaggcacgctgcgcatcgagcccacgtgcctgcgcggcgtgacgctggacgaccccgtcatgaacgaggagatattcggaccggtgctgccggtcatcacgtacaagacgctggacgaggcgttcgccatcgtgcgcacgttcgagaaacccctggccacgtacgtgttcagcgacgacaaagccgtgcagcagcgtgtgatccgcgagctgccgttcggaggcgccaccgtcaacgacgtggtcatccacctggcgaacaaccacatgggcttcggcggcgtgggcaactccggcatgggcgcctaccacggcaaggtgggcttcgactgcttcacgcactacaagtcgacgctgaagaagggcacctggatcgagatgcccatccgcaaccccccgttcggcgacaagatcaagctgctgcgcatgctgatgcgctaggatccgcaccaacgccgtcgacgcttcggcagtcgacggcgccttagccctttacgccctgcttgatggtctcctgcaaccgagccagatgatcctcgtcctcgatccactggtggctcagcgtgcccagaggcaagtcgaagccgcacgcctccaacgccgcagcaacctcgtcgggaccgttggtcccccaaccgtaggaaccgaacgggatgcccacgcgcccctcccagcctgctttcggcgagaggcccttgaggtagcacaaaaacgcggcaaccgtgggcatcatgccgttgttcagcgttggcgaccctacggctacgaacttcgccgataaaagatcggtcatgatgtccgagatatggttcgccttgaggtcgaacagccgggtgggcacgccgcactcgatgaacgcctccacgatttcgagcgccatgtcctcggtggtgtgccacatggaatcgtacacgacgatagcgctgtcatcgggggcgagcgaactccaccgcccgtactcccccaggatctcggccacatggctgcgccagatgacgccgtggctgggagcgatcatgtcgacctcgcacccttcgaacgacttgagcgccttttgaacatggcgcgagtacggcatgacgatgttggcgtagtatttcttcgcctgcgccagcacctcgggcaggcccacctcgtcgtcgaagtgcttcgacgacgcgaaatgctggccgaacgcgtcgttggagaacaggatgcggtcgtattcggaatacgtggccatattgtcgggccagtgcaccatcatggtctgagtgaaggaaagcgttcgcttgccgatgcgcagggtatcgcccgtcttgaccggcacgtagccgcggtcgccgtaatgggcggtcaaaccgttcacaccgtgaggaccgctggcgtaaattttcgcacgcggagcgaggtaggaaatggcaggaaccgcgccggagtgatcttgctctacgtggttgacgatgacgtgctcgatacaggccggatcgaccacctcgctgatacgctcgataagttcgccggcgaaagccggtttgcaggtatcgataagggtcacctgctcgtccatgataaggtaggcgttgtacgtggaaccgcgatccgtcgtgtatccgtggaagttgcgctcgttccaatcgatgccgcccacccagtacacgtcgggcttcaccttcaccgcatgcagcatggccgctcctatcgttcgccgcccctcccccgacggggaggggctctcgtctctcggctgaaatgttatcacatggaaagcaattgccgagagctacctcttctccaccggcacctggatctcggtgagccactccgattcgggaatgccgctccatgatcgcagcgatgcggcatgcacgccttgagtaacatgaggaggttttgcgactcgtgaaacaattcgtcaacgactgacgtgtttgaagcgaagggctttctcacgaatttctttcaggttgttttcaacatccgccgataagctagaagcaggccgacccaagagaaaggtgcgagcatggctgcacaatcgccccgcagacgcgcctcgcgcattcgaaccgccgcctaccgacgccggctgttcgcccgtcagacaaatccgctcgccagccgcgagcgcccgattttcaggcgaaggcgcggacgctggaccgccgcacgcctgtgctttttcggcgcggcggcgttgttggcgggcgcggtttcgttttccatgctgtcgtttcccccggccgcagccgatatagacgcagagaagcgcgcggcgcaggacgttgcttcgttgcaagaagacgtctcgcatccgcaacgctccgcctccctggaggtgcccgccctagcgcagaaccccgagctgcccactggctgcgagtcggtggcgctaacgaacgcgctgctatcgctcgggttcaacctgggaaaaacggatatcgccgacaactggcttcctttgagcgaagacgacttcgtgacggcgttcatgggcgacccgcattcgaccgacggccacagctgcatggccccggcaatcgtccgaaccgccgacgcctatctggccgcgcaaggatcttccctggaggcgaccgacataaccggctcgtcgctcgaccaagtactcgatcaagtggccggcggcaaccccgtcatcgcctggtgcaccatggggctggagccgcccggcgccgcctaccggacggcgcgcgaaaacggccgcacctaccgtctatacgcgaacagccactgcgtggtggtgagcggctacgatttgaacgaaggcctcgtgctggtcagcgactcgctggccggccaggtgagctacgatctccagcagttcgccgttcgctactacgaactgggcgcgcaagccgtggtcatcgaataagcggccgcgcgaacgctcgcctattcatgcgccctgcgcagcgcggcgatctcttcggcgtagcctgcgagatccgggttgggggtctccaggtagaacggcaggtcgcgcagcttcggatggttcgtcacggcggccagggctttgaagccgatctcgccttcgccgatgcgggcatggcggtccttatgcgaaccgcgggcattcatgctgtcgttgaggtggatggcatgcaaacggtcgagcccgatcacacggtcgaactcctccagcacgccgtcgaggtcgcccacgatgtcgtagcccgcatcccacacgtggcacgtgtccaggcacacgcccacgtggctctccagctccacctgcgcgatgatggccgccagctcctcgaacgtgccgccgatctcgctgcctttccccgccatcgtctccaatagcaacgtggtggtctgatgcggcagcaggctctggttcagcgcgtcggcgatcttggcgatggcaacctcgcacggctggccgacagcgctgccgggatgcatgttgtacagctgatgcggcgtctcctccatacggccgaggtcctcggccagcaccatgagcgcgaaatcgcgcgtctgctgcttgtcggaggcggggttcagcgtgtaaggcgcgtgcgccaggatgcgctcgatgccatgctcgggcgcataggcggcaaaggccgcgatgtctttcgggtcgatggccttcgcacggccgccgcgcgggttgcgcgtgaagaactggaacgtgttggcgtcgatggacacggcgtccttcgccatgtggagatagcccttcgcgcttgagaggtggcagccgatggtgaacatgcccgcatcctttccgatggtttaatcgtgacgcacatagtagcatataggagcgccggaccgaacggctcgtgtgcaatgtcgcaggttctacgcgttcgcgcgagcccggtggcatccgatggtgaacatgtggcgagatccttccgatcagggagctttcccgccatcgtagcgcccggccgtcgccgcgcggcaccggcgagcgtcgctgaacccacttgttggaaggccgttgaagaaccgtgcagccgagcgcaatccgaccgagcggcggcgaagcggccgtacggtctgcgatagtgtcggtcgtctgcaaggttcgcccgacgcgcgcggcaagccgccgaaaaccccgcgttgacgccc

SEQ ID NO: 8729 - DNA, 1264 bp, Unknown
  gut microbiota DNA sequence
gcatcatgaagaagggctacatcgccgtcggcgttctgttcgctatcgacgtcgccgtgacggcggcgttcgtggcgatcatgcccgaccaggtgccggtccatttcacgggcggcgagatcgaccgcatcggcagcaggttcgaaagcttcaccgcgcccgctctcgcgcttgcgttcggcctgttcatgatgttgcttacgaggttcggcgacgaaggcaaccgcgcaaccatgatgaagctgaccgtcggcatgcaggcgatcttcatcgccgtgacggtgttcgcatccctgaacatcctgtcgcacgacgtttcggatatctccctcggcgctcccgacgccggcatgtcgaagatcgccgctttcgtcatcggcgccacgctgctgttcctcggctacctcatgcccaaagcgacccgcaactcggccttcggcgttcgcctgccgtggacccagaaaagcgatgccgcgtggcagaaaggccagcgcttcggcgcgcgcacgtccatccccgccggcatcctcatgatcgtctgcggcatcctcttcgacggcgatctcgcattcgccgccaccatggtcgttttcgcagcctgggcgctcatcagcatcatcggctcgtacttcgtgtgcaaggacatcgatgactgagcagttggcgaatctccaccgtttgttcgagagctttccgctcaggcccatacacacatcgccgcttatccacaaagcaaacgactactatcactggagctacgaagaccggcgataccttttcaaccgaatgttcgcctttatacggcactgccccatttcctaccgcaccttcatcgtcgaaaagcgcctatgggaagacaactatcagctcaccggtcgtttagcacgcgacctccacgcgtttcgcgggaagcggttcgccggctagcgaaccgcttccgcagccgttacagcagcacccccagggccacggcgatcgcaacgagcgcgagggatcccgccatcgcggccacgtcggctgcgacgaatgggtactccttgtagccgctcgccgcggtgcgcaggttgaagccgcgcacctccgcggcgatggcggcgctgttggtcttgcgcaccgacgacaccaaaagcggcacgcacagcggcaccatcaggcgcaccttccgcacgatgccgcccgcgtcgaactccacgccgcgcgccgtctgcgcttccatgatgcccttcatgtcgttcatgaacatcgggatgaaatggatggtgga

SEQ ID NO: 8730 - DNA, 19348 bp, Unknown
  gut microbiota DNA sequence
tctaccagcaccgcgccgctgggcgtcgtgagcacctgcactacagccaagatcagcgagaacgcgaacaccgccttcgccagaccgatggcgggcctcaccatgccgcacgtcgcggccagcgcgaagcctgccgccagcagcacggccaagaacgcgaggttgctggagcagaagcacgcgagcgcgaacgccgcggccgccgccagcttggccaccgggttcatgcgatgcagcggactggtgccgggcacgtattccagaaacgagctcatgcgcacacgctcctttcgctcgtccgaacttcctccatgacggccgcggccatctcgtccagcgtgttggcgcggccgacgggcccgtccgcgaggtgcggcatctcgcggcccagctcaagcgacagctccacgatctgcggcgggacgagcgaggcgcgctcgagcgtttcacggttgcgcagcacgtcgaacgtgggagcgtcgtccaccacctcgccgccgctcatcacgatgcaacgcgccgcgtaatcggccaccacctccatgtcgtggcacaccatgaccaccgtggtgcctcgctcgtggatgcggcggatgatgtccatgaccttcacgcactcgcgatagtccaggccggtggtcggctcgtcgagcaccaccaccggcggcgcgagcaccacgatggacgccagcgccagcagctggcgggcgccgcggttcaacaggaacgggtcgtcgtcggggtcgaaggcgaactcctcgacgatcgcgtcgacgcgcgagtcggcgtccggtccgtccagccccagcgctttgaagccgaacagcagctcctcgcgcaccgtgttgcagcagatctggctgtcggggttctggaacaaaaagcccacgcggcgggccagctcgctggtgcgcaggtcgctcgtggggacgccgtcgatgagcacctggccggcatcgggcttgagcaggccgttcatcaggcgcatcgtggtggacttccccgccccgttcgtgccgacgaacgcgacgaactcgccgtcgcggatggtgaagctcacgcctttcaggatgggagccgacccgtcgtaggacgcgtgcacgtcgcggaactcgatcatgcgagcacctccttcaacgcctcgcgcgcctcgcgcacgttacggacgggcgcgccggcgtacaggccttcagcgcgcaggcggttcatgagcgtggtcgaacgcgggcagttcacgccgatggccttcagctcgtccgaatgttccagcacctgcgcgggggcgtcggcgaagcgaatccgcccctcgtcgacgacgaccagcatatcggcgtactgggacaacagcgcgatcttctgctccaccaccacgacggtggcgccatgctcgcgcgcatagcgcgccaagaggtcgaacacagtgcgcgaactcagaggatcgagttcggcggtaggctcgtccagcacgagcacccgcgggttcagcgccaggacggacgcgatggccaccttctgcttctgcccgcccgacagcgacgagatcacgcggtcgcgcacctcggagatgcccatgtcggccagcgcctgcgccacgcgatcctcgatctggccgcgcggcacgccgaagttttccaggccgtacaggatctcgtcctccacgaccgacgtgacgaactggctgtcgacgtcctggcagacgctgcccaccagccgcgacacgtcggtgagcgcgacttcgcaggtgtccagcccgtcgacgacgacggagccgtagaagtcgcccggatagcaatgcgggatgatgccgttcagcgcgtaggtcagcgtggatttgcccgagccggccgccccggtgatcccgacgaacgcgccgtcgggaatgtcgaggtcgatgccgctgaccaccgggcggtcgccctcgcggtaccggaacgtgaagtcgcgtatcttgatcatgaaagagtctttctggggtcgcaggttggcgtagtgagtcagcgaggcgggctgtttcgccgttcggagaacggcgaaaccctagcgcttcagcaccttcttcagcggcatggccaggacttggacgaggatgcagttgaacgtggcggtgccgaagacgatggcggcgtacgtggccagggccaccatgacgtcgccgcccgtggacaccacgttgatgtagacggacagcagggcgaaggtgccgccggacaccaccgtggagacgaacgtgttcaccagcgggttgaggtcgagcttgccgccgatgcgcaggggcaccttgatcagcaagccgcaggcgagcgcgcccaggacctcggaggggatgttcagaagcggcgtggcgttcaacagggggatctggcagatgaggccggccagcaggccgatgaccagggcctgtcccagcttcggacgggtcaggatgatggccaggcagtacatcgcgatgatgaagttcggcttcatgcccatcgacgagagcagcgagcccaccgtcagcttgagcaccgcgcccgcggccagcagcacggcgatgaggatgaggtcctgcgtggacaggcccgccctgctcggcgccgccgccacttcgcgcttgcgcggcgctgacgcctcgcctgccgtcgccgtttgcgtcgcaacctcgcgcttgatctgctgttccatgttcctcaatcctctcttggcggagtccccgccggtcgcgtgcccctcccggggcgtctggtttgccggcacgaacttcgcggacgaggatcactccgcgcaatcaacctcatggcctcggcgctgtgcgcccccgcaatgaaaaagacctgtccttctcatcgaaggacaggtcttgtaaacctgcggtgccaccttcacagttgattccgcgatgcagaaccctctcacgaacatgccaacacatgttctgcccttaacgcaggctcacggtccagatactcggtcagcccggccgcttgcgcgccgcgccttcctttcccctttccctcggcgatccatttaccatccagcttactgcgggaatcccagctgcgcccgctctctgtgagtgctcatgacggcttgaccttcgcctcatcggtttcaaggtattaagttgtggcgcaaactatagcacagtgttaggaaaagctgtcaagaagtttttcacagcatccgtcggacgtgtccggcgtgccaaagggacgggtgtcttgacacacgcccctttggcaccattcccttgataccatcaaagcgtgtcaaatcacccgtccccttgacacgccttgtcgccggccgacaggtacgcggcgacaaggcggcgcgtttcggccgccgacggctccaaatcgccgcacacggtcagcattgagcgagtgcgggcgaggccgatagcggtcgacgacgccacaagcgcctcctcctccaccgagcgatccgtcagcatacgccgttcggggcactcggctaaatgcgcgcgcaaagcgtcggccatggagcgctgaatagccaatatgtcgcgctgaccttgaaagaacagctgaggcatggagcgcagcgcttcgcgtcgcaggttcacaatgccctcgtccacgcccgaagcggcgcccgttcccactacgccgaccaacacgtcgaggtagcaggcttcgctatgctcttcgaggatgcgaaccagctgttcgtcgtcgggaaacgagtccagacgacccatgatggcggccgctttcgatgggaagtagttgaagaacgtcttcttggagatctcggcacgggcgcagatgtcctctaccgtcacgccgtcgtagccccgttcgatgaccagctctaacgccgctcgctccaccgaaagcctggctttgagcttcttacgataccgcaggccttccgccgacggctttgtctgttccacgttgcgcgcaccctttcatcgccgcgatgtgccgtttcggtgcagggtaccacaactttactgccgagcacttttcatctaccgaatgaatatttatactgagtgtaaatcacgtcaaccgcatgacaacgggcgtctttgaagtcgggttagctgcaagctccccttcaaaggcgtttttgttcgcagcgcacattcggaaggaacaggtatatgggtttaacgcgcaagcagatcgtcatgctggccgtgctggtgttcggcacgttcgtgacggttctgaaccagaccgtcgtcgccccggcgctgccgtcggtcatgaccgagatgagcgtcgacgcctccatggcgcagtggctcaccaccggcttcacgctggtgaacgccatcatgatccccatcacggctttcttgacggaccgcttcaccaccaagcggctcttcctcgtgtccatggttatcttcacgttgggcagcttccttgcgggctggggtcccagcttcgtcgtgctgctgctgggccggctcgtgcaggccgccggcgcgggcatcctcatgccccttgtgatgacggtgctcatgtggacgttccccgtggacaagcgcggtacggccatgggcctgttcggcatcgtcatcgcgttcggccccgccatcggccccaccgtggcgggcgtcatcatcgaccgctacacctggcacgatatgttctacatcatcaccgcgctgtcggccgtcgtagtgcttatcggcgcgttcgtgctgcagaagggcggcgaaacgaagaaggacgtcacgctcgacgtgccctccgtcatcctgtcgtcgctgggtttcggcggcctattgtacggcctgtccaccatcggctcctacggcctgcgtgccgacgctatcgccggcacgctcgttggcgcggtagcgctcgtgttcttcttccgacgccagctgaagatggagaagcccatgctgcaggtgcgcgtgctgcagaaccgcaagttcctcatcgccacgatcatcggcatgttggtgcaaggcgcgcttttggctgcaggcatcttggtgcctatctacctgcagtcgctcatgggctactccgccaccgtgtccggcctcgtgttgctgcccggcgccatcatcatgggtgccatggggcccatcgccggccgtctgttcgacaagcacggaccgcgcgtgctggcgctcgtgggcatgggcgtgctcacgctgactacgttctgcttcgcattcctgagcaccgaaaccggcatcatcaccttgacccttctgtacaccgtgcgcctgttctcgctgtcgctggtgaacatgcccatcaccacctggggcatgaacgcgctcgacaacgagctggtgaaccacggcacttcggtgaacaacacgttccgccaagtggcgggctcgctgggcaccgccatcatcgtttcggcctccactatcgccacgaacatgagctcccggacgatgactcccacgcaagccagcatcttcggcatcgacgtggcgttcgccctagccggcgcgctgtgcctcgtcggcttcgtcatggtcgtggcgctggtgaagaacaaaccgggcgaggccgccgagaaggatcgggacaactcccgccgcacggtgctggagtccatcatgaagcgcgacgtgtacacgctgcccgccaacgccaccgtggccgaagccatgcaggtgctgatggaccggcacatcagcgccgccccgctggtagacgaacagggcaaggccgtgggcttcgtatccgacggcgatatcatgcgctacctgtcgaagcgatcgcagatgctgatggaccccgtggtcatgatcatgcagaccgtggacgccgacggcggcaaccaggacttcgcccgcaagctcgacgagctcatgggcatgccggcgaagagcatcggcgcgaagggcatcggcgcgaagggcatcatcggcgtggacgtgcatgccgaccttcccgaagtgtgtcgcgtgttgggcgagaaccacttgaagaaggtgcccgtgctggacgagggccaggtggtgggcgtgatcaaccgctccgacatcacgcactactccatgcagcagtacctggccgagcgcgacgccgaagcggcgtcgaaactggagcgctccgaggaagccgccgcgctccccgacgacgaagcgatggcatcgtccatctaacgcgcccttcccttttcgctcccctgagacggcagccgcttggctgccgtcttttttcgcagcgcatcccaccgctttcgcagcggtcgcctacagactccccttgcatgctagcatctgagcgttaacctgcccgaagggaactcccatgagaaaacgcctgatcgctcttgctaccgccctcgcattcgcctgcctgctcgacccaaacgtcgcattcgcgagcgctgttcccgtcaccatcgaaatcggcgccgacggcgcgccgatcggcacgtcgggagaaggctggacgtacgccgacggcaagctcacgcttggcgcggggcacgcgttcacgttcacgggccacgcgctcaacgtctcgagcgagaacctccttcggaacaagggcgtcatcgaggacggcacgttcgtcgatgcgtcgcagacgtccggtttcgccgtgcgcaacgaagcgggcggcgtgatcaggggcggcgcgttcaccgcaagcatcggaaacgcgggcatcatcgcaggtggaaccttcaacagcgacccgaacgatcccacaaaatcgtacgtgagcacctcctccggcaccatcacgggcggcacgttcgactgcatggtcatggggatgagaagcggcgcgatcgaggacggcacgttcaacgagtccgtgaacatattcaaaggcttcgccatcaacggcggaacgttcaacggagaggtgaacagcggcaacagctccaacctcggcggctccatctgcggaggcacgttcaacggccgcatgcagaatcagggaaccatcgaggacggcgtgttccacggaaccgtgcaaaacgcatccaacaacgccggcgccggcgccatcgcgggaggcacgttcaacggctacgtgaacaactacgacggcgccgtgatttcgagcggcacgttcaacgacggcggcgaaaacaacaacgtgaccaacgacggcacgatacgcggcggcgagttcaacatcggagtggacaacggcggagccatcgaaggtcagggcgtattcaacgcatacgtgcagaacggatacatgaggttcgatcccgacgagaaccgatcctgcaccatcaaaggcggcacgttcaactcggatgaaatagacaacttcggaaccatcgaaggcggtacgttcagcggcaagattctcagcaggggcgtcatcgcgggcggcgcgttctcctccaccagctccgtgacaagcaacgacgaagacaccaccaccggcggcggcaccatatccggcggcacgttcgacggcaccgtaaccaacggcgatcccgaccccgactacaacaacgccgtcctgacgggcggcacgttcaacggcagcgtgacgaaccacggaaccatcgcaggcggcacgttccttagcgacgtgaccaaccgaggcgtcatcgaaggcggtatcttcgagaacgtcatcagcgaccagggcggcaccgtgacctcgtgcgcgtatccgctgcgcgcgaacctgaccgggctgtccattgccgcggtacccagcgcaatgccgaagaacacggctgcaggcttcccggcggaaccgtccgccgcgttgaccgccgcgttcgagaaggacggcgcagatgcgaacctctaccagctgagcgcgaacgaaggctacctgctgcccgacgcgatcgacgtgcgctgcggggcggccgacgggcaaacgctcgcactggccgcgggcaccgattacacgtacgacccggccaccggcgcgatcgcgatcaagaagagcgtcgtcaccgggccgttgctcctcgcggcgcagggcgcggcggctcccacgcccccggttcccccaacgccggacacgccggcgcccgctccggaacccgagactccagcaccgaagccggagtcgaagcccgatgcgcccaagcccttgccaagcacgaccgactccaagcaggcaccggcgaacgccgccgcactcgccgcgacgggcgatgcgcccctgccgcaaattgcgctgggcatcgcgcttctcgccggcggcgtaacgctgacctgcgcgatcgccatgcagatcacgcggaaaaagcggagcaaccgctcgtagccaacgagagagggcaccggcaacggacagggcacgtcgagcgccagcacggcgggtccttgcacgaaacgcgtccttttttgcacaaaaagacgcgacgtttgatatttcgcggtcgcagcttgcagcagcaattcgagcagccgaagaaaacagcaggtcaaggaagcgcgcttcccaacaagggagcgcgctttcgttttgtcgcgccttttctcagccccgtgcgtcaaacgtcgcatctttttgtgcaccgcaggggaaatctcctgcacaaccgccatcggcagacaacgcaacggggatcgccgctaacagcgaacggcgcggaacgcaagaaaaacgagtcgcccgcttgggctatccggccgctcgggccagcatctcgcgcgcgtgcgcaagcgatgtctcggtagcatcgcccgacagcatgcgcgcgatttcggcgggacgctcgctttcgggcagctgccgcaggtcggtttcgggcatggccccctcgtcccccgcagccttgcgcaccacgtagtgcgcctggcctcggacggccacctgcgcgaggtgcgtgacgacgatcacctggtgcgtgcgcgccaaatcggccagcacgtcggccagcgccacggcggtcgaacctcccacgcccgcatccacctcgtcgaacacaagcgtgtccacgtcgtcgacctcgcccagcaccaccttcacggccagcatgacgcggctgacctcgccgcccgatgcgatgcgcgcgagcggacgcgcctgcatgccggcgccaggtcggaacaggaactccacggcctgcgggcccgccttcgtccactgaacgcgctcgagcggtgcgaggtcgcacaccagctgcgccccgcccatttccaggcgatccatctgcgccgtcacggcttcggcgaaccgcggggcggcctcggcgcgcgcgtcggccagcgcggacgccgcctgcgcgagcgcctcttcggccaggtcgagctcccgctgcgccgcgcgttcgcgctcggcggcatcgtccacgagcgatacgaggtcggccgcttcggcgcgacgcgccagcacgtcttccatgcgcggaccgtacgtgcgcaggagcccttgcagcgaagccatgcgctcttgctgctgcgccagcgtctcggggtcgaactccacgccctcgcggtagtcgcgcgtctcgcgcgccatgtcctccaacacgtagcccgcctcgcgcaacgcgtcggcgaactcgcccagcttggcatcgtaacgcgccgcaccgtcgagcgccgccaccgcgctgcccagcgcgtcgatggccccctgctcgcccgcaagcgcctcatgcgccccgttcgcagcgacagccaatgcctcagcatgctccacgcgggcgaggtcgtccagcagctcgtcgtactcgccctcgcgcggatccaccgcgtcgatgcgctgcagcacgaagcgcgcctcgtcgagcttggccgaggacgcctcgcccgcctcgcgcacgcgcgtcagctcggccgccgccgcgttcgccgtcgcgaacgcctcctcgtaggcggtgcgcgcctgtaccaccgcgtcgcccgcccaggcatcgagcatacgaacatgttgggacgttttcatgagctgctggtgctcgtgctgaccgcacaagtcgatggtgggagcaatggcgcgagccagctcgccgacgctggccatgcggccgtcgatggacacgcgcgaacgcccgtccgaggttacgcggcgcatggcgaccagctcgacgggaacgccgtcgtccgcctccccgctttcaaccgcgtcagcggaagaccggcccgcaagatcgtcggaagacgcaaagccggaaaagacggcgccgtagaacctccccgacacggagagggcttcctcgccgtcgcggacggcgtctttgtcggcgcgcgcacccatgagcagcttcaacgccgagagcagcgccgtcttgcccgcgcccgtctcgcccgtgagcacggtcagcccgcgcgccggcaccagcgtcgcctcgcggatcagcgccaggttctcaacttggatctcgtcgatcatcgcgcacctcttacagcctcgttcgttccagagccatcaagtatagcagcgcgagggcgcgccgccgaagcggattcgcccagtcgctcaaaccgcttaaacctagcgcagggtccacgcctttccgacgcgcgttacgcgccgtggctcacagcgcgaaccgctccttcgcgctcgtcggcttggcctgggcgcgatgatgctccatgaggtacgccacgcagtcggtgcggttgcaagcgcgcaaaagctcgatctgccgatcgaacgaggcatcgtcgataaaaccggccttgaccagagcttccaccatgttccgatctccctcgcgcgcgatgcgctcctgggcctcgcgcccgtagccccgcaggtgcgacaccagaaccgagcgcatgtcgtcggcgagccggtagggtacggccagccggtgcagcagcgcgcccaaacgatcgggcaggtttttccccgaccgcagaagctcgtcgtagcgcccgaagtcgaacggaacgccgtcggaggcgtccgtcagaaagcaggtgagcagctgatcggccgacacgtgcacgatcgcccccacgtgcgacaggcggcacaccgcgtactcgaagctgccctccccgaccgagcgcacgctcgccgggataagcacgggcccctccagcttacgcgaccagaagcagtgcgcgccgatggaaaccagcccttcgggaaggatcaggcgcttcgtgccgcggcatgcgttgtcgcgttcgatgatgcgcacggtttcgggtaccaccaccgaggccggcgcgaacggcagggctcttacgccgatgcgcacgagcggccgcccttccacctgtcgcggaagcgccagcacgtcgctcgcgctggccgacacgtaacccacggtggagcccgcttcccccgaggccgcgaactccgtggccgcctcggcagccgccgcagcgggcgaaagcgcgcagacgtcggcatcgtctgcaacctcgtctttgccgcgcacggccacggcgcgcaccgcagcctgctcggcgaagcgccgcgacaccgatatcggcttcggcggccccgctaccagcaccgcgccctccgcgtcgaagtcgtaccagcatccttccaactcgacggctgccggccccgccagacggacgccgcgcttgcgaagcgcgcggtacgcgggagcctcgaccgggcagcgccagaccgcgtcgtcccagctgcgagagtcaacgcgcgcaagcgccgccgagcagtccaccaccgcagggggctcgcaaccgtccgcaaacgccgacgaagccacgcgctccaccccatcgggcaggctcacgcgctcgccgtacggagaggccaagaacacgagctcccgtccgccgtccgaaaacaggttgccctcgcgcgccagatagcgcgcgtttccggcatccaccgaatactcccggcgcgccaaccgcggcgagactcccgccaaatcgcagcgctgctctcctagctggcttacgccgcgcccgatatggatccgctgcgccgacatcgctgcgaacgcgttcgcagcgatatgctccaccgtgtcgggcaccaccagaagcagcacccccacgccctgcacgaagcggcgcgcgaacgcttccacggccacgcgcaccacggggatcccgtccacgtacgcgggcagcagaaccgccaaatcgtcgctctgccccaccgccgcagcgaatctccgcagatcgaacgcggtcagggcatatccgccgggcacctgccgcacccccacggctccgcggagcccttcctccatacgagcgcgcggcgtctcctgcgcgtcggcggcatcgcgttcggccgcctgggcaagcagctcgtcgaactcgcccatccacagcgcgcctgcggaatacagatccccctcgcgacccgcaccgcccgcgacgtcgccggcttccccttcggcagcccaggcccgataagccggaagctgcggagaccacacttcgccctccaccgcccgcgcagcctcgacaacctccacatcgcgcgcgtcgaggcgcaccggattcttgatcgcatgatcaagcaattcttcgatcggcgcatgagcaccatgatagaccagcgtgttctccatcatagtattgtgctacctcccaaaaacctctcggcaacgagcctgtttacccttggcttcccccatgctacactgcgggaagcgacgaaggcaagagccgccgcgaagcaagcacgcgcttcgcgcacgcacattcgttcaaaggagcatcatggccgtcgaagccgtcgagccgcttgcccgccaagcgctcgaccttgcgaaaaacgcgctgctcgtgaacctgcgcttcatgaacgctgcgttcgcgcgcctgcgccctttccccgtgcgcgatgccacgctggccactgacggccttcacatccgcttcgaccccgcaacgctcgcgcgcctctacgccgcggaaccggccgaactcactcgcgcctatctgcacatcgtgctgcacaacgtgttcctgcacctctaccccggcccgcacgtggacgttgcgcgctgggacgccgcatgcgacatcgtcgtggaacgcaccatctccgaactcgacctgcccgccacccgcaccgctcgcgccgagcgccagcgcgcgaccctcgcgcgcatcgacgcggcgctgccgctggcaaccgcagaaaccgtgtaccggtacctgcaggatgaggggctcgacgatgccgagctggccgatctgcgcgcaccgttctacatggacgaccatgagccctggtaccgcctcgcagccgcagaggaggcccgcaaaacgaattcggaagagggcgaacgcgatgagggggcggacgcgcaggacggagccgcgtcggcccaatccgccacgagcggaaccgacatggagatgccgtccgatgccgaccaggcgaagccgaaccacaagtcgcaccaggcggtcagccaggacgacatcgtgcagaaagaggctcccgaacaggtaggacgctccatcgacgaccgcttcgccgacacggtgaacctagatcggtccaaggagcagtggaagagcgcggcctacgagatgggcgtgcagcttgacgcctacgcgaagctgtggggcgtcgagggcgcgaaccttgccatgaacctgcgcgccgtgacgcgcgagaagcaggactatcgcgagttcctgcgcaagttcgcccggatgggcgagcagatccgcgtgaacgacgacgagttcgactacgtttattactgctacgggctcaagcgctacggcaacctcccgctcatcgagccgttggaatacgtggaagagcggcgcatccgcgacttcgtcatcgccatcgacacctcggcctccaccaaggacggcctcgtgcgccgtttcatcgagaagacgtacgccatcctcagccaagagaccagcttcttcgccgacatgaacgtgctcatcgtgcaatgcgacgccgccatcacggacgtcgcgcgcatctcgaacctgcgcgatctggacgactacctggacggcctcgagatcaaaggattgggcggcacggacttccgccccgtgttcgcctacgtggacgacgccgtggagcgcggcgacctcgtgaacctgggcggcctcatctacttcaccgacggacagggaacctatcccgcccgcaagcccgattacgacaccgcgttcgtcttcgtcgacgacgcctcggccgccgcgagtccgaacgtccctgcgtgggccatgaaagtggagctcgacgaaaccgtcatattggacgacgccccgcacgcgaaaggcgcatcgcgcccacgctagaaaggaaaaccatggacatccgtcaggcaaaggatcagatcaaaaacgccatgctggcgtacttttcgaaggacgagttcggcaactaccgtctgcccaccgaacggcagcgccccgtgttcctgctgggcgcgcccggcatcgggaagacggccatcatggagcagatcgcccaggacctcgacgtggggttcgtgtcgtattcgatgacgcaccacacgcgccaaagcgcgctcggcctgccgttcatcgcgaagaagacgtacgacggcgtggaatacgacgtgtccgaatacacgatgagcgagatcatcgccgccgtgtacgacgcgatggaggccaccggcaagcgcgagggcatcctgttcctcgacgagatcaactgcgtgtcggaaacgctgacgcccgcgatgctgcagtttttgcagtacaagatcttcggacgccaccgcgtgcccgacggatggatcgtggtgacggccggcaacccgcccgagtacaaccgcacggcgcacgatttcgacatcgccacctgggaccgcctcaagcgcatcgacgtggagcccgatttcgccgcctggcgcgacttcgccgtggagacgggcgtgcaccccgccgtgctcacgtacctcgatatcgagcgcgaccacttctaccgcgtggagactaccgtggacggcaagtcgttcgtcacggcgcgcggctgggacgacctctccgccatgatgaagctgtacgaggagcaaggcgtccccgtggacgagctgctgatcgggcagtacgtgcagaacgccgagatcgcgaagcgcttctcggtatactacgacctgttcacgaagtaccgcgccgactatcagatcgagcgcatactggaaggctccgccgagcagagcgtggtcgagcgcgcccgcgaggccgcgttcgacgaacgggtgtcgctcatggggctgatcacggacgccttgggcggacggctgcgcgacgccgtgatggaagagcgcgcggtggagttcgcgcacggacggctggcggcgatgcgggatgccatcctgagcgaagcgaacggagcgagcgcagtcgaaggatcccctgcggcgatagcgatcgacgacgcgaacgcgctgcccctcctgcgcgaagaagctgcctcgctccaagcgcgcttggacaccgagcgcaaagcgagcctgctgtcggacgagaagtacgtggcctaccagcgcgcgcttgcgctgatcgaccgcgcgctgcgttgcgacgctgcgggcggcggggttccgttctcgcaggtgaaaactttgttcggggaaatggtcgacgcgctggacgcgcgcatcgcggccgtgtcgagcgcgctggacaacgccttccgcttcgtggaggacgcgttcggcaacggccaggagatgctgctgttggtcaccgacttatcggtgaaccgctatggcatggccttcatcaacgaccacggctgcgagcgctacttcgcccacaacgaggaccttctgttctacgaacgaggagccgacctggccgaccgcatcaaccgtctggatctgacagaagaagaggcttgataaacgaactgatgttctatataatgaagcacatcgtattcactggttgggtgctaccctaactttcccgtaaaggacagccgccttctcgaaaggaggctgtccttggaacagatctacgatccttccccggacgaagccgtctatcaatcggttcgcgccgcactcgaaaccgcgcgcacgaaagcggcggcggcaatcaacgacgcaatggtttccgcatattgggagatcggccggcaaatcgtcgaagcgcagggcgaccgcgcagaatacggccagcatctgatggaatacctgtccgagcggctgacagccgaattcgggaaggggttcacggaacgaaaccttcgcgccatgcgccagctgtatcttgcatatccaattcggcacacattgtgtgccgaattgagctggtcgcattatcgcctgatcatacgcatagatgatcccgtccgtcgcgacttctacgtgcgctccgccgtcgaagagcgctggacggtgcggcagctcgaccggcagatccactcgttctactacgaacgacttttggccactcgcgcagaaggaaaagacgaggttcgacaagagatccagaacctcgagccgccaactaaagccgacggcatcctcaaagacccttacgtactcgacttcctcgatctgggtggcaactcgaactacctggaaacggatttagagcaagcgctcatggacaaactccagcaatttctattggagttgggaaaagggttctcgttcgtcgcgcgccagcagcgagtcagcgccgatggcgaccactactacatcgacctcgtgttctaccactacatcctcaaatgcttcgtcctgatcgacctgaaaaccgggaagctcacgccccaggatgtcgggcagatggacttctacgttcgcctattcgacgaccagtgcacccagcctgacgacaatcccaccataggcatcgtcctctgcgcgaatcgcaacgaagcggtggccaagtattccgtcctcgccgataagaagggaatcttcgcatcgcagtacgtgctctgcctgccaaccgaggaggagctgtcgcaagccttagaagcaacctgcctgctcgcaagcgaagaagaataatcacgctccggcaaaactaagcatcttcgctcgtaaaacacgcgttgggagccgaggcgtgttttgcgagcgaagatggcgccccgccgccgcgaaaggcggcggggcgcacattcctatgcgcagtacgccttgatggcatcgcggaggaattccgcagcgccgggggcgacagcttcgtagtaggccttgaagcgatcgtcggccacgtacatctcggccaggccgaggtgcgcggcctttgagtacgttccgtccttccagaattcgcacagccattggcggtgcaggtcggccgcgcggtgcgcgtcctcgcccgtcggatcgcccgcagccatcgctgccgccagcgcatccttgacgccctgctccagcttctgggtttggcggtactgctcgacgctcatacccatgagcttcgcgttgctcgcatcggccgcatcgtcgccccagcgttcgcgcacctccttgccgtagtgctgctcgttctcgcccacgaggccttgtttgaacgcctcgaacttctcttcgtcttccatagttgcagaaccttccatacaggcgagcgtcttctccacgctcgcgatcaatccgtcgagacgctgcttgcgcgcgtgcagctcgcgcaggtggccggccagcgcgtcgcgcgcatcgaacgcggggtcgtccagcaaacgcccgatggcagcaagcggcatgccgcattcccggtacagcagcacctgatgcagccggtcgacttcggccgcgccgtagcgccggtacccgttgctggcgcgttgcgcgcgaacgagccccagctcgtcgtaatgatgcagcgtgcgcaccgtgcatcccgacagctcggccaactcgtgcaccgtgtacccgccgcccgcccgttcccgttccatgagcgcctcctttcctgcgtgcaaccagcgtacaccctcacgttacgtgagggtcaacagacgcgtgcaatttttttcgaccggattgaggttgcgcggcgctcccctcgccagacgttattcgaaagaagggcacgtgctgatcgaagtggacaaacagtactaatgtttcacgtgaaacattccgattcgggctcgcttaccgcatgcggcccatgcgcagacgcagcacgcccttgggacatacgtcggcacaggcggcgcactggatgcattcggcgtcggcgacggcaccgccggccaggaggtcttgcaccggcaggctcatcggacacgcgcggtcgcacttcccgcagccgatgcagccattcggatcggcctcgatgcgcagttgcggaacccgcagcgccgaacccagtttctcgcccaataccatgaacggcgccatccagcagatgcagtggcacatggcgcgacaccccaagaacagattgggaacgaagaacagcgccacgatgccgaaatagataggcaatcccaaagggctgttcatagacacgccgcccggtatgccgtacaacgggtcgaccgtcgtgaaaccaccggcgatccatgcgcacgctacgatggagcacacccacggcacccagatcacatacttgacgcgcgccctccaccccagtttcgcgggcttgcctacggcggtcgcctcaagctcctgcaggccgcccgccgggcacaaccacccgcaccacgcgcgacgcagcacgatagccaacaagaactgcaggcagaacacgagcatgctggcagccaccgccccttccaaggcgccctcgatgatcagcgccggtgagaagtagaagatgatgaccgggaacagcaggaacgacacgagcagcgccaaccgccgcgcgttctgccgcttccttccccgctcgcgctgcgcgcgtacctcgtcggccgatcgcaccgccgacccgcgcaccttgtcggccgaccgcgcgccaacacgtcctcgcccgcctcgcgccggatcattcggttcctccactcgcgtcacgcccgaaacgacatcatgcaacatgtgttctgaaacacccgatgcttcacgtgaaacatcgctcgcacaatttctctccgactcctccatggtttccctcatctcaccaacgtcagcagacccgtgaaggcctcgttcaagcgttcgcccagttcctcgtcggaaaattgcgcgccagcaaccagcatggccgccataccgtgggtgtacacgatcatgtgcaggtacagcgcgcgcgccgccgcgggcgacagatgccccagctcctcgatgcattgctgcacgccgtcgacggccacgctctcgtacacttccgcgaagctcgtcgcctccatgtgcggagataggtacaggaattggaacaaatgacgctccgtgcgcgcaaggcgcagatgcgacaacccgttcgcctcgaacgcattgcggccgtcgtccacatgctcgcggttgtacgccgcgacccacgcgcgcgcatggtcgtacagtgcgcgcacgagtcctcgcatgtcgccgaacaagctgtagatcggctgcaccgagcagcccgcccgctcggccaccg

SEQ ID NO: 8731 - DNA, 9020 bp, Unknown
  gut microbiota DNA sequence
attcgcctcgaacgcattacggccgtcgtccacatgctcgcggttgtacgccgcgacccacgcgcgcgcatggtcgtacagtgcgtgcacgagtcctcgcatgtcgccgaacaagctgtagatcggctgcaccgagcagcccgcccgctcggccaccgtccgtgcgctcagcgccgtttctcccctctctcgcagcaagcccagtgcagcatcgagcaccgtctcgcgccccactttctgctccggcatcctcaccctcccgtatattacaaccgttatataacgtttgtaatatacggtatgtcaacagcaccgtcaagagatgcgacgaatcccggcaacaccttcctttcatcttcgtgacggcgcatcgtcgggcaaagcacggctcgccatcgaaacccccctgcgaaattccacacgcacgaggggtcctacaatcggcgctgaaatcgttcgcatacgaaaggagttccatccatgaagaacgttgaggagcgacgcaaccgcactatcgctcgcgaggcaaaccaccatgcaaccatgcgcgcgccgcatatcgacaagacggccatcagtccgtacgacgactactgcgacggatacggcatgcccggcgcctacggcaacggctacgtgtccgtgctgaaggtttcggcaggcacggtggagaagaccaacgacgagctggtcgaccgcatcgtcacgtacgacaaggccgaggccgccgatgcgtacgtcggccagatcaacatgctgaccgcctcgtcgttctgcggcatggccggacaggtgtggggctacgacctcgcccgccacgactcggtcgacaacggcaagagcaagccgctgttcaccgagaagcagtggaacggccgcgagctggaagtgtacgacgccgccccgctgctgagcgcaggcgtggagctgttcggcaccgagcagaaccgccgctaccatcccattccgggcgcgcacaccatctgcgcgaacaagggcgtcgtcgcctaccgcccgaagaccgaccgcccgctcaaggagggcgaaggctacggcgtgtggtccttcatcgccatctccctttccgccgatcgcgacttcgcggccgacctgttcatcgaggatgccggcgtgtggaccgagaacgacaacgaagaggacatgatcgcgttcctcgagcagcatcgcaaagctatcgtctggtccgtcgtcgagtgcggccgcgaccagaacgtgctgttcgaccgcacctacgtgggcttcgctcaccgcatgatgaagccgggcgagatcggcaacgccatcacggtgggtccctacgtcacgctggcccgcaacgccgtgcccgctaccggattcgcctcgctcaacaacctgcacctgtccgactggctcaagcaaatggacttcgagccgctcacggacatcgcgtaaccgacggtatccccctgatcgagccgtccaggcaacccccgggcggctcgatcacgtttagacaaggactggaaacatggcagacaaaaccgcttccggttccggcggatcatcggcccaggacagctcgaaaaaagttggcctgatcggcctggtaggcatcgtcatcagcgccatgatcggcggaggcatctacaacctcccccagaacatggccgcagacgcctccgcaggagccatcatcatcgcctgggtcgtcaccggcatcggcatctggttcatcgcgaacacgttccgcatcctgtcggccgcgcgacccgagctcacgaacggcctgtacacgtacgccgagaaaggcttcggcaagctgatcggcttcttcgtggcgtacggctactggatttgcaactgcttcgcgcttgttgcctactcagtgctcgtcatggccacgctgaactacttcgtgcccgacttcacgggcggcaataacattccgtccatcatcggcggctccatcatcacgtggatcatgtacctgctggccctgcgcggcgcgaagtccaccagcttcctgaacatcatcggcaccatcggcaagctgctgcccgtgttcatcttcatcctggccgtggccaccgtgttcaagttctcggtgttcatggaaggcttctggggcatgaaagacggcgtggcattgaccttggacttcagcaacgtcatgcctcaggtttcgtccacgatgctggtcacgctgtggctgttcctgggcatcgagggcgccgtggtcgtgtcgggcaaggcgaaatcgcaggccgcagtgcgcaaagcaaccaccatcggcttcctcgtcacgctggcgctctacatcgtcgtgtcgcttctgcccctcggcgtgtactcgcaagcggaagtcggcagcatggccgacccgtcgatggcggccatcatgctgaagtcgttcggaaaatggggcgagatcatggtgaacgccggcgtgatcgtctcggtgctgagctcctggctcgtctggatgctcatgctgggcgagatgccgctggccgcctccaaaagcggcatcttccccaaaatgttcgtgaaggagaacaagaacggctcgccgtccacatcccttctgtggaccactatcgtcgtgcaggtggtgctcatcatctcgttcttcataggcaacaacgcctggaccacgatgatcagcatcaccagcgtcatggcgcttccgtgctacttcttctgcacgctgttcctgttcaagatcgccgtcaagaaggagtacccgtccggcatcttcgccagccgcggcatggccgtgttcacgggcgcggccggttcgctgtacggactgtggctgatctacgcggccggcctgaactacctcatggtggcctgcatcgtgtacgccatcggcctgccgctgtacatcgtgggcgtgcgccagcacgaccgacaggcgaagctgttcgagaagcggtcggacaaggtcatcctggccgtggtgctggcgctcggcatcgccggccttatctactcggtcatcacgttcgggaacatccatatctagagcgcgcacgattgcgatcaccgcgaagcccgaggccgcttacggccccgggctttttttggtcgtcttgcacatcagacccgattcgtcgaaaacgctgcggctttaccttccctttacacgggctttaccgaatcttaagcggtctgaatatcctccatcgatcggtgtacgactcgaggattcccctgcgaatacgccatgctgttcacattggaaaccgaaagggagtcatccgtgaagggctttaccgaactcatcgtcaactccgtccgcgggttctgcatggccctggccgacagcgtgcccggggtgtcgggcggcaccgtcgccttcctgctgggcttttacgaccggttcatcggctcgctggacgacctgttccacggcgcgagggctgcgcgcttcgcagccgtgcgcttcctgctgaagctgggcgcaggttgggcgatcgggttcgggctgtcggcgctcgtgctgaccagtttcttcgatacgcacatctacgaggtcagctcgctgttcatgggattcatcgtgttcgccatccccatcgtcgtgcgcgaggagctggacgcattgcgtaaacggctgccgtacctcgcgttcgccgtcgtgggcgtcgcattcgtcgtggcagtgacgctgctgagccccgtgagcggagagggcatcgacgttgcggcgaagagcctcgacctcggcctggtggcgtacgtgttcctggcggcgatggcggccatctccgcaatggtgctgccgggcatatcgggctccacgctgctgctgatcttcgggctgtacgtgcccatcatgggtgcggtgcgcgcgacgatggggctcgatctgtcctacctgcctattctgatggtgttcgcggcgggcatcgcatgcggcatgcttctgttcgtccgactcatcagaatgtgcctcgagcgcttccgctcgcagaccatctacgccatcatcggcatgatgctggggtcgctgttctccatcacgcaagggccgctcacgctgagcgagccgcagccggccatgagcctcgacacgttcagcatcgtgttcttcctcatcggcggcgccgtggtcggcgggctccagctgctcaggtcgcgcttggaggaacccgccgagggctaacgcgctacgacgcccgcatcggacagccgcaacgcggcatggaagccgatgccgggaaggctcgccggcttcgccatgctagctcgccgcttggacagcttcgcgcaaacgcgcgagatcatcgtcatcgggatggctcgccgcttcgtcgaagttctcgatgagctgatgcatgcgcgcagcctgctcgggcttggcctcggcggtttgcgcgtagcgggcgcgaacgctggcgggcatgcggccctggcacatgaacgtgcccacgatccgcgccgattcgggcagatgcaccgccacgcgcgccatgacgcccgcgaagtacgtctcgtcggctccgaacccggccgtcccgaacaggaacacgtccttgtccgcgagcgaggccagaacctcggccaactcgtcgccgcaatcgccacggttcgtccagaaccctgcgtacacgcggtcggcctgcgcgacggcggcgcgatccacctcgtccacccgaccgaacgcaaggcgcccttcgctcggcagcgcggcggccaccgcccgcgccaatgcctcagtgttcccggtgcggctgtcgtacacgatcgcgtagctcataagcgttccttccctacatgcctcggcgcgggcgccgcattcgaatcagcttgttatacgcccgtccgaccccgctgtaaaccccgttatactgaaacgagagaatccaacgggcgcaagcgccctgcaagcgaggaggcttctatgcgagcggtggttcagcgcgtgtcgaacgcgcgggtagatatcgacggcgcgacggcgggcagcatcgggcgcgggctgctcatcctgctaggcgtgggtcacgacgacagcgaggagcaggccgaacgcctctggagcaagatcgcgcgcctgcgcatcttcgaggacgccgagggcaagacgaacctgtcgctagccgacgtgggcggcgaagtgctggtcgtgtcgcagttcaccctgttcgcgaactgcagacgaggcaaccgcccctcgttcaccgaggcgggcgcgcccgacgaggcgaaccggctgtacgaatggttcgtcgaacgcgcgcgccgcgacgtgcctcgcgtggaaacggggcgcttcggcgcttacatggacgtgagcctgaccaacgacggtccgttcacgctgtggctcgacaccgacgcgctctagcgcgacgatgcgacgatgctccggcgcgctgtcgcgctagagcagcgcccgctcccactcgacctctttgaagccgaccagcacgaagtcgtcgcccaccaccagcgggcgcttcaccatcatgccgttctcggccaacagcgcgtaggcgtccgcgtcgctcatgccggcatccagcagggcctttacgttgcgctcgcggtacagcatgccgccggtgttgaagaaacggcgcagcggcagtccgcttttcgcatgccaagcggccagctcgtcggacgtcgggttgtcctccacgatgtggcggtcagcgtacgccacgccgtgcgcgtcgagccacgccttagccttcttgcaagtggagcacttcggatattcgatgaacagcacgtccgccatgggtttctccttcgcgttgcagccttcgtatcccgctcatcataccagagcggcctcaagcagccgcaaagcgaagcgaacgggcgccgcatgcctcggcggcggaatgtctcaagtgaaacattcgctcgcttcgatcctgccggaaacggcgaaggacgtccgaggcgaagcagacgcgcacgtcgatcaaacgtacaaatgtttcacgtgaaacatcgtaaccgccttcggttgcaaaagggtcatcgttcgcgcaggctcggcttggtatactgaaggcatacagacggaaaggcggctcatgatcttctacttcaccggcaccggcaattcgctcgcggcggcgcagaccatcgcgcgcgcaacggacgacctgctcgtcgacatcggcgcggcctacaagtacaaggacttcgacttcacgctcgcgcaaggcgagcagctgggcttcgtcttccccgtctacaactacaccacgccgcccatcatcgatgcgttcctcaagcgagcccgcttccgcacgggcaacaaggaaaccttcacgcccgactattgcttcgccgtgatcagctgcggcgcgttcgtgggcagcacggcgcgcgtcttcggcaagcgcctgttggacgcgcagggcatcaacctcgacgcctcgttcagcgtgaaatcggtgggcaactgcacatacctgtacgcgcccgcccaaggcgagaagcgcaagcgcctgcttgccggcgcggaacttgccgcgcgcgagacggcaaatcgcatcgcagcccgcgagcacgtgcgcgccgagcaccgcaatcccctaggcatcgtgctgtccaagttcaccgaaaaggacgagaagccgcgatccacctcggagttcttcgcgctgcccacctgcatcagctgcggccagtgcgccgacctctgccccaccaacaccatcacgatcatcgaaggcgcgccccgctgggccgagctgggctgcacgcagtgcctcgcctgcctgcaccgctgccccgtgaacgccatccagtacggtgcgaagaccgagcgtcgcggccgctacgtcaaccccgtcctcgcgaaagctcccaagcgcgcataacgctcctccctagcctcgttcaagcaattccttgaacgaccgctctccccagccgtcgggcgcctcaagcgtcgtcgaacggataagctcccgcagttccgcctttcgctcaggcgtcaatgcacgatgcccgctccttaggtcttcaagcgaggggaaagctttcggaagctcttcgttgtcgatgacggcaaccatgacacgctcctttcgcttcatcgagcatagatgcgcaataccgtattacgtcaatgacggcagttgatcgcatgcgctgtcttgacgcttccgtatctattgtttatagtgtgcatatcgggtatatacactctacacgttacggagtggacgatgcccggccggaggggacgaggaacgtgcttggcctctcccggcgcgaagcgggacgccgcgacgcgccacccgagcgcagggggacgccccggtgctcgcgcacgaaaccacgaaagggagcctgagttggacatcatcatctcgaatgcgagcgacaagcccatctacgaccagatcgtctcgcagatgaaggccctcatcctgacgggtgagctgggcgaagggcagcagctgccctccatccgagcactggccggcgacctgcgcatcagcgtcatcacgaccaagcgcgcgtacgccgagctggagctccaaggcttcatcgagacggtgcccggcaagggcagcttcgtggccggcggcaacctcgagcttcttcgcgaggagcgcctccggcacatcgaggagctgctcgtccaggccgtcgacgaagcgcgcggtgcgaacgtcggcatcccggagctccatgacatgctcgacctcatcgcagaaagtgacgactgatgaacgacctcctccgcatacgcagcttgtcgaagcactatgacggcttcgacctccgaaacgtcgacctcaccgtacccgccggaagcgtcgtcggcttcatcggctcgaacggcgccggcaagacgaccaccatcaaggccatcctcggcctcatataccccgatgccggctccatcgagctgctcggccaaaacgtcggcgaacatgccggcagcaaggcgatcaaggacgccaagcaacgcacgggagtggtgttcgacacctgctcgttccccgaggagatgaccgtcgcctcggtgggcaagctcatgtcgtacagctacgactcctggagccctgccgacttcgagcagcgcctggcacagttccagctgcctaagagcaagacggtgaaggacctctcccgcggcatgagcatgaagctgtcgctggcttgcgcgttggcacacgaccccgacctgctgatcctcgacgaggccaccgccggactcgacccgctcgcccgcgaggaagcgctcgacatcctgcgcggctacatgcgcgatgagcgccacggcatcctcatgtccagccacatcacgagcgacctcgagaagatcgccgactacatcgtgtgcatcgacgccggccgcatcgtgttcgccgtcgagaaggacacgatcaccgatctggccggcatcgcgcactgccgcgcgaccgactacgagcgcatcgccgagagcggcttcttcgcccccggcgagctgcgcagcatgcaccacccctacggcatcgacgtactggctcccgaccgtttcgcgttcgccgagaacttcaagaacatcgccgtcgacaaggccgatatcgatgtctacatgggcatgatgctgaaaggagagatccgatgaaagccatgatcatgtccgatctcctgatcgcgaagaaatacctgctgcaacagctgggcgtctccatcgtcgtgggcatcttcatcaccgtcgtgataggaaacctctacgttgccgctcccatggtgggcgtgatgatccccttctcgctgaccatcaccatcctcgcgcttgacgaacgcgccaactggcagcagttccgtctggctttgcccatgtcgcgatcgaacgtgatcgcaggccgctacgtcagcttcgcgctgttggcgctgttgggcatcgcggcaggcctgctggtgacgctcgtgatggtcgccgtcgcgcagatcgcccccggcgttccccagctggtcgacctcatgatgaacttctcgtggcaggccatgctcttcgcgtccgtcgccggattggccatcatcttggtcatgctgtccgt

SEQ ID NO: 8732 - DNA, 845 bp, Unknown
  gut microbiota DNA sequence
gtccgatgaaagccatgatcatgtccgatctcctgatcgcgaagaaatacctgctgcaacaactgggcgtctccatcgccgtgggcatcttcatcaccgtcgtgataggaaacctctacgttgccgctcccatggtgggcgtgatgatccccttctcgctgaccatcaccatcctcgcgcttgacgaacgcgccaactggcagcagttccgtctggctttgcccatgtcgcgatcgaacgtgatcgcaggccgctacgtcagcttcgcgctgttggcgctgctgggcatcgcggcaggcctgctggtgacgctcgtgatggtcgccgttgcgcagatcgcccccggcgttccccagctagccgacctcatggggaacttctcgtggcaggccatgctcttcgcgtccgtcgccggattggccatcatcttggtcatgctgtccgtcacgatgcccttgttctcgcggttcggcatgacgaagggcgtccgctacctgccgctgctcatcataatcggcgtgttcttcgcgttccagctcgacggcaacgggccgccgcccgagttcgtcgcgaacgtgctgaacctgttggagtcgcccgcgggcaccatcgccatcgctgccggagttcttgcgatcacggccgccgtctacgcgatctcagccgtaatctccaccaagctgtaccagaagcgcgagctctagcgaacggaaaaggagcgccccatgaagaccatgatgcttgccgatttcctcgctttggcgaaatcgctgccgaagaacgtggcgctgtgggcgctccttgcaacgggcatatgcctggcagcggggaacgcgactcccatc

SEQ ID NO: 8733 - DNA, 718 bp, Unknown
  gut microbiota DNA sequence
aatctcggccgcaatctccaccaagctgtaccagaagcgcgagctgtagcggacgggaaaggagcgccccatgaagaccatgatgcttgccgatttcctcgctttggcgaaatcgctaccgaagaacgtggcgctgtgggcgctccttgcaacgggcatatgcctggcagcggggaacgcgactcccatcatcctgctcaccggcttccccatgtcccacatggtgctcatgcccatgctgctgcgcgaccagcggcgcgattgggtcgcctttcgccaggctttgccgctttcgcgagcaaacgtagtggcgggacgctacgcaagcatcgccgtcgtcgtcgccggatgcgtcgctctcggcgtcgcagcgtatacgaccgcttgcatcgtcaacgccgttgtgccggggcttccgcttgtccgccatttcgccgtaggcttcgacgctgcgggcgtcgtatcgttcgcggccggcacgttcgccctcaccatcgccatgttcagcgtgctgctgccgttcatgttcgccgacagccaccgcaagctcgccagctacatccccttcgccttcatgctcgccctcatgggctggatctacatattccgctccatgaacttcgacgcgtttcttcccctcgtgggccggatcgtcgtcgccgcgcagtcgctgggcggcgcgctcgtcgtgggaggatgcgtcacggcggcggcgctc

SEQ ID NO: 8734 - DNA, 1193 bp, Unknown
  gut microbiota DNA sequence
ttctacatattccgcactatagacttcgacgcgttccttcccctcgtgggtcggatcgtcgtcgccgcgcagtcgctgggcggcgcgctcgtcgtgggaggatgcgtcacggcggcggcgctcgccttgtacgtcgtatcggagcgcgcggcggttcgcgggtacgcgacgcgcgacctctagcccatctgaaccagatcggccagcgtcacgttgtccacgtagtcctcgatggcctggtcgagcccacgccagaaattgatggccacgcactgatcgcggcgcggacacgcctccgcgccgtcttcgaggcatgacaccggcgcgcagctgccctcggtggcgcgcaagacgtctcccgcagtgatctgatcagccggacgcgccaacagatacccgccgctcacgccgcgcacgcttttgagaacgcccgccttcaccagcgccccgcccagctgttcgaggtatttgacggacagatcctcccgctcggccgcttgccgcatggtgaccagcgcgccggcttccccttgtcgtgcgatgtcgatcatgagccgcaacgcatagcgtccccgtgtcgatatcatcatgttcgtcgcaccgtccttcgatggtgttaccggccttgccgcacgcgacggccgcacccttctcgttcgtgtcgttttcaaaagtatagcccatcgtttacctgatagaacacgcctttcttgcaggaatgtaaggatggggcaagcggtcggtaaggcggcgttaagaaccgcttggtataacgtagtggggagttttcctctacagaaaggtggaaaccatgaaaggaacggcgcatcgtgcatcgacggcgcatccagccatcacgttcatcgggcgcctcgccctggcggcgctcatcctcgtcgtgctcgtggaagtgtactttcttgcacgcgggttcaacctgtaccgcgaagcgatcgaggaagccggcctcgacgagatggccgcatccatccagagcagcgagtcgttcacgcccatcgacgagctgccggacctgtacctgcaggccgtcgtggctgtggaggatcatcgcttctacgcccatcccggcttcgatgccatcgccacggcgcgcgccctcgtgaacgacctcaaagcgggcgccatcgtggaaggcggcagcaccatcacccagcagctggcgaagaaccagt

SEQ ID NO: 8735 - DNA, 26238 bp, Unknown
  gut microbiota DNA sequence
cgtggaggatcatcggttctacgcccatcccggcttcgatgccatcgccacggcgcgcgccctcatgaacgacctcaaagcgggcgccatcgtggaaggcggcagcaccatcacccagcagctggcgaagaaccagtacttcacccaagagcagaccgtcgagcgcaagatagccgaagtgttcatggcgctgacgatggagcagcacttctcgaagcgcactatcctggagctatacgtgaactccatctacttcggcgacggctacgagggcatcggcagtgcgagctggggttatttcggcaaagcccccagcgcgctcgatgccgacgaatgcacgctgctggccggcatcccgaacgcgccgagcgtgtacgcgctgtctcagaaccctggcctcgcgcgcgagcgccagcaggaagtgttgcggaagctcgtatcctacgactacctcgggcaggacgcagcacagcacattctgggaaacctgcgcgcgctggccgcatgacgcgccgtcccatcgatccgctcgcgccgaacaccgcgtcagagcggtgcacgccttgcatgcaggttctgtagtcgtcgtagcgccgacgggttcgcgcgcacggacgacgggggctttggtaggataagccgcatgaaacgattcaaaaccaccgttgcagccgccctgaccgccgtcgccctgctgggatcgctcggcttcacggcggcatgcggccccgaagatgcagcggagcccgcggcgcaggcatacgtgagcccctacgattggagcggactcgaacgttcgggcgaccgcctggctttccgcgagaacggcgaggtgcgctcccagttaggcgtggacgtgtccgaccatcaaggcgccatcgactggagcgctgtggcgagcgacggcgtggacttcgccttcgtgcgcgtgggcaaccgcggctacaccgagggcgcgctgtacgccgatacccgatacgccgagaatatcgacaatgcgacgagcgcgggcctcgatgtgggcgcgtacttcttctcgcaagccgtcagcgtcgaagaggcgcgcgaagaagccgagttcgtgctgcggctgctggccggccgttacctggcgctgcccgtggcgtacgaccacgagcccgtcgccgacggcgcgggccgtgcgaacaacatggaccgcgaaacgctcaccgcgtgcgcgcgggcgttctgcgagcgtctcgagcagggcggctacgggacgatgatctacggcaacagcggcgacatggcgcgctacgaccgcgccgatctgggcggacgtcccgtctggttcgccgagtacgatgccgcccagccgcacgcgcagttcgacttcgccatctggcagtacaccaacggcggctccgtggcaggcatcgacaccgccgtcgacctcaacctgctgctgccacccgcgaagtaaaacccgcccttgacacgttcatcggttcgtgatacactggccgtcacttttcgctcgaaatcatgaggagcatgctcgatggctggtcgccttttccgctaaatcgctcagtcgatttgcgattcatccctgcgccgcgcgttcgcgcaacgcatagttgccgcttcggcggccttcttccatctagaattggtagcgcaaccgcgttcgctacctcacactgacgttcatccgaccatctcgttctataggagctatccatgactgcatcgaccgcgcccctgagcgcagccggtcgcgagctgccgaagcgctggcttgcgatcatcgccaccatctggggcggacaagccgcttccatgatcaccagctacgccgcaggatacgccgtagtgtggtacatcaccgagaccacgggcagcgccatcatgctggccgcggccgccatctgcgcgtatctgccgcaaggactgctgtcgcccttcggcggcgtcatcgccgacaagcacaaccgcaagacggtcatgatcgtggccgacctgtccgtgggaatcgtgtcgctggggctgggcatcgtcatcctgttcgggcaagtatcgtttccgctgctcatgatcctcgtcatcgtgcgcagcatcggacaggccttccacggccccgccatgatggccgccatgccgctgctcgtgcccgagaagcacctgctgcgcatcaacacgctcgaccagctgctcatatccgtcgcgtccatcggcgcccccgcgttcggcatcttcctgtacaccaccatcgggttccactccgtgatgttcctcgacttcgccggagcactcgtggccgtggcggggcttgcgctggcgaagatccccaccgtcgccgatgagaccgccgagaaccagcacgtgctggcgaaccttcgcgacggctggaaagcgctgtcggcaacccgcgggctcgtcatcctcatcgccggcatcaccatcggcatgatggcgttcgccccgctggacgccatcttcccgcttatgacgtacgaccacttcggcggtgacggctacatggcgtccgtcgcggaagccgcgttcggcgtagggatgatcgcggggtccatcgtgctcatggcctggggcggcggcaagcgcctggccggactcatcgcggtggcctccctcatcgtgggtgtcaccaccacggcgtgcggattcctcgcccccaccatgttccgggcgttcgtagcgttgtgcgccgtcatggcgctggcatgctcctggttcgacggaccgctgatcacgctcatccagcgcaacgtgcccgaggagaagacgggccgcgcgctgggcctggccatggccgccatgggactggcctcccccgtgggcatcgccatcggcggcgtggccgccgaagctatgggcgtagcagcgtttttcgtggcggacggcctcgtatgcattgcgctgggactgaccgtgtacctgttcaagagcgtgcgcgccctcgatcatgacgagccgcacgtcctgcgcgacagcgcggccgaggcgaacgcggagatcggaacagtctcggaagagggctagcggctctcttttgctcgagacatcgaaacgggggctgtccgacactgtcgagcagcccccgttttcgccgagttagggagggttggcgtttggtgcagctttacggcttcatgccggaaccgccctgcaccatgatggtgtcgcccgttacgaacgaggcatcgggactggccaggaacacgcacacgcgtcctacgtccttctccgcgtcgccgaagcgtccgagcgggatcgccttcacgttcttctcgtacatctcgggctcgcgctcgcgccattcctcgagcgccttcgtcatgacgatagggcatacgatgttcacgttgatgttgtcggggccccactccgatgcggccacgcggctcatgcctcggatgccctctttcgccgcagcgtaggagctctgtcctggattgccgccgatgcccgcgccggaagcgaagttgatgacggatcccgccgtctccttcaggtaagggtaggcatgcttcatgtagaagaacgtcgcgtacaggccggatcgaaccgccaggtcgaagtcctcctccgaatgctggaccagcgtcaatcccgacgccgacgcctgcgcgttgttgatcaggacgtcgatgcgcccgccgaagtgctcggcgcccgcttcgaccgccgcacgcacctcctcttccaccgatccgttcgcgagaatcgtaaacacttcggagccgaaatcgcgctcaagctcctcctttgccgcttccagaccgccggggaacaggtcggtgaggatgaacttcgcaccctcggtggcgaatgcgcgctcgataccccgagcgataccgccgccaccgccggtgatcagcaccaccttgtccttcaagcccatgtccatgctttctccttcgattcgcctgcacagcctgccccgtatggtaccgtggcgcgcatgcgggcatgctatcgcgccctgagaactcaaagacgtgttcggccagcggcttttccacccgaagcgatcgcgtcgagcggcgcgcttcacgcgacgagcggcctctcgggcaacctcacgaccttcgggcgctgccgtatgcggcgttctttcgattgccgtacgcgctgcctttgcgggcgttcttcttgagatccttcaacacgtcgtcctcgctgccgccctccacctggacgcgcagcttgaccacctggtcgcgcaggcgggcggcttcctcgaagtccatgctttgggatgccgaggccatgtcgtcctccatcgactggatgatgcgcagcacctcttcgcgcgacagctcggcaagctccttgttcacctgctcggccgtggtgccgcccatctcgtcggtgacgtagctcatgatgtcgttgatggccttgcggatggtctgcggctcgatgccgtgctcctcgttatacttcatctggatggcgcggcggcgcttcgtctcgtcgatggccagcgccatggaatccgtcatcttgtcggcatacatgatcacttgacccgaaacgtttcgcgccgcacgcccgatggtctggatgagcgagcggtggttgcgcaggaaaccttccttgtcggcatccaagatggcaacgagcgatacctccggcaggtccaggccctcgcgcaaaaggttgatgcccaccagcacgtcgaactcgccgcggcgcagatcgcgcaggatctcgacgcgctcgagcgtggcgatgtcggagtgcatgtagcgagccttcactccctggtccagcaggtgatccgtcaagtcctcggccatcttcttcgtcagcgtggtgatgagcacgcgctcatcgcgcgcagctcgctccttcgactcgtcgatgatgtcgtcgatctgcgatgccgagccgcgcacgatgatctcgggatccagcaggccggtggggcggataatctgctccacctgctgctgcgacaccttctgctcgtagtcgcccggcgtggccgacacgtacacgaactgcgggatgcgatcctcgaactcgtcgaagcgcagcggacggttgtccaggcagctgggcagacggaagccgtgctcggccaatgtgatcttgcgcgagcgatcgccctcgtgcatgccgcggatctgcggaaccgtcacgtggctctcgtcgatgatgcagaagaagtctttcgggaaatagtcgatcagcgtgtagggcggctctcccggctcgcgtccgtccatgtggcgcgagtaattctcgatgcccgagcagaagttcatcgtctccagcatctcgaggtcgtagttcacgcgcatctcgaggcgctgcgcctccagcagcttgccttcctccttgaactgctgcaagcgctcgcgcagttcgtcgcggatggtgcccagcgcgcgatccatcttcggacgcgcggtcacgtagtgggaggccggccagataggcagagcctcgaactcgctcagcacttcgcccgtcacgttgtcgatctcggtgatggactcgatctcgtcgccccagaactcgatgcggatcggatggtcggcgtaaggcgggaacacatcgagcgcatcgccgcgcacgcggaacgtgccgcgcttctgctcgtagtcgttgcggtcgtactggatatcgatgagctcatggatgacctggtcgcgatccatgtccttctgcttgtccacgaacacggccatgccggcgtagtccatcgggctgccaatgccgtagatgcacgacaccgacgccaccacgatgcagtcgcgccgcgacagcaaagccgacgtggccgcatggcgcagcttctccacctcttcgttgatggacgcgtccttctcgatgaacgtgtccgacgagggcacgtacgcctcgggctggtagtaatcgtagtacgacacgaagtacaccacggcgttgtcgggaaagaactccttcagctcgctggccagctgcgccgccagcgtcttgttcggagccatgaccagcgtgggcttctgcacggcctcgatgacctttgccatggtgaacgtcttgccggaaccggtgacgcccagcaggttctgatagcgcaagccctccttgacgccggtcgccagcttctcgatggcctgcggctgatcgcccgccggctcgtacggagacaccactttgaacggcgtggaggcaagacgaacctcgggcagcttgccctccatctcgatgccttcgatattggaaagatgagccatgctgctccttccgaacaacagcggagcaccgacgcgtcggagccgcgcaacgtaaaacttcgcaggagatccagtgtatcacagcatctgtaacatgaacagatgttcgttagtaaacggttacgaagcggagggcaacgcacgccccgagcctagctctccgccctccaacccgtcggctgcgctcgaccgaagcagcagcgagagctgctctcgcgccgcccggttcaaattgctgcccgaacgagctttaaaggagtcgaattcgacccctttaaagcttggattgtacagggtttcccaaagacccagatattcgataacatcgtgagtcctcatccaattctttatcacatctttcggcgtggggcttttatagcgcgcaatatcggtaagcgaaacgtaatcagcataggcgtcgcctttacaaaacgtcacttcgataccttgcgcgttgatcgtcgcacgatcagacatacggcatacacctctctttatctgttccgatgatctgagaggatcctgcggatcttgcaagcatggtacgggcggcgcggaacatccgccgcctctatgggcatccggccgagcacgcagaccggcaagcacttgcactggttcttttatgatgctagcatcatatcacagatttacaaacatatgttcgtaaattttcagtattgtagcgagttcgataaccgcgacagccacacggcaatggtatactctgacgccgtcgctcacgcatacggagcgcgcacccgttcgatagcagaaggatcgaccgtgaccaacgccttgaagaacatacccggcctggctgtatgcctcgccctcgcattgccgtgctggttcatcgggcagcagttccccatcatcggcgggcccgtgttcgccatcctggccggcatggccatcgccgtgttctggaagcagcccgcgcgcggccgcgtgcagaccggcatcgcgttcaccggcaagaaggtgttgcaggccgccgtcgtgctgctgggcttcgggttgaacctcgcgcagatcgcccaggtgggcatgatgtcgctgcccatcatcggctcaaccatcgccactgcgctgatcgtggcgtttttgctgcacaaagtgctgcgcatgccctcggagatctcgacgctcatcggcgtgggctcgtccatctgcggcggttcggccatcgcggccaccgcgcctgtcatcaaggcgcacgacaaggacgttgcccaggccatctcggtcatcttcctgttcaacgtgctggccgcccttatcttcccatcgctgggcaacgcgctgggcatgaccaacgaaggcttcggcctgttcgccggcaccgccgtgaacgacacctcgtcggtgacggcagccgccgcggcatgggacggcatgcatcccggctcgaacgcgctcgaccaggccactatcgtgaagctcacccgcacgctggccatcatccccatcacgctggtgctgggcatttgggtggcgcgtcgcgaaagccgcgaccccatcgcgctcgaagcgcaggggcacagcgtggtgaagcccgcaggcaagctgggaggtttcagcctgcgtcgcgcgctgcccgtgttcatcctgctgttcctggccgcgtccgtcatcaccacgatagcagtgtccgccggcatcgacgcggccgtgttcgagccgctcaaaacgctgtcgaagttcttcatcgtcatggccatggccgccatcggcctgaacaccgacatcgtgcatctcgtgaagtcgggcggcaagcccatcctcatgggcctctgctgctgggtggccatcgccgccgtcagcctgggaatgcagcacgtcctgggattgtggtagcggccaccgctgacgccgcacgggatccttcgactccggcgcttcgcgcctccgctcaggatgacaacgcccccaacaaccaaaacaggctccggccaagaaccgaagcccgcagctttaccagggacgggtcgtgggcgaggggtctgatacgagttccgcacgagccgaacagcccagcgggctgttcgtgcgagcaggactgtctgagttgcagacccctcgcccacgacccgtccccgcaggttgaacgcgaggacctacaggtccttggaatactctccccaccaggccagcaccttgttgcgcatctcctcgggagtaccgtcgttgttgaacaccacgtcggacgcctcgatgcgatccgcgtcggtgatctgctgggcgatgcgacgacgcacgtcggtctcgtcccaaccgctcttcaccgcacgctcgatacgcaggtcgatgggcgcgaggacggcgatcaccacgtcggcgtcgtaagcgagcgacgtctggcggttcttgaacaccgaatgctccaccacgacggccttgtggccttcagcctccagctcggccacgcggtcggtgaacgcctcttcgatgcgcggcagcgtgatgcggttgagcttgcgcgtctcggccggactcacgaacgccttggcagccagcgcgcggcggtcgatctcgccgtcggctcccaggatgtcctcgccgaacgtttccacgagctcggacttcaccgtgtcccacagaaggacgtcgtggcccacttggtcgagatcgatgttcggcaaaccttgctcgaccagcgccttgcgggccgtggacttgccggctcccatgccgccgatgatgaacagcttcttcatgcgtgcattacctcctcaatcatgccgcctcccaatacggtgtcgccgtcgtagagaacggcgtattggcccggcgccgtggttggctgcggactccgcagcgcgagcgatacgcgctggtcgtcttccggctctatgatacacgcacacggacggctccggtagcgtagtttcaccatcgcgccgtacgattcgccgagcgattcgaacgcttgccagttcatgtcgcccaccacgacggagccgatgagcgtctcgtcggcaaaacccaccacgagttcgcgggtttcgacgcgcttctccaccacgtagtacggctcggggcctgccacgccgatgcccttgcgctgccccaccgtgtagttcgccagcccctcgtggcagccgagcacattccccatgcgatccacaatgtccccaggcgcgtcttccacgccacgcgcgcgcagaaacggacggtagtcgccctcgatgaagcagttgtcttggctttcggccttctcggccacgaccaggcccagatcggccgcgatcacacgcacctccgccttcgtcatggcccccagcggcaacacgaggcgcgccagctgctcctggctcaacagcgaaagcatgtagctttgatccttgcgcgcgtccagggctcgcttcaccacgaagcgccccgaatcggacagacgggcaatgcgcgcgtagtggcccgtggcgatgcggtcgcaccccagttcgtcggctacccgcacgagcgcgggcatcttgcaccgcgcgttgcaacccacgcacggactaggcgtgaggcccgccgcgtacgacgagacgaacggctccaccacgcagcgttcgaactcgcccacgcactccggcgtctcgtggcgaatgcccaactgggagcacacggccgccgcatcggccgccgcgcgctcggtggcagcgttgtcgcgaaagcggcacgtgacgcccaccacctcgtacccggcgcgcatgagcagcgccgcagaaaccgcgctgtccaccccgccgctcattccgagcgcaatgcgcccgctcgcattcatttccggcactcctcctgtcgccccgatgcgctcatcgggaaatcgcgtctttccgcgattatcccacggcgatagaagatcgagtagacgatccgacctcttaacacacgatcgccgaagccttgcttcagcgcttcgttgaatggcgtatgaagaatctctcgctctctttatgttgcggacgagatgtagaaacattgttatactggcaattcgcgcccgaggggcgcgaagaatcgaagggagggcaaggctcgcatgtcggggacgaaatcacgctatattcccgcactcgacggactgcgcgcgttcgccgtcctcgccgttatcgcctaccatcttgggatgcaatgggctcctggaggcctgttgggcgtcacggtgttcttcgtgctgtcgggctatctcataaccagcctgctgctcatcgagtgggacaacaccgaaaccatcaacctgccgcaattctggctgcgacgcgtgcgacggctcatgccggccatcgtgctgatcatcgtatgcaccgccgcactctgcgccttgttcgaccacagcctgctcacgaagctgcgcgacgacatgtgggccgcgctgctctgggtgacgaactggtggtacatcttccaagatgcttcttatttcgacgcgctgggcgctccctcgccgctcacccacttctggtcgctcgccatcgaagagcagttctacctcgtctggccggtcgtgttgctggtcgcccacaaaacgggcgtgaagcgcaccactatgcgcaatgccacgctgatcgtcgccctcttgtcggcgctggagatggcgctgctgtacaacccgctggacgacccgagccgcgtgtactacggcaccgacacccgcgcgttctcgctgcttatcggcgcatggctggcgttcgtgtggccctcgcacatgctgggagcccagaagagcgtgcaccttacgaagcaggtgcgcaacgtcctggacggcgtgggaatcgtcgcgctcgtcgccctgctgggcctcatcgtgttcgtggacggcttctcgccgttcctctaccgcggcggcatcctgctggcctccgtgctcaccgccgtcgtcatcgcggtgatggtgcatcctgcgagcctgctcgggcgcttcgccggaacgaagccgcttgtatggataggcctgcgttcgtacggcatctacttgtggcactacccgctgttcctgctcatgaacccgcgcaacttcacgggcgagacgccgtggtggatgtatctcgtgcaggtggccgtcgtgttcgcctgcgccgcgttctcgtaccgcttcgtggagaaccccttgcgcaagggggccatcggagcgttcgtgaaaggcgtgcgctcgaaagaaatcgatccgcccgcatggctcaagcaccacgtcgttcccgtcctagcggggtcggccgtgaccatcgtggccgtgatcggccttatcgtggtgcctcccatctccgccatcggcgccgccgacctgctgaaggacgagcaggcccacacctcgcagatgcccgagctgcccgtcgacgacgcagcggccgggtcgcccaagctcgacgtgcttatgatcggcgactcggtctcggtgcgcgccatcccccagttcgaagagacgttcccctacggcgcgatcgacgccgccgtgaaccgccagctgtacgccggccaggagacgttcgactactataacgaccaggatatcgtgggaggcgtggtggtgttcgccctcggcacgaacggagcggccaccgacgagcagatcgacgaactcgtggcagcggccgggcccggccgccaggtgttcttcgtgaacacccgcagcccgcaatcgtgggtgggccagaccaacggcgccatgttcgacgcggtcgaccgccacgacaacgtacacgtgatcgactggtacaccgccagcgccggccacgacgagtacttcgacggagacggcacccatctcaccgaggagggcgcgcgagcctacataggcctcgtccacgatgccgtcgcaccgctgctgcccgtccacgccgaaagcgacgaagccgctgtggtcaagtcgccgctcgaactggctgccgacaacgcgaagaaagcctcctccgacaccgtgcgcgcgctcgccgcgaacgcggcgaacaatctaaagccccgagagtaaccctcgccgccagcctgaagcatcttcgaaaggcgcttatacccttcccgtttcgtaatcggacttgtacaatgcgaaagcggcaatgtacaaacgatgggaatcctgctacgcaggtccacgcgaacaacgagggggtttctacatgctagacaagttcttcaagatatccgagcgaggcagcactgtctccaacgaagtcattggcggccttacgacgtttctcgccatggcgtacatcatcgcggtgaatccggcgatgatggaggcggcgggaatcccgttcaacgccgcactgaccgcgacctgtttcggcgccgccatcatgacggtcgcgatgggcctgttcgcgaaccgtcccatcgcgctcgcctccgggatgggcatcaacgccatcgtcgcctattcgctgtgcctcggcctcggcgtggactggcgcgtggccatggccgtcgtgttcctggaaggcatcctcatcttgctgctggtgctttgcggcttgcgtaaagccgtcatggatgccatccccgtatctctcagacgcgccatcggcatcggcatcggtttgttcatcgcattcatcgggctgaagggcggtggattcatcgccgccgacgaatccacgttccttgcgctgggcgatctcaccagcccgaccgccattgtggccgccatctccatcatcgtggccgtggtgctcaccgccgtcaatctcaaaggcgccctgctgatctccatcgtggcggccactatcatcggcattccgatgggcgtgactccacctgtcaccgacttctcgttcgcgcccgacttctccgcattcgcagctccgttccaagtcacgcccgagggcacgctggccatcgcacaggtcatcgtgcagcccgtgctactgctgttcgtattcagcctgctcatgagcgacttcttcgacaccatgggaaccgtggtggccgtaggcagccgcgctggcttcgtggacaagaaaggcgatgtcgaagacgtgcagcctatcctcatcgtggattcggccgcggcggcagccggcggcttcatcggagcgagctccatcacgtcgttcgtggaatccgtctccggcgcggcagccggtgcccgcaccggcctgtcgaacatcgtcatcggcatcgcgttcgtggcttgcgcgttcctcgcgccggttatcggcatggtaaccagctcggccacctgcggagcccttgtggtggtgggatacctcatgatgaccgagatcggcgaaatcgattggagcgacatcgcttctgcattcccggcattccttaccatcgtgggcatccccatgacgtactccatcgccaacggcatcggcttgggcttcatctcctactgcatcatcaaggttgcccaaggcaagttccgcgacgtgaagccccttatgtgggtagccgccctagcgtttttggcttcgttcatcttcgcatagaagcgtctgcgttcagaaaagagccggcacttgcgtcgtcggctccaatagcaaaagaaggccggtcttgcgaccggccttcatatacgcgttatggacgcttaggctattcggcagcctcgggagcggcggcttcctcggcgggagcgtcagccttctcggccttcttcttggccggcttctcctcaacctggatggactcgtccacttcgatctcgaagcccaggtcggccgcggcggccttcatggacagggagatgcggcgacgctcggggttgatctccatgaccttcaccttcacctcgtcgccggccttcacgacctgagccggggtgtcgatgtggcgcatggccatctcggagatgtgcaccagaccctcgatggactggcccagctcgatgaacgcgccgaacggcacgatcttcgtcaccttgccgtcgacgatggtgcccaccgggtagctctcgacgagcttgacccacggatcctccgtcgtctgcttgaggccgagcgagatgcgctcgcgctgcagatcgacgtccagaacctcgacctccacctcgtcgccgaccttgacgacctcggagggatggttgacgtggttccaggacagctcggagatgtgcacgaggccatcgatgccgccgaggtcgacgaacgcgccgaagtcgacgatcgaggaaacggtgcccttgaggcgcatgcccttcgacagcttcgcgaggatctcggcgcgctcgttcttgcggccttcctcaagcagcacgcggcgggacagcacgacgttgttgcggttgcggtccatctcgatgacgcgggcttcgatctcggtgcccaggtacatgtcgagatccttgacacgacgaaggtcgaccagcgatgccggcaggaagccgcgcaggccgatatcgaggatgaggccgcccttgacgacttcgataacctcgcccgtgaccacttcgccggccttgaacttctcttcgacgcgaatccaagcacgctcgtactcggcacgcttcttggagaggatcaggcggccgtccttgtcttccttctggagaacgagggcttcgatcttctcgcccagctccacgatgtcggacggatcggcatccttgcggatggacagctcgcgcgacgggatgacgccctcgctcttgaagccgatgtcgacgagcacctcgtcgtgctcgatcttgacgaccgtgccgtcgaccaggtcgccctcgtcgaactcggtcagcgtgccgtcgatcatcgcattcatctgctcgtcggagatgtcctcgaagtcgatgacggacgtgtttttgatgtcggtcaaaacggacccctttcaattctttctaatcggggacccttcgtcatgattacttgctactttaccatgttcgcttgtgcaagaaacttgcccgtgcagcggtgtaacaaacatgtctcgggggcctacattaccgtatgcttacagcttccgtgctataagccatagtagtatagcacagcggcacccggccgctgtgctcattttaacgaaccctcacgataatttcgactctctccgcacggcagaaaaggctcgatcagttctcggcactggccttgcagtgggcgcacacaccgtcgaaaatgatctcgtgatgctcgatggtgaagccgtgcgcatcggaaacctgcgatacgatatcgtcctgatagggcatgtcgatgtcgaacacgccgccgcatatgcggcacttcgcatggtagtgcggcttgttgaggaaatcgtagcggtcggcgccgttgggaacttcaacccgcagcacctccccgcggttcgccagcacgccgaggttgcggtacaccgtggcacgcgaaatattggggtggcgcgcgcgcaccacctcgtacacgtctgccgaggtgggatggttatgcagtgattgcaccgcctccaagacgagcgctctctgaatagtgttgcgcgtcgtggcgcgctctgctttttccgtagccataatagtcctgccgttcgcatgtctaacccatactattgattaattaggattatatatcattagtatggaaagacaagcacacatcacgaacggccgccgcgttcccgcgaacgtccacaaaccggcccgattcggccgattgcccggcgcttgcgatgcgctcgccagaaacggccggttcggctacgcgggatcacgaaaaccactgccgtgaaggggatcccggccctgaggcgccgagaagcgacgggcggccagcaggccgcccctacggagccgtcacgcattgcgacgtaggggcggtcagccccgcatcttctacacggcatcctctccggtttccccggtgcggatgcgcacgacgtcttccacggggaagacgaatatcttgccgtcgcccacttccccggttcgcgcagtagcgcggatgaggtcgacgagcgggcccacctcgccgtcgtccaccaccagttcgaacttcaccttcgggatcatgttcagcatgacctcggtgccacggtagtactccttccacccgtgctgcttgccgcagccctgcacctgcgagatggtcatgcccgacacctgcgcggcgaacagcgcttccttgagcggctccagcttctcgggccgcacgatggccgtgatcttcttcatagtcgcactccttctttagtcgaggcccacgtaggccgggtacgcgctctcgccgtgcgcggccacgtcgaggccttgcgcttcctcggcctcgctcacgcgcaggctgcccttgaagcacgccttcacggcgaagcccagcaccacgtcgagcacgcccacgaacaccacggtcacgaggatgcccagcacctgagcgcccagcagcgtgggatctcccgtgtagacgaggccgccgaagtcggtccacgacagctccggcacgcagaacaagccggtcagcacgccgcccgtgacgccgccgatcgcatggatgccgaaggcgtcgagcgcgtcgtcgtagccgagcttccgcttgaggaacgacacggcgaagtagcacacgggcgacacgacgaggcccatgaccaccgcggcccacggctccacgaatcccgccgccggcgtgatgaccacgaggccggccaccagccccgtcgccgcgcccacgagcgtgggcttgcccgcgcgcgcacgctcgatgagcatccaggacacgagcgccgcgcccgacgccgccaccgtgttcgccagcgcgagcgccgccacgccgtcgggggcgaactcggagcccgcgttgaagccgaaccatccgaaccacagaagcgtcgcgcccagcgccacgaacggcacgttgtggggacggtagctcaccatgccgaacccgcgcctcttgcccgcgatcaggcagagaatgagccccgtgaggccggacgagatgtgcaccacgtcgccgcccgcgaagtcgagcgcgccgatggtgtcgcccacgaggctgccttcgccgccccacaccatgtgggcgagcggcgggtacaccatgacggtccatacggccacgaacgcacacaccgcgccgaacttcatgcgaccggccaccgcgccggtgatgatggccgtggtgatcatgcagaacgccagttggaacactacgtcggccatcgcgggatacgcgtcgtgactcagcgcttcgggcgcctcgctcacgatgccggccacaagtccttgcaggccgatctgatcgaagcccccgaagaacggaatcgagccgtcgccgccgtaggcgaacgaccagccgcacaccgtccatgtgacgccgacgatgccgatcaccgcaaacgacatgatcatcgtgttcacgacgttcttgcggcggctcaaacccccgtagaagaacgccaggccgggcgtcatcagcaagacgagcatcgcgcaaaccagcatgaagcccgtcgatcctgcgtcgaacatacgcatctacctccttatcgtcgtgctgcttgtcgagaacatattcgatgatcccacgctttgacctggcattgcgccgcggcgagcactgttaacacgctgggaaaggtcttgtaacaaacacgaagcgcccgcgttacaatagggaaacacgcacgaccgccatccgtgaaaggttgcagttccatgagcatcgcattcgaagccgtccgcaccaccgacgaccgacagcgcctcgccgcgctggccgacgagatatggcacgagtactggcccgccctcatcggcgacgcgcagaccgactacatggtggagaacttccaaagcctggaagccatcgagcgcgacatgcgcgagcacgcctacgaatattggctcatgcgcgccgaagacgacgggcgcatcgcggggtacacgggcgggcgcgtggagcccgagacgaaccgcttcttcatctcgaaggtgtatctgcgcgccgaggagcgcggcaagggcttcgcctcgcgggccatcgccttctacgagcgcctctgccgcgaacgcgggctggacgcgatgtatctcacggtgaacaagcgcaacgacctgggcatccgcgcctacctcggcaagggcttcgaaaccatcgacgcggtggaaaccgatatcggcaacggcttcgtcatggacgactacatcatggagaagcgcgtcgagcgctagtggacggagcgccgagcgcgcaggttcgcgaactcgcgcggcccctgcggacacgagcgtcctgccaccgcctcgcttccgcgcgcaccccgacctaccgttgtcggcatccgtgcgcgaacccgccgcgcccccatctgcttcagcaacgtttcggtcgcgcccctcgaatctggcacgaattcacggttcgggcacgaatctgcatctattttgccgagcgcatggcaagtgcaacagcataatgccagttcatgagttttccgagtcctaaaccttctgcccaaaccgtgaattcgtgccaaaatcgatgagcttgactgcgacgaaccggaaaaacgaaagacactccggtagcggcgagtcaccttcaaccctacgtttagtctcccgaataggacgaacgtcgcactttgcacgaggtatgatcgacgtaccggcaaaggactcgagaaagggtgcgatcgtatgggaaagttcgtgatcaagaccaccgacgcgggatgccacttcgtgctgaaggccgacaacggcgaggtcatcgccacgtcgcaggtgtacacgacgaaggattcctgcaagaagggcatcgagagcgtcaagaagaacgcgcccgaagccgaagtggtggaagaggactaacgcatgaaagcgacccccgatccgggggtcgcagcatttccgagcggcaaaccaaagccccgcccgatcgaacgcttacatgaacatcagaaacaggtgcgtgaacgcgaaggccagcagaccgcagccggggaaggtaagcacccaggtgagcaccatcctgccggccagaccccacttcaccgtgcggatgctcttctcggctcctacgcccatgatggcggtggtcttcgtgtgcgtggtggacacgggcatgccggtgaacgtggccagaccgatgcagaagcaagccgacaggcacgcagcgaagccctggtactgctccatcttcaccatgttcatgcccacggacttgatgatcttcttgccgcccaccgccgtgcccaaagccatggtggcagacacgaggatgatcagccagaacgggaactcgacgttcgcgtccaccgcgccgctcataccgatcatgatacccagcatgcacaacgacatgaacttctggccgtcctgcgccccatggagcacggccacgcccgcgcccgagatgatttgcgcccatttgaagaacgagttcgccttcgcgcgcgaagcgcggcagcacagcttcttgatgagcctggtgaacagccagccagttccgaagcccaggaatgtggagatgaccaggccgtagacgaccttcacccactcgtcgccgttcacgcccgtcaggccgccctgcagggcgatggccgcgccggtgatgccggcgatgagcgagtggctttgagaggtggggatgccgaagtaccacgcagtcacaccccagacgatgatggccaccatggccgccgcgagcgcgatgagggcggcttggttgtcgccgccgaagtcgaccatcttgaagatggtgagcgccacagccgacgacaccatcgtgatggcggccaaccccacgaagttgcataccgccgccatcgcaatggcgggaccgggtctcatagccttcgtgcccaccacggtggcgatggcgttgggggcgtcggtagccccgttcaccacggtggcgcccagcgtcaggacgacgatgagggcgagcaccgggtcgcccatgagcgccgcggcgaacgctcccagatcatagctcatgccggtttcctccgaacccgaacgttgaagacaaagcactcggagcaatgatagggatgcaatgtcaggatcaggcaacggaaagatcaagtttaggtaaaatcgcttgtcacacgcgcgcgaaggatgcgccgaatgtaaagaaaaggcgccggctgcacaattgcagccggcgccttcatgccaagaacgatcgtttttaccgcgcgagacgctcctgcacggaagcggcgatgccttcggcgtccaagcccaggtcgtgcaacagctggttcgtggaaccctggggcacgaacgtgtcggggatgcccaacgtcagcgcggggaccgcgaggccttggcgcgccagctcgcccagcacggcctcgcctacgccaccggagatgatgccgccctccaccgtcacgacgagcttcgtttgcgccgcacgggctatttcttccgcatcgagcggcttgacccagcgcatgtccaccacgcgcgcctcgatgccgttctcggacagcagctcggccgccgcttcggcgcgcggcaccatacgcccgaacgcaaggatggccacgtcgtcgccttcgcgaaccacgcgcgccttcccctcttccaaaacctgcggctcgtcgggcaaggctacgccctcggccgctccgcgcgggtagcggatggcgaaaggcccgcccagcgcgagcgcggtatgcagcgcatgcacgagctcggcctcgttggaaggagccagcatcctcatatgcgggatcatgcgcatgtaggcgaggtcgaacatgccatggtgcgtcgggccgtcctcgcccacgataccggcgcggtctatggcgaacacaacgtcgagatccggcagcgcgttgttgatgatgacctgatcgatggctcgctgcaagaacgttgagtagatggccacaaccggcttcttgccgcccgtcgccaagccgctggccaggcccaccgcgtgctcctcggcgatgccggcatccacgaaccgatcggggaactcttcggcgaacgcgtccaagccggtaccgcccttcatggcggccgtgatggccacgatacgctcgtcgcgtcgcgcttcggcggccagcgccttgccgaacacgctcgtgtacgacggcgccgatgccgctttcttcttcacatcccccgtcgcgatatcgaacggcgcgataccgtggaacttctcagggttctggaccgccggcgcgtatcccgcgcccttgcgcgtgaccacgtgcacgagcacgggaacgtcggtgttcatcacggacgccaacgtctctttgagcaggccgatatcatgaccgtctatgggcgccgtgcacaggatgcccagctgttcgaaaatcatcgagcgcgggatgacgaactgcttcatcgactccttcacgttgcgtccgaagttcgcaagcgcgctgccgaaagccccgctgctctcgagcgcctcctgcacggagtcgcgggtttgacgatactgaggcgtggctcgcatgtaaccgaggtgcttcatgagcgcgcccacgttgcgcgagatggacatctcgttatcgttgaggatgatcaccatgggcgtctgcgcctggccgatgtggttgagcgcttcgaacgccataccgcccgacagggccgcgtcgccgatgacggccacgatcttctcgtcgccgcccgagagttcgcgcgcctgcgccagaccgagcgccaccgacagcgagtcggacgcatgacccgacggatgcacgtcgtaggggctctcgtcgggcttcggaaacccggacaggccgccgtaggtgcgcaacgtgccgaaatcatcgaggcggccggtgatcagcttatgcgcataagcctggtgcccaacgtcgaacacgatcttgtcgtgcgggcaatcgagcatgctgtgcaaggccaggatgatctccaccgcgcccaacgatgacgcaacgtgaccgccggtttgagaagccgtcgtcacgatctcctcgcgcacctcctgcgccagaatggacagctcttcgttcgtgagcagtttcagatcggcaggggacgacaccatatcgagaatacgattatccatatgcatccttcaacaggggctacgccgaaaccggcgcacccgtctcctgcgcagacgcctcgtcggacgactcggcagaccgctcgcccgcttcctcgacgccctgctgcgcttcgatgttctcctcgagcaaatcgctggcgcgaagcccgagtcctaccgcttcctcgtacaaggcgagcgcagcgtcaagctccagctcgtcgctgctcaccgcgtcgacgatttcttcgaggcgggactttaccgcctcgaagctatcatacgactcaagcgccataggaggaggctccttccggcgactcgccctcctgctccggcgacccgcacttctgagccgcgaggggctcgctttcgggttccgcgatttcgttctcccgcatcgccagaggctcttcgttgccagcggcatccgcatcgcaagaagaaggggcatcggcctcctggccctcctccccctccagcatcttggcgatacgacccagaatgccgttgacgaagcgatgggattcgtcttccccaccgaagtccttcgccagctcaaccgcctcgttgatggtgaccgaggtgggcacgtcgtcgatgtacatcatctcgaacgtggccaaccgcagaatcgagcggtcgacgatgggcatgcgggccaacgaccagttctcggacgtggcggcaaggtggttgtcgatagcgatgcgatgcgactccacgcctcgcaccagcatcaacgcgtattcgggcagcggaccgtcttcttccaggcgacggtcgccctcggcgattgccgcgggcgactcgtcggttatctcgctggtgtacagcacttggagcgcggcacggcgcgcgctggttcgttcatgtcgtttagcagccatatagattcttaaagcctccggacgcttagcgggcgaactgcatgccgtcgatgtacacgtccacagagcctaccggaatgccaacctggctggtcaccgcgtcggagatagcctgacggatgttggcggcgaggtcgggcagcacatagccgtagtacacgtccacgcgaatggagatgtgcagcttgtcctcctcgtccaccgtgatgtcgatgccctgagtggagggcttgctgccgaacacggagcgcaggccgctcgtggtggacgggccgatgcaggccacgccctccacttcgttggccgcgatggacacgatggtttcgacgacgcccggcgcaagcgccatgccgtcgacgttaagctctgtcatagtacgtctcccatctgggtttcgatgaagtcggtggtcacatcgcccgagcagaacatcgcgttatcgagcacacggcgatggaaggcgatcgtggtttcgatgccctcgatcacgaactcgtcgagggcgcggcggccgcgcgcaagcgcttcctcgcgatcctggccgtataccacgagtttcgccaccagcgaatcgtagtacggcgagatgcgcgaacccgtgcgcacgtagctttccacgcgcacgccggggccggccggggcttcgaatttcgtgatggtgccagggcacgggcggaagccgtgctgcggatcttccgcgttgatgcggaactcgatagcatggcccgcaggcgagaacggcgcacgggaagcgcagctcatgggctcgccagaagcgatgcgcagctgctctttgatgatgtcggtgccggtgatctgctcggtcaccgggtgctccacctgcacgcgcgtgttcatctccatgaagtagaacgacccgcgctcgtcgagcaagaactcgatggttccagcgttcttatagttcacggcgcgcacggccttgatggccgccacgcccatggcgcggcgcagatcctcggtcagggccggcgagggcgcttcctcgatgagcttctgatgacgacgctgcacggagcagtcgcgctcgcacagggcgacgttgtttccgaagtcgtcggccagcacctggatctccacgtggcgcggacgcagcacgagcttctccaggtacacgccgtcgttgccgaacgctgccccggcctcggtgcgcgcggcctggtactgagcctcgagatcggccgggtcgtgcacttcgcgcatacccttgccgccgccgcccgccgtggccttgatgagcaccggatagcccacgctgtcggcgaacgccttagcctcggccgccgtctcgatacagccgtcggaaccgggaacggtgggaacgccgcacgctttcatcgtctcgcgcgcggagctcttgtcgcccatgcgctcgatgcactcgggagccgggccgatgaacacgagatcgttatcggcgcaggcgcgggcgaagtcggcgttctcggcgaggaagccgtagccgggatgcacggcttccgcgccggtggttttcgccgcggcgatgatgttggccatgatgaggtagctcttgttcgcctgagcggggccgatgcacacggcctcgtcggcgtactgcacgggataggtgtcggcgtcctcggtcgagtagaccgcgaccgtcttcacgcccagctccttgcaggcgcgcatgatgcgcagcgccacctcgccgcggttcgcgatgagaatcttgttaaacattatgccgtctccggagccggagccggggcaccgtggggctcgatgtagaacagcaccgtgccgaactcgacgggcgtggcgtcctcgaggcacacctcgcggacggtgcccatctcctcggcggcgatctcgttcatgagcttcatggcctcgacgatgcacagcgtctggttggcggcaacctcgtcccccacctgcacgaacggcggttcgccgggtgccggggaggtatagaacgtgcccaccatgggagccgtgacggcgtaccaatcgctcggacgctccacgtcgtcggcagcggctgccggagcggcggcgggagccggagccacggcggcaaccggcgcggccgcagcggccacggcagcggcctcggccgacatcgttcccggcatgcgtacggcgatgcgggtgccctcttcctcaactacgatctcgccgacgccgctttcctcggcgacgcgaaccagctcgcgaatctgattgatgtccacgtaatcgtcctccttggtgtggctcgactcctgctccatgaggaaatcgaccttctccgatgtgcggtgcttgctcaggaacgtgcgcgcctcgttcgggaacagggcgtacatgagcacgtcctcctcgctcttcgcgaggtcgccgatctcttcttcaacctgagcgtaggtggtggtgaccagcgagccgggtgccacgtcgggcggcagcatttcggagttgcccacgaccttcgccacgatgtccttgtccatgcggcccggagccttgccgtagtagccgcagatgtagtccttcatctccttggacacgacgctccagcgcttgccggtgagcacgttgaacacagcctgcgtgcccacgatctgcgacaacggcgtgacgagcggcggatagcccacctcggcgcgcaccttcggaatctcgcgcatcacctcgggcaggcgatcggcggcgttctggatctcaagctgcgacacgaggttcgacatcatgccgcccggcacctggtgcgagtacacctgcatgtgcgtgagcgacgagacgccgcgcttgtagtgtccgcgcttgcgcatgtcttcccagtattcggcgatctcgaacaggaggtcgaggtcgaggccggtgtcgtagcggctctcctggagcgcggccacgatcatctcgacggccggatgcgagttgccgaacgccagcggcgcatgagccgtgtcggcgatggcggctccggcttcggcggctttgaggatgttggcgggcgccatgccgccgacgtaatggcagtggatgtgcaacggcaaaccgatttcggcgttgaacgccttcaccatgcgctcggtgcggtagggcgtgagcatgcccgccatgtccttgatgcagatggagtcggcaccgagatccttgagcttctgaccgtagtcgaggaagctgtccagcgtgtgcacgggcgacatcgtgtaggagatggcgccttcgaagtgaccgccgcattccttgatggcttcggcgttgtcgacg

SEQ ID NO: 8736 - DNA, 1798 bp, Unknown
  gut microbiota DNA sequence
gtccttgagcttctggccgtagtcgaggaagctgtccagcgtgtgcacaggcgacatcgtgtaggagatggcgccttcgaagtgaccgccgcattccttgatggcttcggcgttgtcgacgacgttgcggatgtcgttgagcgcgtcgaacacgcggaagacatgcacgccattgcgcttcgcggccttgatgaagtgattgcagatgtcacgcgaataatgcttgtaccccacgaggttctggccgcgagacagcatggcaagcggcgtgttcggcgtctgcgccttgatggatcgcagccgctcccacgggttctcgtcgaggaaacgcatgcacgtgtcgaacgtcgcaccgccccacgcctcgatggcccagtacccgacacggtccattttaggcaggatcggcagcatgtcgccgatctgcatacgcgtggcccagaggctttgctggccgtcacggatggtggtatccatgatctgaagccttggcatgaactcacacccccttcggtttgcagttagtcaaagatcgaaacaagaattatagagtaaccccttgccgcgatagccatgaccggggaaattcaccgacaagcaacagatttcgagcggcgggaggccgaggcggccatacgtatgcagcacgctcatcaaaaagacgctgcattgtaatcgctggatgacggcttgggttttgcgcgccgttacgctttctgtatgagcgagatgagcaaaaacgagaagatggcgcgcaaggatccccttgtccagcgcctgtctgccgacttgggcagccggcttctcgaagtgcgcacctccgaaggactctcccaaaccaccttggccgagatggtgggcacgaagcatcctcgcattagcaacctcgaaggcggcctcgtggacgtgcgcctctccgacatcgtgaagctggcccgcgccctcgacgtgaaccccggcgagctgctcgatctcgccgcttacaagctggaggactatcccctccccctgcccgacaaccacgcgcgtatgtagacgaacaaaacgagggcgcccgtcgggcgccctcgtttccattgagccgagtcggggtttcgcgcttgctacacgcgcttgatgaagcggccgtcgcgggtgtcgatctgcaggacgtcgccgatctcgacgaacgtgggaacctgcacctcgacgccggtctccagcgtggcgggcttcgtcgtgttagtggccgtatcgcccttgaagccgggctcggtgtgcgtgacctcgagctcgacgaacatctggggctcgatgctgatcagctcgtcaccagcgtacagcagcgacgcctcgtcgttctccttgagccacttcgcggcatcgccgacggtttcggtcgagatggccatctgctcgaacgtgtcgttgtccatgaagttgaaatcggcaccgtcgttgtagaggtactgcagcttcttcgtctcgagacgcacggattcaaccttgacgccggcgttgaacgtgttatcgatgatgcggccggtcttgatgtcgcgcagcttcgtgcggacgaaggcgctgcccttgccgggcttcacatgctggaactcgacgatggtgcacagcttgccgttaaactcgatgcacatgccgttcttgaaatcggcggtagagatagccatactcggtaatcctttcgttcacgggcgatccgctgcgcgccgcggggcccgatcagcgttcaaaccggtacattatagcgtgtcgggcaaaccttgcgtgcgcacatcaaccgtatcagaaaaaaatcagggca

SEQ ID NO: 8737 - DNA, 2243 bp, Unknown
  gut microbiota DNA sequence
ccggaggcgccgccgccggggccgaggtccaccacgtagtcggcgttggcgatgacgtccaggtcgtgctcgatcacgacgaccgtcgctccctgctccaccaagcgctcgaacacgcccagcagggtgcgcacgtcgagcgggtgcaggccgatggtgggctcgtcgaacacgaacacggcatcgtcctgcgcccggcccatctcgctggcgagtttcaggcgctgcgcctcgccgcccgacagcgccggcgtggcctcgcccagcgtgaggtagcccaagcccagctcgtgcagcgtgtccaggcgggcgcgcgccttcttcaagccggacgcgggcgtgcgcgcctcgtccacggtcatggccatgagctggggcagcgtgcagccgggatcctcgcagccctcggcggggcggtggatgcgggaggcttccggggcgtagcgcgagcctctgcacacggggcaggtgatgtccacgtcgggcaggaactgcacgtccaggctgatggagcccgtgccgtcgcattcgggacagcgcagcttccccgtgttgtaggagaagtcgcccgccttcagcccggctgccttggcgtcgggcgtgcgcgcgaaggcgcggcgcagctcgtcgtgcacgcccgcgtaggtggccacggtggagcgcacgttcgagccgatgggcgtggcatcgatgaggttcgcccgctcgatgcccgcggcttcgatgcgcttgacgtgggagggaagcttcgcgccgctcgcgttcgctacgagcgcggggatgaggctttccagcacgagcgtcgtcttgcccgagccggacacgccggtgacggcggtcaggcgaccgcgcgggatggcgacctcgagcggcttcacggtgtgcagcgcctcggtggccagctcgatgcttccgtgggcgaacacgtcggcggcggggacgcgctcgcgtacgcgcacggtctcctcgccggagaggaagccgccgatcagcgaggcggggttcgcctctacctcggcaagcgtcccttgcgcgacgatccgcccgccgtcagcgcccgcgcccggccccatctccacgagccagtctgcggcggccaggatgcgcgtgtcgtggtccaccatgaccaccgagttgccgtcggcgagcagatcgcgcatcacctcgacgagcccgtcgatgttggaggggtgcaggccgatggacggctcgtccagcacgtacagcacgccggtggttcggttgcgcacggcgcgggccagctgcacgcgctggcgctctccggtggacagcgtggagcccgcgcgatcgagcgcgagatagcccagccccaaatcgacgaggcggcgcgccgtgtgctggaacgactcgacgatgttgtgcgccatcgggcgcatctcgggcgcgagaccatcgggcacggcgtccgtccaggcgaccagctcgtcgagggtcttcgcggacgcctcggccaggtcgatgcccgcaacctgcgggaggcgcgcctccggggagaggcgcgtgccgtggcagacggggcagacgccctgcttgaggaagcgggccacgcgccccaggcccttctcgtccttcaccttcgccaacgcgttctccacggtgtagacggcgttgtagtaggtgaagtccagctcggcgaaggtgtcggtcttcttcgccttgtacaggatgtgcttcttctcggctgggccggaaaacacgatgtcgcgctcggcgggcgtcagctggttgaagggcacgtcggtgcgcacgcccatctcgcgcgcgacctgcttcatgaggtcccacatgagcgtgctccagggcgcgacggcgccttcgtcgatggcgagcccctcgtcgggcaccagcgagtccaggtccacggtgcgcacgatgcccgtgccgtcgcactcggggcaggcgccgccgctgttgaaggccaggtcctccgcgccggggccgaagaactccacgccgcagacggggcacgtgatggggcgctcggcggcgacgttcagcgtgggcggcacgcggtggccgttcgggcacacgtggctgccggcgcgcgagaacagcaggcgcaggctgttcagcagctcggtggacgtgccgaaggtgctgcgcacgccgggcacgctgggccgctggtgcagggcgagcgcggcgggcacgtgcagcacctcgtccacggaggcgcggcccgcctgcgtcaggcggcggcgcgtgtaggtggagagcgcttc

SEQ ID NO: 8738 - DNA, 489 bp, Unknown
  gut microbiota DNA sequence
acctcgccgatcttgtgggtcttgcccgtgtagtagaggatgcgctcggtggtcgtcgtcttgcccgcgtcgatgtgggccatgatgccgatgttgcgcgtatccttcagttcgattttcgccatgagtcgaatcctcccttagaagcggtagtgcgagaacgcacggttcgactcggccatcttgtacaggtcttcgcgcttcttcaccgacgcgccggtgttctcggcggcatccatgatctcggcggcgaggcgctccttcatcgtgtgctccttgcgcttgcgcgagaagtcgacgatccagcgaatggcgagcgtggtggcgcgacgggagttgacctccatcggcacctggtaggtggcgccgccgacacgcttcggcttgacctcgagcgtggggcggacgttgtccatggccttcttgaagacggccagcggatcgccgccggtcttctcctcgacgatggcgaacgcaccgtagacgatg

SEQ ID NO: 8739 - DNA, 1218 bp, Unknown
  gut microbiota DNA sequence
aagcgtggtggcacgacgggagttgacctccatcggcacctggtaggtggcgccgccgacacgcttcggcttgacttcgagcgtggggcggacgttgtccattgccttcttgaagacggccagcggatcgccgccggtcttctcctcgacgatggcgaacgcaccgtagacgatgttctcggcggtggccttcttgccgtcaagcaggatcttgttgatcagctgcgtgacgagacggttgttgtactgggcgtccggctgtacttcgcggcggactgctgctgcacgacgcggcatgtgttctccttctaggtcctgcgcgcttcggaacggctttctctccgttcattaggccgcccgcctgccccctttgggctcggtcggttgctgcggcccgcgcgtcttagcgggtgttacttcgggcgcttggcaccgtagcggctgcgagcctgcttgcggttgtccacggcggcgcagtcgagcgcggcgcggatgaccttgtagcgcacaccggggaggtccttcacgcggccgccgcgcagcagcaccatggagtgctcctggaggttatggccgacgcccgggatgtaggcggtcacttccatgccgttgacgaggcgcacgcggcaaaccttgcgcagagccgagttcggcttcttcggcgtggtcgtgaacacgcgggtgcacacgccgcgcttctgcgggttgcccttcagggcaggcgtcttgctcttgtcgactgccttcttgcggcccttgcggaccagctggttgatggtaggcaaagcttctctccttttacctcttgcttgtccgagacgtctacatactctataaacgctcgcttgaacaccgtttccaagtgcgttcagctgatgcgcacacgaaaacgctcgcctcctcggagacgcgaaggtgaactctaccatcgcccctcagggttgtcaaacgccacgcatccgggagtatctatacctcttgagaaccgttatcgcaggtgaaacccacactggtgacgaatccgtggcgaaaagtccaccgtttctcaaaaatacttcgaacctgtcggcagcgtatcgccgccatccccgtcgactttcgcggcttggagcagcgcgagcatgtccggaacgtccaggcacgccaccggtgcgctccgggcaagccgtttgtcggaggtgaccaggtagtcggcctggatgcgctgggcggcggcga

SEQ ID NO: 8740 - DNA, 2328 bp, Unknown
  gut microbiota DNA sequence
gaaccctcttcggccgccttcatcttgcggcggcgctcggcttatgcggcatcgccttcggaagcccgcatgagacgcgcccgtcgcgcgcggcctactgcgcgccttcggcgatgagagcctccacgaggcgggcagcgccctccaggtcgtccacggcgatgtgctcgtcgacggaatggaaggcggccatgcccacgcccaacgtgacgggacgcacgccgcgggcggccagcacgttggcatcggagccgccgccggagcgatggaaccgcggctcgaggccggccgctcgggaggcacggacgatggcctgcacgagctcgtcctcctcgtcgaacagcacggcgtcgtagctcttcgtccactcgatgctcaccgcgcctccgaagcgcgcggcggcggcctccagcgcctcggtcatggcctctttctgagcctcggcgcgctcggcgtacagcgagcggcactcccccgccagcgcgcacgtgtccggcacgacgttcgtcgcgccgccgccctcgatgaacccgacgttcgccgtggtggcctcgtcgagccggccgagcggcatggacgagacggccgcggcggccatggcgatggccgacacgccctcttcggggcacacgcccgcatgcgcggcgcgtcccgagaacgtcgcgttgagcgaccaatggcacggggcgcccgtgatgatggtgcccggagcgccgtcggcgtccagcacgtagcaaggcgcgcccgcgggcagcaggccgtcggccagcgcgctcgaacccagcagatgctgctcctcgcaggtggtgagcagcacggtgacgtcgggtcgaggcgagccggactcgacggccgagcgcacgccctcgaagatggcggccacgccggccttatcgtcggccgacaggatggtgtcgcccgccgagcgcacgaccccgtccacgacgacgggctcgatgcccgcgcacggctgcacggtgtccatatgcgccgagaacaccatatgccccgtccgcgttcccggaagatgagcgacaaggttgccggtatccgagccgacgcgttcggcggaatcgtcgaagctcacctcgaacccgagcccgcgcagctcgtcggcgcatcgggccgccatcggggcctcgtgaaacgacgggctctcgatgcggacgagctcgcagaacagatcgagcagacggctctcttgcatggacgttccttctttctctccttcagccgccaagcttgaacgctcggcaacgacgatgggttcggttacggaaagccattataatcagcaacagcaccgtgcgcgcgagaacccgggcaacggggccgcgcgctccgtaccgcgaaatcgagggaggttccgagtgcaggacatcatcaaagcctgtcgaagctatcgacgattcgatgaaagcgaccgcatcgaccgcaagctgctcaccgcctgggtggacgccgcgcgactggtcgcttcgagcggcaacgcgcagccgctgcgctacgccatcgtcagcgacgagcgcgcctgcgagcgcgtgttctcgtgctgtgcatgggcgaaggccctgcccgactggccgggacccgtgccgggcgaacgcccgagcgcctacgtcgtggtgtgccgcgacaacgatcgcacattggccgacaccttcaccgcatgggacgagggaatagccgcgcaaaccattatgctgcaggccgtcgaagccgggttcgggggctgcatcatcgcgtcgttcaaaaagaggagcatggccgaagcgctgggcgtcgacgcggaccgcttccagcccgacctcgtgttggcgttaggcaaacccgtcgaagacgtgcgcatcgtcgaccttccggcaggcggtgccaccgagtattggcgcgacgaggcgggcgtgcactacgtgcccaaacgcgcgctgtcgagcgtgctgctgtagcccgcacccggcgcacgccgcccgggcatcgcgcgcctacgcttcagccgcctcgtacgcgatctcgcgctgcgcgtcgaggcggcggttgcgaaagtacacgatccagttgacgccgatgcaggcgaggttgatcaagtacaccgccaaaacccagttcaccgaaccggatgcgaacttcgcggcgatgccggccatgtagcctgtcgtgatcagggcgatgaactgccagctggagccagccgccgttgccgctttgaaattcttgtacgcgttgagcggccacgacaagccgaagcacacgagcatcgccgcctccaagagctctgacacgagcccaccatctccttaccgcgccggatcgttctgcgatcgtcggcct

SEQ ID NO: 8741 - DNA, 350 bp, Unknown
  gut microbiota DNA sequence
accagccgccgttgccgctttgaaattcttgtacgcgttgagcggccacgacaagccgaagcacacgagcatggccgcctccaagagctctgacacgagcccaccatctccttaccgcgccggatcgttctgcgatcgtcggcctcgctttcctgcaacaggcaccaccctacgcgctcgccccagcgttgtccaatataaatttcatctccaatgatatgatagatgttataggatgagcggataacgatcggaaggctcccgatggaactgcagcagctcaggtacttcgacgaagtggcgcgcacccagcatgtgacgaacagcgcgaagaagctcaacgtggccca

SEQ ID NO: 8742 - DNA, 2469 bp, Unknown
  gut microbiota DNA sequence
gcatgaacgtcctgcgcgccgagcaggcgcgcgacaccggtgcggacgccgtggccaccgcctgcccgttctgcctgtccatgctggaagacggcctggcgtcccaggacgatgccctgccggtacgggacatcgccgagctgttgtccgacgcgctggctctgtcgcggtgataccatgaggaaaactccttccgcgcgtcgcgcggaaggggcgaaccgagctggatggtatgcatgcgcaaggaggcggggctatgaacgcgtggaggtcgggcgagatgctcgaagtgccgatgagcgagcagctggcccgcgcctacgaggggttctgcgccgcagggacggctccggccgtgccgcggctggcggccacggtaatgctggtgcgcagcccgcgcgaggtgttcatgctgcgccgggcggcgacgatggcgttcgtgccggaggccgtggtgttcccgggcgggggcgtggatcccgccgacgacggcgcgcggtgctcgtggatcggccccgacgaggaggtttgggcgcgtcgcatgggcaccagcgccgacgtggcgcgccgcgtggtgacggcggccgcccgcgagctgttcgaggagtgcggcgtgctgctggccggcgacgagcgcggcgtctgctcgctggacgcctccgagcccgcatgggccgaggagcgccgccggctcgtatcccacgagacctcgctcgccgacgtgctgaagcgccacggcctcgccttgcgcgccgatctgctgggcttgcgttcgcattggctgacgccggagttcgagccgcgccgctacgacacctactttttcgccgcgctcgcgcccacagggcaggagcccgacagccgcaccagcgaggccgatcgtgccggatgggtggatccgcaggccatgttcgaccgcgccgcgcagggtttagtgcgcctcgtgccgccgacggcctacaacctggcgcacctcctgcatgcgcccggcgtggagtcgttcgcggcaggcgtggaggagacgggccgcgtgatgctggaacccgccgtgcgcgaagggggaagggcggtgctgacatgcaggctgccgtgatgcagcgccccgtcgtcgcgacgggtcgggcttcgtggggaagccggcgcgtgtcggctcatgcgcgcgtgatcctcgccgacaacccgtcgcctctcacgtacctcggcacgaacacctggatcctggccgatccgggctcgcccgcgtgcgtcgtggtggatcccggccctgacagcgcgccgcatctgcgcgccgtgcagcgcgcctgcgccgaggacgggcacgaggtggccgccgtcctgctgacgcacgaccatgccgaccatgcggaaggcgccgagcgcttcgcggcgatgacgggagcgccggtgctgtcgcgccggagcggcacgctgcccgacgggccgctcgatctcggtgccggcgcgccgcgcctcgaagcggttccgttgccggggcatgcgagcgatctcgtgggcttcctcatgccctccgacgcgtccgtcatgacgggggatatgctgttcaagcaaagctccacgctcatctgctggcccgatggcagcctggcggcgtacctggaaagcctcgagcgtctgcgcgccacggtcgtcgagcgcaacgtcgcgcgcctgctgacggcccatgggccgcttatcgatcatccgctcgaagccatcgaccgggtctaccgtcatcgcctcgatcgcttggagcgcgtgcgcgccgcctcggaggcgggcgccgggctcgacgtcgaccgcatcatcgaggccgtgtaccaggacgtggacgcgcgcctcgatccggccgcgcgcatcaacatccaagcccagctggaatacctcgcgcagtccggcaagctgccgtcctgagcgcaggaggcgcgacagggtgtcatccttcgattcgctcgcgctccgctcaggatgacaccctgtcgatgcctctgcatgcgagaaggccggggcgcttgccccggccttcttcggatcgtctgcggtttctctgtttccctactcgttctccatgcgcttcgccagctccttggccagctcgaagcgcttcaccttgccggtggccgtcttcgggatctcgtcgatgtactccatgcgctcgggccacaggcgcttggccacgtgcttctcggccaggtaggccgtcacgtcctccacggtggggcgacgctcgtcgacgggcaccgcgaaggtgcagatgcgctcgcccaggcgctcgtcgggcatgccgatggtggccgtctcgcccacgccggggcaccccatcagatcgtcgtcgatctcgcgcgcgcagatgttctcgccgccgcggatgatgatctccttcttgcgcccgttgatgcggatgcgcccctcttcgtccatgtagccgaggtcgccgctgtagaaccagccgtcgtcgtcgagcgcgcgatc

SEQ ID NO: 8743 - DNA, 298 bp, Unknown
  gut microbiota DNA sequence
gtcgtaggagttcttccactcggtgaagctttcgcgcgcctggtagtgcgggtcgcgctccgccatctcgtacgtgtagatgcggctgcacggcacgccggcttccaacatgagccgctcagcctcctcggcggtgtgcgatccgaagaacgcctccatcgcttcctccagcacgttgcccgcctcgcttccgaacgagatgaccggcgtgccctcggggaacagctcgctgccgtactcgaggccgaacagcggcagcgccgcgcgcaccacgccgggacccaggatgagcgtgtag

SEQ ID NO: 8744 - DNA, 11301 bp, Unknown
  gut microbiota DNA sequence
aaccctggtaaaaggaatcaaaacgaaagatactcaactcatccatgcaacgatgatagggttgcagcattgcaaaatttaggtgtaccctattctcgatactaaattcataatctcacaaattggcaagcagtgtaaacctgtacaggttcactcattttctcgattttcccttcggtgcaatcttcgcaaatttgcttgttggggaagcatccccaatcccctttgaacatcatctgccgatgatggctacacgattttcaatcgtttctcaaagaacagtagaataaaaatttgcccatggttgaaagcaccgaaatcgaaaagcaaaaaagcagccacgatccgcaccctttggggagtgcagaccgtggctttttgctttaacggaagttcttcttttcctctttctctttctctttttcctgctctttctgcctgtcgatattcaaaatcgtttcaaccgtccgtttggcaatcagcagttcttctttctcttttctgatctgacggtactcagcgtagtcctgctttttctggactgccagctgatgaaactcctcatacaatgattgcatggacgggagctttgtaatctgcaattcatcaaaggcttgcttcgccgctttatgaattgtgatttcctgacggtgttcttcaaagaattttttgctatatccagacttgcggtactcgatataaatttgccttgtgttgcgataatttttgatgtgctgctgcaacgcctgaacctcaaccatacgtttctctgcgaccttgatagaatcagaaagcgcatcgaaccgggcagacagattttcaatatgagcagtcagatcgtcgtagttgcccaagcctttttctttcagtaggattaccgttcgggcagcttcttttcggttgaacttcttcgcccacttttcataaccgaccgtcttgccctcggccatctttgcctgaatatcaatcagcatctggaactgcttcggggcaggagccttggcagagccgccttttgatttgtgcaggttcttgccggagataaccgcttgaatttcctctttgctatatccttcgcccagggaacgcagccgaatgaaacgcttctgattctcgcccttgaacgcaggctgctttccatccttgaactcaaatcccatgtcagccagagcctgaacaaagccatcaaagctctttggtttctgcttcagcaccgcatcaatcgcatcacataattcgtcacgctgggtacgcttcttgggataaacagttcttttctggcgctcccgatacggcttcggtgtaataatggacagcccgtgttccaggcaaaccatatcactgagtctttgcaccgccagaccggaaagaaagaagtttttgaatttccgtgtggcatccagcgaggtcgaattataaatgatatgattgtgaatgtgggatttgtcgatgtgggtcgcaacgatgaaagcgtgttttccctttgtccatcgcatcgctgtttcatagccgacttggttcgcttcttccggggtgatttctcccggcttaaaggactggcgtatctggtatgcgatgatattgttcttctgctgtctgccggtaatatgctgatactgccgtttggaaagcagaaattcctcatctgctgtctttggatcacactcataggaactgataaattcgccatcattggtttttgcggcattttgtgagtagtcggttctgtctgccaaacattgagcgaccgtctttcccttattcacatggagtgcaatcaatcttgtcgctgccattcccatcacttccttcccaaaaagaaaaagccaccggtcggtgacttttctctgatattatcttatgacctgataaatgctcccagactttctccaatattctcgactttcataacagcccagacgagcaagaacaccgctgctattgtcgcaattccaagaaccacaagaataagcagggactgccacaaagcctttacaatgcagtaaatcgcagatccgccaatgaccaagagcaataaaccaattacataggacacaacatttgtaagcagatttccaagaatgcaaatcacttttacaacgaacagcaccggcagtgccaatatcttcaataccagcttcataggctcaacccctttcttttaattatattgtacaagggtatctgccataacgcaatgatgtcaacccttatgtaaaagccgcagccgaaactgcgacttcccaacaagttgtcggattactggattgaggacaggcgaacaagaacttctctcatgtccgtccagatctcctccagccgtttttgcaaatcctcaatgtcagcacgatagatgctgcctgtttcgttcgctcgctttgcgtactggttcaggttgttggagcagattcgcaggagcgaaaccagggctttcacatcctgcaaatccagtctgatacagtaaccatccagagccattttccgcagataggctcccatgctgcggatgccaagctcgtccatcttctcatggattcgctcgacctcctccttggatgcaaggaaatgaacatcctgatctcgctttgccattacaacacctcctcacgggtttcagagtattttgcaggcgggatatgctccgctttggatttcagatcagccaacacagaaggacgctctgactcgcttctttcgtcacgattttccacagagtcctccatattcagggctgcatccagttctgccagtcgctgacttttggctgtcagctctgcttcctgcgggaacggttttccaacctccgccttggctgcttcctgctgattgtagagattattcaactgctcattggctcgttctaagcgctcaaggatgcctgcaagggcattgtccagtcgggtgatatttcctcgtgcgtccgttccaagggctactctgtggctcacagcgcccttcagggtcacatcgaactcgttccggaaactgtcaaacgaaagctccatctgaaagccacggtaactgccaagaggaaccggatcggcacttttcgtgtccttacaagccgcaaggaggatttcaccggcatctgccttttcggtgtaggctttgcccatgatttccatgccgcaaaagccatcggcaatctgcgggtgtgcttccacggttttaatatcagcttcaaagccatgaatatagcctgtctgcttttcaatctcagccgggaagtatttcagaagcttatcttccatacggtactgctggctctggtggtcagctttcagcaccttcagccttgccacatcaatgtccaagtccatcttttccttgataagcggattgccggcacacagcgccttgatctccgcataggacagcgcctgctcatccacatcgtcacaggagcgaaccggtgatttggaggtcataatctgagaaataaacttctgcttgttttccaaggtctgatacaggtaggcatcgaaggttccctcggtcacatactgatacacctgaacctctttgttccggttgccctgacggatgatacgaccgtttctctgggtcatatcagacggacgccaacccacatccaagtggtgaactgccaccaatttgtcctggacgttggttcctgcacccatcttttgcgtactgccaagaagcactcgcacctgcccggtacgaaccttggcaaagaggtcttttttctttgcctcggtatctgcatcatggataaaggcaacttcttccgcaggcacaccgtttgcaatcagcttggttttgacatcatcatagacattgaaggttccatcatttttcggtgtgctaaggtcgcagaacaccaactgggtcaatttgtcagcctgaccgtcctgccagatacgcaggatatttcccacgcaggcattgagcttgctgtcagggtcatcgggtaacagggtgttcattagccgctgatccagtcccaattttcgtccgtcgctggtaatcttgagcatattatcgacggacgggtctacaataccggcatgaacatctgctgctctctctgaaagggaagccaccatatccttctggtactcagagggctgaaccacaaccgtttcaaactttgcttcgggaacagggagatgcaactggtcagaggtcttgatgtcggcaacctccttgaacatattcatcagttcaggcaggttgaagaacttcgcaaatcgggttctggcacgatagccggttccctccggtgcaagctcaatcgcagttgttgtttctccgaaggtcgatgcccaggaatcaaaatgggtcaggttcttttgctggagcgtactgtactggagatagcgcatgaccgtataaagctcggtcatcgagttacttactggagtaccggttgcaaagatcacaccacgcccgccggtcagctcatccatatagcggcacttcataaacatatccgaagatttctgggcttcggaggtggacagacctgccacatttcgcatttttgtgtagaggaacaaattcttgaacgcatggctttcgtccacaaacagccggtctacacccaactgctcaaaggtaatgacatcatctttcttgtcagcggcaaggagcttgtccagtctggcttccaatgattttcgtgttttctccatctgcttgatcgtgaagttttcgccacgctgccatttcagctccgcaatcgcaccctcgatctcatcaatctgctcccgcagctgccgttcctgtcgttcggcagaaagcgggattttttcaaactggctgtgaccgatgatgactgcatcatagtcacccgttgcgatacgagcgcagaacttcttacggtttgctgtttcaaaatccttcttggtggcaacaaggagcttggcactcggatagaggtgcaggaactcgtttgcccactgtaaggtcaagtgattcggcacaacgaacagggatttctggctcaatccaagccgtttactctccatagccgatgcagccatctcgaaggtcttgcccgcaccaacttcgtgtgcaagcagcgtatttccaccatatagcacatgagcgatagcatttctctggtgttcacggagggtaatatccgggttcatgccgccgaaacggatatgagagccatcatactcacgaggtctggtggagttaaaaagttcgttgtacttggtggaaagggtttctcgtctgtgcggatctctccaaatccaatctcggaacgcatccttgattgcctgctgtttctgctgtgccagggtagtttcttttttattgaggacacgcttctgcttaccatctgcatcttcaatcgtatcatagatacgaatatccttcagattcagcgtttcctccagaatccgatatgcgttggctcgctctgtaccgtaggtgacatacgccgccacatcgttgtagttgggagaactcttaccgttgatgcgccactctgcggtcagctcggagaacttgacctcaatggaacggcgcaagtaatacggcgtttcaaaggtttcctccatgaactgctgaatataatcggcatcaatccatgttgcacccaaacgcacatcaatctcggacgcatccaagtccttcggctgtgctttctgcaaggcttccacattgatgtggaaggaagaatccctgtctgccgccatctgtgcgacacgcagcttgcttcttacatcaccggaaaggtaatcatcggcagtctgccatccaacttccacagcatcgggagccatcgggtctttgaagatcacccctcgaagctctgcctgaatcgcatcgtattctccaggtgttccaagcagctgtgccataaacggcaaatccaccttgccacgctcaccgatagagattgccagagcttcggacggcgtatccacgctcgtcactctgcgttccggcttgatggttcgcttggtgaacatatccgccttgcttttcagattgccgtcctcatccacattttccagagaacacaggagatagtaggaggaatcgtcagcaaatgcctgaccattggctcgattattgataagcccgttctttgcggcaaacgcatcgtaggcatcattcagttctgcctgtttctgagtaatcatttcatccgggtaatcctcaagctgatattcgatcagctcgttgacgataccacgaagttccaccatgcccatcacacggtcttttgctttctcattcaggtctacacggcgcatcagggagttttcacggaagtacacattgccatccaccacggtataagagaaattctttacatccggggttgcaggaatggtttcgatttccttacccttgtcagcttcgggaagctccacagcctgataggttccttggatgtgggaaactgcttctttcagaagttcggacagttccatgccctcaatgggacgcactgtaatgtccatgccgtaggcggtactttcttccaccgtatcgcccagaaccatttcaggatgagcgacaaagtagctgttcatggtgtgtccttcttcggtgcggtcaaggtttacccattccggtacaatgtcaatcggatggtcacgcttttgcaggaacaggatgtcggacacgacttccgtgcctgcgtttttcttaaaggcatcgtttggcagacggattgcaccaagcagttccgccctctgcgccatatatcgccttgcgtcagagttcttggaatccatggtgtaacggcttgtcacaaaagcgaccacaccaccgggacgaacctgatccaaagccttggcaaagaaatagttgtgaatggagaatcccagcttgtcatacggcttgtcggacactttgtagttgccgaaagggacattacccacagccagatcgtaaaagtctcggcggtctgtcgtttcaaaaccggctactttgatttctgcgttgggatagagcttctgagcaattctgccggtgatggaatccagttccacaccatacaaacggctgctctgcatttcaggagggagcataccaaagaagttgccgatacccatagcaggctccagaatatttcctgtttcaaagcccatctgtccgaccgcatcgtagatggagcgaatgaccgtagggctggtgtaatgtgcgttcagggtggaagctcttgccgcagcatattcatcttcggaaagcaggtttttcagtgtctgatactccttcgcccaatttcccttgtccgggtcaaaggcatctgccagaccgccccaaccgacataattcgacaaaatctcctgttcttcggtagtggcgttcctgttctcgctttccagtttgaacagagtttcaatggctgcgatgtttcttgcgaatttctgcttcggtccaccttcaccgatgttgtcatccgtgatgtggaagttcaccgcaggaacaggtgggatttctctggtggtgatggactgctcaagctgagcgataatgtccatgacttcggcattctgccatccgtccacctgggcataatcctgaatgatggtgtcctttccatctacgcactgtacgaagtccagactacccggcagatctctggtattcattgcacccagggcttttctctgcgtgtcaggaagtgcatagtaggctcgcagggcatcatcaaaggaactgtattccttgatgtccagcgcaccccgcttctgaatgtcctcggcaacataaaaatgatcgatgaagtgttccggttcctgctgttcgggttccgcactggctctgacctgtgcgtgtgccttttcgtcagggtagtccccatagatacggatgcacttatgctcctgctgatcgtaaacggcagcaccatcgtacttgaatccgtcatcctccatggttccgtccacatagccctgggcagctttttccgcttcttccagagtgtagtagtccagtttatcatcgaagccgttttcaaagtgatggtaggcggcaaccagatagcggggagccatgcgctcctcgtagctgttaatcatctcaggtgtcagccattctggtttgtcgggaatcatttcatacagctcacgcatcttggcaatctgtgcatggcggttgcctgcccacagatgcttttcgctgtgctgtcctgcaccaaggaagtattcgcagtccatacgcagacggtctaacagctgatactcaggggtgtagtccctcggttcggttttgcccagaaaatcctctgtaacgggcttttcttcggtttgggcatcaacccttaccgcatggtttctttcgtcctgagagagcatacgctcgaaattctcacgattctcggcacggaagatgggataagcaagcgtagggtcacgcagctgaacttctctgtccgtgatctgctccacacggaaagctgtatcgtccagatataccgtgtcaccgacctgataattccatttcggttcctcggaagcagatgcttccacaacttcggcaggctctgccacaggcgcttctggctgaaccgactccatcgcagctacggactgacgaacttcctccaaatagtcattggcaagccattcgtccgtgaagtattccgtaacgccttccgggtctacatagtagtcatcggtctgattatcccagatcgcatactcgccatcctcggtatcaatcactgcgaaacggtcataaacatcttccaacggatcagttttagcttcttcgatagcctgtcgttccgcttcttcctccgggctgaggtagcgtccctttcgtatcagaccgtcgattctctgcaccacctgcgcccaggacatctgcaatttatcgcaaccgctcttggtgtaagcaacacccttggcatcgtgatcctgaccgctgtgcgttgcaccagagcaggcatgggaatgaccaccggttccgtattcatgcttcaggaagtccatcttttccttggcagaatgattctcctgccagtagttataaatacgggctttaccaccggaaaagccgcttccacgggtcaagtctgcattgacttcatcatccgtaatgaactggcggacaaggggcatctgcatcatatcggtctgatactcacgcaaaggcatattcaactcatacagctgtttctgaatgagattcagcttgtgatagtgaaaacgaagcagatcgggattttccgcaagggtttttctaaattccgaatactgctgtaccaaggttgcgtggaaacgagggtcatccaacttttcagccaagtctgcggtttcgtcagggaaaccacgaaacggttcctgatgaagaattgccagatagttgctggaacgggcttcttcactcaaatcgtgataaagatgccacagggattctgccaacttctgacgctcatatccggatgcttctaccagttccacattagttgcgaaccgaccattttcaagcagttctccaatgcgctcggcaaccgtttcccaagaaacgatctgcgctctggggctgtcaatggcagaggaacctttggcaaggtggataccgtcctcggcataccacgcacagatattcccgctatcttctttcagaccatagccgccgtgatagacctgctttaaggtctgaacgatttcttccaacggcttctgcttcatatattccagcgctacgacttttcgggcttcatcggtattgctaccaagcagaaggaagtggtcgatttcttcctgggcaaaagaaaaagcagagggcgtaaagctctctgctcggtcgataaaactgatttgttcattttcggagaggaaaaggttcagactcagctgttgataagctccgtcatcacgacttcctccgcctgtgctttcaggctgttcatgtgctgcacccacgccatctgctgcgtttccttgtccggtgcggggctgtccttcaggtactgctccatcagaaactccactctggctttcgctgtttcctcgatctcccacaggtgcgggaacaggctctccgtcagaatcatgtcgttcaggagcatcggattgttctgttccaaaaatgctcgacgcatcctgccgtacttgcccagaggtttctctccctcgttctccaactgaaggttcggaatctgataatctccggcctgtctgtaagtcatctcgctcataatctgtactcctttcggtagctttaatctgctcatgttctccaatcgctttttcgatttcctgaaacatccttgtgctgatggcattcaccgcagtaccaagggcatttaccgtctgtctggtgttaaaatcaaacaccttctggaaatcctcatgctcgaagtagttgtcgggactttccacgaaccggcaatacatcgtataggatacgctgtttgccaccgcatttttgaaagctacttcgatgttgagttcatcatactcctcaaggaagctgttggcaacgatgtcgaggaactgctttttgtaatcgtcccaatactcagccgccagtgcggatgcaatatcttcaagctgtgcttccagtaccccgtcagcggcaacaccgaaggtacgctccatcgcttccatgacataggagcggttttcaggcgtcacctcccacggtttcagttccggggaagaacggcgaacgccggtatccgccacatcaaacacatagcgcagatacggtttatccctgttcatcacaaacagagcaatgccggtagagccacgctttacatatctgcggtaattttcagcgttccagtcctcatagggcttgcaaaaggtcgcattggggcgctgagcataaatcatcacctgttccggataggtgaactcatagttgcgggacatcgttctcaaaaacgaagtccagttatctgtgttcgaggtgattttcccaatcgtttcttttgctaatccggaataaaatcgctcttttgcgttcattgtatccctccaatcctatcaatccggataaaggttcagcttctcaaaggcggcatcgtccatggctgaaactttacggagaaccgagtctgccaaagcaaaaagctctgactcgtcctccgaaagctgttccttcatcagtgtcagtgcttcacacagccctgaccttgtgccagggctgtaaagcatcatcatgttccgctcatcctgtgtgaaatccatcattcaatctccctttccgggtggctcttgggcggcttatgggaaacatccggcacgggcttttcctttaactgctccaacaccgaaggacgttcctctaatccggacgcttttccgttattgatgataccgtcaatcatcccataatcatcttcca

SEQ ID NO: 8745 - DNA, 1330 bp, Unknown
  gut microbiota DNA sequence
tcgttccgcgtgcccgacatcatggagctgtcgcaggcgcgcatggtggaggtgggcaccacgaacaagacgcatgccgtcgactacgagcgcgccatcggcgccgacacctcgatgctgttgaaggtgcatccttcgaactaccgcgtggtgggcttcgccgagagcgtgtcggcgcgcgacctgcgcccgctggccgatgccgagaacgcacggcgcacggcatccggcgagccgggcgcgggcgagcttctggtgtacgaggaccagggatcgggcgccttcctgaacctcgatgcgttcggcgcgtacgccgagcccaccgtggccgagtcgctgcaggcgggctgcgacctcgtgtcgttctcgggcgacaagctgctgggcggcccgcaggcgggcatcatcgtgggagcgaaacggttcatcgaccggctgaagaagaacccttacgcccgcgcgatgcgcctcgacaagatgacgctggccgcgctggaggccacgctgcgcctctacctcgaccccgcgatcgcgctcgagcgcatccctgcgctgcgcatgctgtccgagccggccgaagccgtgcgcgggcgcgccgagcggctggcgcgcaccttggaggaagcgcttcccgcaggggcggcgcgcatcgacgtggtaccggataccgcgcgggccggcggcggcgcgctgccgttgtgcgacatcgactcgcatgcggtgcgcatcgagttttcgcgcggggacgcgcaggggtgcgagacgttcctcattgcgcggcgcgacgtgcccgtgatcgggcgcatcaagcacgacgccgtgctgctggacgcgcgcaccgtggccgaggacgagctagccgaggtcgccgaggccgtgcgcgcctacttcgacgcgctcgacgccggagccgaggggagccgcgcatgagcgggcacacgcagaccgacctcgtgctgggcacggccggccatatcgaccacggcaagtcgtcgctcgtgctggccttgaccggaaccgaccccgaccgtctggcagaggagaagcagcgcggcatcaccatcgagctgggcttcgcgcgcctggcgcttcccgacggcaccgtgctcggcgtggtggacgtgccgggccacgagcgcttcgtgcgccagatgatcgcgggatcgacgggcatcgacctggcgcttctttgcatcgccgccgacgacggcatcatgccgcagaccgaggagcacctggccgtgctggagcttctgggcatacgcacctgcgtggtggcgctcacgaaaaccgacctcgtggacgaggaatgggcgctgttcatggccga

SEQ ID NO: 8746 - DNA, 45028 bp, Unknown
  gut microbiota DNA sequence
gcgcctgcgcctgcccgtcgaccgcgtgttcagcatcaaaggcgccgggaccgtggtcacgggcaccctgtggagcgggtcggcccggatgggcgacgaggtggaggtgctgccctccggcctgcgcacgcgcgtgcgcagcgtgcaggtgcacggcgagcccgtcgatcgcgccgacgccgggcaccgcgtcgccctcaacctgaacgccgtgtccaccgacgaggttcgaccgggcgacttcctggccgcgcccggtgcggcgagcgccaccgaccgcttcgacgcccaccttgcgttcctcggcgtgccaggcaagggcaagccgctcgtcagcggcgcgcgcgtgcacgtggcgcacggcacgcgcgaggtcaccggccgcgtgctgctcatggacggacggccgtcgctcggcgtcggcgagcgcgcctacgcgcagatccgcctcgacgagccgctgcccgtagcatggcgcgaccgcttcgtcgtgcgctcgtactcgcccgtgcacgtcgtcggcggcggcgaggtgctgcgcgcccgcccccgccgcaccaccacgctggcaccgggcgcgctcgagctgctggacgcgctgcgcgaaggcgacgaggccgccgtggcgcacgccgcgttcgcgctgaccgccgcgcccgtaacggccgccgagctggcgacgctttccgggctcgaggaggacgcggccgcccgcgagctcgaagcccttgccgcgcgcggcgctgcggtgcgcctcggcggcgagcgcgcgctgcgctacgccgccccctccgtgctgcagaagcagcgcgccgccatcgagaacgccctgctgaagttccatgccgagaacccggccgccaccggcatcgcgaaggacgcgctgcgccggcgctgcctgccgcgcgcggacgcgggctgcttcgacgcgctgctggacgacgcggtcgcgcgcggcgccgcggtgacggacgggggcgaggtgagccatcccaaagccggagcaggcgcgcgcaagctggaggagcaggccgccgagcagctgcgcgagacgctggccgccgcagccggggcgccgccgtccacaggcgagctcatcgcatcgagcggcctagactcctcgctcgtccaccgcgcgctgggaagtctggagaagcagggcctcgtacggcgcatcggagccgacttctacttcgacgtatcggcgctggccgccttcgagcaagccgtgcgcgcccgtctggttgacggccccgccaccgcagccgagctcaaggacgcgatgggcaccagcaggaagtacgccatccccctgctcgagtacttcgactcccaagccgtcactcgccgcgaaggcgacacgagggtgccgggaggaagatgacgccccgagggaggttctatccgggaatacgaaaagcgccccgatcggggcgcttgcgtttctggcggagatgtgtgcgaatcgaacacacccgagacgttctgcacgcctcacagcggctttgaaggccgtggagcccaccaggacccatccatctccaataagaaggtgccgtttcggcaccgtagatatgatagcgcatttgtccgcgacgaggacgcgcgttccgaaatgttgcgtatcgttcagcaattccccaaaagtacgtcgctcaggtggcgacgcgccacatccgccagcgcatggagcgcggacacgggggttggaggccggtcgagcatccgatggcacgggaagaagcgcgtgagatggtacgggatggcgggatcgagcgatgccagccaagccgctgccgcatcgatttcgtcgggatcgtcgttgagcccggggatgacgagcgtcgtcacctcgaggtggcacgtcggatcggccgccagcgtttcgatggtgcgcttgaccgcggacaggtcgccgcccgccgtatcgtagaatccctgcgtgaaccccttgaggtcgatgtttgccgcgtccacgatgccgaggagctcggtaagcggctcttcgttcaccatcccgttgctcaccagcacgttcgcaagccccgcctcgctcgcgagccgtccgacgtcccgcacgtactcgtaacccacgagcggttcgttgtacgtgtacgcgacgcctacgcatccgcgatcgcgggcccgcagcgccaggccgaccgcctcttcgggcgccacgtagcgccatgccgcatcctccgcgcccgcgcaggcgatatccgcgttctggcagaacggacagcgcaggttgcacccgtagcttcccagcgacagcacggtcgagcccgggcggaaccgcgcgagcggcttcttctccaccggatcgagcgcgatcgaggtcacgcgcccgtaattctcgtcgacgacccgtccaccgtaggcaacgcgcgccctgcacagcccgcgccgtccttcggaaagcgcgcaggcgtgcgggcacacgccgcacacggcgcgcccgtcagccacggcgcggctctcccccgcgttcgtggcgcaccacctcgaagcgctccagctccacgtcgtcgtcgaacaggtcgatgccggcctttcgcttcgcgatgtccacctgctgctgcgccgagtccacgccgtcgaggttcggcagcagcagcccccgcttccagcctttcgtcacgatcacaccgtagcgggccgggtccagctggtcgatcgactcgacgggcatgggcgtgaacagcacatccaccgaatacgacagcgcgtccaactcgtcggggcgcacgggcgggaagcgcggatcctccgaagccgccgccacgccgttgcgcacgatctcggcggccgtgctgcccgtcaccggcgagatggtgccgatacagccgcgcagctcgccgtgttcgtgcagcgacacgaacacgccggcgcgcttgtccgacagctcgggcggcaggccgtcgggcaccgctatggggttgcccgtgcgcacgaacccttcgacgctggcgcgggcaagcgcaacgtacgggtcgaccggcgcatcgttcgcggctgcgtcgcgcgcaccgctgcgatcctcatcgcggtcaaccgcggtccgcacggcgccgtcgccggccgagccctgcacctcgaacgcggccaccgcgtaacccacgccgaaggggccttcgtagctgagcagctcgtgcgagatgggaaggccttccaacgcgcccgccatgatccagaacgagcgcaggccgcattccgccgcctcctcgccgaacgtctcgtctatctccagcagaccgctcaaatcgcccgcatcgaacagcgcggtgaccatacggtcgaacacggggccctgcggagcgtagccgtacgggccgtcgctcgcaagcttatgggacaagtcgccgctggcgatgaggacgcagctgcgatccagatcggcggccgcctcggcgatgcagcgccccagcgcgaggtgcgtctggggcgagaggcccgacagcccgatgcgcaccacctggtacgtcgaatatgcctcgttcacgaaatgcagcggcacgatggtggcatggtcgagatccttcccgcccatgccgctgccgcacagcggcaccgtgtgcttgcgcgcgcacgcggctatggcggccgtcatctcgccgtcgtattgcacggtcatggaagagtcccatgcgccgaagcgccccatgtcgccgcggtcgaagtcgccggtggacagatggaagcaatcgcggaacagcggggcgtggggcgacaccacgacgatggtctcgggcgcgtgcgcggcgatgcggcgcgccacctcgcgatacgcgtcgagggtgtcctggatggcgcgctcctggccccggcctacctcgggcatggcgaggggcggatgcggcacggcgtacgcggcgacgattcccatgagagctccttcctggaagcgttgaccgggcgcgcctcgagcacgcgcgcgcccttcggtggctcgattgtacaccgcgcgaagcgcccttggcgcccgcctcccccgcttgtgcctattcggcacgcaagcgttgacggatgcgcgccgccgtcggcgcacggcgtccgcagaagggcgagcgcgctacccgtccagcttgacgtcgcgtttcagcccgtagtgcagcacgaggtagtacacgatgcccgccgccatccagatgaggccgagcaccttcgccggcacgtcgaggctccaccacgtgtagccgatcaccgcgatgccgcacaaaggcgacagcagatgcgccgcccagcggccgtcgcgcttcttgacgaagaagtacccgatgacggtgacgtgcagcatgaggaaggcggtgagcgcgccgaagttcacgaacagcgagatggtgtcggtgcccagccgcccgaacgtcagcaccagcacgagcgtgagggtccccacgaacagcgacgcgacgtagggcgtgtggtacttcggatggatcctcgccagcgggctgggcagcccgcccgcgcgccccatggcgaagagaatgcgcgacaccgccgtctgcgcggccagcgctgtgaagatgccccaggccagcgccgtggcgacagcgcacacgacgtacagccacctgccgcccaccacctgcgccaccaggtagaaggcgttgcccgagtcgcccgcgaacgcggctccgtcggggctgatgcagcccgcgatgtaggtctgcagcacgaacagcgcgcccacgatggccagcgacgccatcatggcgcgccccgggccgcgccggccgtccttcgcctcctccgacagcgtggcgatgccgtcgaagcccagaaacgacagcacgcccagcgacacggcgctcatgacgaggttcggatcgaacgtggaggggttgaagaacgggtccagcgagaaaccgcgcgatgcggggtcggcgagcagccaccggacgcccagcacgacgaagaccaaaagaacgaggatctccagcacgagcgccacgcggttcacgatgtcggtgaggccgatgccgcgcacgttcacgaacgtgttcgccaccacgaacaccacggcgaacgcccaaggcgggatctcgggcacgaggccggacaacgccgtggaggccaccacgtacatgagcacggggatcagcaggtagtcgagcagcagcgtccagcccgtcacgaagccgatgcccttgcccaggccgcgcgaggtgtaggcgtacaccgagcccgccaccggccactcgcgtatgagcatgctgtaggacagcgccgtgaacaccatggccagcgtccccacgaggtacacgagcgcgggcatgccgcccgaatccgagaacacgccgccgtagatccccatcggcgcgatgggaaccatgaagatgagcccgtacacgatcatgtcgggcacggtgagcacgcgcttgagctgctgcttgcccggctgcccgcctccgctcgcctcggatggggcgcgcttcgcgccgtcgtgagcttcgtccgccatgcaaccgctcctttcgtcagaccgctcggatgcccagcgcgcaggcgccgaggcgtaccctgtccacgatacggcagagcccggaaggagcacggcggggcagcgccgcccttgccaacgcgttgacccgttgtcggccgggcgtttcgctgcgggaggcgcgggcgggcgcacaagcggaaagcccgctttcgcgggctttccgaacgggctttagaagtcgatggcgtcgggatcgaggccgctttggccgaggggatccagctcgtcgatgcgctgcaggtcctcgtcggtgatgttgaaccagaagatgcgtgcgttctcggcgatgcgcgacgggtccgtggacttcggcagcgggatggcccggcgctggaggcaccagcgcaggcacagctgcgccaccgtgcagccgtagctggccgcgatgtcgatgagcagctggttctccagcacgcggcccgagcccagcggcgaccacgcctccaccacgatgtcgtggcggttgcagaagtcgcgcgtaacctcctggttgcagccgggatgcagctcgatctggtcgaccatcggcaggatgtcggccgcatccatgagcggctcgagatgatggggcttgaagttgctcacgccgatggcgcgcacgagcccgtcgaggtagagcgtctcgagcgcacgccacgtctcctggttcgtacgctgccagtcggcttcggcccccttcgcagcgggccagtggatgaggtacagatcgacgtagtcgaggtgcagcttggcgcgtgactcctcgaaagccttgagcgtggcgtcgtagccgcgatcggtgttccacaccttcgtggtgacgaacacgtcctcgcgcgacacgccgcccgaggcgagcgccttgcccaccgtgccctcgttgtcgtaggccgcagccgtgtcgatgtggcgatacccgtcgtgaagcgcctgatggacggcgtcgatccccacttcgccgtcgggcatcttccacgtgccgaaccccaaacacgggatgccgtagccgtttcgcagggtgatccggtccttcggactttgcaaatccgccatgcgcgtgctccttatcacttatacgccgcccgcaggccgcgcaaccgtcgttacgcgtcccacgatacgcccgcgcaacgcgcagtcgccgaaccgtagcgcgttcgtagaaggaaaggagcgaaaccgttacgcacatgcccggttcgacagcggaaaagcgcatccgccgtcgacgcgcaagcgcgcccccgaagggctcgcctttctcgacgcggctcgcagggcggctcgcgcaggacggctcgcgggaagcaggtcgctcgcccaccgtgcggcccgcccgcctgcttcctgccctccggtcggcctcgaatcgcacactttctcgccatatgatgcgtccctggaggttccgaaggccgccctcgcccctcggcttccgcagcgcttcccgtaatgcccggtcacggcgtcgcgccgtcccgtctcggacgctccgcgtcactcgtcgacgcggccgcgctgcgccttcgtttgggagcggcggcgcttctgggcgagacggcgctccttggaagcgcgggtcgccttcgtggcgcggcgcgccttcggcggcacggcctcgcgcgcgaaccggtcgcgcagcttctgcaggcacagctggcggttgcggaactggctgcgcgattcgcgggacgtcgctgtcatgccgctgggcacgtgcgtcatgcgcaccgccgagtcggtggtgttcacgcactgcccgcccggcccgctcgcgcggaacgcctgcacgtcgcagtcgcgagcgatgtcttcgagcgacatgcgcgcccaacgggcgtagtcgcggtatgtcggctcgtcgtgatccatggccgcatcatagcacgacgcccgcgaacgcacgtcgtcgcccgaaaaacacggaatcgctcctgcaagcgtgtttttcgggcgacgatgcaaagccgggcctgtcggccgccgacgcggccggcaggccggccccttaatcctcgatgccgtcgttgttcctgatcagcttgcgcttgatcttgccgccgatggtcttgggcagctcgtcgacgaactccacgatgcgcggatacttgtagggcgccgtcgtgtgcttcacgtggttctgcagctcgcgcaccagctcgtcggaaggctcgtaaccgcgcgccaacacgacggtggccttcaccaccttgccgcggatgggatcgggcgccgccgtgacggcgcactccaccacggcgggatgctccacgagcgcgctctccacctcgaagggcccgatgcggtaacccgagcacttgatgacgtcgtcgttgcgacccacgaagaaacagtagccgtcggagtcgcgccacgccatgtcgtgcaggttgtagtactccccgcccacggcctcgcgcgtgcgctcctcgtcgcgatagtaccccacgaacagtcccggcgggtacgcctccttgagccccgtcacgcagatggcgccctcctcgccgtcgggcacctcgatgccgtcgtcgtccagcagcttgatgttcaaaagcggcgaaggcttgcccatggaacccggacgcgggtcgacccacgggaacgtcgccagcagcaccggaccctcggtctggccgaagccctcgcggatcctcttgcccgtcaaacgctcccacgccaacgtgacctcggcgttcagcggctcgcccgccgtggcgaagttgtgcacgctcgacaggtcgtaggcgctcacgtcctcctgcagcatgaaacggtacatggtgggcggcgcgcagaacgtggtcagcttgtagtcctggatcttctgcagcagcttcgtgggcacgaacttgtccatgtcgtaggcgaagatggtggcgccggcgatccactggccgtagatcttgccccagccgaacttcgcccagccgctgtcggtcacgctcatgtgcagcgcgtcctcttccacctgctgccagtacttcgcggtgatgatatggcccaacgggtgggcgaagttgtggcacaccgctttcgccatgcccgtggtgcctgacgtgaagtagatgagcatgatgtccttgctcgtgacgcccgcctcgcccctcgggcgctcgaactcgtcggactcgccctcgatcagctggtcgaacggcgtccagccgtcgcgctcgcccgccacgatgatgcggttctcgatggacggcgattcaggcagcgcttcctccatctgcccgcatacgtactcgtcgttcacgcaaacgaccgccttcacctgcgcgctatcggcacggtagacgatgtccttcttcgtcagctgcaacgacgcggggatgatggtggcgcccagcttgcacagcgccacggcgcacacccagtattcccagcgacggcgcaggatcatcatgaccacgtcccccttgccgatgccgagcttgcgaaacgcgttggccgcccggttcgacagcttcgacaagtcgtcgaacgtgaaggtgcgctcctcgtcgcgatcgtcgcaccatacgagcgcacgcttctcgggatcgacgcgagcccactcgtccaccacgtcgaagccgaagttgaacgcctcgggcacgtcgatcttgaagttctcgaagaagtcctcgtacgaatcgaactcgatgcgggggcagtattttttcaggatatggttcacgggctgtgcttcctactctgcgatgatcgtcacgaattttgcagggacatctccgccgcagcgctggccatgcgggtgctccgggttgaagtagatgctgtcgccggcgttgagctcgaactccttatcggcccaggtgaccacgacggtgccctcgatgacgaggttgaactcctggccggtgtgcgtgacgagcttcgccggctcgtcggaggggtcgagcaccacgagcagcggctgcatgatcttgccggtgtagcgccaggcgaggtcctcgaagtggtaccccggatagcggtcgacctcgcgcccttcgccccagcgcaccacctggtacgtgtccagcttggccgcggtccccgtgaggatctcggtgaactccacgccgaagtgatgggccatgtggtagatggccgagatgggcacgtcgtcgccggtctcctcccagcgcgcgtacgtttccagcggcacctccagctcggccgccatgtcctcgcgcgagacgtcgcacgcctcgcgaaggcccttgatgcgcaggccgatctcggccagttcagctaccatggtcgctccttacgcgtcgattcccagttgcagggcccgtttgttcatgtcgagcatcgccgtcttcttggcgggcacgcacttctcgatggccttccagagggtctcctcctcgcagaagcgcgtctcggcgaacagcttgccggcaaggatgatgttcgccagcttcttgaagccggcctcctcggccatggccgtcgcggggatggcgcacatgcgcacgccctcgatctcggggatgcgctggacgagcgtggagtcggccaccacgatgccgccttcggccacgcttgcctcgaacttgtcgagggacggctggttcatggcaacgagcacgtcgggggcgagcacgagcgggctgccgatggggtcgtcggagaggcacacgctgcagttggcggtgccgccgcgcatctcggggccgtaggagggcagccacgacacctcgcggtcttccagcaagccggcgtaggcgatcagcttgccggcgaacagcacgccttggccgccgaagccggccagcaccatgttgacggagcggctcatcgcgcgcctccttccacctgcgagtcggggtgcgcgatggggcatgcggcgttgcgcgccgaggccgcctcggccgcgtccgcgtagccctcggccaccacgtccttgtacacgcccaacggatagtacggcagcatgttctcgttcatccaggcgaacgcgtcctgcggcgtcatgccccagttcgtcgggcacgtgcccacgatctcgacgagcgagtagccgcggccgtcgatctgcgtctggaacgctcgtctgatggccttcttcgccttgcgcacgttcttcgggcagtcgacggtgacgcgctcgaggtacgccacgccgtccaacgagctcagaagctcgcacacgcggatggggaagccggccgtctcggtgttgcggccgtagggggacgtctgggtcacctggttcggcaggctcgtgggggccatctggccgcccgtcatgccgtagatggcgttgttcacgaagatgacggtgatgttctcgccgcgcgtggccgcgtggaccgtctcggccatgccgatggacgccaggtcgccgtcgccctggtaggcgaacaccacgccgtcgggcagcgcgcgcttcaccgcggtggccaccgccggggcgcggccgtgcgcggcctcgatcatgtcgcagccgtagaagtcgtaggacgtgacggtgcagccgacgggggcgatgcccacggtggagccttccacgtccagctcgtcgaggcactcggccacgaggcggttgacgatgccgtgggcgcacccagggcagtagttggtgacgacgggcaggagcgcatggggtcgttcgaacacgactttcatttccttgtcggccatggcctactcccctcctttcgcggatgcggcgattgcttcgttcatagcctcgagcttggccagcacctccaccggcgtcgggatgacgccgccggtgcggccgtagaaatccaccggacggcggccggccacggtcaggcgcacgtcgtccaccatctggcccatgttcatctccaccgacaggtaggccttcgcctgagggatggtggcctcgatggcgtccacggggaacggccacagggtgatggggcggatgaggccggctttgacgcccttctcgcgagccgcgaccaccgcgctgcgcgccacgcgggcgctcgcgccgaacgcgaccaccacgatgtcggcgtcgtcggtcatgaacgactcggcgcgctgctcgtcgcgctcgatggcggcgtagcgctcgtagcgctccacgttgaggtcctccagggcctcggcggtgaggtacagcgagttcaccacgttgtggggacgccggtgcttgtgaccgttggtggcccagggcttctcgggcagcgagtcgatgggctcgggcatgaccacgggctccatcatctggcccagcatgccgtcggccaggatcatgacgggcgtgcggtacttgtcggccacgtcgaaggccgagtacacgtagtcggccatctcctggacagtggacggcgcgtacaccaccacgcggaagtcgccgtggccgagcgcgcgcgtggcctgccagtagtcggcctgcgacggctggatgccgccgaggcccgggccgccgcgctgcacgttgatgatgacgccgggcagatcggcgccggccatgtaggagatgccctcgcccttgagcgagatgcccggcgacgaggacgacgtcatgacgcgcgcgccggccgcagccgccccgtacaccatgttgatggccgcgatctcgctttcggcctgcaagaacgtgccgccgaccttctccatgcgcttggacatgtaggccgcgagctcggtctgcggcgtgatggggtagccgaagaagaagcggcagccggcgcgcagggcgctctccgccaaagcctcgttacccttcatgagcactttctctgccatgggtctacctctctaccgtgatcgctacgtcagggcacatgaccgcgcaggacatgcagcccgtgcacgcgtccaggtcggtgcagtacgcggggtggtagcccttcgcggtgatcttgtcgtggtcgagcgccatgatctgctcgggacatgcgtcgacgcacaggccgcaccccttgcagaaggagtcgtctacgctgattctcgccatgattcgccttcctcgtctcgtccgaatgcataaacggccggactggaaccgtccggcgcgcagctctcttgtctattcccagggagttcttacatatacttgcacaggatagtacgtttgccgatcctcattcggcgcgcggtgggtagtttcccggtcggcgacctggcgcgccgccgcggcgggcaccgtggtgcatgccaggggcagcccggccgcctgcgcgaccgcttgcgcgaacggcacgccctgctccacgacctgggcgtcggtgtcgcgctgcaggtgcgtgttgttcacgacgcacgtggcgcgcaggtgcgacttcgcctcgatctcgcgcagcacctccaccgcctcggcgggctcctgcgtgaggttgcggctgcggttcaccacgtacagcatctcgtagggagcctgctcgaccgtgcgcgcgaagcgcccgagcgccgtggcgcccgcatcgtcgccgcccgcatcgatcaccacgaagggacgctcgtcgccgtcgcgccaggctcgctgggcgccgtcgatggccggctcgatggtgccggacaagctgggtccgtccacgttcgtgcccgcgaacacgggcgcgaccaaacggatgccgcgctcgtcgagcagcgcgcggtagtcgctggagcggaagaaggggttcaccacgtcgaggtcgatcaccgtgaccgcgcgtccccccgcagccgcgtcgagcgcaatgttgagcgtcaggttcgtcttgcccacgccgtagtgcccgcacaccacggccacgggcgcatccatcatcatacgaggccttccagagctttcgccgcctcgtccgactcgcggatggctgcgcggcggatcttgccgttcacggtcttgggcagcgcgtccacgtactccacgatgcgggggtacttgtacggcgcggtcttgtgcttcacccaggtctgcagctcgcgtgtcagctcggaggaaccctcgaaaccctcggccaaaacgacggtggccttcacggccttgccgcgcgtggggtcgggcacgccggtgacggcgcactcgcgcaccgcctcgtgttccagaagcacgctctcgatctcgaaggggccgatgcggtagccgctcgatttgatgacgtcgtcgttgcgcccgacgtaccagaagtagccgtcctcgtcgcaccacgcggtatcgccggtgtggtaccagccgcacgtcatggcggccgcggtcttctcggggtcgcggtagtattccagcatgatgccggcagccttctcgtggatgtcgatgcacacctcgcccgtctcgcccacggcgcagcgggtgccgtcgtcgcgctggatctcaacgttgtacagcggcaccggcttgcccatggagccgggtcgcggagtggagttcgtcaggttcgcgatggtcagcggcgtctcggtctgcccgaagccctcgtagatggtgagccccgtgtgctccttccagaaatcgaacagatcgggattcaaggcctcccccgccgtcgtggagtactggagcgagctcagatcgtaggcgtcgacgttctcggtcatcatcatgcggtacatcgtgggcgggcagcacagcgtggtgatgcggtgctcgccgatgagcgacaggatctcggaggggtggaagcggtcgaagtcgtacgtgaacacgcacgcctccataagccactggccgtagtacttgccccataccgccttgccccagcccgtgtcggcgatggtgaagtgcaggccgtcgggatccacgttgtgccaatgcttcgccgtgacgagatgcgcgatggcgtactcggaatcgtgcagcaccattttggggttgcccgacgtgccggacgagaagtacatgagcatagggtcggccgccgccgtctcacggcgctcgaagtcctcggacgcggcgcgcacgcacgtgttgaagtcgagccagccggcgcgctcgacgcccgccgcgcacacgccttccggccccgacagcgcctcgcccagcggcaggccgtcgtcggggaacacgaggttgccgtcggcgtcctcgggcgtgaggccgccgcccgcgccgttcacgaggatgcggcgctcaagcgtggggcacgcgtcggccacgcggtcgcacacctcggcgatgtcgccgagcgatgtggcgatgacggccttgacggacgcgccgttcaggcggtattccaggtcgtgttccttgagcatgaaggtggcgggaaccatgacggcgcccagcttcgccagcgcggtggccacgaaccagaactggtagtggcgccgcaggatgaccatgaccatgtcgccgcggccgatgccctgctcggccaggaagttcgcggtcttgtccgaccagcgcttcatatcggcgaacgtgaacacgtggttctcgccctcggggttgcaccacaccatggcgcggcggtcggggtcgttcacggcgatgtcgtcgaccacgtcgtagccgaagttgaagcttgccggacagctcacctcgaacgaggaaagcacgccgtcctcgtcgtaggcctcgttcacgtagcggaggttgatgtttctcataatggtgtctttctcggaagatcgatgcagcggaaggatccgccgcgagacggatgggatcatcggatgcggggcgcatacgctgggggcttgttcggcttctcgccgcctgcccggggcgctgcgcctagataatctccccgttcggcttcatgaccaccgcgaggaacgtgcacggctctccgcctgtggcgatcatgccgtggccgcggctggaatcgtacatgagaaggtcgcctgcctcgagctcttcgatatgatcctcgtaggcgaagcgcatgcggccggagatgatgtagtcgagctcctggcccttatggtaggaaaggtggatgggcgcgtcctgctcttcctcgaggtacggcgccgtcaccaggaagggctcggccagcttgttcttgaaatgaggagccttgtgcaggtactcgaagcccgcacggcgcttgatggacaggccctcggcggcgcgggtcaacgaatagcccgacagatgcggatcctcgccggtcagaagctcgatgacgtcgacgcccagacgctgcgcgcacttgtagaggaacgtgaacgacagatcctgctgccccgactcctgtgcggcgtactcggccaccgagcgccccgtcgcgtcggccatctcctgcatggtgatatcgaggtcttcgcgcagcgcccgaattcgcccagccacctcttcgatgttcggctccatgctcgcttgacctccttctggtatatcgttggtataaaagtttacttattgtatagcaaaccgcttcgattcaggggaggacgaaaccatttggaaacaaaaaagcggcccgatggcggcggcgacccaagttgtcatcctgagcggagcagcgacgctgcgtaatcgaaggatcccgtgcggcggtagccggaagcgccccggccgatgccgcacggaatccttcgattacggcctacgcccaggatgacaatctcttacgcgggaacgccgtcgccgaacaggagctcgcgctccgggccggtcagcgcggcgcgcgcctggtcgcgcaagttgttcatgccgctgaggaactggcggtacatgaccacggtcaggtagcgtccgataggcgtcagcgtcagctcttcggcgttgtcggtttcaaacgccctgttcagacgcatgaaagccaattccatgggaagacctgtctcgatgctgcagccgaagtcgcgctcgaaggcgcgcttgtcgagccgcagcttgtacaaatcgagcaggaagcggtagcgcatgaggtcgcgcttgctcatctcggtcttgcccatgatggacatgcgcccgctctcgatggccgcgttgtagtctttgatgctgaagttgttcacgtacaagcagccgttcaggtgcgtgatggagccgctgccgatggccggatactcgtcgtagttcacctggtactcgtcgatctgaggcgcgtcggccggcttgcccgccttgtcggggcgcgtgaacgtccacagcgtggtgcggtcgaacagcgggtcgtcgccgccggccagcacgccgtcgaggatctggtagtaacggtactcgcggtcgtagtccatcgcgcctaacgtagcggccattttgcgcgtagtggccgacgacacgtacagcggagagaacgtggtctggcggcaaccggacagcgcgatcttctcgaggtcggccatgagaacgtcctcggtctgcgaggggaaattgaagatcatgtccacgttcagcgagtcgaagtacggctccgcctcggcgatgcgctccaggatgacgtcgccgctgccgtacttctcgtagcggtccatctgcttgagcaggtcgtcgtcgaagctttgcacgcccacgctcaaacgctgcacacgaccctgcagcttgtccaaccacggctgcgtcagatggttcgggttggtctcggaggcgacctccctgatgttgaagttgtcgcgagccatgtcgagcgtctcgcacagctcgtcgatcatgacggtgggtgtgccgccgcctacgtagatgctctcgaagtcgtagccgagatccttcaacatcagcatctctttgcgcatgttcgcgaagtagggccgggcgacctcctcgcgaaacgggtaacggttgaagctgcagtacgggcacaggcgctcgcagaaagggacgtgcatgtacagcatgtacttctgcccgggattggcggacggcatcatggtctcgctcgtggggttgagagccagatgctgcttggtcatggtatggatcaggcgcgacagtatgcgctcggaaagcatgtaagtctcctattcgcttcaaagatttcggtacccatagtaaggcttttccgacggtttgcacccgctatttatcctcgtacataaagaaaaacgggcccgggcgcatgccccgggcccgcagcgtcgcaaggacagccgcgcctacgcgatgcgctcgaagcggacggcgaagtgagcatccggggagccgggggcgaggcgcgtggccacgcaggagcggccgttgacgggtgccagcttgaagcccgcgccggcctcgctttcgaggaaggccttcaccacgccgttgttctcctcgcgggttaccgtgcacgtggcgtaggccagcgcgccgcccggggccacgtgcggcgcggcagcctgcagcatgcccagctgcacgcgcgcgaactcaacgatgtcggccggcttgatgcgccagcggatctcgggatggcggcgcagcgtgcccagccccgagcacggggcgtcgatgaacacctcgtcgaaggcgcggtcccccaccacggcgtccagctccagcgcgtcgcccgtgaacgcctcggccacctccgcgccgtagcgctcggcgcgctccagcagaagccgcgtcttgaacgcatggttgtcaagcgtagacaggaccagctgcgagccgtaggcgcgcgtcgcatcgctttgcagcaggatcgtcttcgtggcgcgaccggcgcccacctccagaagcgacgcgggcttccgctcaggcagcaccgaggcggccaccagctgcgaagcggcgtccgtcacgaggatcttgccctgcgagaacatccgcttcacctcgggaagcagcagcgcgcgtgtgtcgagcacacggtagcagccggcaacgctcacgccgtccaccgataccgggtccagcccctcgtccagcttgtcgaacgctttgaccagggcctcgtcggaggttttcgccgcgttgacggcgatgaacagcggcgcctgctcgttcgaggcgcgcatgaagtcgagagcctcctgcggccccaagtcgacgatgagcttgcgcgccaaccacaaggggaacgcatgcaggcgcgcgagcgcctcggggtcgcgcatgggatcgccgaagggaaacgcctgacgcatgagcacgatcttgcgcagcaccgcgttcgccagacccgacgcgctcatcgcgaaggagcgcacgagctccacgccctggtcgacggccgcgtgcggcgtcttgccgaggaagatgatctcgtaggtgctcactcgcaaggcatcgcgcacgtcgggtttcacgtcgctgggcgcgttgagcgcgcgatcgatgatctcgtcgagcgtgcccgtggcgctgaccacgccgagagccagcttcgtagcgaacgcgcgatcctccgacgagaggtcggagcggtcgatgcgcgtgccgatgacgtcctgcgcgaacgcgtcgcgctcgcgcacggcgcgcaccacgtcgagcgcggccaaacgtgcggggctcgccttcgagcgcggcttcttcggagggtttttaggtccggcgtagccttggggctttcgcgtctcacgtgcttcaggcatggggttcctcccaggtcaggccgccgtccttgattccctggacgcccgcggcgaacgaacgcgcgtccatggtctgcttgccgtcgggcttgagcgcgcccacctcgagcgcgccgtccgccatgccgaggaacaggcgcttgcccgcgaagcgcacctcccccggacggatgcccgccgccagctcgcaacccgccgcgtcctcgggcgcgtgcgcttcgagcacggtgacgccgcgcccggcgacgacggcgcgcgacgggtgcggcgcactcgacgcctgcactttgcgcgccgcgagcgcaacgtcgtcgttcggcgacaggtccagctcgcgcttctcgatcttcgaggcgtaggtgacctgctcctcgtcctgctccgtccactcggcagcgtcgcgctcgacatgcacgagggcggtgagcagggcgtgcgagcccaggtcggccagctcatcggtaagctcggaggcgcttttgccgtcgacgatggcggtgcggcacacgcagtaggcgcctgtgtccaggccctcctccatgcgcatgatgcacacgcccgcctcctcgtcgcccgccaggatggctcgctcgatgggcgcggcgccgcgccagcgcggcagcagcgacgcgtgcacgttgaggcagccgaagcgagggatgtcgagcacctccttcggcaggatggcgccgtaggccgcgacgcagatcacgtcgggggcgaacgaggccagctcgcgctgcgccgcctcgtcgcgcagggtgcgcggagtcagcacgcgcaagccgcggcgctcggccgcggccttcaccggcgagggctctaagcgcttgccgcgcccgcgcaccgcgtcgggacgcgtgtacaccgctgccacgtcatgctgctccgccaaatcgtcgaggatggtcgccgcgaacgcgggcgtgcccatgaacacgacgcgcatggttagcgcacccgcgcttcgagcgaggtctcccccgggcgggcgcccgcggccagcgctatctcgtagtcgcgcagcgcctcgatgcgggccatcgggtcgcagcgctcgaacatggtgatgccgtcgaggtggtccagctcgtgctgcaggcagcggccgaggagatcgtcgccttcgatctcccactcctcgccgtcgaggtcgaaataacgcacgcgcgcaaacggcgggcgcgcgatgggaaccgtgatgccggggcacgacaggcacccctcgcccgccaccaccggatcgccctgcgtgtccaccagcacggggttcaccagcacgatgggattctgctcgccttcttcctggtcgcagtcgatcaccacgagccgcttcgccacgccgagctgcggcgcagcaaggccgcaaccgtcgttcttgtacatggccttcgccatctgcttggccagcttcttcaagctcttatcgcctaggtcgcacggatcgcacacctggttcaggatagggttgggggactgcacgatggaaatcacggtcaacacgtccttctgaattatgggacgcgccgcccgtttcagggcggcgcgggttatcgtcggattcgtattgtccggtttcgggcgcaccttgtccagcaaacttccgaaagctccacaaaacgcgaggtgggaagggctattgcttgtcgtccgccacgatctccttgagggaggcggcaaggcccgccatgccctggatctcggaggggatgatgagcttcgtggcccggccgttggccacggccttcagcgcctcgaaggcctgcagcgtgagcacggcgttgtcggcgccggcctcgcgcaccatgcggatgccgtcggccgtggcctgctgcacgttcttgatggcctcggcctcgccttcggcttcgcggatctgcttctctttctccgcttcggcggcgagaatcacctgctgcttcgcagcctcggcagacaggatctgcgcctgcttgttgccctcggcgatggtgatggcggcctgcttctcgccctcggccagaagcaccgcctcgcgcttctcgcgctcggccttcatctgcttctccatggcctgctggatggcggagggcggcgtgatgttcttcacctcgacgcggttcaccttgataccccaggcgtccgtggcctcgtcgaggatggcgcgcatcttcgcgttgatggtgtcgcgagaggtcagcgtagtgtcgaggtccaagtcgccgatgatgttgcgcagcgtggtggccgagaggttctcgatggcgaggatcgggctttcgaccccgtaagtgtacagtttcggatccatgatcctgaagaacaccaccgagtcgatggacatggtgacgttgtccttcgtgatgacgggctgcggcgggaagtcgaacacctgctctttgagcgagatgtaggggcgcacgcggtcgatgaacggcaccttgacgtgcaggccgttgttccacgtgtcgaggtacgagcccaagcgctccacgatggcggcttcggcctgcgggacgatcttgatgcacgtgaccgagaacagcaccacgagcacgacgatcacgatgatggcgatcagaagcgggtcgagggtgatcatgctaggacaccttcctttcgacgatgagcttcacgctctcctgccccacgatgcgcacgacggcgccctgggggatgaacgagccgtcggcggaacgcgcggcccaggtcatgcggttgtcggtttccacgcgtccggtgaggccctcgttgtcgacgtcctccaccacgacggcggtctgcccgacatgggtgggctcctcctgctttccgcggtcgcggtacttcacgaacacggggcgcagggccacgaggcacacgacggaaacgaccaggaacacgacgatctggacaagcaggtcggcaccgagcaggttcgcagcgaacgctgcgagcgcgccgatgacgaaccacatggtgatgaggccgaacgacacgacttcgacgacggccatgacggcggccacggccaaccagatgaaggggctcacgggctcctcctttctcctgcgtcgagtataccatccctcgtcttcggcgtgcgcgaggcgaggaaaccgatcaggaacgcggggaaagcggcttatgggcggctcggcggcgcttgaggtcctgctgcatggcggccacggcttcgtagagcatctccagctcgtcgggatcgaggcgcgacgggtcggcgatctgcgcgcgcagggcgcccaccgcatcctcggcatcgccgatggcgagctcctccacgaggaaggccgccagctgctcgggcgcagccgtctccgacacggtgcccgacgtcagcacggcagcggcgtccggaagcgcgcgggacgcctccgtcacgagccgcgccgaggaggccgccggatcctcggccagcacgtcgagcatgctctgggcgatcgcggcgtgcgcctgctcgtgccactgcgtctgcgcgagcgcgtcggcatgcaggagcgccaggtcggggcggcgcgcggccagcgtcagcagctgacgttcgaaacgacggcggttgatctcggcgcgcggcaggttgcgagccggcctccgcggagcgacggcacgctcgaaaccttccggcgcggactcgtcgtcgcgctccccttcggccttcggagccttcaaatgctccagctggtcgatcacgtcctgctcgcgggcgcgcacgctcgtggctatctgcacggcgtaatcgcgcgcgagcatggagtccttgatgggggccagcacctgcagcgcgtcggcaagggcggcggcgcggccctcggcgcggctgaggtcatggcgcgcaaggcggcgctcgatgccgtacttcagcagcggctgggcgttcgcgatgagcttctgcagctcctcggcaccgcgctgggccacgaagtcggccgggtcgaggttgtccggcagcgtgacggcagccagctcgatgcggctcttgcccgcctcgggcgtcatggagtcgtcgatgaacgcgagcgcccgatcggcggcgcgctggcctgcctcgtcgccgtcgaataggtatacgatgcgatgctgcgcgtggcgcgacagcaagcggatatggcgcatggtgagcgcggtgcccagcgtggccaccgcattcctcacgcccgcctcgtgcagcgcgatgacgtcggtgtagccctccaccaccacggctatgccggtcgaggccatggccgctttcgccttgtccataccgtagagcacctgcgacttgtggaacagcggagtctcctgcgagttcaggtacttcggctcgcccttgcccaccacgcgtccgccgaaggcgatgcactcgccctgcggatcgttgatggggaacatgatgcggttgtagaagcggtcgcgcagcttgcccccgtcgttcgacagcgccacgttcgcctgcaccatctcgtcgggcttgaagcccttcgcagacaggtggcgcaccagctgcccgtgccccggcgcaaaaccgagctgccaggtcttcggcacctcgccccccaggccgcgcgcgcccaggtagctgcgcgccgccgacgcgtcggagccggggttgcgcatgagctggcaatggtagaactgcgaggtctcgtcgcagacggccttgaggcgggccttgcggctgctgccgatgctcttgcgcccgccgctctcggcgatgtcgatgtgcgcgcgctcggccaaccggcgcacggcttcgggaaacgacaggtcctcggtcttcatgatgaagccgaacacgtcgccgccctcgccgcagccgaagcagtgccatagctgcaaggccggatcgatcttgaacgacggggtcttctcgttgtgcagcgggcagcagcaccagaaattgcgcccgcgctgcttcaccggcgtccgctctccgataacctcgacgaggtcgttggcctcgcgcaccttctggatgtcctcttcgctgatgccgcccgccatcgcgacccctacctgcgtctgttctgcttcgccagcaccacgttcacgaggaacacgaatgccaacgccagcgacggccccagctcggcgatgccgacgccctcctcgcccgcgttcgcgtacgcgagcacgaggctgcccgtcatgaggacgaagctcaagcccccgataaccgcgaatatccactgcctgttctgcatgcactccctttccgtgttcgtcgctgtccagtatagcgcaagcgcgcgctcgcggcgccgcggcgggaaggcgcagggcaatcagcaggatgccaaccgaatcctgacaaaaccgcagcggtatcggacgccggcgggaccgctgctatgcttgatcggccggtcgcgcttcgccggcattccgaacgatcgcccgaaaagagaggtttgccatgaacgacgacatcacgattttggcggacttcgattctgcgctctacgagcaggtcgagccgcccctcgtatcgctctacctgcccacgcacggcagtgctcccggcgacgagagcgaccgcatcgagttcgaggccctcgtggagcaggcgcgcgcgaagctcgcccaggagcgcgagcgccgcgaatacaaaggcgtcgacgagcggctcgcctacgcagccgagcacttcgacgatctgatgagccccgcgcccggcggaagcctcgccgtgctcgcaggcaacgaccgaacctacatctaccggcttggctacgaggcgggcccgctcgcgttcgtgggcgagcggttctacgtcaagccgctgctgaagaacttccagttcggatcgcactacttcctactggggctttcggccgaccgcttcgcgttcgtccacggcgacttcggctcgctcgagcgcgtggagctgccccgcgacgtgctcgacgcgttcagcgaggagttcccgctcgtgtacgacgggcacgagggtgcgctggactactcgtcgctcgagaaccatatgccgccctaccacggctggaagtcgcgcaacgacgtgaggaaggaggaggccggaaagttcttccagtacgtgaacaaggcggtgaccgactacctcgtggccggcaccgacctgccggtgatcctcgtgagcctgcccgagcaccaaagcgccttccgccgcatctccaccatcccccatctgctggacgagggcatcgagaaggacatcggcggcatcgaggcccccgagctcttgtccgatgcgaaagccgtcatcgagcatgtgcgcgaggcgcgtgcgaccgagctgctggagaagttcggcgatgccgaggcgcacggcggcgcgtcatcggacctgaaagccatcgggctcgctctcgtggagcgcaaggtgcgcgccctgttcctggccgaaggcgcctacatccccggcggcttcgacgagcagacgggcgaggtcttcctgttcgagcgagagccgcacggccgcttccagggccccgagctggccgacggcttcgtccgcgcggcccttgcccaggacgccgacgtgttcgagcttcccgccgagaagattcccggcgactccggcatcgccgcgctgtaccggtactaggcgcttcgttaccatcagcactgacccgcttcgttaatgcacgcttttgtcaagctttcgtacgtatgaaaggcggttttgcttgtcaaaagcgtgcgtaagcggactgcaaccgcttggagccggcgcatgcgctcgctcgccggcctcttcgccgtacgcggctccatgcgctacaatgtcctcgatacccgcgacgcccgccgccgcgcggcgggctgcatcagcagaggacgcccatggaacgcacgaacatcccctatctctcactcaaccccgacatcgaggccgccatccgcgccgaccgcgccgccgggcgcgcgcacccgcatcgcttcgacgacgcgaacgtcgtgcgccgcgaacggaaccctcacgacaacgccacgctcacgcgccccgcgttcgcgcgcgacatcgagaagatcctcaacgtgccggcgtacaaccgttacgccgacaagacacaggtgttctcgttcgtggagaacgacgacatctgtcgccgcgggctgcacgtgcagttggtcagccgcgtggcccgcggcatcggatcgctgctggggctgaactgcgagctcatcgaggccatcgcactgggccacgacgtagggcacacgcccttcggccacgccggcgagcgctacctcagcgcctgctaccacgcgcgcaccgggcgctacttcaaccacaacgtgcactcggtgcgcgtgctcgaccagctgtaccgccgcaacgtcagcctgcagaccctcgacggcgtgctgtgccacaacggcgagttcgcccagcaggtgctgcgcatgggcgacacggccgacttcgccgcgctcgacgcgctggtggaggcctgcaacgccgacgagcggaccatcaagacgctgcgcccctccacgctggagggctgcgtcgtgcgcgtcagcgacatgatcgcctacgtgggcaaggaccgcgccgacgcgctcgacatgggcgtgatcgactcgctcgacgtcttcgacagcgaggtcatcggccgcgacaacgcacgcatcatcaacaacctcaccgtcgacctcgtgaacacgagctacggcaccgaccgcatcgcgctcagcgaggaggcgttcgccgacctcaagcgtgccaaacgccagaactacgagctcatatacgagcgcgaaggcatggtgaacggcgcaggcaacatcgtggaagagatgttcgaggagctgtacgagcgcctcttggaggatcttctcgcaggcgacgagggctcgccggtgttcaagcaccatgccgcctccctcgccgccaagtctcgcaccgtggagatcgacgagtacctggcatcggatccgaaccaggtggtcgtcgactacatggcctcgatgaccgacagctacttcatggcgctctacgcccatctgttcccgagaagcaagaagcgcatcatcacgcgcggctactgctccgatttaggctgagggcccaccgaggaaaggaaacgcctgtgaagctgctcatcgcatccgacctgcacggcgcggcgcccgccgtgcgcgcgctcgtcgaccgcatcgaagccgaagcgcccgaccgcatcgtcttgctgggcgacctgctgtaccacggcccgcgcaacgacctgccggaaggctacgcgccgaaagaggcgatcgcgctgctcaacggcctggcgaagcgcatcgttgccgtgcgcggcaactgcgatgccgaagttgaccagatggtgctcgacttcccgtgcatggccgactacgccctcgtcgaggccgacgggcacgtcctgtacctctcccacggccacctgccgggcaagtcccccgacgacccgcctacgctcgctcccggcagcgccttcttgtcaggccatacccatgcgaagacgctcgacgagcgcgacggcgtgctgttcgtcaacccgggaagcacctccatcccgaaggacggctcccccagctacgccgtgtacgaacacggcacgttcaccctgaaggacttggatgggaacacgctgcgcgaaggcggatgggagtagcccgaacggcgctcgacccttaacctaaccgtcctcgatccaccgtgtattccacgtcggctatcgcggcggtcgaggcgcgatggctcaccagcacgacggtcttgtcgccgcggccctcggagagcgcgcggagcacggcggcctcgttcaggctgtcgaggttcgacgtgggctcgtccaacagcacgaacggcgcgtcgtgcaggaacacgcgtgcaaggcctatgcgctgccgctcgcctcccgagagcgtctcccccagctcgcccaccggcgtgtccagcccgcgcggcagacgttcgatcaaaccgctcaacgccgccttgcggcatgcttcggccagctcttcaggcgaggcgctcggcttcgcaaggaggatgttctcgcctatggtgccggcgaacagatgcgtttcctgcgtcatgtagccctgcgtttcgcgcaagctggccgtgttcgcacggcgcacatccgtgcccgacacctccaccacgccgcgcgtggcatcccaaaagcgcatgagcagcttgcacagcgtcgacttgcccgaaccgctgcgcccggccaggtgcaccacgctgcccggttcgatgtgcaggctcacgtcgtcgagcacgggatgccctccataggagaagtcgacgcgacgcaccgcggcgcccgagaacgtccccagatccacaccgtcgtcgacctcctcggtctgcgggcgctcgtcaagcagctcaagcacgcgccccccggacgcaagcgtctgctgcagcgtggagccgagattcgccacggcgatgaccgggccgaacgacgacatgagggcggccgtggccacaagagctccgtcgggcgcgatggcaccggacaagcacagcgtccccgacgccagcaccatcgcaacgtcgagcgccagcaccagcccgttcgtcaacgacatcgccagagcgccgcgccccttgaggcgcgcttccgcgcgggcaagctcgtccatgcgttcgtccagctcgcgcgaacgttcggccgctcggccgaattgcagcgtctcgcgcaagcctcgcaagctgtcaagcacgaacgcgttcataccgcccagcccctcccgcagctcgcgcccgcccatgccgctggccttcgaggaggcgtacggcaccgctacgcccaccagcaggtaggatgcaagagccagcaaccccagcgccggagatatcgtcgcgacgaacgccgtcatgcccgcagacacgacgaacgcgatgatcgccggggacaacgtgtgagcatagaacacttccagcaattcgatatcgccggtcacaagcgaaacaaggtcgcctttgtcgcggccttccagcttcgccggagccaagcggcgcagcgcggcgaacacgcggtcgcgcacgagcgccaacagcttgaacgcgagataatggttgcacagctgctcgccgtagcgcagaggcccgcgcgcgacgccgcagacggccacgagcgccagcgcggcgccgtagccgacagtctgcggaaagcccgccaggtcgacgagcgcgtagaccccgaacaccgtgaggaagatggccgccccgaagcccagcactcccagcacgacggccaacgccatccagggagccagagggcgcacgagccccaccagccgcagcatcaccgacaagtgcgatcggcgcgtcggctcgacgggcgcaggctcttcccctcttcgcccatgcgcagggcagtcggggcagcgcgcaggctctgccgcggcgcgcgcggatcctccggaaaccgcaggcgacgcttccggcagctcctcctcggatccggccgcttcgaccgccgcagagaagcgctcgagctcggcttgccggctccataggcgcgcatacgggccgccgtgctccagcaattcgccgtgcgttccggcttctgccacacggccgtcttccaacacgtagatgcggtcggcgccggccacggccgccaggcgatgcgagatcacgacgacggtcttcgtgcgcgccagctcatggatgacctcgacgatggctcgctcgctctccgcatcgacgttcgacgtggcctcgtcgaacacgtacgcaggcgtatctcggagcaaggcgcaagccagcgcgagtcgctgccgctgaccacccgaaaggtttccgccttcctccgctatcgctgcatcgagcccgcccgcctgctccacgaacccctctgcgcggcagcgacgaagcgcctcccacagctcctcgtcgctcgcctgggggtcggctagcagcaggttcgagcgcacgctccccttgaacaggtaactcgagaacggaacgaccgtgacggtgctcgcaagcgaggcgcgcgacgcctcctggatcggcacgccgcccacttcgaccgaccccgcgaatccggcgttgcgtcccgacaggatgcccgccaacgtcgactttcccgaaccgctctcgccgacgatgcccgtgaacgatccggcggccgcatcgaaatccacgtcggaaagcacggtgcgctcgccatcgtaggaataccccacgccgcggcatgcaaaggagatgcgatcggcttcgatgacgcgcgagccgcgcttgggttccggcgcatcgagaatcgcgaacatcttgtcggccgccgccatgccgttcatggccgtgtggaagaacgaccccagcgtacgcagcgggatgaagaactcggccgccaggaatatcacggcgaaagccgcgaaaaacggcgcctgcccgagcgagaactgccacagcgccatgacgatgcccaccgccgccccgccgtaggcgaacacgtccatcaccgtcacggagttcagctgcatgcgtaaaagccgcatcgtggcctggcggaacgtctcggcctcgcggttcatcgcctcgtggcgatcggcgtcgacgcggtagatcttgagcgtggtgaggccctgcaggttctcgaggaacgtcgcgcccagatcggtgtaggcgtcccagtacgagcccatcgcgcgcttcgcgatcttccacacggcgacgatggacgcgggtatgagcggcacgcaggccagaagcgccacggctgccggaaagcacagcggagcgagacaggcgaacagggtgagcggcgccaagaccgaatagaacagctggggcaggtacgaaccgaagtagctctccagctgctcggtgccctcgacgctcacctgcacggcctcgctcgtggacacgcgctcggagtacgacggaccgaggcgcacgagcttgtcgtatacgagcttgcgcacggtgcgcttcgcggccgcagctgccgcctggcccatgcgctgcgaaagcgtcaaacagcaaacgcgcacgacgatagccgccgcagcggccatcacgaggttcgcccgcgccgcggcgacgtccccaccctcgacgagggactgcacgaacgcccccatgagcagcatgagcgctatgttcgccgcgagcgcgacccactggaacgcgacgcttgccgctacgtacttgcgcgcttcgggcaccatgcccgccagccgtttgctgaacattcctagccctccgtccgctcgacaacgcattcggagccgcgctcggtcccagagccgcgatccgtcttcacgatgaagccgaaatacgcgacatgcgccacccatacggcagcaacgacggcgcgtcccaccggcacgttcgccatcagaaggaacgaggcgcccaacacgagcgtgacggggcccagcagcatgagcttcgccttcacggtcatcgcgcacttcttcgcgaagccttcgagcacggtgcggtacagcttcgttccatggaaccatgcgtcgaggcgctccgagctgcgcgcgaagcagtacgcggctcccagcaggaacggcaccgtcggcagaacgggaagcaccgcccccagcgccccaagcccgaagcaggcgaagcccccgaccgcccacagggcgcgaaggcacctggccgcgcgccggtctctctcgttcgtcatgagcatccttccctgcgccgacgccctgcgccggcaaatagttacctttgtctaacaaggtgggaattgtacgcgaactggattaaattgtaaaccttggttaatttttaacgacggttcaacgtgtgcaacatgctcaggccccgcagggtgagatgttcgtcggtacgggcgacgcgctgcgacagcgcggcgatggcagcggcatccgagcccgtggcgatgacgtcggtctcgtagcccagttcgcgccataccatgtcgatgaggccgtcgatgagcgcgacctcccccatcacgacgcccgcctgcatggcctcgcgcgtgttcttgcccaccaccgatgccggggccttgagatcgaccatcgccagctgcgcggcggcatccgacagcgccttcgccgacagcttcacgccgggcgcgatgatgccgcccacgaacgagccgccctcgtcaaccacctcgaagttcgtcgtcgtgcccagatccaccacgatgaagggcgccgtataggccgtgcgggcggcaacgaggtcggctacccggtcggctcccagctcgccggggtcgttgtagcgcatcttcacgcccgtcttcacgccgggtcccaccacgagggggcgtcggccggtaagcgcgcgcgtcgcggtcacccatgcatccgtgagccccggcaccaccgacgcgatgacggcatcgtcgcagatcgcacgacggccgtcgcgctccagcatgtcgaacagccccgccatccgcatgcgcgcctcgtcggccgtcatgcgctccgtcgtggtcaccttccaggtggcttccagctcgccgccgacgaagaggcccaggttcgtatccgagttccccacgtccacgcatagcaccgtgcgcgctgcgtcccttccgttgtccatagcctcccgcccttcccgaattgccacaatcatgcgaatttagcgatgccgctcgcccttttcgtccagtatactgtacccgtccgttcagtaacccgacttcctaaaacgtgaggggaagcggatatacgcaaaggagaagagaatggattctgtcaaagggcagctgacgctgcgcggcatcgtcataggctgcgtcggttgcgccatcatcaccgcggcatcggtgtacacggccctcaagatgggggcgcttccttggcccatcgtgttcgcggccatcatctcgctgttcttcctcaaggccctcgggcacggcaaggccagcctcaacgaggcgaacgtcacgcacaccgtgatgagcgccggcgccatggtggcgggcggcctggccttcaccatccccggcatctggatgctgggctacgccgacgaggtgggctggttcgagatgctcctcgtagccgtctcgggcgtcatcatgggcctcgtctgcaccgcgcttctgcgccgccacttcatcgaggactccgagctggagtaccccatcggcgaagcggccgcccagacgctcatcgcgggcgattccggcggcaagaccggctggaagctgttcggctccatgggcttcgcgggcgcgttcacggcgttgcgcgatttcttcggcgtgatccccgcgatgctcttcggcaacgccgcggtccccggcgttgcgttcggcatctacctgtcgccgatgcttctggccgtgggcttcctcgtgggcacgggcgccgtcgtcgtgtggttcgtcggagcgctgctggcgaacttcggcatcatcgtgggcggctcggccgcgggactctgggacgtggcgtccgcgcagggcatcgtgtccagcctcggtatgggcgtcatgatgggcgcgggcctgggcgtcatcttcaagaacatcctgcccaaggcctggcgcatgctgcgcgacgcccgcagctcgaacgcgttcggcctcaccgccgcaagcaccatggatgcgcccgcaagcggcgctaaggacggacggctgcgcatcggcagcttccgcctcaccgccgggctggccgcgctcgccgtggccgccgtcgcgctcatcgtctgcttcggcctgcagctgggccccgtcccggccgtcatcgtggtgctgctcgccttcgtcgccacggccatgagcgcgcagagcgtcggccagacgggcatcgaccccatggagatattcggcctcatcgtgcttttggccgtggcggccgtatccagcgtgccgcaggtgcagcttttcttcgtcgcgggcatcgtggccgtggcgtgcgggctggccggcgacgtgatgaacgacttccacgccggccacgtgctgggcaccagccccaaggcgcagtggatcggccaggccatcggcgccgtgctgggcgccttggtggccgtcgccgtcatggcgatcctcgtgagcgcgtacggccccgagtcgttcggccccacggcgtcgttcgtgtccgcgcaggcgtccgtcgtggccaccatggtgtcgggcatcccctcggtgccggcgttcgccatcgggcttgcggcgggattcgtcctctacctgctgaacttccccgccatgatgctggggctgggcatctacctgcccttctacatgtcgctgaccgcgtttctgggagccatggccaaagtcgcctacgacgccgtgtgcaagctgcgccgcaaggggctctcgcccgaggcggccgcggagaaggagaaggcccagggcgaaacgggcctcgtggtgtcgtccggcctgctgggcggcgaatccatcgtaggcgtcctggtggcgctcgccgccgtggcgacgggcctgggagcgtaaacgcggcgtgatcgcggccgcgtcgcccgaaacggacggtttgagcggcgattccgtccgtttcgggcgacagcttccccaatcaggcgacgaatggctcgtcgtgcaaggcgcatacggcgaacacgtgcgccgaagtcgagcgagagcgcgacaggcgccgaacgacacgagccgtttcatcgtcccgaggaattccatactgatcgaggagcttgacgaagcgacccgtgttcgccacgtctttgctcgagaaccgcatgatcggcatgccgtaaagggtgagctgagcctctcggtgctgttcgtcggcaaggacgcgcatcggtgtccggccgccgcgcagcgccgcgtcctcgtacttctgcatcccatcgaactcgccgataaccctgctgccgtccagccgcgtccagaggaagtcgacgcgatacgaacgccgtcgatcgagcggccgaggcaaagccacctgaagctcgggaagcgcgaagccatgctggatcatcgcggcgcgcgcgatggattcgccaccgctttcgctacgggcatcagcgtagtgcatcgtccgcatggcatgtgccgctccttcgagattgccgccgatgcgcctaacatgggaaacgaacgcgcttgccctgcccccaccgaggcgtagcgcgaaatccgcaacggccagggcctgcccgaaatccgccatgcgcatgcaatcgaagacggtcctctgcagcgacgtcacacggagtccctgcacaatgacggattcgtcttcggcgacaacgtgccaccgaacggtcttcgagttcgcattgcgattcgatcgggtcgtcgcaacgtggattgcgcccagcctctcgtacgataccggcagaccgaacgcaacggcagccgattcgtgacagaaaacccaatcgggatgaatgctctgtgcagtgcgcatcacatgaagcattttctcgggcttcgaaagcccgctccaataggcggctctggcatacatgccccgagcaggccgtacgacctcacctcgctccacatgccgccgcagaatcttgcgcgtccgctcgcaggacgaaatcgcgcacatccgcatgcgctccgcccgaaggaaaagctgggccatttcgacatcgttggctttcatcgcgcaccaccgccatccgcatccatgcaacttcgttccatcttcccagaaaacaaacaacctgacggcttgagccgcgcagttcgcaagacgaacactgtcgcccgaaacggacggtttgagcggcgattctgtccgtttcgggcgacagcttccgctaacggactcgccgttccgcatgcacgctagttgaacttgaagatcttctgagccatacggtagccggtgatgccgatgcggcgaccgaacgaggtgggcaggttcgtgcccatgttgagcgtgctgcgccggatgggacggtaggcgtccggattgtgcgctttgaggtactcccagatggcctcgcgcttgtcctctgcctcgtcggtgtcgatcatgcgcaggaagatggagcagatgcacatcatcatggacaggtagttctccatgtagcgctccaggcgcttctcgggcacatcgtcgggcaggcgcacggcatcgatcatctcgcgcgtcacgcgcagctgctggtcgatgcgacccatcatgacgttctcgttcacgctctgatcttcgcgcccgatgaagtagcggtacatgtccacgtcacggtagtagatggtcttcacatgcggaagaggaacgtacacgaagatgttgtccacgtagaagcaatgctcgggcagcttgagatcgatgtcccgcaaaagatcggtacgatagatcaccgagtgcatgagcaggtactggctttgcccgaaatggcccacgtcggcccagccgaactcgcgcccctcgggaaacacgttacggtagtgcatgaccgtgcgcgcgccctcgtgaaccttctcgtacacgtagttgccgatgacgagatcggttggatgcggcagttcggcctgacggcgcaggtaaaccatgatctcggccatggcgtgctcgtcgagccagtcatcggagtccaccaccttgaagtagcggcccgtcgcgttcgccaatcccatgttcaccgccgatccatgaccgccgttttccttatggatggcgcggatcaaaccggggtgacgctcctgccacgcatcggccttggcggccgtgtcgtccttcgtggatccgtcgtcgacgatgagtatctcgatgtcgtccccgcatttcaaaatcgactcgatgcaggtatccatgtaggcggccgagttgtagcacggcacggcgaaggagatggtcttcatgccgctaccccaccagctcgtcggcgagcgccagcgcacggccgatgatgacgtccatgttgtagtagcggtactcggccagacggcccagcggatggaagttcggaagcgacgtggtgagcgcgcggtagcgctcgtagtgcgcggcgttctcgtcgttgatgatggcgtagtacgggatctgcttcttcggatcgtcgtaggagtggctgtactccttcatgatggtggtcttgtcgcttacctggccggtgaggtacttgaactcggtgatgcgcgtgtaatcctcggtcaccgtgaagttcaccgttccgcaaggcagcacgtgctcgacgtcgtgcgtctcgtacacgaaatcgaggctgcggtacggcagtcggccgaaacgcgacaggaacagctcgtcgagcggcccggtgtagacgatgggcccctcgaacggcgcgcccttgatgagaatggcggacagaggcgcgttctcgtcgttgctctcgaactccagttcgaacacgttctcggcttcggtttccaggcacaccatgatgcgctcgtggtcgagcatgcgctcgaacagcggggtgtagccctcgagcggcatgccctggtaggcgtcttggaagtagcggttgtcgcgcgacaggaacacgggcacgcgcgccgtcaccgacggatccacctcctccggcgtgagcccccactgcttctgcgtgtagtagaggaacacgttcttgtagatgaagtccgccacctcggtgagatcggggtcgtcgacgctccgcagctcggtgatggtcaccttgcgctcgtcgccgaacgtggcgatgagcttctcgatgagctgcgaggcgcgctcctcgccgaaggcgatctccatcgagttcttgttgaacggcaccggcatgtacgtgccgtaccagtcggccagcacctcgtgctggtagtcgcgccactcggtgaagcggcggacgtagtcgaacgcgcgcttgtcgttggtgtggaagatgtgcggcccatagcggtgcacgaggatgcccgcctcgtcggcctcgtcgtacatgttgccggcgatatggggcttcttctcgatcacgagaacacgcttgccgccgcgctctgccagctcgcgcgccatgacgctgccggcgaacccgctgcccaccaccacggcgtcgaaatcgcctcgatcgatgtcatgcaaatcgcagtaacgcacacccatggggaaccttccttgtccgtattgacccgcacgaaccgcgcggtcgcgatatcctagaaataaagcgcggtatttgccgcgccatagatgccgaacgctattttaccgggaaggctccgggttgcgtggattatcatacaaagcggataaaatggaagcgagcgacgacccgccgctgcagcatgcgaagagggcgtcgcgcgaatcgaaaggcctgccatgagttcattcctggaaacgatgctcgcccgcgccaaagcggatcgccagacgatcgtgctgcccgaaggcgacgacgagcgcaccctggcggcggccgagcgcatcttggccgacgacatcgccgacctcgtcatcctcggcgacgcccacgccatcgcggccagcccctacaagctcagcggtgcgcgcatcatcgacccgcgcacgtccgagctgcgcgaagggttcgccgaggcgctctacgagctgcgcaaggccaaggggatgacgcccgagcaggcgatgggcctcatggacgacgtgctgtacttcggcgtgatgatggtgaagaccggcggcgccgacggcatggtggccggcgcatgccatgccacgggcgacgtgctgcgcccctgcctgcagatcctcaagaccgcgccgggcgtgaagctggtcagctcgttcttcgtcatggtggtgcccgactgcgacctgggccaagaggggacgttcctgttctcggactgcggcctggaagtgcagcccgatgccgaaaagctcgcgcacatcgccgtgaactccgcgaagtcgtggaagacgctcatgggcaccgagcccgccgtggcgctgctgtcgcattcgacctacggctcggccaagaacgacgacgcggccaaagtggtcgaagcaacggccatcgcgaaggagctggcgcccggtctcgcgctcgacggcgagctgcagctggacgcggccatcgtcgagtccgtgggctcctcgaaggctcccgactcccccgtcgcaggcaaggccaacgtgctgatattccccgacctcgatgccggcaacatcggctacaagctggtgcagcgcctggcgaaggccgaagcctacggtccgatcacccaaggcatcgccgcccccgtgaacgacctttcccgcggctgcaccgccgacgacatcgtcggcgtcatcgccatcacctgcgtgcaggctcaagcgaagcaggcggagtaaggcggacgccgcctgcttgccaaacgacgaggcccccgcgttgaactgcgggggcctcgtcgtttacagcttcgtgcgtttacaccagcgggacgtccactttctcatggagaatctcgtaagtgtcgcgagcgatcatgtactcctcgttcgtggggatgatgatgatcttcaccggagagctctcggtggatatctcgcgctcgaagccgcgttggcggttcttctcctcgtcgaggatcatgccgagaggctgcaagcccgcgaagatcatgcggcgcatcttctcgcagttctcgccgacgccggccgtgagcacgatggcatccacgccgcccatgacggcgatgtactggccgatatacttcttcaccgagttcgagtacatgtcgtaggccagcatggcgcgctcgtgaccctgctcggaggcatccctcacgctgcgcaggtcgttcgagatgccggatatgcccagaagacccgatttcttgttcatgaggtcgttcatctcgcccgcagtcaggccctcgtgctccatcacgaacgggacgatggccgggtcgatggccccgcagcgcgtgcccatcataaggccgtcgagcggcgtgaggcccatggaggtgtccaccgccacaccatggtcgatggccgatatcgagcaaccgttgcccaggtggcacgtgatgagcttgaggtcctcgatcggctcgtccagcacggcggccgcgcgctcggagatgtagcggtgcgaggtgccgtgggcgccgtacttgcggatggcgtacttctcgtacagctcgtagggcaaggggtacatgtaagccttcggcggcagcgtctggaaaaacgacgtatcgaacacggcaaccatcggcgtgctcggcatgtgcttgaggcacgcgttgatgcccatgagcgccgccttgttgtgcagaggcgcgagctccgccagctcgtcgatcttctggatgacgtcgtcgtcgataagcaccgagcgatcgaagtacttgcctccctgcacgatgcgatggcctaccgcatcgatttcctcgagcgagtcgatggccttcgtcggcccgctcgtcagcgattcgaggacgagcgccatcgcatcgtcatgatcggccatcttggcatcgatgacctcttcgttcttatcgaggccgtgcttatggaacgcctcggccgaacctacccgctcgcagatgcccttcgcaagcagctcctgctgctccacgttgaccagctggtacttcaaggaagatgaccccgcattgatgactagtacgttcaacgacctgcctccttcggtattcctaaagcatatattctaaggtggcggcggaaagctccgcgggcaaacggaggcctgtatcggccagcggcgcgccgctcaccgaaaacaagcgtcgaggccgtctgccggacaacggcaagacgacctcgatcgaagcgtattcgcaggtcagaatattacttcgccgaaggatcgcccgagttcatgggagcgccgcccagcacgtgcacgtggatatgatgcacggactgctgcgcatcgtcgttcgtgttgacgatcacgcggtaaccgctctcggcgatgcccttgagctcggcgatcttcttcaccgtgttgaacagataacccatctcgtcgtcggggatgccgtctccgatgttgtcgtagtgattcttcggcacgatgagggtgtgcacgggcatctgcgggttcacgtcctcgaacgcgagcacgcggtcgtcctcgtacaccttcgccgaggggatctcccccgccacgatcttgcagaacaggcagtcttccttgcgcatatccttctccttctcgaaagccggttttccccgctaggacaagctggtgtcgcgcgcaccgtcgtcggcgtcggccacgagctcgcccatgagcacgtccactttctgctgagcctcagccagacggccttgcagcgccgcgagcagggccacgccgcgctcgtagcttctcaggctgtcttccagctccagcgaattgctttccagcactccgacgatgccgtccagctcggccatggcctcgcgaaacgtcagctcctcgatgggcctgagttcggtgttctccgtcatgatgcatcctcccaatcgatgatttcggtgtccacgcgcctggcttgctccacccggcaggcgagcacgccgtccgcgacggcgacgtccacggccgtgccaggcggcgcggcctccacgctcttgaccacggcgccgtcttccgtgcgcgcgatggcgtagccgcgccccagcacggcaagcggcgacaggtcgtgcagacgcgcggcggcaagcgccgcctgttgcccgaagcgcggcacgagagcgccgccgcacgacgccaggcgctcgcgctcgtgctcgagacgcgtgcggctgcgatcgaggctggctggcaacgcgcaggccaagcgctcgcgctggcgcgcgaccgaagcctcgtcgcgcgccaggttcgcgggcagcgcccggaacagacgatcggaggccaggtcgagcatctgagcctcggtggcgtacagaagctgcgcgtcgcagaacagcggacgcgtagcgcagcgccgcacctcggccccggcgcggtcgagcgcccgggacatgctggcgcgcagcgacgacgaacgcgcctcgaacaagcggccgagactctcgcgggcggggcttacggcttcggcggcggccgtgggcgtagaggcgcgcaggtcggccaccatgtcggcgatggacgtgtcgggctcgtggccgatgccggtgaccaccggcacggggcacttcgcgatcatgcgcgccagcccctcgtcgttgaagggcatgagatcctcgaacgacccgccgccgcgcaccacgagcaccacctcggccccggcgcgcacgaccgcgcgcatgccctcaacgatgccggcgggcgcgttcgagccctcgaccgccacgcccgcgacgagcacgcgagccagcgggaaccggcggcgcagtgtgcgcagcacgtcgtgaacggccgcgccccgcggcgaggtgaccagtccgacgagcgccggatacgcaggcaccggccgtttgcgagccggcgccataaggccctcggcttccagcttgcgcgcgaggttcgccacctgcatgcgcaggttaccctctccggccagcgcgatggaaaacacgtcgaaattcatgcggcccttcggtgcgtacagcgtgaaacgcccggtcagttccacgagctggcccacggccaaccgcacgccggacgcttggaaacggttgttccacatcatgcacggcaacgcggcgcgctggtccttcacggtgaagtacacggctttgtagccgggcttgttcgagacctcggacacttcgcccacgagcctcacggtcacgccctcgagcgctcccttcgccaacgccatcgcgcccgacaccgacagcgcatccggcgaccccccgccctcggagcgcgtcgccgcgcgagcccgctcaagcgcggcgccgaggccgtcttggcgcgccgtctccccgtaccccatggctcgccgctagtcccggcgctggccgagcagccacagcagctgcaggatggaggtgagggcggccgccacgtaggtgagggcgcaggcgcgcagcacgttgaacgagcccgcctgctcggcctggggcaggcccgtcgtgttcatgtaggccatcgcgcgctgcgaggcgttgaactccaccggcagcgtgaccagctggaagatgaccaccgcggcgtacatgacgatggcggccgtggtgaggccggcgatgttcaggaagatgcccatcatcaacaggaagatccacgcattcgacgccaggttcaccacaggcaccagcgcgccgcggatcttcatgggagcgtagccttgcgcgtactggcaggcgtggcccacctcgtggcacgccgtggccgtggccgtgatggagcgcccggcgtaggcgtcgggcgacagcgtgacggagttcgtccgcgggtcgaagaagtcttggccgggaccgccgcgatgcacctcgacgtcgccgatgccgtagtacatgagcatgcggcgcgcagcctcggcgccggtgaggcccgtggatatgggcacgtgcgtgtatttcttaagctgggagttcacgtaccaggttgcaaggccgccgatggccagcgtgacgacgatcagcagcaggtatccgttgctcaatccgaacatgggtgtaacactccttcagaaggttgcatgcgcgaacgctctcgtccgcatcgttttcgttccccgctattctataatgaaacagatgatcgcctcgaaaccgtcatggattcagcgcgaaagattcgtaactgacggcgccgagacgccggaggcgctcaactccgatgctccacgcgcagctcggagccgtcgatgctgagcgcgagcctgccttccagaagctccagcagctcctctcccacgagcgcacgacgccaaccgcgcagaagatcgacgccctcgcggtacccgcgcgcgacgcgcgccaggtcgtcatggctggccagcgtggggaacgccacgccgttctgcttcgcgcgcagccgcacgagcgcgcacatgagatccagctccgcgtcgacgttcggctcgttcttgccgcagcgatcaggctctggccaggtgtcgggagacgcgtccaacgcggacgcgatcagcgacaccacggtgcgcgcgtccttcgtggagaggcggtcggacagcccgcgcaccatgaacaggtcgtcgatggaacggggctcgcgcttgcaggcctccacgatctgctcgtcggtgaccacccacttgcggggcacgtcgcgtcgctgcgcttcaagctcgcgccaggccgctacctcgcgcgcggccgacagctgacggcgcgacagctgggacacgcgcttgagccgcttgtagcgctcgcgctcgttggcggcgtagcgcgccggatccgccaaatcctcgaagtcgcgatcgagccatgacagtcgccccagctccacgagctgcgcccgcatgcgctcgtacatgcgcgacagatacaccacgtcgtcggccgcgtactccaactgcgaatcggacagcggacgacgcgaccaatcggtgaacgagtcgattttcttcagcgtcacgccgcactcggcatgcacgagcgccgcgtagccgatctgctgcgtatggcccaggagcgcggcggccacctgcgtgtcgaacaggggatgcggcagcacgcccacctcacgcagcaggatctccagatcctggttgcctgcatggaacagcttcatgacgttctcgttgcgcagcacgggcgcgagcaccttcagatcgtcgacggcgaacggatcgacgatggccgtctcatcgtcggtcgcgagctggatcaggcatagcttcgcatagtaggtcttctcgcgcagaaactccgtatcgatggccagcacgctggaatgcatggcgcgctccgcgaacgccgcgaggttttcttggtttgctatgtacacccggtgttccttaccttgtgtttctcggttcatgttgtaccatgccatcatagcaaacgatcggaaagggaaccggtgaaactgctcgtcatcaacaacctctcctccggcttcggcgaaggagccgtgtacgacttcgtacgctcgttcatgcaggacggcgacgaggcgtgcttgcgctcgacggacggaaccaccggagtgagcacccttctggacgacgccgcgtcgttcgacgccgtcatcgcaagcggcggcgacggcaccgtggccacggtcagctacatgctcgccgactcgggcatccccgtcctgcccttcccagccggcaccgcgaacctgcttgcgctcaacttggcctcccccatggagccccacgcgctggcgaagatggtgcgcgagggccgcacgctcgacttcgacctcggcgagatcgaagtcgaaggccgcaagttcggcttcggcatcatggcggg

SEQ ID NO: 8747 - DNA, 404 bp, Unknown
  gut microbiota DNA sequence
cggacagcttgaagaaccagttctcctcgccgcccgccttctgcacggggcgcttgcagtcggggcacaccaattcgccctcgtcgttcttctcgaggtcgctctcggcgtagtaggtttcctcgtgcacgcagtaccagccttcgtagctgcccttgtagcaccagcccttgtcgtagaggtcctgccagaacttctgcacggtaacggcgtggcgcggctcggtggtgcgcacgaagtcggtgtaggtgatgcccagcatatcccatgcgtcgcggaatgcgggctccatggaatcgcaccaatcctgcggggtcatacccttgtcggcagcggtgtcggccaccttctggccgtgctcgtccatgcccgtcacgaacgccacgtcgtagccgttcatgcgc

SEQ ID NO: 8748 - DNA, 196 bp, Unknown
  gut microbiota DNA sequence
agccagcacgctcgcgccttcctatcctgctgtcatcggcgcgcatctcatcgtaggcgcgatcgcactcgcgatagccggcctgtcgatgaagcgcgtccaatcccgccgcacgacactcgcgctgagagccaccgccagcctgctcgcgctcgcagccgtcttcgtcacccgcatcgtgttctaccacctgcac

SEQ ID NO: 8749 - DNA, 972 bp, Unknown
  gut microbiota DNA sequence
cgctgcatcttgcgcccgccgcttaccggcggggcgttgcggggacgggcgacttcggatatcctagccgtcgtgagagtacgcaagcgcgtacgaaggggcgcaccacctcgggtgcgatctgcttcgtgcgcgcttttttcgtgcccggaggccggcggctgcgccggcgggggcggaaaggagggtgagacgtggcgcaggtgaacggacgggcgcggcccgaggcggacggttcgacgctcgcgcagctgctggagcgcgacggcttcgacgccgcgcgcgtggcgtgcgagctgaacggggccatcgtgccgcgcgacgcgtacgcggccacggtgctgcgggcaggcgacgtgctggaagtggtccgcttcgtgggaggcggctgatggacgcgctttcgagccgcatcggagaagaggcgcgcgcgaggctggcggcggcgcgcgtgggcgtggcggggctgggcggcctggggtcgcacatcgccgtgatgctggcgcgctcgggggtgggcgcgctgcacctcgtggacttcgacctcgtggacgagtctaacctcaaccgccagcactacttccgcgagcatctcggccggccgaagaccgaggcgctggccgagcagctgcggcgcatcgacccgggcatcgagcttacgctcgaccgcgtgcgggtggatgccggcaacgcggcggcgctgttcgcgggcgagcgcatcgtgtgcgaggccttcgacgacccccgctgcaaagccgacctcgtgaacgcgctgctgacggaggcgccgaataccggggtggtggcgggcagcggcatggcgggtgcgggaccggccgacgcgctggtcacgcggcgcgtggggcggcggctgttcgtgtgcggcgacggcgaggccgacgtggccgacgaggcgctgttcgccccgcgggtggccctgtgcgcggcgcagcaggcgctcgtcgtcgtgcg

SEQ ID NO: 8750 - DNA, 814 bp, Unknown
  gut microbiota DNA sequence
gaggcggccgtgcgcgatgcgggcgccgagatcgtcaccttggctgtgcgtcgcgcgaacacggggcaggacggaagcatcctcgacgccattcccgagggcgtgacgctgctgccgaacacatcgggggcgcgcacggccgacgaggcggtgcgcatcgcgcggctggcgcgggcgatgggatgcggcgacttcgtgaaggtggaggtcatccgcgatgcggcctatctcatgcccgacaacgccgagacggtgcgcgcaacggcgcaactggtcgaggagggcttcgtcgtgctgccctacatgttccccgacctcgtctgcgcgcgcgacctggtacgcgcgggcgcggcggccgtcatgccgctggcggcgcccatcgggtcgaacaaggggttggccgcccgcgacttcatcaagatcatcgtcgacgaggtggacgtgcccgtcatcgtggacgcgggcatcggccggccctcccaggcgtgcgaggccatggagctgggcgcggccgcggtcatggcgaacaccgcggtggccacggcgggcgacgtccccctcatggcggccgcgttcaaacgcgccgtggaggcggggcgcgcgggataccgagccggcatggggcgcgtgctcgaccgcgccgaggcctcgtcgcccctcaccgggttcctcgcggattaggaggggccatgacgcaagcaggcacccgctccgcaacgccctcggcggttccgcgcttcacgcgcctcgaggcggtggaccccgccgacgtggcgcgcgatcgcggcatcgaccctatggcctaccttccgga

SEQ ID NO: 8751 - DNA, 517 bp, Unknown
  gut microbiota DNA sequence
gcctttcccccgagggcttcggcgcgctgctgtcgtctgccgccgagccgttgctggaggagctggccgccgccgcccgccgcgcgcggcggcgctggttcggcagcacggcgtacctgttcacgccgctgtacctggcgaactactgcgacaaccactgcgtgtactgcggcttcaaccgcgacaacgacatctgccgcgcccgtctcgaccgcgcgggcatcgtcgccgagctcgacgccatcgcggcgacggggctcgaggagatcctgctgctcacgggcgaagaccgcgcgcgcaccgaccccttctacatcggcgaggcgtgcaagcttgccgccgagcgcttccgcatggtgggcgtggaggtgtaccccatgaacgaggacgaatacgcctacctgcacgaatgcggcgtcgattacgtcacggtgttccaggagacgtacgaccccgcgctttacggcaagctgcacctggcggggcgcaagcgggtgttcccgtaccgtgcgaacgc

SEQ ID NO: 8752 - DNA, 337 bp, Unknown
  gut microbiota DNA sequence
agacgatttcacggctacgctcatgcatcttgcgcacgtcggcgccatccgcatcgacgcgggcagttacgaggaacccggcgcgttcaggcgcatgaagaccgtggacgactattacatcacaaggttgcctgctgccgacaacgtgaccgatcccatcgatcgtcaggcgttggatttgctgttcggcacgttggccgggggagccgactcgctgtggttcggcactatcaagaagtacggcgaagatcatccgcaggagtttgtcgacgcgatgcagggctggcagggcgcgctttcggcggcgacgaaccgcgaggatttcttcgaggcgaaa

SEQ ID NO: 8753 - DNA, 145 bp, Unknown
  gut microbiota DNA sequence
gcgcatgtccacttgaccagtgagctgttacgcactctttaaatgcatggctgcttctaagccaacatcctggttgtctaggcaaacgcacatcctttgccactcagcatggatttggggaccttagcgggcggtctgggctgtt

SEQ ID NO: 8754 - DNA, 1374 bp, Unknown
  gut microbiota DNA sequence
ttgtctaggcaaacgcacatcctttgccactcagcatggatttggggaccttagcgggcggtctgggctgtttccctctcgaacacacagcttagcccacatgttctgactcccggcctctgatccggcggcattcggagtttggttcgtgtcggtaggcggtgaagccccctcgacgatccagtgctctaccgccgtcggagaacggccgaggctagccctaaagctatttcggggagaacgagatatctccgggtttgattggcctttcacccctatccacgggtcatcccctccgttttcaaccgaagtgggttcggccctccacggggtcttacccccgcttcagcctgcccatggatagctcacccggcttcgcgtctgcagcatgcgactctatcgccatcttaaaggctcgctttcactgcggctcggttcaaaccttaacctcgccgcataccgcaactcgctggctcattctacaaaaggcacgccgtcaccccgctcgggggctccgactgcttgtaggcgcacggtttcaggtactgtttcactcccctctcggggtgcttttcacctttccctcacggtactggttcgctatcggtcacaggagagtgttcagccttggagggtggtccccccaggttcgcaccgggtttcacgtgcccggcgctactcgggcgccgcactcgcagtccgcgcggattcgcgtacggggctctcaccctgttccgccggccttcccaggccgttccgcttccgcgcggatttgtaactgcgtccatggtctgaggcccatggaatgcgcggtcccacaacccctcatgcagcaacgccctcaagcttgcacgtgcatgggtttgggctggtgcggtttcgctcgccgctactcccgcaatctcggttgatttctcttcctccgggtacttagatgtttcagttccccgggttgcctcctcgcgccctatttcattcaggcgcgggtagcagggcatgacccctgctgggttcccccattcggagatctccggatcgaaggccgtttgcgcctccccggagcttatcgcagcttgccgcgtccttcttcgacttcctgtgccaaggcatccgccgtgcgcccttagtatcttcttctcataactcaggttttcaggcatcgaatactcgatgctctcgcgatcgtgatgatgctcggtccccggccgcccgtcggacggccgggtaaaaaagatcattagtcaccaaacgctatgcaactgtcaaggtgcgcgggaggccgaagccccccgggggcagagccccggaagccggatgctgagacagcgggcgaagaggccaggcggaccctcgcgacgggacccgaaagagatt

SEQ ID NO: 8755 - DNA, 9878 bp, Unknown
  gut microbiota DNA sequence
tccacggtgtcgcccgtggagaacgtcatcttcgcggcggccttcttctcggcgcccgggcgcacgtaggaaccgcccacgcgcgcggcgcgctcgtcgctgcggccggacgaacccgacgcgctggagcggccgaacacgcggccgccgcccgcctcggtgccgctgccggcgatgcccttgcggctgccgcgcttctcccagcccgtgccgctgaagcccgccgagccgaggcccgtggtctggcgcagctcggaggggatctcctggatgaagcgcgagatggggttcgacgatgtctggccgaagatctggcgcgcgtaggcgcaggtgaggaacagcttcttgcgggcgcgcgtgatggccacgtacgcgagacgacgctcctcctcgatgccggccgcatcgcccacgctgttcatgtgggggaacagcgtctcctccatgccggccacgaacacgcagtcgaactcgaggcctttcgacgagtgcacggtcatcatggtgacggcgtggccgtcctcggccaccgtgtcgaggtcggtgcgcaggcgcacccactcgatgaaatcggccagcgagtcgccgcgcaggacgcgcacggggctttcctcggccggagccgcaagctcgttcgcgcccgcgaaggcgtagaacgaacccgcgagggcgtcggcggacgaggggacgggggcgagcgcgggggcgtcggccggctcggccgtgggcgcctcgtacagcgcgtcctcgtcctcgtgggtttcggtgaactcgtcgacgacgccgaggaactcctggatgttctcgatgcggccgcgcgcctcgtcggtgttctcggcctgcagcgcgccgatgaggccgctcttgtcgatgatcatctcgatgaccttgcgcaaatcgccgccgtaggtgcgcgcctcgttgacgaggcccacgaactccccgatggcctggcgcgccgacgcgcgcagctccggatcgacgatggccagctcggcgccctccatgaacgtcatgcccatctcgcgggcgaactgctcgatgcgctcgatggtggtcttgccgatgccgcgcctcggcacgttgatgacgcgcttcgccgcgatgtcgtcggccgggttcaccacgagcgtgaggtaggccatgacgtcgcggatctcggcgcggtcgaagaagcgcgtgccgccgacgatgcggtacggcacgccagcgcgcagcagcatgtcttccagcatgcggctctgcgcgttcgtgcggtagaacacggccacctgattgtacgacagccccgccgcgcgctgcttctcgatctcgccggcgatccagcggccttcgtcgcgctcgtcggcggccatgtacacctggatcttgtcgccgtcctcggcgctggtgaacagcttcttcgccttgcggtgctggttgttcgcgatgaccgcgttcgcggccgccagaacgttgcccacgctgcggtagttctgctcgagcttcacggtgtgcgccgtcgggtagtcctgctcgaactcaaggatgttgcgcaggtcggcgccgcgccacgagtagatggactggtcatcgtcgcccaccaccatgatgttcttgtgcccctcggccaaaagccccgtgatggagtactgggcgtggttcgtgtcctggtactcgtccaccatgatgtagcggaagcgctgctggtaggccgaccgcacgtcctcgtggttcttcagcagcaggtaggcgtacagcagaaggtcgtcgaagtcgaaggcgttcgcggccttgaggcgctcctgcaagcgggagtacacgcgcgaggccaccttccccaccgggtcgcccgcttccttctcgaaggcgctcggcacgacgagctcgttcttcgccgtggagatgcggttcatgagggcgttcacagggaagcgctttgggtcgatgtccagctcggccatgatctccttgtacaggcgcttctggtcgtcggtgtcgtagatggtgaagttgcgcgtgaatcccagcttctcggcgtcggagcgcagcatgcgcacgcacatgctatggaacgtcgacacccacatgccgcggcagcgagggcccaccaggccgttcaggcgctcgcgcatctcggcggccgccttgttcgtgaacgtgatggcgaggatctcccacggagccacgtcgtggttctcgatgaggttcgcgatacggtacgtgagcacgcgcgtcttgcccgagccggcgccggcgagcacgagcagcggcccgtcgacggtgacgaccgcctcgcgctgcggcccgttcaagctgtcgatatcgattgacatatgagcagtctcctgacggatggaggtgaaacaaagctttcgtattctaccgcttttcccctccggcaactggcaaacgcgcgcaatctgcgcaagcgcaggggccgctacgcaagcgcctccgccagctcgtcgacaggcgcttcggaacgcttcgcgaccggcggcgctcccccgtcatgcgaaccgggacggtcggcgcccagcgcgtcgccccacatggacagctcggcgccgtgctccacgaggttcgagcactcgttgcccgcgcgctccaggcacagcagcagctggttgtacaccgccttgttctcaggcgcgcactgccggctgcccacgcggcggaagtgggccttgcgcgcccggctctgccgcttgacgatctggcggcgacgctcgtcgagcacctgctcggaggcggtgcctccgtcgctcaggaaccgcagcaccgcgtcgtacatgtccgccaccatcgcggcgctttcggccagctcctcgcgcgcctcgtccgagaagggcttcttcgacgagaggcgctcgccgtacagcgcggccgcttcgccgcagcgcgagccgatgcggcccgccgcgtccacgatgaacatgaggtcggatatctccgcagcctgccgctcggacgtcgcgccggcgctcagcagctccaccgcgtaattcgcaagctcgctttccgcggcttccacctgcgcgcaatcggcttggagcgccttgagcgcggcggcgtcccggttcgcgatggcctcgggcagcgcagccagcatggcgcgcaccttgtcgcagtacttctgcagctcctcgccgaacatcctgatggcgaacaccggctgaccgaggatcttgtcgtcaaggacgacgagcgcgcccggcgccgcctcgccggccttgcccggcacgagaaacgtcacgatcttcaccatagccccgatgaacggcagccatagaagcgtgcagacgatgttgaacgtggtgtgcgcgttcgcgatctggcgcgcgatgacgtccagctcggggccgggcgtgagaagctgcacgaactgcgcgataagcggcacgaaccagatgaacacgaacgcgcccgtgacgttgaacacgctatgcgccacggcggtgcgcttcgcgtcgcgagactgcccgatacaggccaggagcgccgtgatggtggtgccgatgttgtcgccgagcaggatggggatggatccctggaggcccagcacgctggtcacgccgtcggggccgggctgcgaggcgaagctctgcagcaccgcgatggtggcgctggagctttgcacgaccagcgtcatcacggtgcccgccgcaacgccgagcgcggggatatccttcacctggtcgatcatcgccaggaacacctcgctttgcgcgagcggcttcatgaccgcgcccatggtgtcgatgcccacgaacagcaggccgaacgcgaacacggtctggccgatgttcttgacgcgctcgtccttcgccgcgaaccacacgatgaagccgacgaacacgatgagccagatgtagtcgctgagcttgaacgccatgagctgcgcggtcatggtggtgccgatgttggcgccgaatatgacggcgatggcctggcgcagcgtcatgaggcgcgcgctgacgaagccgatggccatgaccgtggtggcgctggagctttgcagcacggcggtggccaccgcgcccgccagcacgcccagcaccgggttcgaggtgagcatggacaggatcgacttcatcttggcgccggcggccttctgcaggctctcggacatcatgttcatgccgaacaggaacacggccagtccgccgagcaggccgaacacggtttccatcggagcgttcacgcgggactccccttcgcatcgtcggttgcaagcgctcatgcacgcgagtcgaaaggataccgggcagacggtaaggccccggtcaagggaaggtaaagttcgggtaaagtttttacaaacggggcgcgtccgacggtttccgagccgtcggacgcgcccgattccttacacgatcttcttgccgaagacggcggcgatctcgcgcagcttcgccacgagcaccttgaactgggccggcgtcagctgctgcgggccgtcggacagggccgcgggcgggttgggatgcacctcgatcatgagggagtcggcgccggccgccacggcggcaaaggcgagcgacggcaccaggtcgcgctggccggcagggtgcgacacgtcgatgcacaccgggcacagcgactgcttgtggatcaccgggatggcggcgatgtccagcgtgaagcgcgtggccgtctcgaacgtgcggatgccgcgctcgcacagcaccacgttgtcgttgccttccgccgtgaggtagtcggtggcggccagccattcggcgatggtgcccgcgaaaccgcgcttgtacagcaccatcttgtgcgactcggcggtgacctggccgattttcttcaacaggctgaagttctggaagttgcgcgcgcctacctgcaggccgtccacgtaggagtggaccagctcgcagtgcgccgagtccatgacctcggtgagcgttttcaggccgtgcttctcgccggaatcgcgcatgatcttgagggcctcctcgcccaggccctggaacgagtgcgggttcgtgcggggcttgaacgcgccgccgcgaatccaggtgagaccgaggcccgcgacgcattcggccacttcttcgaattgctcggccgactcgacggagcacgggccggcgaagatggtgatctcgtcggtgcgggtgcccaagtcggggatgggggctatcttcgcttcgctcatacggacggggtctccttcatgatcttgagaatggtggcgtagatctcgcacaggttctcgttgtacaaaggaccctcgttgtagctgctcaccttcgcgaatatctcctcttcgcgcttggcgtcgtacaggcccaggtgggctccgggcttcaaaccgcggatgaccagcgagtggccggcgcgcttgttgagcagcgcgacgatctgcttgtcgatctcgtcgatcttggcacgatgttcttggatctccgccagggagctgtctctctcagacatcggcttttcctctcatgactctcatgctttaacgtgcggttcgacccgctgcctcgcgcgaaagcggcgatgttctcgggcgacacgtgtgctgacatgatagcaaaagcggcgcgcccgattgccatgccggccgaattagcgaggaagttcatgggatatcgcggtcggcgcatgccgaaaaccgatggaagggcgaagctgcaagccgctcggcgccccggctcccgttgacggtgtacactggaaacgcgcgcctcgctgctgcgccgaatccgaacctattgagagggaagcctcgttgatctcgcaattcgccgacatattcgtgcagatggtcgtcctgttcgccgtgggcgcgacaggttacgccgccaagcggctgaacctcatggacgaggacttcgacaagaagttctcgaagctcatcctgaatacggcgttgccggcgcttatactggcctccgtgctgaccgccgaaacgctgccctcggcgacgaagatcctctggaccgcgggcgtttcgtgcgccagctacgtggtgctcgtcgcaatcggattctccatcacggccgcgctgcgcgtgcccgacggacgcaaaggcgtcttccggttcatgatggtgttcggcaacacgggcttcatcggcttccccgtgacggcggctgttttcggcgcggaggcgctcatctacacgacggtgttcaatctcgcgttcaatgcgctcgtcttcacgctgggcgtgtggatgctcgccacggacaacaaatacggcgtgaagatcaagatgagcccgaagtcgttcctctcgccgtgcatcgtggccagcgtcgcgtcaatcgcgctggcgttcgccggcatccacggcgtgccggtgctcggcgaggcgctggacaccctgggctcgctcaccaccccggcggctatgctcatcatcggctcgtcgctggccaacgtgccggcgcgccagctggtgggcgggccgcgcctcatggcggccgcgctcgtgcgcctgttggtcgcgccagcgctcgtatggctgccgctgcatttcctcgtgagcgaccccgtgctgctgggcgtgatcgtgctgctgtcggccatgccggtggccacgaacggcaccatgctgtgctaccagtacggcggcgacagcaagactatggcgcagggcacgttcgtaaccacgctgggcgccgttttcaccatcccgctgctcgccgtgctgttcatggcgtagcggggcgcagcgataacgcaaagcggcgcgcccgaaggcgcgccgcgaaccgtgcgatatctgtatgcacgacctttacggcagcatgcccatgctttcgaagacgaagtagcccagcaccagcacgcctacgacgatgcggtaccagccgaacgcggtgaagtcgttcttcttgatatagcccatgaggaacttgatggccaccaccgacatggcgaacgccgtgatgattcccaccgccagcacgaggatctcggtggaggtcatggcgatgccggccgccacgaacttgatgcacttcaccagaccccagccgaacatgatgggaatggccaggaagaacgtgaactcggccgccgcggtgcgcgaacagccggccagcatgccgccgatgatggtggcaccggagcggctggtgccggggatgatggccaatacctggaagcagccgatcttgagcgcggttttccagtcgatctcgtccacgtcggtgatcttgaacagcgatgcctcggcctcgtcggacacatcgccgtacgacacgcgcgcatggcggccgcgcggcgcctcgagggcggcttcggcctcgcgcagtcgacggcgattgcggcgctcgagcacgatgaacaccacgccgtacaggatgagcatggccgccacggtcaccttgttgtagaagtactcgttcaccagatcgtcgaacaagaggccgatgacggcagccgggatgcagccgatggccaccatgccccacagacgccacgtgctcttcttctcgacggcgtccttcttcggcgagaacgggttcagcttgtggaagtacaggatgagcacggccatgatggcgcccagctggatgaccacgaggaacagggccaaaaactcgtcggacacctgcagcttcacgaactcgtccacgaggatcatatggccggtcgaggagatgggcagccattcggtgatgccctccacgatgccgatgaggaaggccttcaatgcttcgatgatcatgcgtgcgtatccttggttgggtcgatgcggttatcgtttgcgctgatgatggtcttgcagcatggcgatggccaaaagcgccaccgacaggcacagtcccatgagaacgaattggggaagctcttggcccagcgcgatggtggcaagggagacgagcgccactacgagcgccgccatcttgcaaaggtaggagatgcggtcgttgaacgaggcgtgcatctgacggcgctcctcgtcggtgggagcctcgcgacgaggacgtttcgccgggcgcgcaggcgcggcgacgtcgtctgacgcggcaggaacggacgcgggcgcgtccagctccaagtcgtcaagcgcctctatgtcgtttcgcgcgttctccatgccggaaattgtacacgaggatgagcgtggagcgtcgagaaaccacagggggcacatcgcaagcgaagaagatcggattcgacaatacaactgcctatcagccctatttcgcaacctgcaacatctttatgagatcggaaacgatcgcaagagaagttaattcgccaggctccaaatggttcagataatccagggcttcggagagccaagcccgtttcgaagatcgataggctaccttttctccaaaaacggtttcgagttcgcccgtcctcacaataagacaaccgcactccaagcatcgatctagcaactcttcaacttcattctcaatcttatctagatacatcaaaggatcgcgtttgtaccgtagctttgtctcttcgggctttcccgcatcgcattctatagcgtctcttgtctcttgagctatctgggaaagccttccgctagggtcacattcaaaacacttcaagactcttttgaacttattcttatcattcaaaatatcaaaatccatcactgcgcagcagggaacgccaacgttcttataaaattccaccgcgaatgcaattctgtccttgctgtgcacgttaacaaagaacgcctcgtcggctacgcccactttattcaggatttcccgatacacaagctcatccgactccgactccactacaactacgacacgcgtaaaaacgccctccaaaagacgcgtgcttctcagcagaggatcccctttcaccctatccaagccctcgcggtcaagcaagttcgctcgaagagagtctccgtcgcgctgtagtcttaaaatgtcgcagttatcccagtcgcatgttgacatgatgccattaagaagatgcgtactatgcgtcgctatgatcatttggctgcattgttcagctgaagagccaatcaccttccccagttcgtaagcttgaggcggatgaagaaaagactctggctcgtcaattagaactacaggtttgtctcccgacctaagagcaagatatacagaaacgaagcttcgaaacccatctccttcgtctttcaaggaaacaccctgctctaacaggaattcgaaatctgaggttccacgagcacttgttctgtaactcgaaaaatccgaaccagtcttgaattggatcattccaccttttgtaacgtcatcgagtacgacatctttcccaaataatcttttagaaatttccgacaagtcatcaaggatttgatcttgggatcgaactcgtgaaagaaaattcgtatttgaatctgccacgccgtagtacggttctccagcggaaagaatcaatctatcttctgtgccagaatagccgacaagcagtggccctatgaaattgagaagcgcatctaaagcacgcgcatcattgggagaggcataatgagattcgattacatccttccactgtccctgatattttgtcgcacactcttctcgaactatttgaccatattgattaatattaattccagtattgcagtactctcttacaccatagtttccattttcatcgcgaaccacttttcgatccagatcaaaccactcaaatagagcgtccgtcgattcgggaagcagcaattcaatagtgcttattattttccgacccaggattaggccgccgtcttcgtcgctcaatctacccaaaagggcagaccgaacttctttcagaaacctacttttcccagcattatttggcccaacaatgattgttagtgcttttgggctgaaccgagttccttcttctgaacggagctcaatttccttaatcttaaaaccagcgaccataatgcggctccctaaacaaaaaaa

SEQ ID NO: 8756 - DNA, 21841 bp, Unknown
  gut microbiota DNA sequence
tagctggcaatctccttcgtgcaaagcctgtgcagcacgcctcatcaacccggcaatcgctgtcttttcgtgtaagatggctagcgaaaaacgagagcgatccatttatgcgaaggagccacccgtgtccaccaccccgtccagccagttggtcatcgtcgtcgatttcggagcccagtacgggcagctaatcgcccgccgcgtgcgcgatttgcacgtgtactcggaaatcgtcccgtgcgacatcaccgccgaggaggtgagcgagctcgcgcccgcggccatcatcctgtcgggcgggccggccagcgtgtacgccgaggacgcgccgtccatcgatccgggcatcttcgagctgggcattcccgtgctgggcttctgctacggccagcagattatggccgtcacgctgggcggcaccgtgggccacaccgagaagggcgagtacggagccgcgcctctgacgcggcgcgacgaggggacgtccctgctgtacggcgagacgcccgtcaagcagacggtgtggatgagccaccgcgacgccgtagccgaggcgcctgcgggcttcacggtgacggcctcgaccgacgtgtgccccgtggcctcgatggagtgcgcggagcgccggctgtacgcgacgcagttccatcccgaggtgcgccacacgccgcacggcgaccagctgctgaggaacttcctgttcggcatctgcggccttgaggccagctggacgatggactccatcatcgacgatgccgtggcggccatccgcgagcaggtgggaagcgatcgcgtgatcctgggcctttcgggcggcgtggactcctccgtggtggccgcgctgtgcgcaaaggctatcggtaagcagctgacctgcgtgttcatcaaccacgggctgctgcgcaagaacgagcccgaagaagttgaggacgtgttcacgaagcagttcgacgtggacttcgtgcacgtgcacgccgaggaccgctacgccgcgctgctggccgacgtcgtggagccggagcagaagcgccgcatcatcggctcgcagttctggaaggagttcttcgccgtcgcggaggagctggccgagggcggccggccggtgaagtacctggcgcagggcaccatctaccccgacatcatcgagagcggcgcgcgcaagaccggcggcaaggcctcgaccatcaagagccaccacaacctgatccccttccccgacggcgtgcatttcgatttgatcgagccgctcgaccacttcttcaaggacgaggtgcgtgcgctgggcacggcgctggggctgcccgaccacatcgtgcatcgtcagccgttccccggtccgggtttggccatccgcatcatcggcacggtgacgcgcgagaagctggagattttgaaaaacgccgatgctatcgtgcgcgaggagctggacgcctacaacgtccgcgtgtacgaggagaccggcgagcgcaacagcgaacgcagcgtatggcagtacttcgccgtgctgcccgacgtgaagagcgtcggcgtcatgggcgacgagcggacgtacgcctaccccatcatcctgcgagccgtggagtcgagcgacgcgatgacggcagactgggcgaagctgccctacgaagtgctggcccgagtgtcgagccgcatcgtagccgaagtcccgggcgtgaaccgggtagcgtacgacatcaccagcaagccccccgcgacgattgagtgggaataatttagaggtatttttacccccgagcacccagatattccgggtggttccgagtggttcggagtggatgaaagccaccggaacttctatcaaacggtctcaacgaaaccctctttgcagagctaagcgaagggggtttccttatgcccgattacctgcggaaacgtcgatttcaactcttggtttcgttaactcggaacacctgcaagccacccgggtaaaacagggcatacgggagacgtgagcacagaccggttgagaccaaacgggatttccgggaaaaccgctgatttgcccaaggtggtctcaaaatggtctcaaccctgttttcgaggtcgattttggtctcaactccgtacatgcgagttgagaccacttttcggcgaaatttgaactgcctggcaaaaacggatgagaccactttgagaccatccgaatcggccattttcggcaattctggttcactgcacgacatgaaacgtcactagccgcactccaatgcatccaggtcaaattaatcttattgagtgggaataaatagcgatacagtaacgtatcggtttgtgacaagcagaaccctcctgaaaacaccagctcaggagggttttccttttggttttacgctcaaataaactgcttgtattacagaaaaatggcgtcatcggtgacaaagaatgtcaccaagaaacaacgcggtttgcaagtgtttcgcatcttttacctgcggaaacgctttctgttcgattattcctcatgccacggggcgcaccgcctactacaccgcccccatcaaggcgctcgtgtccgagaagttcttcgatatggtggacatcttggggcgcgagaacgtgggcatgatcaccggagactccaccatcaacaccgaggcgcccgtcatctgctgcacggcggagattctcgcgaaccaggccctgcgcgagggaccagcctcaaaggtgggctgcgtcgtgatggacgagttccacttctacgccgaccccgaccgcggctgggcctggcaggtgtcgctgctcaccctgaccggtgcacagttcctgctgatgagcgccaccctcggcgacgtgagtgacatcgccgccatgctccaggagcgcacggggcgccccgtggacctcgtgaccgacgcgccgcgcccggtgccgctgtcctacgactacaccctggagactctggaggccacggtggagctgggcctgcgcgccggcgaggcgccgctgtacatcgtgcacttctcccaggacgaggccctgaagaacgcccggtcgctggccagctacggcgtatcggagaaagaccagcgtgaggccatcaaacaagccatgaagggcacgaagttcaccacccccttcggcaagatcctgcagcggctgctggcggcgggcgtgggcgtgcaccacgcgggcatgcgccgcgctaccggcttttggtggagcgcctggcccagcaggggctcctgcccgtcatctgcggcaccgacaccctgggcgtgggcatcaacgtgcccatccacaccgtagtgctcacccagctcaccaagttcgacggcaccaagatgcgccgcctgcgcagccgcgagttccaccagatcgtgggccgggcgggccgggccggcttcgacaccgagggaatggccatcgcgctggcccccgagcacgagatcgagaaccacaaggccctgctgaaggccggggacgacccgaaaaagcagcgctgcgtgaagaagaagcagccgcccgagggcttcgtgagctggaacaagcagaccttcgagcacctaatcgaaaagccgccggagaagctgacgccccgcatgcgcatcacccactccatggtgctgtcggtggtgagccgcggaggcgacgcgtgggccaacgtgcaccagcttattgccgactcggcccagacccccgaggagaaaatcaagctgaacgcccgggccgacgagattttcggcacgctgctggaagcgggcgtggtagtgcgcgagaccgacgccgagggcaacccgagctacgtgctcaccgtggaccttcccgaggacttcgccctcgaccagccgctctcgccgtttttgctggcggcgctcgatctgctggacccggagagcgacacctacgctctggacgtcatctcgctcgtggaggccacgctggagaatcccgcgaaggtgctgcgggcccaggagcgcaaggcccgcgacgccgccatggccgccatgaaggccgacggcgtggaatacgaggaacgcctggagcggctggccgaggtcacctatcccaagcccctggaggagctgctggaccgcgccttcgagctgtactgccagggcgtgccctgggcccgcgactacttcgccgagcacaacgagatccgcctggacggtgacgcgcggtcggccgcctacctctccatcgacgagagccccgaagccgaacagcacctctggcatgtgcgccagatcttcctgggcgagaacgccgacggcgacttccgcatcgaggctgacgtgaacttggacgccacccaggaggaaggcgaggtcatcttcaagaactaccgcgtgggcttcgtggaggatttggcggaataggataggttttccaggccaagaaactggtacagctcctgtttgctgtggacacccaattttttataaatgttgtgagcgtgggtcttcaccgtagcgaggcttaccaccagatcgtcgctaatttgcgctaacgtttttctctgggcgaggagaaggagtacgtctccctcgcgcttagtcagagagcactgcatggcgaccgatgtgcaggtttcggcgagtatggtgtaataacgtgccggatcgacgtactgcgcctttgctggatcggtgctcctctcgagacttccatctctgagaggagaaagatagacgaacgcaatggctcctaatcctgcgagtaggacgaggggcaacgcatgcacgccaggccctatcatgcccgagaaagcttctcctagaaaagcggcgagttgctctgcaagataggcaagcgagaagacaaagactgggttgtttcctcttctttggcagagattgcacagtatggtgaagaagaatgtcgaaaaagtcatataggaggcatcgagaagaatcgaagcaatttcgtaggaacacccagctcctatagcgaaaactatgattgccaattccagaatggcgagcgatgcgtcatagagctgcttgatgcgaacgattcttccgtttaccgcgagggcgattgaggtaaccgcaatggcgataaagagcccgaagtaggaaacactagctacgggcgtgggggcaaagccttgtagcgtttgaatggtgaagatgataagcgaataaatgagcagcaagcgcgcaatgggaaagaagctgcgcggctcaattttgccggcctcttccgagggcgaagtagccgtagggttttcgcgccagagcgcaatagaggtctttctcgtgaggcagagggcgattgcgaggggcgcaatacaggatatggcaagtggcggaagcaaagtggagagtgcccgcagtatgcctacaaaaaactgccaagcaatgagcgttaaaaggcagtcgacgagggggagccccgcaagcgccttgaggcacgagatgagcagagaggctcggcagagcgccgttacgcaaagacaagcgaagggtagaactccctggaaagtttccggctgcaatgagcacgcccaggcgccaaaaaaaccgagaaagcacagtgagcaggaggcaacaacgaacgccttactgctgaggaaggtgctggtttggcggtgaaacagggccaagacgccgaatgcgagcgacgttacaaggagatgggggtattgggaaaaggatacgagtgaagcgaatcctgccggaattgcagcagaagggtcgagcatccaagcgcaagcaaaagccagagcgagagcaaaaggcacgttgcgaatctgatttaccgtcacggccttggccatgttcgacctctcgaatggtttcgtatgatagaactgcctcccggtctattttataccgattaagcctggaaaacccgaggtaatcgcactttgaggaagtggagtgcggaggcgaggaatagcttgaagtgcgcaatgcgcttcatcaaccgttttttcaacccttccgtgcctgcaatcaacctcaatctgcatcctcaagatccaatacctgcgttttcatacgtaagtgcgatttcgaataggcgccgtcaacgttttgtcgatagacgagttgggcgatggcccatgagcccaaaatcgcacatgcaataactcagttaggaaagaggaggatcaaaaatggacaaggtgatatcgcgcagagattttattgttgggggtggagtatttggtgcgagcatggcagcggtcggcctcgcgggatgcgctccttcaaatgctggcctgccgtcgactgataccgacgcatcgggcaccagtacgcataagggcgcagatcgccctctttcttcgcggcttgtcgaagtggatgaaggggatgtggcccgcacggaggagtgcgatgtcgtagtgtgcggctcaggatccgctggaacctatgccgccattagagcagctgagcttggtgctcgtgtaatctggcttgagaagacaagtctcaagggaggaacttcaacgataacggagggtacgcttgcgtacaacactcaagagcagcttgatgcgcaggggcccacagacttgcaggccgagttcgaagcttacatgcagtggcacaattggggtgcttatgcaccagggatttggtgctacctggacaattctggagaagccctcgattgggccataagccatggggcttcgatgtcaactggtggccagggtgcccttctgagctgctttgacgaggcaggcaattgggtaaacaacggcgagggtatgctcaagccgctttgggcctatggggagacgctcgataatttggattttcgcctagagtctcctgccgtgaacatcattctcgacaatgagggagttgggggtgtctacgcaaaaagcggcggcgatctcgtgcgcattaatgccaaagcgacggtgctcgctacgggtggattcgggaaaaacccggaaatgtgcgccgagcggcttcgcattcctagtgaacgagttgtatttctggggttcgatggtcaagatggcgacggtatcaatatggcgctgacggcaggcgcgcttccccaggcgccgtctgcggtaatgtacggactttcgaaggcgtgcggagaaagttggagtagcatgctgtcgattttcactcagtggccgcccacttatcggtatccgctagaaataggcaaaacgctccccatggtcaatcagagcggcgtgcgcttttacaacgagacacttgcagaagacgccgacacctcccgcctcaacacggcaatcgcttctcagtcgaaggtctttaccttgttcgatgaggcgcatgttgaagcctacgagggcgaggataaactcaatgagttcgttgccttcatgggtgttgggagcggagagttccgatccttggttgaaggcagcgactttgtttggaaggccgatagcttcgaggagcttgccgagcttatgggggttgactcggaagcattggctgcaacgatggaagactacaataatagagcgaagggggacggctctcatgacccccttggagccgaccccgcgctcatgacgcctctagaaaagaagccattttatgcggttcaggtcgaggcttgcgcctatagcacctgtggcggcgtgcgaggagattatgaggcgcgggcgatcggacacgacgatctccccatcaagggcttgtttgtgtgcggcatcgataacggttccatgcagtttaacgactatccctatgggctgcatggaggatcggggcagggtgctgcttgcacgacgggatatgttgctgcgaacgcagcttgcaaggatctgggtcttgcctagcgatcatttaacagacgaccctcatccccttctgcagcaacaaggggatcgagggtcgtcttaaagcgcacgaagcagggttatcgcaccttctctttcaaatagtcgctaggaagctcgcagctgtggtagttacgagcttcttgcttttagcggttgttagggaagtccccgtcgcttccttattcgcttctcagagcttcgaccgggtcttttttcgccgctgcgcttgaaggaatgaggcctgccaagaatgtgagcagtacgcttatgccaatcaaggcaatcgcggcttgccatggcagaatcgcgatgttttccacatcgaacaatgaatagacaatcgtgttggcgggaatgcaggccaaagccgtaagtccgatgccaataacgccggctgcgaaaccgacgatgatggtttcggcgttgaacacgcggctgatatcgcctttgcttgcgccaatggagcgcaaaacgccaatttctttcttgcgttcaagcacactgatataggtgatgatgccaatcatgattgaactcaccacgagcgaaatcgccacgaacgccatcagcacatagctgatcatattaacgatggtggttacgctgctcatgagcgcgcccacaatatcggtgtagcttacgaccttgtcttcctcgccggcggcgttcatcgcttcgttgtagttgtcaaggatatcgatcacgctttgcttgctttcgaaatccttcgggtaaatgtcgatgctcgccggcttggcgtaatcggcccaaccgaactttttcatgttgctgtcgtaactgctttgttcggtcgacatgagactcgccgattctctccctgaaagaaagcaagcaggaaggcgttgccgaagggatgaagagctcgatgctttcgtacatgctcgaccaatgcggaaactgccaggtcataattgtcgaaaacgagatcccggacgatgtcgatttatctgctgcgacccttatcgaattcaccaaaaacgagagcatcgggcgctacggctttctgcttgaccagctaatcctatagcgttgcggtgcttagcacgagattgccaaatccaacaagggcgcgtacgatacgtttcgatggcccgggacgaccgctgattcaagtcaccgggcctaaatttgtttttacaggaatagcgtctttccaggcgtcttcgcctgatggccatgatcttccttttgattattagacacatttaagctacaattcgtgtccaataatcaaaaggagggttatgagcagaagtgaggagatagccgaattcgtagaagactcgggcggcatcgcgagcgcggcgcaaatcgcgaaagcgggctttctgccgggctcgatttcctacgcccttgaatcgggcgctatagacaagcttacccggggcgtgtactgtctgcccgaagtcttcgatgacgagttcgcagcgatatcctacaggtggagcaaatgcgtgctatcacacggaagcgcgctgtacctcgccggcctttccgacagggttcccgccgcaatcgatgtcaccgtcccacacggctacaacccgcgtggccttacccaagaatatcccgatacgaaaatccaccgtctctctcccgagctctacgagctcggcatcgttaaggcaaagtccccaggagggggtactgtgaaagcctattgcgccgaacgggccatagccgacctcatttcgcagagagtttccgaaggagcggacccccagctcgtccgcgacgcggtcgcgggttatttcaaaaggaaaggcgccgacctgcctaagctcgcacggatgtgcaacgcgctcggcgtcgagaaagagttcaggatgtatttggaggtgctcacatgatgagaagtgatgcaagcctcaagggcaaaatcaaggccttggccaagaaaagcaacctgaagccccaggagctcctgcaaatgtacctgttcgagcatcttttgatgcggctcggaaagagcggctacgccgaggcgttcgttctgaagggcggcctcctcatctcctcgatgacgggcgtcgcccagaggaccaccatggacatggacacgacggtgataggcatggatatggacgaaggcatggtgagcgaggccgtcgccgccatctgcgccgtggacgtcgccgacggcatggaatactccttcgagcggatcgagcccatccgcgagggcgacgagtacgcgaactggcgcgcgcacctgcgcgcgaggtacggcaagatagacgttcccgtgaagatcgacatcacgaccgaagacgagatagtgcccgggcgcatcgagtaccgctacccgctgatgttcgaggagggctcggtcagggtgctctcgtacccgctcgaaaccgtgctggccgaaaagctcgagactgtcgtttcccggggaatcgccaacacgcgtggccgcgactactacgacatccacactttgctccgtttgaaggcgggcgaaataaatcgggattccctgcacgaagccgttgtcgccaccgcctccaggcgcggttcactcggcacgatgggcgactacgaggccgtgctcggcgaggtcagaagatccgatatgatgcggggcatctggtcctcttacgtctcggcatcaccctatgcggaaggccacaagacgagggggaggcgaagcaggacgcgttcaaatacatcgagctctactacagcaggcagaggatgcgctcatcgatcggctataacgccccgtgcgacctagagcgagatgttgcctgaagaagcttatttttccgtccaagaaaccttgaccagtccaaaaacctcccatttctcgtgttcaagaaatgggaggcagttcaaacgtgcacgggaccctttccttttaatggctggtttacgctgcggtccgttttggaagggtcgtgagcatggtggccccgttctcggaacttgcttcgacctcaaccgtgccgccgtgcagcgctgcaatctcccaaacaagcgctagcccgagtcctgcgccgccgtatgccctgctgcgggatttatccaggcgaaagaacggctggaagatgctctcacggtactgcttgggtattcccgggccctgatcttcgactcgcaggaacacgtgactgtcgttgtcgcagatggagacgttgacagtggagccggggcggctgtaacggatggcattttcgaccaggttaaacaccagccgatagaggagcgtgtcgcttccgattatcagagcgcctccactgcaattgaggacgatgtctttatgctcggcaagcggagcaaggtcggtgaggacttcttcggacagggggccaagctcaatatcgtcctcgcagggaacgctgtggagctcactcatctcaagcagcaccttggtcattcgcgacatccgctcggtttgttcttgcagcaggccgagcagctcggctgtttggggttgcgatgtgggatgctcggaggcgaacagttcaatctgcgcctgcataagggcgagcggggtgcgcagctcgtgtgcggcgttgccggtaaactgacgctgtgcggagaacccttcgtcgagccgaccgatcatatcgttgaatgaggcgctgcatcgttgcagttcggtgggcacatcttcgctgaggttgatttcgcttaggttgtcaggctgcacgcgctctacttgagcggcaaaagcccgtagcggcttgagcgcacgaccgctcacaaagtatgccagcacgccaccaagcagcgtgactccagctgtgatgcaccaggcggtcgcgccaaaagactcttgtgcgttattcacgacgaccgtgacctcgtcatcgagggccacgttcgttgggtcaaacgcctggggcgtatcttcgtcggctgtgctaagagccgagatgccactgccaattgcgtccatgtagcgcatgcccgtatagccgaccaggcagtttgtcagcatgcacgccgcgcacgtcagaagtgccgtcatgatcgttatgcgccattgcagcgaaagccttttcattcgctatcctccatgacgtagccctctccaatccgattgcgaatcgggtcgtatcccaaagcgctgcgcagctttttcctgagcgacgagatatgaacacgggttgcgttgctaaagctgttcacactgctatcccaaacgtgctcgataagctcctcttggcttaccgggcgcccctggttaagcatcaggtattccaagattcccgtttctttgcgcgtgagagacagcgcttcgccgcctacggaagcgatgcgcgccttggtgtcaaagctgagctttccgcaggttaaaactatgttgtcttgtgcgaagcgcctgagcgtgaggctgcgaattctcgccgcgagctcgtccagatgaaacggcttggtgaggtaatcgttggcgccggcatcgagtccggtgactttatcgaatactttgccacgtgcggacagaatcagcactttggtctcgcggtcggttttccgaagtgccttaagcacggtcatgccgtcgatacggggaaggttgaggtcgagtaccacgaggtcaaagacttcaacgcctagtaggtcgagcgcctcctgcccatcatggcagcagtcgacgctgtatgccaagtttcgcaagctgcgcgcgattgcgtcacatagagctcgctcgtcctcgacgattaaaatacgcataacaatctccttgcacatttcaaatcgcgcttaacacggattttatggtcgatatggttcaatggttgcgtaacgaaaggagtggtcaggttgttcaaggcggtaaaacccatggtacaggtcgctttgttgatcgtcggaattgccatggtgtgttttggcgttatgcgtggcgaggcggatgccgtgctggccaaagcaattaggctgtgcttggagtgtatcggaattggataaaagagaaaacactgcgtcgcatattttggcccgatttcgcggattcattcaggcggtagcaacgctcattacgaatatccatctgccaaacttcgccaaaggcggcatctaccaaggcgcggaaaaaacggtttgcgtgccggggcttaattgctattcgtgccctgcggctgcgggcgcatgtcctatcggtgcatttcagtcggtggtgggctcgtccaagttcagcttttcctattacgtcacgggcacgctcatcttgctcggcgtgttgctggggcgctttgtgtgtgggttcctgtgtccgtttggatggctgcaggagctgctccacaagattccttgcaaaaagctctcaacgaaaaggctcaaacctctcacgtatatcaaatacggcgtgctgctgcttgccgtggtattgctgcccgtgctggtggtcaacgatgtggggatgggcgacccgttcttttgcaagtacatctgtccgcagggtgtgctcgagggcgccattccgctggcggctgtcaatgctggaatccgatctgcgctggggcagctctttacctggaaacttttcgttctcattgccgtggtggtgctgagcgttttgttctatcgccccttctgcaaatggatttgcccgctcggcgcattctatgcgctcatgaataaggtgtccttactggggatccgggtcgatgcatgcaaatgcgtctcgtgcggcacgtgttcaaaggtttgccagatggacgtcgatgtggtccgcgcacccaatcatgccgaatgtatccggtgcggaaagtgcatcggggcctgtcccgtcgatgccatcagctatcgctatggcctggatgtgtcggaagaaaagctccctctgaccgccgataaaaagtaagcaagtttcgacaaaacggaggaatgaccatgaaactatctaagattgcggccctgtttatggtgccggtgctggccctgtgtcttgtggcgtgttcggcgcccggtggcaacgcgagcgaatctacgggctccgatcctaagatcgcggagctcattgcgcaagagccggccaacgccgacgaggccgccgagctctatgcgaagctcatgcagaagcagaacgatatcctctcgagcgataatgcgctgtgggaaaaggtgtttcttgccgccaataaagatacgccgatgatcgaggacggcagcaattatggcgatttcctgctcaagaccatcgacggcgccaaggatgagtttgcagcggatgagttgaagacgctcaaggccggtgcgcagcagatcaaggagatcgaggacaagctcgagagcctggaaaaggagtttcctggctgtggaagcacgccgagcgcaggcgagagcgtcgacgcttcggccgctggcatgacggctggcgccgatgcttcgagcgaggcgacgaagttccccagctttacgggcaaggacttggacggcaacgacgtgagcagcgacgagctgttctctaagaacaaggtcaccgtcatgaacttttggtttaccacttgcaagccgtgcgtgggcgagctgggcgatcttgagaacctgaacaaggagcttgccgagaagggtggccaggtcgtgggtgtcaattcctttacgctcgatggcaacaaggacgagattgcagatgccaaggacgtgctgagcaagaagggcgtgacatataagaacatctggttcaagtcggatagcgaggccggcaagtttacgtcaaatctgttctcgttcccgacaacctacgttatcgaccagaacggcaacatcgtaggggagcccatcatgggcgccatcagctccgccgagcagcgcgcggcgcttgacaagcttatcgaccaggcgattgcgaagagcgaacagtaaacaagctgaactatgtatattgaggaggtctcgggaatcccggggtctctttgttttcgattcttcgagatgcgaatccgctcctgccatgaagggtttcagagcgggagcggattaccaatgttggcaagacgcgcgtgagcggttgttagcggtcaatcacaaaatcgtccatttcgacgagcttgcgggccttctcttggccttcgatcgcctcgcggaggcgcttggtgtaatacgtcatgccgttggcgatgtcgatgcgcaggccaatctcggtgcgctgatagagcgtcagcgcgtaggggattacggtcgatgccgcaggagggggcatcggggtcaatgagcatagcggctatgcgaatggcgggctggacaaactcaacatcgtcgcggacaagctcaagactgcgttcgtacagacggtatgcttttgacttgtcttgtggcacggcgcgaccgcggccgaacatgtcgccgagtttgtataccgcttcgctggagggcgcaagcgctgcggcgagcgaataccactgataggccttggtgtggtcgggcttgccggtccttccgtactcgtagatataaccgaggttgatgatgctctggaaacaacctgcgtcagctgccatttcgtagagttccgcggctttggcgtagtcctgttcaacaaggtctcccatatagtagagggcacctaaatcgttcatgcaggctccgctgccggatgaaattcccagtctgtagcccagtccatgctggagctcaaaggtatttgcgcgaagaccagctgctaccgatgctgcattcgagggataaagagccgacgccagcaggcttgatgctcgacgcggaggagctcacgtcggcctacatcctgcctagaaaggacggcgagagactctatttggacttgttcgccaaaggggaataccgccccgagctcctcttcggtgagtgcgccatcgcccaagccgctgtcgcgagcccggaagcgcaatggaagcttgctaacttgaagaagatgaagcgatagcgatatgtgcgggttggtctccgaatcactctgttttaagccatccgctacgaatcctggcggaaacccgggaatgattaaaggagcgacctgcgatttcgcgaatcagttgagtcattcccgaaatcgcgaatcaaggggctgattcgcctaaattgcgcacgaatcagcccttaggcggtatgacgcggcacggatcggcagcacccgtactggattagtcactgagtgggagtaatgtacagtaaaaagtgtattagttttaccagttgataagaggctttctggagcgtggtttactctccgtagtttgtcgggagaaggtgcaatccaaaggaaaaccgcagtacagcaccgaaaagggttgggtagatttgtttgtctacctaacctttgttgtctcctggttttaccagatggccaacaatgacccagaatggccgcacgtgatttctgctgaaaaggaaccatttgggaaccagggggattattgggaaccagcgtctatcacttatcagaaagttatcgttccttcttaagattcccttacttaccaacgaaatggcttactagcagttcgccgatggcagacatcattgccttgtactttgcgctgtcctcaaaaagcgaggtgaacgattctgtgttctccacgtaagcttttcttgcaacttcatcaaaagccttcggtaggacgctgttctcaaagacaacacggccatcacggcggatggtgtcttcaatttcaggcattgcggacatcctctgccagagagtcgtgatgaccacacggtcgccctcggtaaactcgccaagccactgttcattgaatttatcaatgagggcctgcaggggatctttcttcttgtctaggctactgctaccagaccccgaagagggctcgagcacgccgccaccctcctctaaggtgatactgccctcaaattccttcttgagcttgtaaaagcgcatctcaactttatcgtcgatgccctcaacagggattggttcggccttcagaaagtgcctcaggtagttcaggtagacatactccttgtggagatccttgtcaaacatgcgaacaatctgggtgatgtacgaataccacttgcagaaactgcgcaccttccttcggacctgatattggcgctcctcatccagcaaatcgtactggataatagcgggcttcaaaacaccggcaagtttcccttgcaggttcgcgcggtctttgccgccctcggtaaaggcgatatctgcagcggcctcgatatccgattggtcgtaaagcccgaactccccgatctccctctgaaccttgtacaacaggtcagtattaatttgctcagtaagagaggtctccgtatagaaacggctgaaggcttcctgtatatttgcaggatcgttcacgaagtcaagtacgtaagtgtcctctttgtcgggatggatgcggtttacgcggcaaatcgtctggacggctttaacgtcacgaagcttcttatctatcacaagggtgtgaagcagcggctcgtcgaatccagtctggtacttctcggcaacgatgagcatgtcgccataatcatggaactctgccttagtctggctctcggcaaccctctggccgtcatggcctacattcattcctggctccgtgtattccttaccacccggatcggcgggatcaactatcgttccgctgaaagcgaccagaacctcaaggtcgtcatatcccttcttctgcatataccgttttacttcgtggtaatagcgcacagccgcaaggcgcgatgctgtgacgaccatcatcttgcccttgccctttatcttcttccgggtaacagagcagaaagtctcaacgatgatctccgccttctggcccaaagcgtaaggatgcaactccttgtatctgcgcaataatttcagtgtcggactggatgggacatctggattgtcaggaatcgtcctggcaatttcaagcgcctcactgtaggagacgtaatgggcgagaggatccatgataaagccctcctcaatcgcctggcgcatcgagtagatgtggaacgggcgataagatccgtccggatgttccactccgaatatctcaagcgtctgctcctttggcgttgcggtaaacgcgcagaatgtcaggttctcatgtcgaccatgcacggacaaggccttagcgagctcatcctcccagtcttcgacctcaccttcagcctcgacctcgatttcggcgtactcccgcaaggcctgctcggtatcagcgagggctgccttaagcttgagcgcactggtaccagtctggctcgaatgggcctcatcaacaatcacagcgaaacgttttccgctgctttcgacctcctcaaagattacagggaacttttgtaaggtcgatacgataaggcgctttccatcgtttagagcatcgcgcaagtcgccagaatctttctttttgtcaataatacaaacgctgccaacagcatggtcgaatccgctgattgtttcttgcagctgatcgtcaagaaccctgcggtcggtgacgacaacaacagaatcgaacaagggcttgtcacccctaaacagcgaggcaaatcgatacgctgtccaagcaatactgttcgacttccccgatcccgcagaatgctgaatcaagtagctgctgctcgatcctgattcgatgacatccccaacaatctttctgacaacgtcaagctgatgatagcgagggaatattatgcggttcttcttctgtttaacctcgatacctttggagtcaagtttcgtttcttcctttacttcaaggtgaataaacttctggagaatatcaagcaagctatctttctgcagagcctctttccaaagatgcgaagttgcataaccatgtggattattaggatttccagaaccaccatcatttccagctccgttcgaaccttggtcgaacggcaagaaggaagtggtcaaaccttcaatctttgttgtcatcatcacgttgcaaagatcaacggcaaaaaaggcaacgacacgattatcgaatttgaacgattcttcgcgagggtctctgtcctctcgccactgacgcatggcatcttcgacgttctggccagtgaactgatcctttagctcaattgcgacaacaggaattccgtttacatccaaaaccatatcgacagaatggctaggaatcgtctcataatgaaattggcggatacaacggcaaacattttggccatatcgcttgttagcagcatcattcaggctcgactctggcttgaaatacacaactttgaaggctatgcctcgatgtttgaaaccatgttttagtacatgaacgatgccgtaaagacttacggcatcttgaaaaaccttaaagaacttcttctcaggatcggaattgcactgcttctcaaaacgctcccaagcttttggctgcgtggtctggacaaaattgaccaatgttgcgatatcaataccttttccaggcatatctcggtagccgtgcccgtctacaacctgataggttccgtcttcgacgtataggagggattggctgtctttagatttataatacccacccgcttctgaacagaggaaggactcgatgtcttcctctaaatttttctcttttgtgacaatcattacatagccctccgtttaccagtaacgatttcgtacacaaatgtctcctgaagcttgttgagcgattcaagggactcactcaagcgaccaagctttaattcggcaagtacattctgtttgttgccgtccgtcatatcacttacagcgtcatcgatagcacagagtctctccgtcaccacatcaaacgaaatattctcgatctcggcctgaacagacgccctggcagaacgaatttgcttcaattcgtcagacagataatccactatccttttctgttcactgattggaggacatgggataacgatctttttcatgtccgaccaattggtcgtccagatatcgctatcaattccatgcccccatcggtagaattcctctgcaaaccttggggtgtcgaacagcaggtcaaagtatctcgaaacaattggctgcctcggaaaaaggactgtagtaatagttgaaacagatccatcgtatggagaaaagccgcaagaattcctacggtcggatcggctgttgatggcaaagtcgccttcttttacaagctttcgattcgcatggttatcgcttttagcaacagaatcaagttgagggactatgcccttcttggttacggaaagcggtcggtaatcttcatcactcacttttgttgaccttaattcgaacaggtctccaatacgaagagcactccaagattcagggatgtcacctagccatgtttcgcttgcttcatagcaaatctccggatcaggaagcatggcgaaacgcctaccaacttctgcagcactcctattcatcgagcaagaaagttcctgagccgcgtcattgacggtttcaagatccataaattcatagaagaacctggtgaatgggatagtgtaacctgttttttgcttctttctgtttagccacgcatgctcattgaaaggcagaactttcttttccatgtattcgtcaatatcgtaactaagcggaatatcttcggtatcttccctctcggcatcagcaaccgggctccctttcttatcgaccacaattgacccatcagggttaaacaggggttcgcagacgccaaccctgttgtagccaaaatcagcagcatcgcaaaccagagaacgtacatgaatggcattgccgctttctgaagaagacgagtagtctttcgtctcaaaatccgagaacgcctcaagaaccaaatcacgacagaatttggttatgtcattcctctttttaccaatgggtctatttcttggcacgcaacaacccgaggcatcaatcaactgcacttttcctgctcgtttttcaggcttgcctttattgatgacccataaaaatgttactaaccctgtgttgtagaaagcgtctccactcaaacgaataatcgcatcgagccaatcgttttcaagaatataggaacgaatcttgtcttcgccactttcaggttttcctttataaagaggcgatgcgtcttggacaatcaccattacgccttcgtcctttagctttgcgattccgttaagcataaagagcatctggccatcgccacgagcgggaagtccgacatggaatcggcttccagtaagcttggcttcttttctgacggcggtttcttcaagcttccagtcgcctccaaaaggcggattcgaaatacagtagtcaaatttataatccgcgaatttgtctgatgatagggtgtctccaaaccgcatattcgcatcgtcttctccacgaattagcgcggatgccttggcgatgccaaaggtgaaaggattgaactcctggccgaagcaagtcacacgagcgtcatcgtcaagctggcgcaaacgctcctcggtgcagctgagcatctgggaagtgcccatggtctgatcgtatacggtcttggagatgcgatcgccgtcgaagacatgggggtcggcggcaatcagcaaatcggtcatgagatagacgatgtcgcggcttgtgaagtgggctccggcatcctcgtcataggattcggagaaccgctggataagattttcgaagatgtagcccatgtcaacgggcttgatcttctcaggagacatgtcggcgcgctccgcgcagaagtcgctcaccacctggtacagcaaaggtgcatcaggatcgctcaggcgctcaatctggcggaagaaatccatgcgcgccaaaatgtcttgcacgttttcggaaaaaccgttgaggtagtccttgaagttgtcctcgatgttggcggggtcggccttgagcgtctcgaaggtgaacttggatgtgttgtagaaggggtaaccggatgcctctcggaggaaaccgtccttgacggcaaagttcttgtactcctctgcggcttccacgaccttcccgtgcgttggcagcaggcagtcgtgaaaacgtttaatgaccgtcatgggcaagatgacgaggccgtactcgtggggcttgtagggaccgcgcaacgtgtccgcaacgttccagggtagcgtcccgaaagttggtgtatcaacccgtttctggagggcgggcgaagcctgcccgagaaaaacggacatcgtctagaatcgtcaatcaccacaaaa

SEQ ID NO: 8757 - DNA, 14878 bp, Unknown
  gut microbiota DNA sequence
tcgggcgcaggatgctcgagctcgtggcgaacgccgcgatgtcggcgagggccgacgaggaatgcggggcggcctacggcgagcgcagccccgagcggacgaactcccgcaacggctaccgcgagcggggcctggccacctccgtcggcgacgtgacgctcaggatcccgaagctgcgctccggctcgttcttccccgacgacctcatcgaacgctactgccgcgtggaccgcgctctggtcgcggcggtggccgagatgcacgtcatggggggtgtccacgcgcaaggtggaggccgtcgccggcgagctcggcgtgtcgtcgatgtcgaagtcgcaggtgtcgcgcttgtgcgaggtcctcgacgccgaggtcgccgcgttccgccgccagcgcttcgacggcgtgcgcttcgcgtacctctggctcgacgcaacctacgtgaagtgccgcgtggagggccgctcggtgtcccaggcggtcgtgaccgccatcgggctcgacgacacgggccacaagcgcttcctgggcgtggactgcgtcgacacggagagccgcgcgggctggagggcgttcctgtccgacctgcgcgcacgcggcgtcgagggcgtgaggctcgtcgtctcggacgcgcacgaggggctcagggcggcggcggccgagaccttccagggcgccgcctggcagcgctgcgtgacgcacctcatgcgcaacgtggcggggcgcatctgcaagagggaggaccagcgccgcgcccgcgaggccatgaaggccgtcttcgcccagaagagcccgatcctggtgagggcgtgctaccagcaggcgaccgaggagatcctgaagctctccaagggcgccggcgaggccctgctggaggccgaggagtcggcgctggcctacctggcgttcccggcgtcgcacaggatcaggatccgcaccaacaacgtccaggagagggccaaccgcgagatcaagcgccgcgccaacgtcgtgcaggggttcccctcgcgcgagtcgctgatacgcctggtgggcgcggcgctgatcgaggccgacgaggagtggtcggtgcgctgcgtcatctccaggccctcgctcgcccacgcctggaaggcgcccgagcgccccgccccgacggaggaggaggtgcgcgccgcccgggaggcggcccgcaggatcatcggaagcgcgattgacccgaagggggacgaaggctaagattcaccgagcaagggtgccggcgattccaggcgacgacccttgatacaccatgattcgggacgcgacccgttccagatgagcgccgccttttcctgaatgtttacgccgactttcttaatcaattcatcgctgttcataacagcccctgttctggtggattttagcgagctttcgctatttctggttttgatgcatttcttccgcgcgcttctgaagcgcggcgaaggtatcggagtcgatgagcacaagatgctcggcaccgttcttggtgaggtagatcggctccttggtttccttggcaagcctggagagctcgccgaccttacgctgaagctctgttacgggacgaattatggccatgatgtgcacctttcagccattttatgcatggtcatattttacatagaattccatgtaaacgcattagcttgttgccaagggacgttaagcccggttattaggggcgcgggagatcccccgcatagcctgcatcagcgcggcaagttgcggcgaaagacggcccgttaaaccgggcttgtccgacgccaagggctacttgctggattcactatctaaacaatcgttagtcgaattagcaacacaagtagccaacttgcctatttttcaggcattcagatggttggatctgagctatcccgaattcgtccagcacaatttttcatacctgaaaacgaaaagggaaagtatcttggaacagcaataatcggcgaacagtcaatcgggttatccccaaaactcaacgcaattatcggcgggcgtggcagcggcaaatccgctctacttgacaggattgcactctcgctggacaacgccagatttgaggatccggttgatgaagaaaggattgagtttctgaggaccgaaatccccgccgttacttcattatcgggtacgagcctgtctgacggctccttccgctttgactatttcgatcagagctatgtctcttcgctgtttcaaaacaaaggtgaagctttcaataagaaattgaagctctacttcggctcagcgtttgatcaagtcgaagagatcaaaaccaggtcaatcgaaagtgaatatagtgttcaatttaacgagcagcttcttgaacctgaagcagaacgacaagagaatctaattgacttcatcggcagatacggcgttgatcatgacgagaagttatcaatcaagttcgaaaaagctcctacggcttcagcagtaaaaaatatacgtcgattgattatgcaactgctttggcaaaaatcgacacatcttttaggcgagacgttcctgaggcggttaaggaaaatagagatgttaccgaagctttccgtgcttacaagaaagccgttcttgaagcagctcgtgaagcccgtctttcccatcttaacgatagtttcatccataaagcccttgaagacaagctaaaggacaagcgaacccagataagcaatacaagcaaagcaagacaagaagctgtcgattctttccgaagcgcattcgaaagcgaaacacttgtcgcaaagcggagaaccgccctaattagagcttatttccacatgcatagcaccatgaagctccatcacaagaagttagggtttgcaaatggcgaaacagcaaatgcttttatgttcaagaaagagctcaacatccaagatcgccgattcccatttggttcccaaactcataaaagctagggacaatccgacaaactacatgaactccaaacaattagagttcactggagaaaacgaatccctgaatgaggcaagggaacacttgttctaatatttctgtacgctttggaataccttgacatctgttagcacccagccccgcgcgctctcgcacccaccgggctgggtgctttttccgtctctcccggtggttcttatatggcgcgctttggtgcctcatgccatctcatgcgtcacctcgcaaccaacagcagccgactcaatctgtctctatggcacccctacaaccagacattggacaaatgcgacattaccccaattcctcttcgcgagtcggatccttttcgaacacgagaacatggctcaagagcgtcctaggctcgacaccgagctcttcggcaagggcgcagatggcttcatcaatgcatgaaagcctcgattcctcaagacttcttagcacctgcggatcctcagtaaggaaggcctcgatgccagtgagcctgaaccctagccttctggacatgcgccggctgttgccgttggcggcctcgatcttcgcgacaaaccccgttggcccgacgacctcctcgaacccaagcaggaaagcccgcatcgcctcggatcccactcccctcgcctggcaatcgctcagcaaattgatcccgagctcaaaagggctcgaagcaaggtcaggtccatcatcgcctacagctccaattcgtcgacaatcttcttcatcacaagagcccatctcagctgctgggcaatgaaacccggccaggcatcttggttgcccttgatcctgcagccttccttgtagaatcgcagcccggatgctttcttggcatcgaagggcttctctacaagccctagccgctcctcgaacaatgacgcgttctcgatagccttgcgaccgatctctttattgtccggcacgtagaactcaatgccgatgcagccgcgctgcgtatcgacgagcaacgcgatatgataggacgatgttccgcagcgcagcgtcgtccaatgatccttcgaaggcttctgcgggttgaaaaccttcagaaactcaaacgatgcctgcgcgacctcacgatacttcgtccaatacgacagcttggtgcgttcggtctcggaaaggcactcgctaagtttgatggtcttcgtccactcgtttggctgttcaacgacgttgaagcgcggcgcgggcaacgagtcgccgatagaccacagctctatctccaccaagaagaaaccgaagctgctgtcggtgtgctggttgagccactcgatcgcctgcctgtgctcgtcgcgcgcgcgggcaacaacccagatcacaacttcggcgcccttgccggcagcgtacgtgatgactttgcccaaatggtcatggttcgtatcctcgagctggttttcgatgacaaccttgcgcccggttccagactcctgcgcgtagatgtcgacgttgaacgagccgacggatgactcggtctcgacgagctcgagctcgatgccgatcgcattgccgagcatgttgaggttgctctccacggaaagccacttagtgaagtcgcgcgcctcgttcggccacaccttacgcaggtcgattctgttgagttgatctagattgcaaatagccacattcacccctcgtatgcagaccgccgatcccccttcgtagtctcgcgattaaaagacgaaacatcccgaagagacagccgttccgaaaatgacgacagcgcgaaggctcctctgcagggatcagacctttttgaccaggtacgctagcaccttccctatgatgacaaaaggagcaagaagcaacgcgagaagagctccgaggcatcccgactttttcataccttccccttcaactaattgctacctgcaaaactcagcatacaacaatcgacacgcctaccgtgtaccgaatattggacaaaaaacacttttctcggtttccacccacatgcccacaccccacaccaaccggctcctcgtcgcgcatcgcctaaccttaaaaacacctgaaatctcgtttgacgtggcataaaagaccgcagcaacaaaatgccgttggacgaacccacctcccgggcgaaaccccgcagcaccacggcgcaaccgaaaacacagaggcagacaccgcatcaccaaccgaagcgaggagaccgcgatgaagacccgcctgaaaatcatactgcccgcatcgatcatattgatcgccctggtcggcgttgccatagcggcgctagcgcttccaagatcgctcgcgcccgaacaggaagagcgcatctcctacgacaaagaccaacaggttgcgctcatcgactcgcagcttgccgggatagacctcgaaaaagtccgtgcgaaaaaagacctgatcatggagaagtccatcgaggacctgcacgcggcgatctccaggggcgacttgacctacgaagaactgacggcgttctacctgaatcgcatcaaaacatacgatgccggtgaaaagggcatcaacgcagtagcggcgatcaatccgaaggcgatagaggaagcccgcgccctcgacgcgagctccgcaactccggcggggatgaggggaatccccgtcctcgtcaaagacaacgtcaacacgaacaccatgcccaccagcgacggcacctacgcgctcaaggacttcacgccaaaagacgacgctgacgtagtaacggccctgacgaacagcggtgcgatcatattgggcaaatcgaacctgtccgaactcgcaaacttcatggacacgaagatgccgagcggctacagctccaaggccggccaaacccacaatcccttcgatcccctcaacctttcgccggaaggatccagcttcggaagcggcgcggccgctgccgccaacttctccgcagtagcgccggtgaaaagcctttccgatctgatcgccttcaaccagaaagacccgagcaggcgggcgaaatatggccaggatctccttgaagacgcgaacgaagtgaccgaattcgacaaagcgaaggtcgaggcgatggtcaaaaccgcgcaaagcaggatcgatgacctgcttcgcgacgagaagctcgacgccctcgtgttctacgacaacgaaggcgtactcgtgccagccacggcgggataccccgagctgacggtgcccgccggcgtctcggacgaaggcgccccaagaggggccaccttcgtcgcagggagaaacgaggacgagaagctgctcaacatcgcctacagcttcgagcagaaaaccgccgcacgggctatccccgagaactacctgaattagaaccgcccttgattgacgagcaccggagccgctgccaacggcccctcttggagaatagacagcggtccgcctccgccttcaaccttggtagtagcccaagggaaatagaatcttgatgaaacgctcgacgcctcccatcgactgatcttgcaaagtgggaatctcaggaaaagctaagcacactcacaatcaaccgcatcgacaggatgccgcattcaacaccattgtacgggatttcccgtctccaacgacgcagccagcaaagacccgattcgttctgccgtgagatagcgaccttcatacataaaaggtgcctccctgggttcgatccagaactcgcgtacggtcttcggctctccgcttggcccgatcgagtcgaagatgcgaagacgctccccggtttcgcaaacggttatttccatttcctgggacccattacattctgcgggaccgatgggctcttgcctgaaacgacgacttgtcaccctgcgatcctccgtcgcaaaatagactcgatcgccatccatgccaacttccaaataaggagccatcataaagggccccgtgaacctatcggcgcaagaccatataggctcctcaaacccctcgcaaaccaaagagttgaaaacaagatgcttcgcaaattcaacaagttcgtcaatctcctctattgcttcagctgccaactccgccggaaaactgccaccatcgccgcccggcaaaagatggctcaagatcgggtacgcgacctctccaccaaggcttgcgacgatagatcgaaattggccaattcccgaccaattagatacgcactcgctaagatactctctgccttcatgctcgcacggtttatccaaccagtcagaaaagcggcgatcgagagcaccatagcacctcatgtactcctcgaaaccaagctgcactaagaaacaatcaagcatccgagatgagagtagtccttccgcatcccggtagacatcgtccatcgtaaaaggctcaagagggttcgaaagttttccatccctaagacaattgcacgcaacaaatgcatcgagacccatttctaccatctcccagccaaccactgcagcgtcacgcccacgcccgagtccaacttcaaacgacgattatgtcgatactgcaatcatatcaatacagacgatgccgcgtactccacggaacggacgtgagacatcgagtaaacgcgtaaacgtccgaaacacgagcctctcgaaaatctcgctaaaaaggcacacgaacgaatccccgcgatcgccctgccgccattcgctgagactcaacgatgccgccataaccaagctccagggttcttgcacggggtccacggaccctcaccgcataaagcacgcagacgacgtatcattctttacaacatccagaaccaaacccgtataatattcgaatgtagtttcaactcgatttaggcggcatcgatgacctatctctatggcttgacccattcaaacaaagatttcgaaagcggagatgccttcgggaaaaacacgtttacaacggctttccccatcgcgttggcaaactaccttgcgtgcgagaagaatctgccgatgaactacatcgtagccgacctcggcgagggcgatgcaccgacaacaaaacacaagctaacaccgctcaaggatataataggatgcgatccgtacgatgcggaataccacttcgaagacagcttcgagcaatacagccaatacgccgtaaacgaagcaaatcgctctgatatagtagttaaaaaccgcataacaggtgacgaagtgtccgccttcgaggtgaaactcgttgcggtgccgacctccggcaccgcaagaatgcctcgagacgaacaatgctgcgagctggttgttcgcccaccgtctatcgagcagctctgtttttcgtttgccgcatcgtttggccccttgcgcagacaagaagtcggtgaagttattgttgctgaattaggcagccccatcgattacgaatggtcgaacgaagacttcatgaagaggcaccggagcaatgttcttgcagcgtcaaacgagctgatcaggcgctgcatacccaagcaaaagcctctcgttctcatcggagaatggagaacgcagggacaagagccggtgcttgataacgaatgctacgatgtcttctttttttccaacgccgcgttccttcagctcttcacttctgcaatgaagcgagaaatcgcgacaagcacttcgtccataggtcgaccagcacgagccttgatatggttcatcaagtcgatgttcgattattctgcgcaaggacgcgtcactttcgagcgtacgcattcgcttgtgacgttcggcggtcaaacggacaaggcgggatcattcacttctggcggtattcggcctttcatcaagtcaaagcatttcatccatccgcgcatttccgtcaatgaaactaatgaaatactgctacccgaaggcgcagcgcttctcaagcccgaacgcagactggacgccgtccttattcatcgctcgatggaagagctgcttggtatgctgcaatttggcgagccacataattagcgagcaggacgggaacagcattgccgataatctgctccgcgtcagttttgcttttcggccacgtccagttttcaaaagtttgaacgcgagcgcgctcctccgttgtaagcggacgagccttggaagcgtcggccttatcgccatggtgtccaggatagccgggcgcaatcgggcgatttaccccacgcaccgtcggacaaggttcgtcgatactgaaaatcgcacgacgagcataagagcgaggatgcctgtaaatatattccgtgcctaacgcatccccgaagtaatcacgcatggtcgtcctatggtcagacaatccagcatccaagagttcgcctatttcatcctgcttgttagcgtttttccacccaatcgtgataagccgcttcctcgattgaggaacaccgacacgagaagcgtctatgacgcgcttgctgataccgtaacctgctttttccagaacttttatcgctttttcataagcacgagatttgtctgcacgaggaacgttttccattaaaaagaaagtcggttcaagctctttcactattgcggcgtatttctcagtcagatcggcacgatcaccctcagtacgcttgcccgcagacgaaaaatcctggcagggaggtccgccgatcacgccgtcaatgcctttgtactcggcaagcctctcaagcgaagcgctcaaatcgccgagatccagcatttctccctgatcaggattgttagcactgtacgtgtcaagcgctgcttgccagttgtcaaatcccacaagattctcgaatccggcagcacgaaaaccagcagtcagaccaccgcaaccgcagaatagatcaatagtctgcactgccaagtctcccctcatgtaagcaacgaatagtataaagaatatattatactcatgtgatgccctatgctttcgctttattcataaacagccgagggaacacacaaaagcttgatacggcggttgatgtggttgattcagcttgaccgcaggcgcagtctcggcactgcaatcagactgagcgaccgtccttggatttcgctcatgaatgctcaatttcgggtatcgacacgttttcatccgacagactcagcatccccatcgtctacagcccgccctcttcccagcctctccaactccctcgccacttcgccgctgatgaagcgcagcacctgttcgtcgggtcgcggataggcgaagggggctataccgccataccagactgtggcgctatcggcgattacgagattggggcaggcttcgcggaacgatactcggactccagcttgcttgagcagcgcggcgacatccgcgatcgcctgcgccttcttcggctttgcaccttcggggtcgggcaaagtcgcctgcgcatccaccccgcgcgccactgccgcctccaagcaaggcgccaacgactctgcgcggcgcttgtggacttccgagctagccaccaccagcgttttcgccgccttcgccacatccgattcgaaacgctccagatacgcctccggggtcacgaactcgccgcgcacgtcgccctcatcgactgccggacgcagttcgtagccttgcgcagcgtactccttcaggcgtttacgatacatgccgtcgagcatccgcacattcatgtcgacgtagtcgtacacgaccacctcgtccttcccctcgcgacgtcggtggaggcgccccacgtactgcgctacgagcccgctccatgacaccggcccggccagaaacagcgcgtccagacgatcgtcgtcgaacccttcgcccgcatagcttcccgtcgccacgatagcgaacggcttcccggaagcgaactgtccgagcatgcgcagcttctcgcgcttgattctctgcggatccgatcccactagcagcatcgtctcatagccctgcgcggcgagcaacttctccaatgtcgtcgcatgctcaacgcgccgcgtcaagacgagcgccgtccctcccccgtcaagcacgcgtgcaacgtcccgcacgatcaggctgttgcgcgactcgtcggcgcaaagcccgttcatcagctggttgaagttcttctggtcgacatcgtcgaggcgggtcttcgtgaaacgcggcaccataacgcgcgcaagcggctcctcctcgccaaccactccctttcccactcggtagcgaatcgtcccgcattgcatgaacacgatggcctgcagtccgtcggagcgcttaggcgttcccgtaagcccatgcacgtaacgggccttcaccgctcgcatgaccttctcgaagctgaaggccgacacgtggtggcattcgtcgcagatcaccattccatacgtctgcacgaggctagccacgcgtttctcacccggaaggtcgcccttctcgaacagggccggaacaagcgcgatgtcgacaacgccgctcggcaggcgtttccctccgccaacttgaccgataatggaacgcttcttcctgcttttgcggccggtcggcgtcagcaattccggcagatcctcgtcaatgccgagaaattgctcgagacgatccctccattgttcgagcagtgtcaccttctctacaagaatgagcgtgctcaccttgcggcatgcgatcaggttggcggcgaccaccgtcttgccgaacgccggcggagcaaccagcacgccgatgtcacatgccgcgagtgcctcgactgcgggcacttgcttgggccgcagcgcacccttaaattcgaccttgatcggctttccctcgcaacgcgcctcttcgaacatcggttgcgcaccgcacgttgcgagcagctccgccaccgagttctcgcatcctcgcggcagcccgatccagtcgccagcatcctcgtcgaagtgcagtacccgctccttgccgtacaccgactggcgcatggcctgcgcgcggtagaagtcagggtttccgaatgcggccacacgcctgatccggtcgatcgccgcagccgacaagccctctttcgacacgaacagcaagttcgaacgcacgatgcgcaccagcgcgggcatgtcccctggtcccagcttcgcgcgagccttcgaagcccatggcagaactgcgcctcctccaccgcccttgcacgccggtgtctccgcatcgagcagctcgctcgcagacgaggcgtctgcgtcttccagatcgccgaggatgcgcttaccgaaccgccgtagtaatcgaacgaggtcggcctgcgtcatacgctcgaccgacgagaggaacctccactggtccgcatagggccggaacgacgcatcgacgaaaagcgagttgccatcacgccgcgcatctccctggaacggcagggcaatcgcgttgccgaagccgccggtcggcgtggagtcctggctaggaaacaggcggtcgtacgattcaaaccgcacgttcggatcgatccgcatcgcgcatgtcagcagggcgcatccgagcttgcgggagtccgacgcagctactggctcgctgaagaacatccacgcatgcgcgccgctgcctgaccgcgagcgctcgatggcgaccggcacgccctcccgttcgcatacccttcgaaacgcgccgaccgactgccaccagtcgtccttgtcgaagtcgaccgcgagcacgtgcgtcttgtcgtcgtcgatgaggggatagccagcaacgattccgacgccctcccgccctgtgccgcggaaatgcgccctgagaaccccaccgtcaagcggcaagaactcgcgatgcggacaatctgcgcacttgactcggggctttccgcacacaccgcgatcccactcgtgagcgcacgcaggcgtataaccgacacgccccgttttcttgttaaagtagctcttcgcatacacatcgccgcgcatgacgaacaacaggttgaacagcgcaagcttctcggcgctcgagctcgccgaggtcacgatgccatcgtccgccgattgacgcgcctcgaaccgcgcgtacccggcctcccacgcctcgcaagtcgcgtatctcctttcaccgtcgggcgcctcgcatagtacaacctcgctgccgtccgtcgccgaagacaatttctcgacgaaacggtactccacgttgctgatcaacgcgcgtacaatctgcgacgaatcatcacccatacgggctcccatctcgaagaacgacttttgtagcatactatgagatgcatccgatctgcaattgctccatagtcgcttcggacttcggctgactagctcgtcttaggcagcacgcaatcaagcccctttcgcgcaagcaaagtccattctctcccaagatgtgcacgattagcttcgcagcattctcaatctgcttgcttatggactctaagcgaattagtcttttcaaaggtacgccaaacctaatggcgaagcaaaatgtcagaggaggacaatcgtggctgttcccactcaatcggaaatgttcggggtcgtcttgagagtcatgggcgacgatattgatcgagggtggcgagacgtgcagaacgatgtagcgcgcgaagtcgggttgacccaagaagaaatggaacaatcgacgccgagcggcgttcccacttacaaaagcaggaccgactggagtgtatcccatttgtaccgcgcaggcttggtcaaccgtatttcaagaggcatttatcggataagcgctgaaggcctggcgttccttgcagaaaaacccagcgacctcgaggtatatagaaaaacctgcggactcatcaaacaaaggaatccccggaacactaccaaaaacagagtagagtccaagatcgacgagcgccaggacgaagaggaaatcaaatcccctcaagagatgatagaagacagtattgaagaaataaactcttcgctcgcagatgagcttcttgacacgatcctggataaagacccgaggtttttcgaagacctcattgtcgacctgcttgtgaagatgggttacggacaagggagagcaactcagtacgtcagcgatagcgggatcgacggaatcatcacaaccgacgcgctcggttttgatcccatttatacacaagcaaagcgatacgccaaggaccacagagtcggcagacccgaattgcaggcattcgccggcgcgcttggcaatgtggcacgaggcgtatttatcaccacgtcaagctttaactcaagcgcagtggacttcgcaagcaggtacccccacgcaacgattgtactcatcgatggacagaaactatctgagctaatgatcaagtacgatttaggcgttaccatcgaaagaagctttcaggttaaacgcttggacatagattatttcgagcaggcctaacctcgattcagagcatcacaaacgatctcgaacctgcttagtttcacagcacaaaggatgaccattgaaaataatcggacctgatgccactaacttccaaaccgaagatcaagacgatgcgaacgcgccttcgcaggacacgagcagctccgacaagcccgcagttgagcaggccgaaaccttcagcaaggccgtcgacatcgccgagaaggcgctgcgtttcgcgaccttgcctgctggcatcaaacgcgcggcgacccgcgtcatgcccacggtgaagaaagcagcgaaggtggctccaatagtcacaccagcggccaatccttacatcctcaaagctgtcgcgaaggccaaagaggtcgcgcccgaggtcgcccaagcagcgaaagccgtcgcttcgggagcgcaaaccggagcaaagacagccaccggccacatacgcacgacggctcccaagctcggccatgctgccgccggcaaggtatagcacatcgcaggcgagctcaagcgcaaaaacgacggcagcggtaacccgtcccctccttcatgataaaatcctcggacaagcatcgaatgacgaaccatccttgaacggagcatcatgatcaaagaactggtaaaggacgaggccaccctctcgcaggtatgcacccctgccacggccgaggacgcgcaggtggcggatgaccttgtggaaacgctgacgtcgatggacggtgccgcttgcttggcggcgaaccagatcggcgctacgacctgcatcatcgcgtacctggacgacgacgatcag

SEQ ID NO: 8758 - DNA, 408 bp, Unknown
  gut microbiota DNA sequence
tcctctcgcaggtatgcacccctgccacgaccgacgacgcgcaggtggcggacgaccttgtggaaacgctgacgtcgatggacggcgccgcttgcttggcggcgaaccagatcggcgctacgacctgcatcatcgcgtacctggacgacgacgatcagccgcacgtcatgtacaacccgcgcctgctgcaggcgctcggcgcgttcaaggccgtcgaaggctgcctctcgcttgaagccgactccaaagtcacgcgcttcgaccgcatcaaggtgggctacagcgaactggtcgacggcgagctcaagccgcgcaagaaggatttcaacggctggacggcgcagatcatccagcacggcatcgaccactgcaagggcaagctggtctagcctcatgggcaagaagccg

SEQ ID NO: 8759 - DNA, 290 bp, Unknown
  gut microbiota DNA sequence
tcgccttggccgaagcgcctgacgcggcggtgtacgatgcgcgcttcatgtccgactactacaaggccgaggcgaaccgcgccgaggtgttcgagcgtccgctgttcggcgcggggcttgccgaggacacgtcgtacgtgctgcgcgtgttcgccgcgaacccgttcgggaaggagacgctcgtcggggaggcggcgttccgcacggcggcccgggtcacgccggctctgggcaacccgctgctgtccgtggacttctccacaggaagccacgcagatgccgcgttggcg

SEQ ID NO: 8760 - DNA, 181 bp, Unknown
  gut microbiota DNA sequence
gaaaaccatgtccgaaacgcgtttgaccgaaggcccgctgcaccacctcgacggcaagctcgccgaatgcgggtgggccacgtcgcttctgcgcgcgtacgatcgcgatcgtatcaaggcgccgaagcgccgcatcaaagaatgggactactacctggtgaacgacgacgagttcgctgtg

SEQ ID NO: 8761 - DNA, 5401 bp, Unknown
  gut microbiota DNA sequence
cgtactctttgtttatgactcacgcaacgagaaaaaacgtcggacagcgcgtccgggcgcttcgcgaggagagcaatctgacgcaggagcagcttgcgctcatgacgggtgtaggacggtcgtacctcgccaaggtggaggcgggcaaccgcaacgccaccatcgacttcatggagaaggtcgcgctcggcttgggcgtgacgctgggtcagctgttcgagggcctgtaggcttcctttcccatggacgcaagcgcatcttcgacatcgacgtaggacgcgagcgccaccgcacctcccgcggcctcgtcttctgcgaaagcgcctgaaactcgcacccgtgcgggagcgccgccgcgattcacacacacggttccggcgaagcctcgctcgcccgcctcgcgagcctccttggccaacgcaccgacggctcgacgcccctcctcgtcgtcgcccgtcaccaaactgtagcaagcattggattcgagagttgtgaaagcttcatccaacctatgacgagcaaacccgatgcccagcagctccatgagcgtgccttcctgcgcgacatctcgcgccttcgccctttcgcgctcgtcgaagcggtcgccgcgagcacgtcgagaaggcgctacgtccgacgtgctcctgttctggtagaaacggcgcttatcgcggtacatcgcctcgtctgcatcgaacaacgttctatcgatctcactcgatcgcggcgtccattgcgcgccgatagccacctcgcacgacggaacttcgtcgaacgctttctgcagccgctccacaagcgaccgaaagcccgcttcgtcggtatccacgaccgtggccacgaactcgtcgccgcccacacggtacagccgcgcaacctctccgagaacgcgctgcatcgtctgagctcatgcttgcaacagatggtcgccttcagcatggccgccgcgatcgttgatctccttcatgccgttgacatcgagaaaaaccgcgccgaacgggcgcgccagcttctcaaggcgccgcacgtcctcgttgtagcggtttcgattgtacagcccggtcagagaatcgtgatagctcatcgccaccagctggcgctcgttttcgatacgctgcaacgtcatgctgtagaagtagcacaacgtgcgcagcagcggcgcgatgtcgcggatctggtcggccggagggttgtccatgccgaggaagcccacgagacgcccgtcgcgttcgatgggtgcgacgaccagactggcgatctcctgcacgtgcagcgtttcgtactcccgaggatcgacaacgcccttgatggcgtccagatcctcgatcagcacgcattccccccgaccgaacaggtcgagccaccgctcgaacaaacggtagtccatatcctgaaggctttcgatctgggaggatatgccgtcagcacaccactcgtgcgtattgctgaacccttctccgcgagccgagaacagataggaacgctcggctccaagctcctcgcccaaccgttcgagcatgcgcacggacgcgcgctccggatcggtctcgcgatacagatcgttagcgatctcgaggatgacctcctcgttgcgatgcaggttccgaaagcgcataccctcttctttttgatcggtgaggtcgaagcccacctcaagacgaaccagcttcccaccccagttgatcagacgatcgttcagcagatgacgatggttcgtcaaagggttcgtgaattcccacacgtagcttttctcgacgctgagcagatgattcgtgcagaacggacacggctcatcgcgcccttgcaggaattcgtagcacttgacgccctccagatcggcatcgagcggcaccttgaaaagccggcggcccgcctcgttcacgtgcagaagctcgtacgtctcgatgtccgagatgtagaacggatcgggatagttcagatcgtcgttgtattcagccatggagagccttcgttcacggtaacggacatgccggcgtttgcgcttcgcggttactggtattgcgtcctagtatagcgatattctcagtaacgtgcgcgcccgatcgcaagctccagaagaacggcagcgccctccggagagggcgcaaaaagccgtgcatgctcgatagtagccgagaggtcaagcgctgggaaaacgcagcacgaacgtggtgccctgcccttcggcgctctccacctcgataacgcctccgtggtacataaccgcatgcttgacgatggccagacccagtcccgttcctccggtttccttcgaacggctcttgtccacgcggaagaagcgttcgaacaccttgtcgtgcaactcggccgggatgcccggtcccgtgtcgctgacgcgcacgaccgtctggtacgcggcgttcgcgagcccgccttccacgcattcggagcccaccttcatggtgacgaggccgccttcgtggttgtagcggatgccgttctcgatgaggttgtacagcatctcctcggccaacgtctcgctgcccgcgatgcacgccgacgcgccctccacccgcacgcgcacgccctggtcgtccgcgaagctggacaacctcccggccacgcgctgcgccaccgcgtacaggttaatggccgtcgcaccgtcgttctcgaaggccgactcgtcaagcttcgacagcgtcagcacgtcgttgatcagcgagcgcatggtctgcgcctcgtcgtagatgagcgcggcgaacttctggcggtcggagggctgcaccatgtcgttcttcatgagctcggcgtagcccgatatcacctgcaggggcgtcttcatctcatggctcacgttgctggagaaatcgcggcgcatgttctcggcttcggccagctcgctgttctgctgcttgagctggcgctgttgctcgtcgatccggatgagcagcgggtccatctcctcgtatatctcattgtccaaggggttcgcgaaatcgagcgcgtcgatgggcttcatgatccggctcgtaagtatcttcgacagcaggaacacgagcgccactgccacgatgagcgctatgagcacgggcatgagcatctcgctgagaaacgatagcagcgaatgccgcgtctcggacaggcgcacgatactgccgtcgtccagcttcaccgccgcatacacggtgtcggtgcccagcgtttcagagtagcgcatggtgacggcctcgcccatgtctgccgcttcctgcacctcggggcggtcggcgtggttgtccatggcatcggtgtcggcggcgctgtcgaacagcaccgtgccgtccgcatcgatgagcgtgtagcgcgtcagtccactgaactgctctttcagcgcgggagcattctcggacgacggagtggcgttcagatagcgcgccgcatcctgggcactggccgcaagctcggtttcagcgtcgtgctcgtaagacaggtagtagatggtggtcatcgtcacggacagcgcaacgatgacggccaacgtgaacgcgagcacgctcgtgaaaatcttgccggacaggctcttaaccttgaaatgcgtcgggctcatgcgcgcgctcacgaggagggtttgatgcagtagcccacgccgcgcaccgtacgaacgagggcgtcggccccttcttgcgccgcggccagcttctggcgcagcgtctgcacgtgcacatccaccgtgcgcgtctcccccacgtacgtcataccccacacgtcttccagcagttggctgcgcgacagcacgtgcccctggttctgcagcagcgtgtgcagcaggtcgaactccttgagcgtgagcgtgatgggctcgccgcccacctgcacggtgtgagccgacacgcatagctcgataggaccgcaagacagctcgtcgtcggccatgacgggaggcgccgacgcgcggcgcatgagcgcgttcacgcggctgaccagctccatcatgccgaaaggcttggccagatagtcgtcagcgccggcatcgaggccgctcaccgtgtcgaactcggtgcccttggccgtgagcatcatcacgggcagatgcttggtcgccgggttctcgcgcagcatatggaggatctcgagcccgtcgatttccggcagcatgatgtcgagcagcaccaactcggggaggcgctccttgcacgcggcgaagaactcgcccgccgccgggaagcccgccgcctcgaatccggcctgcttgagagcgtacaccgtgaggtcgcggatgttggtatcgtcttcaacgtagtagatcatgggttggtcctttcggccggcagcgcgctttcgccgccgtcgaacctattgtaaagcaggaggaaaaaccacgggcttgcggcaacgtcaaatttgcgtaaagccgaaaggaagcccctttgtcatcctgagggaacgcggcttagccgcctccgctcaggatgacaggccgcgacttcggcgctgcgctcaggatgacaacgctccgacctagccgaaccttcccgccacgtagtcggcggtgcgggggtcggccgggttcgtgaagatgtcgtcggcggagccggcctccaccatctcgcccagcaggaagaacgcggtcttgtcggacacgcgcagcgcctgcagcatgttgtgcgtcaccatgatcaccgtgtacttgctcttgagctcgcccacaaggtcttcgatcttagcggtggagatggggtcgagcgcgctggtggcctcgtccatcagcagcacttcggggcgcaccgccaacgcgcgcgcgatgcacaggcgctgctgctggccgccggagaacccgagcgcgttcttcttcaggcggtccttcatctcgtcccagatggcggcgtcgcgcaggctctgctccacgatggcgtccagatcctcgcgcttcttgatgccgtgggtgcgcgggccgaaggccacgttgtcgtacacgctcatggggaacggattgggctgctggaacaccatgcccacccgacggcgcagattgttcacgtcgatggagcggtaggcgtcctcgccgtccaacgtgatctcgccttcgatacggcagccttccaccaggtcgttcatgcggttgaggcttttcagcagcgtggacttgccgcagcccgacgggccgatgagcgccgtcacctggttcttggggaactgcaggtcgatgcccttcagcgcgtggaaatccttgtagtacagatcgaggttgcgcacgcccatcttggcgggcgcgtcgacgggcgccttctccttgatgcggcggtcggccgcctgaccctgcgcctggggcatgtaggtagccggggcgttctgggtcggagcggttctctcaagcgtgacgttagtcataggtgcctcccttgttcatcttcttggcggcgaacgtggccaggaggttcagaagcaccaccatgaccagcag

SEQ ID NO: 8762 - DNA, 1099 bp, Unknown
  gut microbiota DNA sequence
aaacccgagcgcgttcttcttcagacgatccttcatctcgtcccagatggcggcgtcgcgcaggctctgctccacgatggcgtccaggtcctcgcgcttcttgatgccgtgggtgcgcgggccgaacgctacgttgtcgtacacgctcatggggaacggattgggctgctggaacaccatgcccacccgacgacgcaaattgttcacatcgatggagcggtaggcgtcctcgccgtccaacgtgatctcgccttcgatacggcagccttccaccaggtcgttcatgcggttgaggcttttcagcaacgtggacttgccgcaacccgacgggccgatgagcgccgtcacctggttttcggggaattgcaggtcgatgctcttcaacgcatggaaatccttgtagtacagatcgaggttgcgcacgcccatcttggcgggcgcgtcggtgggcgccttctccttgatgcggcggtcggccgcctggccctgcgcctgaggcatgtaggtagccggggcgttctgggtcggagcggttctctcgagcgtggcgttagtcatcggtgcctcccttgttcatcttcttggcggcgaacgtggccaggaggttcagaagcaccaccatgaccagcagcaccaccgccgtggcataggtctcgttcacgtgcaggccttcgctggccagcgcgtacatgtgcacggccagcgtgcgggcggaatcgaacaccgccatggcgccctcgccggcgaagttcgggatctgggcgatggagccggccgtgaaaatgagcgcagccacctcgcccacgcaccggccgagcgccagtatcacgccgcccaggataccgggcacggccgaaggcagcacgcagcgaaacaccgtgcgcaaacggccggcgcccaaaccgaacccgccttcgcggtacgcgtcgggaacggccagcagcgcttcctcggtggtgcgcatgaccacgggcagcaccatgatggccagcgtgcaggcgcccgccagaagcgacaggccccagcccagcgccgtcacgaagaacaacatgccgaacaggccgtagatgatggacgggatgccctgcagcgtctcggc

SEQ ID NO: 8763 - DNA, 3772 bp, Unknown
  gut microbiota DNA sequence
acccgccaaaagcgacaggttccaatgcagcgccgtcacgaagaacaacatgccgaacaggccgtagatgatggacgggatgccctgcagcgtctcggcggtggtacgcacgacagctacgaaacgactgccgcgcggcgcgtattccaccaggtagatggccgatcccacgcccaccggcaccgccatgagcagcgagagggccgccatcagcagcgtgttcaccagcgccggcatgagcgagacgttcgtggagttgtactcccactcgaacaggctgggcgtgaggtacggcacaccgttcaccaggatgtagcccaccaggaacagcagcaccgccgtggtcagcagcgcgcccagatacaccagcgctcgcagcagcatggaaaccacgcggcgtgcggcgcgatgacgctcttccgccgcttcgaacatcgcatcgatccgatcgcccgggttggcggcgggcgccggggaggcgtcggccgattcgtaggcgatcgtcagcttgggactcattacctcgtctcaccccgcttcttgataacgttgaacaacatagtgatgagcaggatgaacacgaacagcaccacgcccgtggccacgagcgcgccgcggtgcaggtcggccgcgtagcccatctccagcacgatgttggcggtcatggtgcgcacgccctcgaatatgctctcgggaacgatgggctggttgccggccaccatgatgacggccatggtctcgccgatggcgcggcccacgcccagcacgatgccggccatgatgccggagacggcggcgggaacgataacgcggaacaccgagcgctcgtgatcggcacccagcgccagcgcaccctcgtagtacttcttgggcacagcatcgagcgcgctctgcgcaacggtgatgatggtgggcaggatcatgatgcccagcagtacggcagcggccagaagcgacaggccgcggcccggcatattgtcgcgaataaacggcacgatcatcaccaggccgaagaagccgtagacaaccgacgggatgcccgccaagagctctacgcccggcttgaggaacgccgcgatcttgccgctggcgaaccgcgacaggaagatggcgcacaaaagccccgtaggaacgccgaccaggatggcgccggcggtcacgtagatgctgcccacgatcatcgggaagatgccgtagatatcgttggcgggacgccacgtagtgccgaaaagaaactcgggaaggccgatctgcgcgatggccggcacgccgttcgcgaagagaaagacgcagatgagagccaccgcgaggaccgatatccccgcggcggccacgaacagcgccttcgctatgccctctttgatgtgcaggtggaacatgtacactccttggtctggctatgtcagcgagaggcgccgaggcggggtgcatcggcgcctcgcagcgtcgagctcttccggcggctgttaggccgacggaataacatcttcccacgtggtcagctcgccggtgtagatgcccttcacctggtcggacgtaagctcgtcgatggaggcatccgggttcacgataaccgcgatgccgtcctgggcgatgaccgtggccttcacgccgctctcggagtccttgagctcgcgggagaccatgccgatgtcgcaggttccctcggtggccatgttcacgccggtggtggagtcggactggttgacctcgatggcgacgtcgggattgagagccttgtacgcctcggccagcttctccatgaccggggtcacggacgaggaaccggcgatgacgatcttgccggacttgccggaagccttataggagcccgcgttgtcggcaacggagatgcaaccgttctcctcgaccaccttctgaccgtcggaactcatgatgtagtcgatgaagtcctgggccacatcggacacgccgtccttcgtcacgatattgaacggacgggccaccttgtacgtgccgctcttcacgttctcagccgtagcctcggcgccgtcgatgctgagcgccttcaccgtgttgttcagcgaaccgagcgatatgtagccgatggcgttcgcgtcgcccgccacggacgtcatcatgacggacgtggagttcgtgatggcggccgtgggagtggtcagatcaaccttgtctccgttggcatccttttcctcgatgccgaacagctcgatgaacgcaccccgcgtgccggagccgtcctcgcgcgaatagaccgagacctcgccggacgggctggtcgaagccgacgctcctccgtcggttgcgccgctcgcaccatcgtcgttgcccgacgcacagccgaacagcccgaacagtcccagcgccagaaccgccgcgctcaccgccattgccaaacgcttcttcatcttcttccttccttcgatgcgctttgcgagcgcattgctttccgctgaagcacgggcatcggaggcccgctgcaaggaacatgatgaagacggagcatcagaaccgtgtcggacgccggtcaaaagtctgtaaagtttcgggaggccgtttttttcgcgccggcgctagatcgacgcaagacccacgccaggcgtacgctcgaacggtgttggaaacaccggcaagaaatatggaatccgcgttggaagcgcgttgaaagcgcgcgagatcgaggaagatccgcgctggatgcgcgccatctgcgcatgatacgcggtcgctatactaagaggtacgaagcgcagaggcggcgcggcaccacacccctttccaccagatgctcccgagagagggaccgacggagggaaaaacagcactaaatgtgctgttttacactgattcgttgcgcgcgagcgcgcgcctggtcgtatggtgcgctttgccggaagccgctacgatggcctgaaatggacgccatgaccgttttggccttgatagcggcgatccttgagttcgcttccagtttgctggggttcttgacagcgataatggagcggctcccgatccgcaaggacaaggagccgtaacaagaagccaaaccgccgaagcgattcgagagccgtggggagttagcagctccctgcggctcgcctctattatacgaacgggcagcgcaaaagcaagctcgaacgcaaccttcccggccttccgcgcgccgattcattcccggctctcgcgcgcccgtcccgtgcttgatcagtacacgttgtggatgacctcggcagagccaagcaggttcgacaccggcagggtcgagccgtcgtcaagcgtcaccgcaccgtcgaagcggccgaatacctggtgctggtcggatcggatcagcttgaagtccatccagtccacacggtcgagcagcggcgtgaacacgaggtcgagccgtccctcgtcgtcggtcatatgccagggctgcatgagctggtagcgatcggccgtcttcttcgcgtgcgcgccgcccgtcttttgggggatgccgaagtccacgcggtgcaacttgtgcgcagcaccgtcgatgaacaccatgttctcggaagccgccgacgtgtcgccgaacccgtagcccaggttgaggccgaagcgacgaccgtcctgccaaccctgcgccacggcccagtaccacgtgttgtcgcgcgtccatacgcctcgcccccagtccagcaggccgaacgagttctcggggcagaacccgtgcaccaaaagccccttcttgaaactgcccctcgcctgcatggcgacgatcttctggttgtagtagaacgcgagcgggtcttcggcccatggcgtg

SEQ ID NO: 8764 - DNA, 123 bp, Unknown
  gut microbiota DNA sequence
ctcggggatgccgaagtccacgcggcgcagcttgtgcgcagcaccgtcgacgaacaccatgttctcggaagccgccgacgtgtcgccgaacccgtagcccaggttgaggccgaagcgacgacc

SEQ ID NO: 8765 - DNA, 513 bp, Unknown
  gut microbiota DNA sequence
gcgcccccagtccagcaggccgaacgagctctcggggcagaacccgtgcaccaaaagccccttcttgaagctgcccctcgcctgcatggcgacgatcttctggttgtagtagaacgcgagcgggtcttcggcccatggcgtgctgatcaccatcgaatcgcgcggctcctcgtccagcacggcctcgaacgtcaggtcgtcgccgccgtcgaagcccgcgaaccacacgttgaggcggcgctgcccgccggcaacctcgaagcggaacgatacgcggttgttctcgaaggaggtcacgccctcggccgaggtggcgggcagcttgaagcgccccatcggaaacggcgagatcacgctggccgtatgcgacgtggcctgcgcgaagtccatcaccgatgccgagatgagccccacgtaacccatatcggcgacggtcagcgccacagcgaactcgtcgtcgttcaccaggtagtagtcccattctttgatgcggcgcttcggcgccttgatacg

SEQ ID NO: 8766 - DNA, 346 bp, Unknown
  gut microbiota DNA sequence
ggacgccgtcatctgcaacggctggcgctgggcgcccggctcggccatgttccccgtcatcggcggcgcggtgtacaacaccgagaccgagtcgttcggctgctgggccttccagaccgaggcgctgggcctgtactcctggggcgatcaccccgatatcatgatgggccccgacaagtacgacctgccgaacgccgacaccatcgtgctgtacggctgcaaccccgcctgggcgcagcactccagcatgtactggctgaacaacgccaaggaatccggcaccgggttcgtgtacgtgggccccagctacaacgtgaccgccgcgcagctgggcgcgcgctggatc

SEQ ID NO: 8767 - DNA, 378 bp, Unknown
  gut microbiota DNA sequence
cggcgcccacgatggtgtgcagctcgtcgatgaacaggatgatgcgtccttcgctctgcttcacctcgcgcaacacggccttcaaacggtcctcgaactcgccgcggtacttcgcgccggccaccatcgcgcccaggtcgagcgcaacgagatcgcggtccttcagcgaagagggcacgtcgccggccacgatgcgctgggccagaccttcgacgatggccgtcttgccggtgcccggctcaccgatgagcacggggttgttcttcgtgcggcgcgacagcacctggatggtgcggcggatctcctcggcgcggccgatgaccgggtcgagcttgccttcgcgcgccttctgcgtgaggttctggccgtactgctcca

SEQ ID NO: 8768 - DNA, 2689 bp, Unknown
  gut microbiota DNA sequence
atcgtgcgcgcttgcgccagcttatcgccgcagcgttccagctcgcgctccagcacggactgcacgcgccggaacagcgtccaggcctcgtcgccgcgcacctcgtcggggatgaacgccgcaaagcactggcaccaggcgaaccctcccgtgcgcgcaagcgagacatgggcatcgttgtcggcgagcgtggccatgcggtgcgcgggaatgcgcgcgtcgtgcgcggcgaagccgcccggcaccgacgcgtcgccgtggaacgccagccggtcgagcgtgtcgcagtgcaggtcgaacacccgcaggcgatccgccggcacggcctcttcgctcgcgagccgcacggcgtcctcctccgtcagcccctcaagcgtcatgaacaaacccatcgcgcatccttcctcgtcgtatcccgggccgatagagcaaaagcggcgcaaattcgcgcagcatcgaatccggcccgatcgatcccgatcatcgtagcaaagacggcgtccgagaaaatgtcgtccaggcgaacgcgcacaaaacgaagacggtcgcgaaacgcgtggcgcccttcgccggcgtgccgcgagccattgtgccgatgtgaaatccgattggaaagcgtgcgtcggctaccgagagcatctcgaggtttggacgcaaatcgactcccatgacactacgagggccggtttgaccgaagaagaggtacgctggtttttcgccatctggggctttgctcataccagatgacgcaacgccaaggagatgcgcttcgaaactgtcatgggcgccgttttgagcccagcaaccgacacgccccgctccccgcttgcccttccagctgcaaagcgtcatatttaaccatattgttaaatattgcggagaaggacgatgggcatccaggagacgttgaaagcgctgtccgacccggtgaggagggatatcctcgagcacctcaagcacggacgcatgccggccggcgacatcgccgacctgttcgacatctccgcacccgccgtgtcccggcacctctcggtgctcaagaacgccggcctcgtgcgcgactaccgcgagggcaagtacatcttctacgagttgaaggcgtccgtgctggaagagacgctgctttggatcgcgaatttgaaggagcaggcagaatgaagaacatccgtaaggttatctacgctctgatcgtcctcaacctcgtcgtggacgcggcgtttctcgtgctcgcgcccgaccaggtcgccgtgcatttcggcgcgagcggcgaggcggaccgcatcggaagcaagtacgagcatctatggtttcccgcgctggcgctcgcgttcggcctggggcttccgttcatcgcgaaacgaagcgacgcgcacgacggcgacaagctcttgaaggccgatgtcgtgctcttggccctgatggcggtgttctcgctgttcgtgttcgcggacgggctctccagcagcggctcgccgttcgcagcactcgacctcaacgtgggaagaggcgccgccctcgtcgcgggcatcgccttcgtcatctgcggcaacatcatgccgaaatccgatcgaaacgaagccttcggccttcgcacgccctggagcctgagcaacgacgaggtgtggcgcaaatcgcagcgtttcggcgggtacgcgatgatcgcctcgggcgtgctgaccgtcgtagccgggctcgcactgcccatgaacttggtcatgcccgccatggtggccatcctcttggcggcagccggcgcgagcatcgtcgcctcgtacgtgtactaccgaaagcactacgacttcgctgagtgactctcttcggtcgcctgcgcgccgtcttgccggacgttcggcttctcccctgtcaccaggaaaatcatcgcgatcatgagcgcgcaccccgccaggtcggcgccggtgaacgcggtgcctagccacagcgtggcgaacagcgtggcgctgaccggctcgacagcgcccagcaggcttccctgcaccgaccccaccaccgacacgccgtgtaggtacagcgcgaacgccgcgaacgtgcccactagcacgaacgctgcgaacacggccgcgcctgcagcatcgagcgccggcagcgcgagcggctcgccaagcgccacgccgctgaagtacaccgctgcggccacgataccgccgatgaacatgccgatgcccgtgaccgcgaagcttccccaacgggcgaacagcttcttcggatacatgatgtagaacgccaccgacagcccgttcgcgataccccacgctaggcccatgggcggcaggtacagcgcgctggggtcaccttgcgtggcgatgagccaggtggcgatgacggcggccgcaagcccagtcacctcgcgcccccgcggcatccgtcgagtgagcacgcaggtgaacagcatgacgaaggcgatgccggtggtttgcagcacggttgcggtgcccgcgttcgtgtagccgatcacgatggtgtacgtgatctggcacaggaacagccccacgccgccgaacacggccagctgaccgagcgtgcgccggtcgcccagcatagccgcaagctgcgcgcggttgcgcacgagcagcactaggaggaacaccgccccggcacccagcatgcgcacggccgtgatgaacgagggcgttatgtcgtagttcgccagcaggaactgggcgcacgcgcc

SEQ ID NO: 8769 - DNA, 1819 bp, Unknown
  gut microbiota DNA sequence
ttgcgcttgtcggccaggtagcgcccgccggcgcggcgcaggcccgtcatcttgtcgcggggcacgtcgacgggctccaccaccagcttgcccgccgtcaccgacacggtcttgatatggtgctcgttggcgtaggccttgatgcgcgccttctccaacaggttcttcgccgcctgcggcatgtcggggcgcttgtcggccaagtcggcacgcacgtcctccacggcctgctcggtggcggccgaggctatcctgcgataccacagcacgcgttcgtcggcgtccggcacgtactcttcgggcaggtaggtgtgccccggcacgttcaccgtgatatcgctgagcgcgggcggcagcgcgtccatggccttgaggtcgccttcgcgcgtggcgctcacggcctggttcagcatctgcgcgaacaggtcgaagcccactgcggacatgttgcccgactgctcggcgcccagcaggctgcccgcgccgcggatctccaggtcacgcatggcgatgcgcatgccgctgccgagatcggtatgctcgttcagcgcggtcaggcgcgcggccgcctcctcggtgagctccatgtgctcggggaacatgaagtaggcgtacgcctgcgtgcacgagcggcccacgcggcccttcagctggtacatctgcgccaatccgtagcgctgcgagtcctcgatgatgagcgtgttcgtgtgcgggttgtcgatgccgctctcgatgatggtggtggccaccagcacgtccagctcgccggcgctgaagtcctccatcacgcgctccagctgctccttcgacatctgcccgtgcgccacgcccacgcgcgcctcgcccgcggccgcggtgacgcgccgcaccgcctcctccatggagcgcacgcggttcgacacgtagtacacctggccgccgcgcgccagctcgcgcctgatagcgccgctcaccacgtcgggatcccactcgcccacgtgcacttccacgggacggcgctcgtcgggcggcgtgaggatgaggctcatgtcgcgcacgcccgacagcgacatctgcatggtgcgagggatgggcgtggccgacagcgtgagcacgtcgatggactcgcgcaggttcttcatctgctccttgtggcccacgccgaagcgctgctcctcgtcgatgatgaccagccccaggtcgtgcgggttcacatcgcgcgacagcaaacggtgcgtgcccaccagcacgtccacgtcaccttcctggaagcccttgagggcggcggcctgctgcgcgggcgtgcggaagcgcgagagcacctccacgcgcacgccgaacggctcgcagcgctccttgaagttggtgtagtgctgctgcgcgaggatggtggtggggcacagcaccatcacctgcttggagtcctgcgtcgccttgaacgcggcgcgcagggccacctcggtcttgccgaagcccacgtcgccgcagacgaggcggtccatgggcttcgccgactgcatgtcggccttcacgtccgcgatggcggccagctggtcgggcgtctcctggtaggggaacgcctcatccatctcgcgttgggccgcggtgtcgggcccgaagcggtagccttgcacggacgcgcggcgcgcgtacacgtccaccaggtcgaacgccagcttcttcgtggccttgcgcgccttggccagcgctcgcgaccagtcggccgtgttcaggcgcgtgaggcgcgggctcgcgccctccggccccacgtagcgcgtcacgcggtcgagctgctccaccggcacgtacagcttgtcgccctcggagtactccagcagca

SEQ ID NO: 8770 - DNA, 225 bp, Unknown
  gut microbiota DNA sequence
tctgggcttccacgatgcgcgtcaagtcgtacacgctcttgtcgaggacgtcgatcggcccctcgggttgtaccagctggccgtcgacgaggacgtactctcctcccgtgttgccgctggtcggatcggccgcgaacgcttcggcgtcgttcgatgcgaggatgatggcgttcgacaggcggtcggcttcgatgcttcgttcgtgcgctccggcgatcacctgca

SEQ ID NO: 8771 - DNA, 743 bp, Unknown
  gut microbiota DNA sequence
cgacgcgctgttcatgagagagcgcgtgtcggtggatgtcatgggcgttcctgtgctgagacgcggagcgctgtgccccttcgacgagcaacggctgctgcgcgaagcgggcgatcgggagatcgttatccgcgtggaccttggtgcaggcgatgcgcaaacgacgtattggaccggcgatctgccgccgggctaggcgttcggacgacgggatgcgagccgcgcgaagaccgtgcggttcgcagcgcggcgtcgcgggcggcgcacgcgcgaatcgacggcgcgatggaaggtgatttcgatgacggtcgaaatggtggagattttccttcagattctgatcctattggcgttcggcttcttgttctccaagcgcgacatcatcacggactcgatgaagaacggcttgtcgaccctgctcttgaaggccgtgttgccgttggtcatcctgtcgtcatcccaggttgctttcgatggatcggtgctgcaggggttcgtggtcaccatggcggtgtcgttggtcttctacgtggtggttgtcggcggcctggggcttgtccggaagcgcattcccatccccgacggcggcaaccgcatcttcgtgcttttgtgcgcatacggcaacgacgggttcatcggcattccgttggccatgcagtttttcggctcggccggcatgttgtacgccatcgcggcgaacatcgtgttcaacatcacccttttcagcttcggcatcgcggttt

SEQ ID NO: 8772 - DNA, 824 bp, Unknown
  gut microbiota DNA sequence
cgtgctgtacgcgcttccgttcaggttcccgacccccatcacggacgcgttcaatatggccggttctatgatgacgccgctggccatgttcataatcggctacgaaatgtcgcgcatgaagctgtcggatgtggtgagagacaaatgggcttacatcgtttcctttatgcgcctcctggccttgcccgctctggctgcggtcgtcctctcgttcgtgcccgggatcgacccgctggtggcttcggtcagcgtcttcctgcttgctatgccgtgcggcacgctcaacgtcattctgtcccagcaatacggcgcgaacccgaagttcgccgcccgggccacgacgcaaagcatgttcctgttcctgctcaccgtgccgcttatcctgatcctggtgaaggtgctgttctgactgatggggcggctcttcccgcgcgccgagccttctatcggctcgaattgtttcacgtgaaacattcgaggcccgacgcggattgtttcccgtgacacaatccgggcgcgacacgagatgctcttcgtgggacattcgaggttgcgatgtgggatgtttcatgtgaaaaatcccggatgccgcgcaggctctttctgcgatgggcgcagcatgcgatgccctgggcgagccgtgccgataccggttttccgaccgcttgcgaccgcgttgcccgaccccttcctccgcctgccgcgatcggtgggccctctgcgtgaacgcctcacccgttgccgttgtgcgtctttggcgtcggcgccctccccgccgtccggcgatcgaaccctccggaactcatgtggagacctcgaaaaga

SEQ ID NO: 8773 - DNA, 546 bp, Unknown
  gut microbiota DNA sequence
gagctgcgcacgtccacgccggtggagcgcatcgtggtggagaacggctgcgcctgcggcgtcgaggcgggaggcgcggtgcattacgccgactacgtggtgtgcgacgccgacttcccgtacgccatcacccagctcgtcgacgaggccgacgcgcgcggcaagtacacgccgcagaagatcgaggagatggagtactcttgctcgtgcttcatcctgtacctgggcctggacaagcgttatccctccgatgcggtgcattccatccgcttcgcctccgacttcgagcgcaacatcgacgacatcttcgacgacgcgcgctttcccgacgatccgtcgttctactgctacgcgccttcgtcgctggaccgctcgcttgcgcctgagggctgttcgaccttgtacgtgctggtgccggtcccgccgctgtcgcccgcatcgccccgctggtcggacgcggaggtggccgagtatcgcgaccgggtgctcgacctcatggagcgcgagacggtgtacgaggacgtgcgcgaccatatcgtgttcgag

SEQ ID NO: 8774 - DNA, 275 bp, Unknown
  gut microbiota DNA sequence
gccgcacaacaaggcgaccgactgcagccgcctgtacttctgcggcagcagcgtccatccgggcgcgggcgtgcccatcgtgctgctcagcgcgaagctggcggcagaggagctgatgcgcgatgaccgcctgtagcctctttgaagagcgcgcggacgatttcgcgtggtgcgaggacgtgatcaggcgcaactcgcatagcttctaccgagcgttctcgctgctgcccgcttgcaagcgccagagcgtgtacgcgctgtacgcgttctgccgc

SEQ ID NO: 8775 - DNA, 5040 bp, Unknown
  gut microbiota DNA sequence
gactacttcccgaaccgcgtcgccgacccgaccctggttcgcccggagatgtggaacgactagtcgcgtagcccataccggggctcgcttcccttgcagcgagccccggttcatcccgaagttccggcctccgaggatcccgtctcgtgcaatgcgacggcgttccttgcacgaagcgtctcccagaggccggccgatttgctcccgtatcatcacattcatgtcgaaagcggcgccgcagcgtccgcgtgcctcgtcgtacccctaccctttcgcccgcaaacgggcaaggcgtccccgtcaaggacccggtcgacacgactccgctccaaggagggatacatgaaccaacaagcaaagtacaagcttatcggcttcatcatgatgttcgcatcatcgtcgctgatgggcggtatcggagccttcacccgcttcatcgacgcacccggcgacttcgtgtcgttctggcgcaacttcgcaggcttgatcgccctctccctcatcttctgcttcgtcggcggaagctggaagaagatcaaggaaacccgtttctccggcatgatgctgctctccggcgtgttcttgggcctgctctctggcctgtactgcctgtctacgcagtacaccacgctggcgaacgcatcgttcctcatctacaccggccccatctactcaaccatcctggcagcgatcttcctgaaggaaaagctcaacatcaagggcgtcctgtgcatcgccgccgtggtcgtcggcatgctgttcatcgtcggcatcgtcacgcccgagggtctgaccctcgacctcgatccgaagtacaccttcggcaacgccatcgccttcgcttccggcgtggcctacggcctgtacctgttcttctcgcgctaccgcgaggactgcgactccaacgtccgctcctggtggaacttcctgttcggctcgctgtccatcgtcgtgctgctcgtctggcaccacttcttcctgcagccgctgtcctacaccgagaaggtcaacggcgtgacgcagttcgacgcctcgggccagatcatcacccacgcgtggaacatgttcacgatgcccggctcgtcctgggtcgtgctcatcgccgcagcgctcatcaccggcttcggcgcgttctacctgctcacccatgccacgaaacgccttaaggccggcgagctggccgccatctcctaccaggagaccatcatggcgtcgcttctgggcctgttcatgttcggcgagaccatgaccaccttccagatcatcggcggcgcgctcatcgtctgcggtggcgtcgcccagatcttcttctccactgcagctgcaagcaagcagggcgagaagatcgagaaggaagaggagatccgcgagaaccttgaagcgcggctcgaccaagagcaagagcgggaagctctcagctagccgagccgaccgctaggaaaggaacgtgcacctatgaagatcacgagcaacatgacccacatcgccaccgaggtcgagttcgaggctccgctgaacgaagaccagctgagcgaggtgttccagaagagcggcgtgcagggtttcgccgccgagctcgacatcgccgagcgcacggaggaccacgtccagatgatgtcgcttgacggcctgctgggcttcgccaaggcgtccgggctgtccgcggtgacctacgacgtgacgtacttcccgcacgccgacgacgcggaggtggcctaccagctcaggcagctggcgcgcgacctggagatcagcgccgaggtcatccgcgacgtgtgcgcggccgagatccaggagtacctggccctcgacgcgaagcgcgacgccggcctgccggtccacagcatcgtggaggcctacacgggcggcaccgcgttcgcctggtacggcatgagcgactacccgcgcctcaagcgcttcatcctgcgcaagctggcgcagggcggcgcccaagccaagcgcaacttcatcttgcgcgccagcaaggcccaagtcgacctgctggaagactactgatccaagcgctgacgacatcggagcccgccgcgcatggcgggctccttccgattcgaggagggacaagctatgaaacccactgtgtacatggaggaaatggacgcgttcacctaccgcgagaagctggcgaaggatgccgtggtgttcatccccgtcggcgcgctggagcagcacggctcccacatggccatgtgcgtggacgccgcgctgaccaaggcgatggccggcgccaccgccgaggcgctcgtcgccgacacggacggcgcaatggaagccgtcgtggccgcgcccatcaactacggctaccgttcccagcagcgctcgggcggcggcttccacctctcgggcaccacgtcgctgtcgggaacgacgctcatcgcgctggcgaaggacgtggtgttcggcctcatcctgcatggtgcgcgcaagatcgtgctgatgaacggtcattacgagaactaccagttcatcttcgaaggcgccgagctggcgctggagaaagcgcgcgagaacggcatccgcgacgtgaaaatccaactcttgtcgtactgggacttcgtcgacgacgagaccatcgaggccctgtatcccgacggcttcaccggctgggatctggagcacgccggcgtcatggagacgtcgctcatgctgctgttccaccccgacctcgtcgacctgggcaagaccgacgacccgctgtacgaggggctgccggccgagctgccgaactacgacgtgctgcccatcgtgcccggctacacgccgccgtcgggctgcctgtcctcgcccgtggaatcctcgcgcgagaagggggcgatcctgcgcaacgtcgccgtgaagcacatggtggaagccgtgaagcacgagttctcgggcgagggtgactaccatgaggtctaagagctcggacgacgacgcgcgcaagcacgtccaccccatggaggtggagaacgagtcgggcgaagtggatccggagccgaaggaagcccaggccgcacggctcggacgcacggtcaggcacgaccatgtcatccgagccgcgtcggtggccatcgtcgccgtcgtgctaggcatcgcgctggtcagcgccgacacgttcatcaacgcggttggcgtgctgcgcacgttcgtcacccagtactgcagctggtggatcgtgctgtgcgcgtttttgtgcttcgccgtatgcatattcgtagcggtgacgaagctcggttcgatccgcctgggcggcaaggacgccaagcccgcgttctcgtacttctcctggttcgcgatgctgttcgccaccgggcagggcgtgggcctggtgttctgggcggtggccgagcctatcatgatgtacgggggcaccccgttcaacgcccccgaccccctgttcgccggagacacggcgcttgcatggacgtatttccactgggccatcccggcgtgggccatctacgccatcgtctcgcttttcatggcttacgcccgctacaacatgcacaaggacaccacgttccgcggcacggtggaggatctgttccccgcccgcgcgaagcggcccgtcggcatcgtggtggagatcctcgtggtcatcgccaccatctttgggctgaccacgtcgctcggacttgcatcgtaccagttcaacagcggtattcaacagatcttcaacatccagacggggcaagccctgcaggtggcgttcgtcatcctgttcggatccatcgcaacgatgtcggtgtggttcggcgtggtgaggggcatcaagaagatctcgaacgcgaacgccgtcatgtccatcgtgttcgtcgctgccgtgttcattttcggccccacgctgtacatcctgggcgtgctgcccgagtcgctcagcgtgttcatcgaccagttcatgctgatgagcgggttcaccgaagccgtgaacctgggcgcgggcatcgcctcgtacggtgattcctggcaggcgttctggtcgttcttcatcttctgctggtgcttcgcgttcgccacgttcacggcgggcttcgtgtccaccatttcccgcgggcgcacgctgcgcgagttcgtaggcggcgtggtgttcgtgcccgcggccgtatgcatcgtatggacgtgcgtggtgggcggcaccggcgtgtgggccgccatgtccgaccccggcatcgtggcgaagaccaacgccgactcctcgatggggctgttcctcaccatcgacagcgtacctctgatcggcggcgtgctgaccgtgctggcaaccatcctcatcggcggctatatcgtgacctcggtggactccggcgtcatggcgctgtcgaacttcgtgtctcccgccgcgcgccagagccgcggcttcaaggcgctgctggcgctgtgcatcacggcgctcgccgtgctgttcatggtgacggccggacaggacttcctcagcaccatccaattcgccaccatcgccggcggcatcccgttcagcgtcatcgtgatcctcatgggagtccagttcttcaaatgggtcaagcacgacgagcagctggtggaacgcggcctggccgagccgtttcccgaagactcgcttgcggcccggcagctgcgtcagtggcacgaggagagggaggcgcgcgaagccgagaaggcatggctcacgcggcatgaggaggtcgacgtccccgacggagccggcctcgacgaatcgatgaaggaggtgtcgcgatgagcgcggcagcagtaacggaggcacaaccgaaagtgccgttcaaggtggcgatctcttcgtttttgggcaacttcatcgaatggttcgactacgccacctatacgtatttcgccatcaccatcggcatcgtgttcttccccgagtcggcggtgaactccacgctgctcgcgttcgcggtgttcgcgttgtcgttcgtgttccggccgttaggggcggcgttctggggcagcatgggagacaagaaggggcgcaaatggtcgttgtcgctgtccatcttcatgatgacgggcgcggcgttcctcatcggctgcctgccgtcgtacgag

SEQ ID NO: 8776 - DNA, 528 bp, Unknown
  gut microbiota DNA sequence
ctgtcgttcgtgttccggccgttaggggcggcgttctggggcagcatgggcgacaagaaggggcgcaagtggtcgttgtcgctgtccatcttcatgatgacgggcgcggcgttcctcatcggctgcctgccgtcgtacgagacgatcggcctgctgtcccccatcctgctgctgtgcctgcgcagcgttcagggattctcggctgcaggcgagtactcgggagcagcggtgttcctggccgagtacgcgccggcgaaccatcgcgggaagtactgctcgctcgtgccggcatccaccgcggcgggcctgttggcgggctccaccgcagcgctcatcatcaaggcgctgctgcccgaagccgacgtgatctcatggggatggcgcattccgttcttgctggccggacccctggggctcgtggcgcactacatccgcacgaagctcgaggattcccccacctaccagcagatgacctcgacggccgatccggccaaagaggccccgcggcctacccgcctcgtgttcaag

SEQ ID NO: 8777 - DNA, 949 bp, Unknown
  gut microbiota DNA sequence
attcttgctggccggacccctggggctcgtggcgcactacatccgcacgaagctcgaggattcccctacctaccagcagatgacctcgacggccgatccggccaaagaggccccgcggcctacccgcctcgtgttcaagaagtacaagaagcgccttgcgaccagcatcgcggcgaccatggtgaactcggtcggcttctacctcgtgctcacctacctgcccacgtatctgaccagctacacggcgatggaagcctcggcggcccagcttgccaccgacatcgcgctggtcacgtacatcttcatcatcttcggcgccggaaagatatccgacatcgtaggacgtaagaaaatgctgctgggctcgtgcgtggcgttcatcctgctcagcatccccgccttcatgatgctggagacggctcagctgcccatcgtcatcgcagcggagctcatcatgtgcgtgacgctctcgttcaatgacgcgaacatcgcctgctaccaggcggagatgttccccacggaagtgcgttacaccggcgccgcgctggggtcgaacatcgcctacgtggtgttcggcggcacggcctcgatggtggccaccgcgctcatcgacgccacgggcaacggcctcatgcccgcgtactatatgatgggcatctgccttgtggcgggcatcatcctgctgttcacggcgcacgagtacgccggcaaggaattgaacgacatcgagtagaggatcgaacgcatcgaaaaagaagagggagcgggaaggggcgcgtcgagcgccccttcccgctcctgcggcgcgttggcgccctcgctcgcttacgcgtcgccatcccttgcgctacagctcggagcggcccctggcgcgccgcgcttcggcgtggtttcctgcggtcatggcttttcggaaaacatatgtggaggtgacggcgcgcatcgacgt

SEQ ID NO: 8778 - DNA, 24087 bp, Unknown
  gut microbiota DNA sequence
tacctcgtgtccgtgaacggccgcgagaagtacctgttctacgagggcccgcgttggttcgtagaggaggtcgcccccgacgagccgcgcccctcgtcgtagtcgccgcgcgaggcgcccgctcttcggctatactttgacgcgacagatagaagcgcattcgaggagaacatcgccatgggtaagcacgaccgcgtcgagaacggactcgacctcgacgaaggcgcgcctgcgtccaatagcaagatcccccttccgctcaaggtgttcggcatcctgtgcatagtcagcggcgcagcgctcgtgccggtgctcgcgctgctcatcgtcggcatggtgatggccctgcaacagggcgccatcgtcgaggagctgtccgccgccgccctcgtcatcttcgtctccgacgcggtgctcatgacggttttgtccgccatgttcgtcatcctgggcatccgactgctgcgcgacaaacggcgtcgcacggcccagatcgccgaggtcatgatcgtcatcctcatcctcgtgatcctctgcgacatgatgctgagcggcctcacgcccgatctcatcccctacggcgtggtgctggtcgtgctcgtcgcgctatcgagctacgtggacccgtcgctagccgaagagcgcgagctgcgccgcaaactgcgcgatatggaaacgcgcgaggcggccgaggagggcacgctcggccgcgacgagaccggcaagggcttcatcgcgctcaacttcttcaacctgttctggatcttcgtcgtgtgctgcgtgctgggactcatgatcgagacggtataccacttcctcgtcgtgaatccagggcactaccaggatcgcgcgggtttgctgttcggcccgttctcgcccatctacggtttcggcgcggtgctgatgacggtcgccctgaaccgattccacgacaagaacgtcgtgctcatcttcctggtgagcgccgtcatcggcggggcgttcgagtatctgaccagctggttcatgcagttcgccttcggcatcgtggcgtgggactactccggcacgttcctgtccatcgacgggcgcacgaacggcatgttcatggccatgtggggcgtcttgggcgtggtgtggatcaagctgcttcttccctggatgttgaagctggtgaacctcatcccttggaactggcgctacgcggtcaccacggtgtgcgccgcgctcatgatcgtcgacggggcgatgacgctgctgtcgctcgactgctggtaccagcgcgaggctggaaaacctcccgagacggccgtggcgcacttcttcgccgagcacttcgacaaccagtacatggagaaccgcttccagagcatgtccatcgatccgggcaacgcgacccgcgcgaaatagcgcgacccgctcggcgggcgcgagatcgaagggcgtaggggcgtgcgcgcagagcgcggcgcccgcccctacgccgcggccgagccggtcagggcggcgcgcacgccgcgcacggccagccgccctatcacgacgccggcaaggcaagcgagcacgcttccgcatgcgtacagcgcgcccgtcgcgtacttgccgcgttcgagcaaggcgagggtctccagcgagaacgcggaaaacgtggtgaagccgccgcacacgccggtcttgaggaacaacacggcgttgtcaggcaagccggagccctccgtggcggcctcgaacaccgccccgatgagcacggcgcccgcaaagttgacggcgaacgtcatgagcgggaagtcgccctcgaccggcacgagacccagcagatagcgccctaccgatccgatgaagccgcccaaacccacgcacagcaccgccaccatcgcccgctccttcgcactcgtttctatatcatgcaagcatcagtatacccttgctcgtcgcgaagcgaatcctccgagccgtcgagagacaggggaaaacgcgagaatgcacggcgtgcaggttcgtcggaaagcatgaagcgccctcggacaactaaaaccgatccgcacgctccatgcgagatgccgctccagcagctccgaaaaccagcacagccgccgcatgccgcaaggagcggaagaatccgggttcgactcctcttccctacccttgacttcgaacactcgtatgcgtaccatatacgaacaaacattcccgcgaacatttgatctgacgaacggatggacgaatggatctggttgccaagctcgagattctcgccgacgctgctaagtacgacgttgcctgcacgtcttcgggcatcgaccgcgacgcccagaagggcaagctcggcaacacgctggccgccggctgctgccacagcttcgcggccgacgggcgctgcatcacgctgctcaaggtgctcatgaccaacgtctgcgtgtacgattgcgcctactgcgtgaaccgcgcgtcgaacgaggtgccgcgcgccgcgttcaagccgcgcgagctggccgacctcaccatcgcgttctaccgccgcaactacatcgagggcctgttcctcagctcaggcgtcatccgcaaccccgactacaccaccgagctcatgatacagacgctgtccatcctgcgcgaggagcacggcttccgcggctacatccacgcgaaagcggtgcccggcacctcgcccgagctcgtgcagcagctggggcacttggccgaccgcatgagcgtgaacatggagctgccctcccagaagagcctgcagctgctcgcgccccagaaggacaaacagcgcatcatcgcgcccatgcgccagatccgcgacaacatcgccgtggacaaggacacgcgcgcgctcgtgcgcaagcagaccacctacatgaggcagatccgccccaagaagaaggagcgcgccttcgtgccggccgggcagtccacgcagatgatcgtaggagcctcgcccgaaagcgacttccagatcctcaacctgtcggccgcgctctaccgcacgctgtcgctcaagcgcgtgttcttcagcgcctacacgccggtgaacgacgacaagcgcctgcccggcaccgacgccgtccagctcaaccgcgagcatcggctgtaccaggccgactggctgctgcgcttctaccgcttcgacgtcaccgagatcatcgacgaggacaaccccttcctcgatcccgacctcgacccgaaggcgaactgggccatcaaccacctggacttcttccccgtggaggtgaacaccgctccgctcgaggcgctgctgcgcgtgcccggcatcggcgtgcgcggagcgaacctcatcgtgcgcgcgcggcgcaccacctgcctgcgcgagcccgagctgcgcaagctgggcatcgcgtacaagcgcgcccgcttcttcatcacgtgcagcggcagctactcggggcgcggcgtcgacttctcgcgcgaagggctgcgcgcgcagcttgccgcgcccatcaagggcggcaaccacgggcggcgcgccgacaagaccacaccgggtcagatgagcctgttcgagagcgtcgagacgcccgagaaggcccgcatcgcgggcgggtcgggcgcacgcgcgctggaaagcggcgatgcgaccgcagcggcgtcttgcagcgatgcggagcgctcctcgaacgcggcgtcgtcgtccggccgcgccgcgagcgccgacgggacgtacggttggcagcgagccctcgaaacgccggaagccgtgtgcgcatgagccgaaagcccgccgagaaccagcccctcttccccgaagaacccctggccgaggtcgcctactgccacgacggctcgctcgagggcctgctgtccgccgtgttcgaggcgtacgcgcgccgcgaggacccgcaggacatcgcccgcgccgacgtcctgcagccgcggctcggccaaaccgtgcgcgtcatcgagacgaacgaggagcatgccgtgcgcgttcggcgcggcatcaggagggcgtgcggagacgccgcctacgatgccgtcaagcacgcctcgctcagcgaccacccggacgccggcaccatcgtgtaccgcttcatccgctacgccatggcgcagaacaggccgcacgattgctccggctgcaagcgccgcggatcatgcggcggcgcgtgcgggaagttcgcctgcacgggcaaggcccgccgcagcgtgctgggcgacctcgcccaccctgccgtcgagccgctccaccgcctcgcccgctccgtcatgaacgagcggcatcgtatgctgcagttcctccgcttcgagcatctggagaacggcgtgtggttcgcgcgctgcaaccccgcagcctcggtcatcccgctgctcatggactggttcagcgggcgcttcaacacgcagcccttcatcatcttcgacgaggcgcacaacattgccggcgtctacgaagggcgcgactggtacctcgtccagacggagaacgtcgacctacccgaccgcgcgtccgaggaacgcctcatgcagcaggcctggaagcgcttctacgacaccgtggccgtcgaggcccgctacaaccccgagctgcgccgccagttcatgcccaagcgcttctggaagaacatcaccgagatgcaggaagacctccccggaaaggaaatctccccgcgctagcgtccgcgcgtccctgcgaagcggccgccccctctttccgccaacggctaaccgcaggcaggccgtcctcgcgcgcgaaccccgaattcgcgtcgacggtcaagatgccaacgcggcgccgacccgtttccccgtcggaacaaccgcgatgaatccatcaaccgcccccgcatacccgaaggcgggtctttcgaaatgccgtttccagccgcaggtcttcgccagattgtttcacgtgaaacatttgttccaaccatcgctctgctgcgcaaagcagacaagcccaggcaaaatacggcaggggcggcgtcccggcaacgtcagcccatgcatccccccgcgctccgaatggcgaaaaagcatcgaattcggaaggacgaggctcatcgaacccgcccggtgcgcctcgttggaatccagccgcttccacgacctgcggcgatgccaaagcaagcgcgcctccgcacgcgcaaccctcttcgatgcttccgaattcaacctcttttcgccattcggagcggaggaatgcgcccaaggacggccgagggagggagggtagagcccgccttacgcgcgatcgggctcccgcacgccggacaggtcgaacgcggggatgaagctgtcctcggcggctccgccctgctgccagaagtagtcctcgacgcccagctcgtcggcgtaatcgagcagaagctcgtactcgtcgtcggagacgcgctcggcaagctcggggcagcggtcgagcgtcgccgcggctcgcgcgtcgcccgccttcgcggcgtccgccagcacgggcgtgtactggttcatcagcgacagcagcaccgcgtcgccgaaacgctcgtgcacgaggcgcacgacccgcttcgagtcctccagcgcgcccggcagcatgaggtggcgcaccacgacgccgccggtcagacgctgctcgccgtccacctcgtcgaacgtcggtccgcccgcctcctccaccatggcctcgagcgccgccagggcgacctcggggtaatcaggcgcatgcgagtagcgccgcgccagctcggcgtcggcgtacttgaaatccgcgaggtacgcgtcgaccgtgcccgcgttcgcccgcacagcggcgaccgtctcgtacccggacgtgttccatacgacgggaagcgccagccctcgctcgcgtgcccaggcgacggccgcgcgcgcctcgggagcgtaatgcgtcggcgtgacgaagttgacgttgagcgcgccctgctcctgcagctccaggcacatctcgcccaggcgctcgacgctcacctccgcgcccgcctcgcccgcggcgatcactgcgttctgacagtagacgcagcgcagcgggcagtgcgcgaagaacaccgtgccgctgccgcgcgacccgctgatgggaggctcctcccagaaatgcagcgccgcacgcgccaccacgaggcgcccgtcggccccgcacgccccgcgctcccccgccgcccgatcgaccccgcacgagcgggggcagaggtcgcatgttgataatgccagattcatagactcaccggtccaataatgtcagagagggcggctgtggtgtccgagatcgtgaggaaggcgaggacgaagcgcatcctgcaagaagtccccgcaggggatacttcggtacgcgagtcctcggcttcgcggcgagatcgggtgccacagccgcccgcagcgtcggcaaggtccgtcggccgtaggccgacggaaccctaattggccgaatacgcgccgtagccgggataatcgccgaaggaaccgtggtcgtgcccgtggtcgtggccgtcgtcgtccagatcgtcgaagccctcggcgacgtcgccgtaggcctgctcagcgcgcgtccagtcgaggccctgctcggcgcacgtcttctcctcgccgtacaccagcgccagcgctgcaggcgccttgtcggagccgccgatgacggcgagcagctccagcaggtgcaggcacgcctcggcctgcggtaggatgaggtccacgtcgtcggccgccgtcagcgcggcggacagctcggccatgaacatctcaaccgtgtacatgccgtcgaaacgccccgtgttcaccgcggccagcacctgctcggccacgggcgtcgccgcacccacgcgctccgtcgcctggtcgagcgaggccgacgagcgacgcacggcgcggtacagcgcgtcggcctccacggccgagatcacctgcgccgtcgtctgcagcgtgtacgcggcgcgcgcgagctgcgcagagcccgccccgcccgtttcctgcaccgtgccggcgatcgcttccagcacgggacgcgcctccgccacggcctcctcgtcgcccccgacgaagcacaccaggttgtcgcggtcgccgaacgcgtcggcgcgggccacgtccaccaccacgagcggcgcctccaccgacatgaggtcgctcaccacggccacggcgttcagctcgcgcgcgaagctgggagtcgacgccgacaggtcgatgagcagcgcgcccttccccgccgcctgcacgagcccctgctcgtcgaagtacgcgtcttccagcgccgtctgcgacgtgcagtacgtgatgatggcctcggcatgcgcgacgtcgtcggtgcgcgtgcagccggccgcctccaggcgggacaccaccatagcgcccaccgtctcgttgccggagtatacgaacgaaagttccatctaagcacctttcccgatgcgttcgaattccatgtgtcgcgagccgctcgcgcgcgggctactcgccgcccttgaccttcttcgcgatgcggtcggccaccgacagctcctcgcgcttgtcgttgccccagaacaccaccgcgatcatgtccggccccacgtgactgccgatgaccggcccgatgctgctctccagaaacaggatgctgtcgtcgcccttgcccagcgcctcctgcaggcgagcggcgtccttcgggcagtcggcgttgccgatgaccacgcagcgacccggccgcgagtcggccttgcgcttgttgtagtactcggccagctgcttgatgcccttcttgcgcccgcgcgccacgcccgccagcgacagcttgccgtcgacggtgatggtgagcagcggcttcacgtccagcttcgagcccgcgtacgccaccgagctggggatgcggccgccgcggcgcagggcctccaggtcgtccaccatgaactcggcgtccacgaagtagcgcgcctcctcggcccagcgcgcaagctcctgcgccgtcatgccgttgtcgcgctgacgcagcgcctcgtacaccagcagcgcctcggccaccgaggccaagcacgtgtccacgatgtacagctcggcgtccggatgctcggccatcagctggtcgtgcacgagcgccgctgcatcgaagctgccggacagcccgctggagaagctcaagtacacggtgggcaccccgcttgcgatggcgcgctcgaacgcgtcgcggaacacgggcacgggcacctgcgcggtggtaggctcctcgccgttgcgcatcgcctggtagaaatcgtgcgccgacgaggtctggtacagatcgtcggcatgctcgccgtcgctcatgatgtaggggaacctgataagctcgacgccttcccggtcgacgacctcgaacggcaggtcgcagcacgaatcgatgatgaggttgcacttatgctgcatgagcgtttctcgctttctgagcggtttgcatacggtatcggacgatcgcgcgactctacgaagcgcaggcgcgcgcctgcaccgggccgctgatcttgccggccagggcgcttgcgcactcataggcaagccccacggccggtcccacgtgcaggccgatgacggggctcaccggcaacacgctcaccgtgcgcccgatgagcggctcgacgacctcgcgcgcccatgcgacggccggcgccttgtcgccgatgtagtgcaccacgacgtgcttcaggccgtgctgctcgacatccttcttgaactcggtcacgatccggtcgagcgccttcttgcgcgtgcgcaccttcgcgaacgtgtcggccttgccgtcgctcaccgtgagcacgggcgaaagctggatgaggttgcccagcagcgccgccgcgttgccgatgcgcccgccccgttgcaggaacgtgagcgtttcgggcgtgaacaggaagcgggtggactcgatgccgcgcagcgccgccgctgcgcatcccgccaggtcctcgcccgcgtcgcgcgcggccaccgcgtcgaacaccggccacgcttcgtcgtagccgcacgacgtggagtccacgatgacgtaggtgaagtcgatgttgcgcgccttcacggcgcgcgctgcgcgcacggcgccctcgtaggtccccgacagctccgacgagatgaagatgcccagcacctcgtcgcccgcgcgcgccgcctcctcgaacacggcttccagcgtgtgctgggacggctggctggacgtggggatgttgtctaccatgtcgtagatgtcggcgtagaacgcgtccaaatccatctcagagtccgcgtattcgcatccctcgcggttcacgaacagggtgaccacgtcgatgccggcttcgcgcgccacgtcggcgggaatggaggcgaccgaatcggtgagtatcttgatcatgacatccttccttgacatggggcacaggcgcccgaaccagtcgatgacgtaccctcgtacactacgcgatgccccgcagcttcacaaccagatcgcgacggcgctcaaaaagaccatattcgaggcctaccggataggtgtgggcgttcagcatgcgcttctggctctcgtcgagcgtggcgaggcccgcctgggcacgctcgcgagccgcccatgcgtcgcgttcggacgcgtcgagcaccgtgcggccgtcgcgcgcgagcggcttgagcagcgtctcggagcacagccccgagaggttcttctgccgcaggtcgtcggacgggtcgacgatgacctcgcgcagcttgtcgccgggcgcgttcacgtcgaacaccatatcgccggccaagcgcccgctgccgcagtagaagtagcggcgcacgtccagcacgccgggcgtggtcagcttggcggccgactcggagatcttcaggcggtcggtccactcgctctcccccgaggcgcgcgtggccgacagcttgtacacgcctcccagcgtgggctggtcgtaggcgcaggccagcttcgtgcccacgccccacgaggtcacctgggccccctcgtcgcggatggactggatggtgaactcgtccagatcgttcgacagcacgatgccgcagtcggtcaggcccgcctcgtccagcatggcgcgcgccatgcgcgcgagccacgacaagtcgcccgagtcgatgcggatgccgctcaggcgctcgccgcgctcgcgcatctccagtcccaccgtgatggcgttcttgatgccctgctccacgtcgtaggtgtccacaagcagcacgcagttcttcgggaacgcctcggcgtacgcgcggaacgccgtgagctcgtcgggaaacgacatgacccacgagtgcgcgtgcgtgcccgacacggggatgtcgaacagcttgcccgccagcacgttcgacgtggaggcgcacccgcccacgacggccgcacggctggcccacaagccgccgcccgcgccctgcgcgcgccgcaggccgaactccgccacgggagcctgcgccgccaggcacacgcgcgccgccttcgtggcgatcaacgtctcgaagttcacgcagttcagaagcgccgtctcgatgagctggcaatccatgatggggccggtcacgcgcaccagcggctcgtgcgggaacacgacggtgccctcgagcaccgcgtcgatgtccacacgcagctcgaaggtacgcaggtagtcgaggaactccggcttgaacagcttgccgccgccgggcgcgtcgagcgagcccaggtaggccacgtcctcgtccgagaacgagaactcgtccacgaggtcggccagctgcgccatgccgcacgcgatggcgtagccgcccttgaacgggtagtcgcgaaagtacatgtggaagcaggcctgcgtgtcgccctggccggtctcccaatagccctgcgccatggtgagctggtacaggtcagtcaacagcgcgtagtcgatcttcattcccgatgagcctcctccgtacgtccgctattcgccgctcggcgccgcgccgcccgctccgggcgcgcccgcgccgtccgagccgcccgccttgtggctgcggcgacgggcgcggcgatgcccgccgtctcccgtcgggcggccgccctcgccgctcggagcccccgagcgctcggggcggggcgccttgtcctggcgcggctgctgcggcttctggccctggcgcaggcctgaggacttctggccgggacgaggcttcgagggctgcatgcccttcggcccctgcttcttcgcgccctcgcctccctggcgctggccctgctgcttcttggagccgccgttgccgctctgaccgccctgacccgaccggcgcttctgctgctggccgccctgcccgcccttcggcgagccgccgccttgctgcttctgcttgcgcttctgcgtctcggccgcctcgggggcggcagcgccctcgccgccgaccttcgtcgagcgcctcctgcgcggcttgcgcgcgctctgcgcctgcgcgtcggcctgtttgccgcccttctggccgccgttgccgccgcccttctggccgccgcccgcgcggccgccgttcgagccgccgcccttcgacggcttctgaccgccgcggcccgtgcggcgcacggaacccggatcggccagcttgtcctgcccggtcagctgcgtcgtggtgccgaacagcgccgactcgcccgcaaatccgatagggtcggccgtcgtcgcgtcctgccacgcctcctcgcctacgcggttcgggcggttcgagccttcctcgggcgggtcgaagtcggccagcggcaccttcacgggcttctcgcccatgatcttcagcgacacgatctcgcgcggcacgtcgagatccaccaccttcgccggcccgtcgggcgtctccaccgtggcgttctgtttcggggcgcggctcttgaagtccttgtacgcgtcgaactcgtagcgcagacagcacatgagccgtccgcacacgcccgatatcttctgcgggttcagcgagaggtcctgctccttcgccatgcggatggacacggggcagaactcgccgcccaggcgcttgcagcacagctcctggccgcaatgccccaggccgcccaccatgcgggcctcatcgcgcacgccgatctgtcgcatgtcgatgcgcacgcggaagtgcgcggccagcttgcgcacgagctcgcggaagtccacgcgctcctccgcctcgaagtagaagatggccttgtcgccctcgaacaggtactccaccgacacggggtgcatgtcgccgttgccctcggcagccatctccttgaacacgggcagcgcctcgcggctcttcgcctccagctcggccgcgcgcgcctcgtcctcgtccgtcgcgatgcgtttgacaggcttgagcgggcttttcagcttcttgatctgcgcctcgtcggcctcgaacacgtcgtgggccgcgcggccgaactcggtgccgcgggccgtggacacgatcacgccgtccccggcgcgcacgtccaggtcgccggcgtcgaaccacagcgtcttggggttgtaatacaggttaatcggcgctatgcgaaccatagagcacctctcttatctcgaacagcatcgcgtcgatgcacgtttccggtgatacattatacgagatcgcctcgtcgcagcggcgcacggccgctagcgcggcggcggcgcgcgcctcatcggtggcctcggccgcctccatgacggaggcgcgggcatccacgttgatgacgagctcgggcgtctcggcgcacacggccatcacgtcgcgcagccacgagcgcacgatggccgtcagctggcgcagcgattcgaaggtcttggccgtcagctggcgcttgttgcgcgcctcgatctggcggatggccgacttcgccaggaagtccgcattctcggcgagctcctgctcctgctcggcgcgcgccacgtccagcggcgccttcaccagcaccacgagctcgctcgcgaacccgacggcgtcccagtcgtctgccttgcgcagacagcccagcacctccagcacgcgggtgcggaacgccaggcgctcgttggacttcaagaactccacggcacgcgtaatggagccgtcgcaggcctcgacggccatgcgcgcctgctcgcgcgacgcgcccgtgttctgcacgatgatgccggccgcctcgcttgccgggatggtgcggaacggcaccacctggcaacgcgacagaatggtgggcagcacgctctcgcgcgtacgcgcgagcaggatcagcaccacgtccgacggcggttcctccagcgtcttgaggaacgcgttggcggcctgcacgcccagcaggtcgacgcgatcgaggatgtagaccttcttgtgcgcctggatgggcgccatcgacgtatcggccacgatgtcgcggatctgctcgaccagatagccgcccgcgccttcgggcgcgaagtagcgcacgtcgggatgcttcttgcgcatgatgcgccggcaggcgtcgcatgcgccgcagttgcctccgcgcgggccggaggcccccttcgggcacagcacggcctgcgcgaacgcgtaggcggccatcgttttgttcgacccggccgggcccgtgaacaggtaggcgtggctcaccttgccctgcgccaccgtggcgcgcaagaattcgcgcacctgcggctggccgaggatgttctcgaacgcgtcggccacggctttacgcctccactttcgaacgcttcacgtcgaggcggtcgaaaaaggcagggtcgtcgtcgacgacctgcgccatccaggggaacaggtcggccagctcggcgaacaccgcagcagccgtctgcgacttgttgccgtcggagaccaccacgcgcacgcgctcggggtcgcgccgggcgatttccagaaacgcctcgttcacgcgggcatggaactcctcgcccgcctgctcgaggcggtcggccgccccccgatgcgtcgcgcgcacgaggcccacgttcgcctcgccgcccgtggccatgaggatggtgcggtcgggatgcacgccctggcaggcgaactcgttcacgcggtcgacgaacatgcgcggcaagcccctcccgtaggcctggtaggccaccgtcgaatcggtgaaacggtcgcacagcaccacggcccctcgcgccagcgcgggcgcgatgacctgcgccatcagctgcgcgcgggcggcctcgtagatgagcagctcggcctcgtcggacatgccgccgttcgccgggtccaacaccacggcgcgcaattgctcgcccacctcggtgccgccgggctcgcgcaggcacagcacctcgcggccgtgcgctcgcagcgtctcggacaaaaagcggatatgcgtcgtcttgccggcgccctcgccgccctcgaacgtgatgaagatgccgcgcagggcatcggttgcttgtgcggattcgtgtatcacgggtatggtcgttccctctccctttgaaagcgtgccctggctagacgaggtcgtacacgtcgcggccccgtacgtcgacgccgacgaagacggggaaatcgaccacgtcgatgcggcgcagggcctcggttcccagatcgtcgtacgccaccgtctccgatgatgccacgcacttcgccagataggccgcggccccgccgcatgccacgaaataaacggaacccgtcgcgcggcaggcatcgcgcacctcggacgagcggcggcccttgcccaccgtcgccgcgacgcctgcgcggtgcagcgcgggggcggcgaaatccatgcggctggccgtggtgggcccgaccgcgccgaaggggcgcccggccgcttcgggcgtgggacccgcatagaagatggcctgaccgtccagaccgtagggcagcgcgccgccggcggcttccagctcggccaagaggcgcacgtgtcccgcgtcgcgcagcgtgtacaaagggccggtgagcagacaggagtcgcccgcctccaaccgggccagcgcggcgcggtcgaacggcaacgcgaggcggatgcgatcagcgctagccatggcgcacctcctcgcccgcatccgcggcgcttcgcgcacagcgcgaacgatcagacgcaggttcagcgaagtcagcgagggtttccgcagtgcctgagattcgggggatggcgcaggcgccgcgtacttcggtacgcaagcctgcggcatcgcgcgaagatcgggtacggcgggaagccgcagcgtcgagccgttccgctggctggcaagccagcggaaccgtgatcctgcgcatggccgagcagcccatgttgatggccaggggcagcgccgcgatgtggcacggcgccgtggccacgcgcacggccagcgccgtcgtgcggccgcccaggccgccgggtccgatgcccgtggcgttcacggccgcgagcagctcctcttcgagcgcgcgcaggcggtcgtcggccgcgggctcgtccacaggccgcatgagcgcccgcttcgccaagccggccaccttgtcgaacgtggagccgatgccgacgcccaccacgagcggcgggcaggcgttggcgcccttctcgcgcacgcagcgtacgagctcgtcgacgatgccctgcttgccggcacccggaaccagcatgaccacgcggctcgcgttgtccgagccgccgcccttcagcataacgtgcagccgcgccgcgcccggctcgtccacgggatggacgtcgcagaacgcaggcgtgttgtcgcccgtgttcgcgcggtcgaggacggcatcgcgcaccaccgacttgcgcaggcgcgcctcgtcgtaggcgcgggcgacggcgtcgtccacgtcggcgaacacgtcgccgcgtacagctacgtcaggcccgatctcgaggctgacccacacggtgccggtgtcctggcagataggcacgcgatcctcggcggcgatcgccgcgttctcaattagctggtcgagaaccgcgcgcccgcgcggattgccctcgagctcccgcgccacggcgagccccgcttcgatatcggccggcagcacgcaggccagcttcgggatggccgcgtagactgcgtccgcgacctgtgatttcgtgatgatggtttccataaggagagattataccgcaagcacgttactccttccccgcccccgtcgatcgcttcggcaaatcttcccatgaacgcatacgctcgcccgcatccggcgtcccgccgcacctttccttaaggcgatgtgcggcaaaatcgtcgttttggcagtctcgacgggcttcgacgcctttttctgggaatcggccaggcgaaaccccagctcgcgttccgacggtgttccggaacacggcttccgaacgagctcgacgtgccaaaacgacgattttgccgcacatggagtccggaaaccgtgcattcgcgatgtttctcgggacgagccgagatgctactcgaagctcacgcccaacagcttcaaaccccgaaaggcggcgtaggcctcggcgaggtcgcgcagcttctgttcggagcaggcaacccacgtagccagcgagacggacaggcccgcacccttcttcttggccgtccacgtgcccacggcctccccgttgcgcacgacgacgccggggttcgcaacggtcttccagatacgccgctgcaacgaaacgtcgacctgcaaggtggcgcggtcgcgttgatcgagatagggatcgtggccggcaagcagcagcacctcgcgctccggcggctccgccgatgcgagcgcatcgaggtcggccgccagcgcccatgccttcttgccgccgaactccaccggctccagctcgtccgcaatgcccttccacatgcggcgcgcctgcgcgcccgagcaccccgtccaggccgcgagcgcatcgggcctcgtcggcccgtagcaatggacgaacttccgcaccagacgcgcggcggcgtcagcgtccggctgcagcgcgccgcccgtccaccttcggtacgaggtgaacgtgggcgttgcgccggcgcgctcgccgaacacgacgaggcccatgaacgagcacgggcgcagcaagaacgacaccgcggctcctcccaccgtctgcttgtcggggctgccgtacatcgacggctgtcgccacgccgcgcgcttgttcgcaggaagcagcggctcgacccaatccgccaacgtttgatcgagcgccaccttgctcgcgatcgcctcgtcgtcgaggcgcggcatcgcccgcacgagcagttcgagcagccggtcgaactccatgcccagcgcatcgagcgcaaggccgatgcccttcgtgtacgcccacggctcgcccttcgccggaacgagcgccgacaggaacgccgcgctttcggccgcggggaacaccacgggcgcgccgcgcaggctccacgcctgcacgagcgtcttctccccgtacagcaggcgctcggcatcttccctgcgacaggccggcgcgcggttgaacaaggccgtctcccatgcgcccggcggcgtgttctgcattccgcacgcgcccgcaagctccgccgcgtcttcgatgccgtatgcgcgatcgagatgatgcgcgcgcaaacgatgccgtcgcgcctgctcgacgcttacaaccttcatgcgctacttcatcacgaagtcgccggcgcggcgcggcgcggttcgccggtaggagacggcgggatggcccagcagcatgcatatctgcagcggcttgtcctccgcttcgaggaacgccttcacggcgggaagctcctcggccgcgcggcacaggtagccgttgaacagggcgcccaagccgagcgatgccgccacgagctccatgttctgcgcggccagccccgcgtcgtcggcgcgctcggccgccacgaacgcgacggcgggcgcattgcggaacaggaagtcctgccgccccgcccgcgcgtcgaccaggaagggcttgtagagcttgacccagcgcggcttgtcggcggcagggggcgccagcatgccctcgatgccgtcccacacgaggcgcttgaactcgtcgagctcgtcctgcaccacgatgaagcggcagccttgggcgttcttcgccgtggcggtgtagcgtcccgcctctagcacgaggcgcagcgtgtcctgctcgatcgtattcgggaggtagtcgcgtacgctgcgacgcgacttgacgacccgaagcattgtgcgaggatcgacagccgcgccggcgggcacgcatgtttccacgtcagccatatcgtagcttggaatggacaccgccccggtggggcacacggccacgcagtgcccgcacaggatgcagagccctttcacgcgcgccgtgacgccctctacctcaaggttcgcgcccacgcaatcgtccacgcagcgcccgcacccgatacagtacctctcgtcgatctcgaccagcatgctgagcccttccttcccagggggagcgcaacccctcccttaacgacggggagcgccgcccaagcgacgctcccccgatccgcactatcgcaacctacgccgaccctctcaaccggcagggacaggaggagtccgtacggcagcaatcgctgcgcgtgcgggaagttctgcgcggctccctcccccgtctcgcagatcggctactccggcaggttcgccaatcccgcgcgcacgctgtcggcgctggcgcgcagcgcggccagctcgtcatcgttcaggtcgaactccacgacctcttcgacgccgttcttgccgaggcgcaccggaacgttcatgtagagatcctcgatgccgtactggccgtcgatgtgcgcgcacacgctcatcacctcgtgcgaatccgtgaggatggcctccaccatcttcgcgatggacgcgccgggcgcgtagtaggcgctgccggtcttgaggaaggccaccacttcggcgccgcccttcacgcagcgctgcaccacgctggccacggccgcctcgtccatgagttcagtgatgggggtgccgtccaccgtggtgaagcgcggccagcacaccatgccctcgccgtgcgcgcccacggcccaggcggtcacgtcggccggcgcgcagcccagctgctcgcacaccgcgaacgccagacgcgaggagtccagcacgccgcccatgcccatgagacggttcgcgggcaggccggactcccggaacgccagcgtcgtcatcacgtcgagcgggttcgtcacgcagatgaacacggcgttcggggacgcctccatggcctggccgatcaccgacttcatgatgccggcgttcacgccgagcaggtcctcgcgcgtcatgccgggcttgcgggcgatgccggcagtgatgaccaccacgtcggaatcgcgcgtgtcggcgtaatcgttcgtgccgatcaccttgaccgtgaactgctcgacgctgcgcatgtgcatcatgtcgagcgccttgccctgcggcaggccctcggccacgtcgatgagcacgacgtcggccaggttcttggacgcgatgatgtgggctgcggtggcaccgacgttgccggcgccgacgatggttaccttgggcatgtgatagctctcctcgctcgttgatcgtacttcgcatgattgtaccgcttggcccgtcgctgtgttttctcggcgggccaagcggacggtttcttcacgccttccgcgctttcgcctagtccttcttcgcggcgggcgcgcgtttggccggggctttcttcgccgcgggcttcttcgcgggagccttcgccgccggcttcttggccgccgtccccttggcgcccttggcacccttctcgtcttccttctgctccttgccggggcagtcgaagttggggcacagcttccacgggccgcgcgcggtggtgacgatcaccatcggggcgccgcagtgctcgcacacctcctcggtggccgtgagcgcgccgtactggggcagcggatagcccgtgccgcagtcatcgtagttctcgcagcggatgaagcgcttcagggtgcgcgggttcttctgcgcgatcagcttcgcctggatgcccttctccttgcaggccgggcactcgcccaccaccacgtcgggctcctggttcgtggagcaatgcgggtcgatgcagatggtgcgcggtttgctgcggaacgcggtcaccttcacctggggcatgccgcacgtgggacacggctcggggacggcctccaccttgcccttcggcagcgggtacgtgacgtcgcagtcgggccagccggcgcagccgatgaacatgctgcgggtcttctgcgaggcgcgcagctgcaggtccttgccgcatttcgggcacgggcccacgtaggcgtcggcggccacggcgtcggccagggcctccttcacctcctcggagtgcggcagcaggctggccagctgctcggacaaaaggttgcggctcgtgtccaccacctgggccttcgtcgtgcggccctcggcgatgttgtccatctcctcttccagctcggccgtcatctcggggtgcgtgatgtgcggggcgaacttgtccagcgcatcgcacacggccatgcccagctggctgggctcgatggggtcgttcatgcagtacttcaccgcatagaggcgctcgatgatggcatggcgcgtggacttcgtgcccaggcccagcttctccatctcctggatgagcttgccctggctgtagcgcgcgggcggctcggtctgcttcttcgtgcagacggcgccgttgaacgcgacggtctcgccctcggaaagcgcgggcagctgctcgtctttcttgaggccgtaggggtagatagcgcggtagcccggcttcaccagaacgtcgcccttcgccacgaacggctcggcgttcacgtcgagggtgaccttcgtgccctcgatgacggccgcctcggacagcgtcgccaaaaagcgccgcgcgatgaggttgtacaacttgtagtcggcgggagccagatcgtcgggcgtggccttggcggtcgggtagatgggcgggtggtccgtcgtctccttcttgccgcgcgtggccgtgagcttgcccttcgccagtagctccttgcagtacggcgcgtaggccgggttgccggagatggccttcaccgtgtcggcgaggtcgagcgagctcgggtacaccgtgttgtccacgcgggggtacgagatgtagccgtccatgtacaggctctcggctatgcgcatggtgcgcgcggggctcaggccctcggccgacgccgccgccatgagcgaggtggtgttgaacggcgcgggcggctgcacggtgcgcttcttcttctcgacggacgccaccgtggcgcgcgtggcgccctccacatgggccatgacggcctgcgcctcggcctccgccttgaagcgcgcggtggcatgcggggcctcgaacgagtcgggatcggcaccgaacgcgccgcgaatcacccagtagtcctcggggacgaacgcgaggcgctcgcgctcgcgcgccacgacgagggcgagcgtgggagtttgcacgcgacccgacgagcgcacgttgccgtagccggcgaacttcacgagcgtcaggtagcgcgtgagcaccgcgccccagatgaggtcgatgtcctggcgcgaggcgccggcggaggcgaggttcacgtcgagctcgacgaggttgtcgaaggcgtgcgtgatctcctctttcgtgaacgccgagtagcgggcgcgcgacacgggcgccgtggggttcacttcctggatgcagctgagcgcgtcgcttccgatgagctcgccctcgcggtcgaagtcggtggcgatgatgaccgagtcggccttcttcgcgaggttcttcagggagcggatgatctccttctccttgggcagcttgttgatgggcgcgtacacgaggtacggcagcgcgtccatcttccaggatttcagctccacgccgtcctcggtgaagggcttcttctttttgaacgggggcttcggcagcgacgcgggcagctccgccggaagcgtttcgccctcctcggtgacgccctgccatcccccgcgcttcttgtacaccatcgtcggcgcgaagtcgggctccaggatgtggccgcgcaggccgatggtcacccattcctcgccgtccacgtcgaagcggtacaccggcgtcgagtacaccttgtccgccttgggtttcttcacgccaagcaaatcggcgatcttctgagccgcgtcgttcttctcggttaccaccagcttcacgcggttccctcctgttctttccggccgcctcccgcagccttgtttcgttcacacggttgccccacctatttattaacgtgtgcggggatgggcgcgccgtcaagcgcgcatgcgccgcgccgttcgggcacagcaggtgttagcatacacgattttccgcgccgcgcgagagaaattgccaagctggcgaaaacggacgcgctagacgaaactgatgcgcagctgcttgccgagaccctcggccacgcgcttgagcgtttcgagcgtggggttggcgttgccggactccagccgggcgaacgcgctctgcttcatgccgcaccgctgcgcgagctcgcgctgagtgagattctcttcggcacgcgccgcgataatcgcatcgatgatgtcgtactccggccgcaaacgctcgtattcagcggcgtattccgggtctttcatctgctccgcatggtattcgctgagcgtggtcataaaggccgcctctcttcccaatcccgtttgtaccggcagagcggcggcgcactcctcgcgcacgcgtcgcatgcgcacttccggaaatcgagtggttatttcgttaccgcgggttgaagatgctggggtcgttttgtgaagcgccccgttctcgggtacccttgatcgcaagggatgagccgccgaaacgacccaccgccccgctccgcacgcaccacgaacgcagcagcggcggcgtcccgccgaacgcaacggccctctgggtcgagatacgggaggttacgcatgaaacgagtcctgggcgtgttcctcgggctgatcgccctcatcatcgtaggcatcgtgggcgtgttcgccttctcgggcaccggatcgggccccgccagcgacctggcgaacgacgcgaaggcagccgccgcgaacgcggccatcgacgcgaccggcctcaaggacaaggccaagagcgccctcgagggcagcaaagcgagcatcgccgcggcgaccggcctcagcgaaagccaggtcgatcaagccatcgagcagctcgacatcgacggatggcaagccgcctcgctgccctccaccgccacggccaccggcaccatcgacggtaacgccctcggcatcaacggcaccgtcaccacctacgacgatcccggctacgtctccgtcgaggtctacggccagacggtcacgctcgccgtccccgaaagcgcgcaggcttacctcccctacctcgcctacgtgcagtagcgtcggcagccgaggcaagcggtgcgggatagaacggctcgccgcatggcgcaaattccgtctcgcgcacgtttccagggatcgatctgcagcaaaatcgaacttttggcagcgttttcacgtttcgaacgccgcaagaagacgcccgatcgccaagctgtcgggaaaacgcctgatcgcccgaccgcctccgtgagaagctcgtttccgtgctgccaaaagcccgattttgccgcacataggcccaccgccgctgtcgcatgcggcgaccccagtcgacggaacgccgttcgggtgggacgcaggggatccttcgacttcgagctgcgctcgggatggctgggaagcgcgctcgtgcaaccctccctacgcggcgcgggcttccttcagcctgcgctggtaggcgcggacgatctgcgacagcgtgaagcacacgatgaagtagataagcgccatgatgccgaagatggcgaagatctgcgcggtagagttgtagctgttcatgaggatcatgccgcggcccatgagctcctgcagcgccatggcgccccacaggtagctcgtgtccttgatggtggtcacgaactgcgacagcagcgcgggcaccatgttgcgcagcgcttgcggcaggatgatcagcacgtacgtctgcacggtggagaagccctgcgaacgcgccgcctcgtactggccgtgcggcacgctggccaggccgccgcgcacgatctccgccacgctcgcgctcgtgaacagggtgaacgccagcacggccgcgccgatgggcggcagctgcgccacgaagaacgtgaacatgatccacagcaacagcggcgtgttcttgaatatctcgatgtacacggt

SEQ ID NO: 8779 - DNA, 404 bp, Unknown
  gut microbiota DNA sequence
tgtgaacagggtgaacgccagcacggccgcgccgatgggcggcaactgcgccacgaagaacgtgaacatgatccacagcaacagcggcgtgttcttgaatatctcgatgtacacggtggctatgccccgcagcacgcgggcgttcgacgtgcgcatgaccgagatgaccgtgcccagcaccaccgagcagaggatggccaaagcggatatgagcagcgtcatgccgagcccctgcaacaggaagcgcatgttgacccaggtgaacagcgcggcgatatcgctcatcagcgatccttccgcccgtcgtcggtcgtggccgcctcttcgccctcggccagctcggcgcgctcgacgtccatggaacgctcgtcggtctcggcggcctcctcggcgtcctcgagcgc

SEQ ID NO: 8780 - DNA, 801 bp, Unknown
  gut microbiota DNA sequence
ggcgaggccacgcaccgcttcatgtacaaccgcagctttgtgcgccactgctccaactccagcgccctcaccatgggtcgtctgacgggagcggcgctggccacggcgtaacgacccgatcttccctcgcgcgcaggccggaccccctccccggcctgcgcttgcgtttgcccgccgtcaagcatgcgtcgaaaatccccgctctatcgtcccataggacgatagagatccgcacgcgcttgtcgcggcaccgagcgcgacgaatgtttcacgtgaaacattcgttcgattacggattcgttgcgggctttgccctcgcgacggcgtcaccccctccccgatggggttgccaacgaaaagggctaactcttcttggcggcgctcgtctcctctatgaggtcgagcaattcctggcgcgagtgcacgtccatcttcgcgtaagcgtggcgcaggtgggttttcaccgtgtgctccgacagcgtgaaacgctcggcgatggcccgggcgctgcgtcccgccgcaaactcctcgatcacttcgaactcgcggttcgtcagctcgtaggtgcccttcatctgcacgagcgcatcgcctgccgacaggtgcgccagcgggacggccgccgcttcctcgggggcgctcgcatcgccgaccgcatcccgcttcgacgcatagcgaaggtagctgcagaacatgagcgccagcgtggccaccagcagccacaccgagccgacgagcgcgagctgcggatcgacgccggtttgctccaacagcgtctgcgccgcgaagcgccccagcgcc

SEQ ID NO: 8781 - DNA, 1381 bp, Unknown
  gut microbiota DNA sequence
tcttcatctgcacgagggcatcgcccgccgacaggtgcgccagcggggcgcccgccgcttcctcgggggcgcccgcatcgccggccgcatcccgcttcgacgcatagcgaaggtagctgcagaacatgagcgccaacgtggccaccagcagccacaccgatccgacgagcgcgagctgcggatcgacgccggtttgctccaacagcgtctgcgccgcgaagcgccccagcgccaccgacagcctcgcgacgcccaaggccaagcccagcaggaagaacgccggcagcttccgctcgttcgcctcgctgatgaacatgagccacagcagcacgtagaacgagatgaggaacgcggtcatcagcgatccggccacgtgcccgtcggcgacgttgaggctgcggtacagcaagatggtgaccaggcacaacgcggtgatgggcgtgatgtagtcgatgttcgccttgcgcggcttcgccaccagcagcacggccagcatggccacggccgcgatgatcccgaacaggccggtgaggtcggtctgcgcgtactgcaggttgttgtggatgtcgagctcgatcacgaacccgcagatcagcgagaatgcgaacgttcctgcgaccgcgcgcttcgtgcgcgaaagcgcctcggccatggaggtagcgggtgcgacggattccttcatctgctgggcgacgaacgcgttgttgcgcaggcaccacagcagcgcgacggtggacaggacgaacgatgccagcagcatgatgctgcgcccgcctgggaacagcgagctggtcagcggcggaagcagcgtatcgatgaggtacgcggcggcgatcaggggaagcgagagccgcggccggtagctggtgaacacctccatccagcagaggatggacagcgaccagcccatgcccgccgtcacctgcatggcgataagcgcgatatcgtttgtgttgcccgacgcaacgagcacggcgtagatcgagctgacgacgacggccgtgacgaacagcggcttcgcccggtcgatgcgcccgaggtaggagaggacggcgacgacgaggaacgtgaggccgtcggccgcgaggcctaccagggcgtagggggttgggctgtagggtcccgtgttgaggtcgagcagccgcgcgccctgcagcaggccgaacccgagcgtggccaccgccgcgagggcgaggattcgcgttttgtcagatgcgtgcgcgttcatcgtttcccctttgcttgcgaaacagtcgcgccccactataacgcacccgcgcccgccgcgctctgcgaagccgagcagaaccgcacagatgtttcacgtgaaacactcgctgctcgcaccgccgcgatcatgcgaccctgtcggacattgaag

SEQ ID NO: 8782 - DNA, 373 bp, Unknown
  gut microbiota DNA sequence
tatcacgaacccgcagatcagcgagaacgcgaacgtccctgcgaccgcgcgcttcgtgcgcgaaagcgcctcggccatggaggttgcgggtgcgacggattccttcatctgctgggcgacgaacgcgttgttgcgcaggcaccacagcagcgcggcggtggacaggacgaacgacgccagcagcatgatgctgcgcccgcctgggaacagcgaactggtcagcggcggaagcagcgtatcaatgaggtacgcgacggcgatcaggggaagcgagagccgcggccggtagctggtgaacacttccatccagcagaggatggacagcgaccagcccatgcccgccgtcacctgcatggcgataagcgcgatatcg

SEQ ID NO: 8783 - DNA, 283 bp, Unknown
  gut microbiota DNA sequence
gcgctgcggcgcctgcgcccagtttcgccgtgcgaggttagggcgatgggcgcgctacccgctcactacgcggggcagggcgatgtcgtggggctcgcaggggacggttttcacgcgctgctcgtcgaaggcgatgccgaccacggcggcatcggcgcgcaagcgggggagcagctggtcgtagttgccgccgccgtagcccaggcgccgtccggcatcgtcgaaggcgaccagcggcaccaccacggcgtcgagctcctcgggatcgacggcctggaacccg

SEQ ID NO: 8784 - DNA, 1050 bp, Unknown
  gut microbiota DNA sequence
cgacgaacagcggcttcgcccggtcgatgcgcccgaggtaggagaggacggcgacgacgaggaacgtgagcccgtcggccgcgaggcctaccagggcgtaggggctggggctgtagggccccgtgttgaggtcgagcagccgcgcgccctgcagcaggccgaacccgagcgtggccaccgccgcgagggcgaggattcgcgttttgtcggatgcgtgcgcgttcatcgtttccccttcgcttgcgaaacagtcgcgccccactataacgcacccgcgcccgccgcgctctgcgaagccgagcagaaacgcacagatgtttcacgtgaaacactcgctgctcgcaccgccgcgatcatgcgaccctgtcggacattgaagcgaacgaatgtttcacgtgaaacattcgggttgcggaagaagcgcgccaggcgttttcgtgcccactgcaaattgcgcttccttgatcgagcgcttccgcgtcgatctgcacgctgcggcgcccgcgcccagattcgccgtgcgaggctaggacgatgggcgcgctatccgctcactacgcggggcagggcgatgtcgtggggctcgcaggggacggtttccacgcgctgctcgtcgaaggcgatgccgatcacgacggcatcggcgcgcaagcgggggagcagctggtcgtagttgccgccgccgtagcccaggcgtcgcccggcatcgtcgaaggcgaccagcggcaccaccacggcgtcgagctcctcgggatcgacggcctggaacccgtcgcgctccagcgcttcgcaggcaaggcagcgcaggggcgcgccaaggaaccccgctgcggccgcgtccagctgctcgcgcgccacgcggtagaatcgcatctggggcgacccgctcgtgccgccggtttcgcccgctgcccgccgtccgctcgcctcgcctgcagcccgcgacccgctcggcattcgcggcacgtctcccgcccgcggctcgctcggcaccggcgacccgcctgcttcgtccgcgcccgcgcgacccgccgcccgcgacccgcccgc

SEQ ID NO: 8785 - DNA, 194 bp, Unknown
  gut microbiota DNA sequence
ggggggtgaagtcgtaacaaggtagccgtaccggaaggtgcggctggatcacctcctttctagggagacacgtacgtgtccggaggggtcgagcgagagctcccccgcctggaaacaacgaaaatctctttcgggtcccgtcgcgagggtccgcctggcctcttcgcccgctgtctcagcatccggcttccggg

SEQ ID NO: 8786 - DNA, 4111 bp, Unknown
  gut microbiota DNA sequence
tcccgcgagcgcgatcgtgggcgagatagagggggaggacgatgtataaggtcatggtcatcgacgacgaggacaacctgcggcaagcgctcgagcagctgctggtgtcgaacggctacgcgttctgcggcgctagggatgcggaaagcgggctggagctgctggccagcgagcatcccgatttgctgctgctggacgtgatgctgccgggcacgaacggcttcgacctctgcgcgcgcatccgcgagcagggccgccgcatcccggtgatcttcctgtctgcgaagtgcgacatcgtggacaagagcatcggcttccgcgccggcggcgacgactacgtgacgaagccgttcgattccaccgagctgctgctgcgcatcgaggcgaacatccgtcgccacaaggacaccatcgatttcgcccgctgccgcaaccgcgagggcgtggcgcgcatcggcgagctggaggtgcggttcggcgaatacgaggtgcgcgtgaaggggcgcccggtggcgctgaccacgaaggagttcgagatcgtggcgtttctggccgcgcatccgggcaaggtgttcacgcgcagccagatccaggagtacatctggggcgagtcggatgccgactgcaagcccacgaacaacatcaccgtgttcgtccgcaagattcgcgagaagatcgaggagaacccctcggagcccaagtacctgctcaccgtccagcgggtaggctacaagatggccgacaccttggagtaggcggcatgcgctgtccgcagagcggtgcttcctcggacacgtttgtctggcgagtgtgcgaacgaccggccgtgtcggcagatcgccgcattctggcaggaatcgacgggattccgttctgcgagggtgcaaaatgcgactcccgactgccgctggacgagctgcctttgcattgcgccagttcagctcgttgccatcgaatcgggttcggatgatcggaggagatggcgacagaatcccgtcgatttctgccagaatgcggcgtagcgacgcgggagcataggcgcgtgaactggatggcattcggtagccgcgataagcataattgcctattgaccagcggcgttaatacgcggttaagaactttttaacgcaaaacttatgtccgatttatcgcaatatccttcggcgctccgtaaagtgagactcatgaaaggccagggggaacgaggcttttcaccccgcccttcgcagaacgcgatcccctccccgccatctgcgaagggcgagcatcggaaggccttgcggccgaggagtgaaaaagagaggagcacacatggctgaacaagcaacgcatgggttcacccgcaggagcttcatcaagggcgcggcagtgctgacagcgacgggcgcgctggtaggctgcagcccccaaacccaaaacctggaaaaagccgaaccgcagaaggaagccccccgagacgcaaatcttctccggcgtctgccgtggcaactgcgccggcggctgcttccttaacgtgcacgtgcgcgacggccaggtggttcgtacgtccatgcgcgagatgcccgatccgcagtacaaccgtatctgcatgaagggtctgagccatccgtatcgtatttatagcgacgagcgtttgaagtatccgctgcgtcgcgctggcgagcgcgggtctgacgagtgggagcgcatcagctgggatgaggctctcgatgagattgccgagaaatggaacggctacgtgaaggagtttggtcctacgtcggtaggtctgttcacgggttctggaaactatggattggtaaacggcatgtctgtcggtggggtgaccagccgcttcttggcggcgtcgggcatcgcatacctcaatcagacggtggatgcggctgcgaacttcgctacgagccgcctgctgggcatgggctactactctaccggaaatgagccagcagacatgatgaatgccaaaaccatccttatatggggtgcgaatccggccatcagccagatccagaacatgcacttccttatggaggcgcgcgacaacggcacgaagcttattgccatcgatccgatgttcagccagacggctgctcgctctgacgagtgggtaccggtgaagccgggcaccgatggagcattggcgtttggcatgatgaactacatcgtcgagcagggctggcatgatctcgacttcctgcgcgaacacagcgttgcggcctgtctggtgaaggaagccgatggtaagtttttgcgccaagcggatctcgatggatctcagccatctgccgatgatgcgaagaacgctgcaacgtccttggtgatggggaaggatggtacgcctggcatcgtaggagaggtggccgatcctgagctggagggttcgtacgaagtcgagggcatcaaggtgtccactgcataccagctgttgcttgatcgcatcgcggagtatccggttagcaaggctgctgaaatcaccggcgtatccgaggacctcatcaaggatgttgccgaacaatacgctcgcaatacgccatcgagcatctacacgttcttcggcatcgatcactattggaacggtcattggagccagggctgtttagccaccttggctgtgatcacgggtaacgttggcaaggcgggtgcgttctgcggcttccaggagtgtcttggatcgggtttgggcaacgctgttctcgcgtcgccggaaggtgctcctggccaggcggcaaaatacaacgcgccattcctgaccaaagcgttcgacgagggtgaatatgccggtcagccgtttaatctcaagatggccatgttcagtcatacgaacgctgtcaccaatatggccgaccgtaacgatacgttgagctggatgaaccggtgcgagttcctcgttggtgccgatatgctcatgacggacacgatgcgttattgcgatatcgtgcttcctgtggcgcactggttcgaaaaagaagacgtgttcatgtcgtacgcgacgcatccctttgcgctgctgcaggaaaaagcaatagaacccgctttcgaaagccgggcggacatcgacattttcaatgatttggcagatcggatcggttgcggcgatttgttcaaaatcaccacggaagagtaccttgagcaggtgttccaaacgaagcaggcgcaggcaatgggcgccgacttggcaacattgagggagaagaaggctgtacgtcaggccggtaaagaaggcgaggcgtacgtttatggcgaaggtggagtgtttgccaccacgagcaagttggccgaactgtatgtagagaaccctgtgggaagcaacccttacaccgaaggttgggatctggctaaagagcatctagcctattgggaacccgcattgcaggttggtgacgagtcgcgtcgcgagaagtaccctatccagcttctctcggagcatagtcgattccgcacgcatactcagtggttcgaagcggatatgctcaaagagatcgacaccgaacctttcatcaagctaagtcctgccgatgcggcagcgtatggcattgccgaaggtgaccgggtcaaggcttacaacgaactgggttctgtggtgctgacggctcaaatcaattctggcctgccagaaggcatggcaacgtgcccgaaaggctgggaagctggcgaattcatcgaaggtagcttcactgagttgttcaccaaggaaggcaatcctttctgctcgaatcaggcgtatttcgactgcactgtcgccatcgagaagctgtagggggaaactatgacacattacggaatggccatcgatctgtcgcgctgcatcgggtgccacacgtgtgcaatcgcttgcaagatggcgaataacctgcccaaaaacgtgcttttcaatcgcgcgcgaaccgtcggtggagacggaatggatactgcgtcgggtgaatacggcgctaacaccatgagcttccttccgatgcagtgccagcattgcgagaacccggcgtgcctcgatgtgtgtccgacgggcgctaccgccaaggacgaggagacgggcatcgtttcggtggacagcgagctgtgcatcgggtgcgagtcgtgcatcaaggcgtgcccgtacgagggcgtgcgcacg

SEQ ID NO: 8787 - DNA, 44281 bp, Unknown
  gut microbiota DNA sequence
tcgcggagggcgtttcggcatgcgaaggccccgcccccctcgggaggcggggccttcgcgcgttctgggggctccgcaattacccttgcgctaggggctctcttttaagttgatatctatgctaaacttcaaagagtagctgcaatatgaaggaaggttgatgatatgacaggggatgcttctcgtttcttttcggttcgcatgtcgatagtgctcacgttgttcgcggcggtgcttctatcgggcatgatggtgccgagcattgcctttggtgaagagacgggcgttgggcatgaggctggagcagtcgatggcggcacgcaggcttcgacggaggcccacggggctgctgatcaggatgaagatgattctggctccggaaatccacatgatcccgacgctccttctgacgagggtgcaggttcgggaggggtctctccttcgcctgcatatgtccctgggtggaacactgtcgatggcaaccgctattttgccgacgagcaaggaaagctcaagagcgggtggttgattgatggagggaagcgttactacctggatcctggcaacggcaatgcgatggcgcgcggcttcgtcgctatcgaaggcaagtcttactatctcgataccgatggggttctgttctcttcgggatggctgctggtcgatcgcgcctggtactacgcagctgcgtcgggcgagatagaaaccggctggctgaagctgggcgggacctggtactacctcgatccttcgcgaggtggtgccatgttgaccggctcctaccgtgtgggatcgacgctgtaccatgcacgtccgagcggggcgctcgtcaccggcaacggttgggtgcgtacggatggcgcttggtactatgcgagtccctcgggtgctttgcgcaccggctggctgaagctgagcggcacctggtactggctcgacccggaaaccggagtcatggcaacgggttggtataaagatggatcgacctggtactattctgacgggtctggtgcgatgcttgccaatcgctggatgaagcagggaggaacgtggtactaccttagggtatccggtgcgatggctaccggttggttgaagcaaggtggtatctggtactggcttgatcgttcttcgggagctatggggaccggctggtatcgtgatgggtcaacctggtactattctgacggatcaggtgcgatgctcgccaatcgctggttgaaacaggctgggacatggtactatttgaacccatcgggctctatgcgcacgggctggttcaagcaacacggagtttggtactggcttaatcccgaaagcggcgccatggctactggatgggcgaaggcgactgatggaaagtggtactacttcaacggatccggcgcgatgcttgccgatcgatggcttaacctgggcggcacatggtatacgctcagcgcatcaggcgccatgcgcaccggttggtaccaagagggatcggcgcgttattggcttgatccggaaaccggagccatggctgtcggtaggtgcacgatcgatggacgcgagtacgtgttctctggcagcggtgctatggtcaacaacgtatgggtgtcgcttgggaacggctcctgtggcttcatcgatggctcgggggatgccgtgctcgtcgcctcgtacgatgctcagggcagaatcgtatgtgctgatgggaagacgggctggcgcacagccgctggaaagaccttctatttcgatccgaaggacgaaggcgccttgcgtacgggcatgttcgacgtcgatggagttcgttactacgctgacgcttcgggcatcaggcaaacgggatgggtcaaagtctccggaacgtggtattacctggatccctcgagcggggtcatgcgcaccggttgggtttccgtgggcggttcttggtactatctcgatccttcgacgggggctatgcagaccggttggctgcaggagagcggtgattggtattacctgaagagcagcggcgcgatggtttccaacgcaagcgtgaaggtgtcggacggcacctactggtacatgaacgggtcgggacgccatgacaagcaggcgggcatcgatatcatcatgcgcacggcgcgctcgcttcttggcgtgccctatgtatggcttggcgtgtacccgcaggacggaggcatggattgcgcttcgtttacgtggtatctgtataagcagctagggatcgatatcggtttcgagacgtatgatcagatgtacagcggcgtgagagtgttcggcgatccccaacctggcgatatcatcttgatgtattacggtgcgtggccgaactacaatcctatgctgcctgagcacgtggtgctgtatgccggcggcggaatgatttacgaagagccgacattcggcggtcgctgccagtacgtgtcgctcgcctcgaagggagcatctacgacgacggcgcaaaggattctgtcataacgaagagccgcctgcataacgagacagggcttccgcacgtatgaaagcgtgctggaagccctgtgggttgcgcatacatcgaaatcgatggactaatcagccgaccaagtggttccgtctccgaagtcgagatgctttggcagatgggtgtgtcgatcgtctacgggtggcagctgtcgccagtttccgtaggttgcttccaggaacgcttctggtcgggcgggtacgggaaattcgtatccctcgaacaagagcgtgacggctggcagcaggtcgcttctcttgaatccgggcacgtttggccacggaagcgaaaggtacagagacgaagggctttcacgaacgggaagagtggatcgattgaactttttccggatgaaatcaggatcgaacagcctcgataccagtgaatgagctattttgcaggcattgcgctctgctgtacccaaaagccctttgtgcggtacgacgatcgtgcgtgtgtaatatagatagaggatcgactgccatatgcgtgcgtttctgatttgcttcttcttctgggcggagtcttctgccagctgatcgtagggaaagatatcgacgaatattccctgatcgcatcctgcttcaatagtttcctccgtgtagaatttggtattatctttgtatacttttgcgaacatggccgagtagccgggagtgttcgaccagtcgtgtagcgagtagcctgaaggcagttcggtttttgcgagagatacgaatcggtcgtagtcttcgcgaagcattccgatatctatgtcatcgtcccaggggatgaatcccttatgccgcgctgcgccgagaactgtccctccgtcgaggaaccatgagatatcgtgctgaaggcagaagtctttcaacatgataaggatatcgagttcgatgtcttgcagttttttcagtgcttcagtgttgttcatatgggtctccgaaatgtttgaaaacgacgtttcatcgtggtgtgctggcacaacgcccttgcgctgcagcgcaagcgagagctgttaagcgagctgtctcgctccaagagaacttctcgatgaccagtcggttgatgttttgtcccatggcgcggcatcgaatgcgattgcggttgagttcgcctactgctttagctatcgtttcgccgtccgccgaagggagtatcatgccgaattcgctacttggcactagctcctgcacacctcctacattcgtgacgagaggcgttgctccgcatgcggccgcttccagcaaggaggtcgagaagccttccgaacgcgaggggaggcagaagacgtcggaatctttgagcagggctgaaacgtctggggaatctaagcggcctaaaaacgttgcgttgggaagtggcgtccgcgtgaatctgtccttcaaagggccttctcctgcaatgaggaaatggactgattcttcgtcggtcaagatgctcgccgcttcgatgagagccggtattcctttttcggggattaatctaccggtgaaggctatgacgagcttctcgtcggacagaccgagctcgcgcctgaaagaacgatgggaagcgctgtcggcaaaggcctgagcgtcgatggaattgttgagcaccccgcacgcttcaatgctgaaatgtcggagccattcttttcccgcgagggagaccgcgtagtagtctgcaggatgacgttttaccagttcggttactgcatgttcgacggccgcgacaaagggatcaacgaccttgcttcccatggttaggtgggccgatccgtggtcgacgatgaccggccggatgcccttggcctccgctagagcgattccctccagcgtatgccgataaaatcgggtgttgatggttacgtagtcgatatcttgctcgtggaggtatctcatgatccggttgtacgccttgttgtggcgtgtgacggggtacctgtctcccaagagcttgtagcaagggagacgggctatctcgattctttcccctagcgtctctctttcgggaagatcgtacacgttcgatgtgacgatgataacgcgatcgcctcgacgagccagttcgcgggcgagattctgagtgtacttctcgacgcccccgacgtgagggaggtagtgggcggagaatatgcagaaagtctcgttcatatgctgttggggtcgttcaagcgtgctcttgggagtggtcgtcggggaagtcgtgcgcatcggagtgctgcggatttgcgttcgctgcgcccagcttttttgcgagtagagcttgctcttgtacgaggttcttgatcatgatggcttgcttgcttgctattgagctgagcgagagggagatggccagcaagaagaacaatcctataaaaaagatgaaattcgaaggggtttcgaatcccaagagggaggaaatcgagtacagaggttgcgggaaaagagcgcacaacaagattgcgatggtaagcgccatccagagcagcgaatatttgagaagcaggcgctctcgggcaacgaggtggacgacgtacgcgaaaaaagcgacgcataagacgattgcgacaatttgaagaacgaacacgtaaccctccgcttcctaaatcctcttgtgcctgtgagaaaagctgacgatggagatggccagagacaccttgaccatatagtacaagctggaaagccctccgatagacgatttccctccttggcgctcgcgcatggtcacggggacttcgtctacggacaatcctgatttgattgcgagcatgatcgactcgggttccgggtaatcggtggggtaattcttgcagaacaacgccatggccttcttgcctgaagcgcgaaagcccgatgtcggatcggtgatgcgttttcgagagaacgctctgatccaaagggagagccagacgatgcccattcttctgagggcggttgacctgaaaccgtcggagtctctcacgaaacgagagcctatggcgagatccgaccccgatctgatctgctcgacgaggctgggtatgtaggcgacatcgtgctggccgtcgccgtcgaactggatatccacgtcatagccgttgagaagcgcgtatttgtggcctgcttggacgcagccgccgatgccgaggttttgggggagggacaaaacgttgaatccgtttctgtcgcatatcgacagcgtttcgtccgtcgagccatcgtttacgacaacgtaatcgtatcctgcagtgatcacgcttctcacgactgagacgatgctttcctgctcattgtaagcgggaatgatgacgagaacgtttagatgatgtttgttgagatgtgtattcgaggtgtccatatgccaaagtataccgtgtcggcacgacctgtggcagcaaagcggagaagctgccgaaatattactcctcatcaccgatgctaggctgggaattacgagaatctttttctttggcggcgttgtaggcgtattccccccattgcgtttcgtccccttgtgcaaagcgttggtgttggctatcattcattaaatggaagatatttgtatattcacacccacgtacaatcgcgctcatacgttgagcctgttgttcgaaagtttggtagggcagaattcgcagcggttctattggctcgttgtggacgatggctccaccgacgagaccgaagctctgatcaagcggttctctcttgcgtccccgttcagggtggtgtacgtcaagcaggagaacgggggcaagcagcgggcctacaacacgggggtcgaacactgtgaaagcgagctgttcttttgcgtggattccgatgacgtgctggttccgagcgcggtcgaaacgattttgaatgcatgggaagcctatcgggcagacgcgtcggtggccggattggtcgggttgtgcggacgcgatgagaacacgccgctgggaacgggtatgccgcaaagtagcggaaccattaccttttgggatctgtactacaagaaagggcataaaggggattcggctgtcgtccatcgcaccgacgtgctgcggcgttacccttttttcgtcgcagagggcgagaagtttatggcggagccctatgtgtatcatcagattgaccaagagtacgtcttgggtattgtcgacgctgtgcttatcgtgcgggagtacttaaaggatgggtacacgtacaatattcgcaggatcaccaagcagaatcccgttggatatcgaattctcaagcggatgtacattgaatactcggataccctgtatttgaaattttacaattccatactatatctggtcggttgccgattgagcggcatgaaaggcggcgtgaaaagcgccccttatccgcttatcgctgcgctcgcgtatttgccggccttctttctgtgcaagaccgtatatcgttgaacgaggagaatcccatgcgagagattgctctcgaggaaatgaagcagctcgagctagaaatcatggttgacattgacgctttctgtcgaaagcacggtctgaggtactatttggccgtagggacgcttctcggagctgtgaggcataagggctttattccgtgggatgacgatatcgatatcgtcatcccacgcgctgactacgagcagttttacgacctatttaaagaggagcatcgcgattctttcttgcaggtggtgtcgtatcgggataagtcttcgatctaccccttcttcaaggtggtcgatacgagaaccgtcgtattcgaggaatacgttgactcgcgttacagctccggtgtatgggtcgacattttcccgcttgatgccttacctgaggacaacagcctgttcgaggcgaatcgccggacgaaacgcatctacgatgtcgtggtggcgaacaccgacattgcgacgacgcctttgcgcaagcttgcgaaaaaggtgcttaagcctttggtaggtcgcagagacatctatgctgttgctagggagctcgatcaggtggcggcttcggtgccgatggaggagggctgcgatgtcggggtggtcatctgggggtataatgagcgggagcgcatgccgtactccatcctcgagtctgtcgagctggagttcgagggcaagcggttcttcgcgcctcgcgactacgatgccaatctgaccgctatcttcggagactacatgacgcttcctcccgaatccgagcgtttgcctcatctctgccgcgcctactggaaagatgaagagccgaatgggtgatggccggcgcaaaagcagcgaatcgatatccgagcgtgaggtgaagcctctatctatcaagcagaacatgctgtggaactcgttcgggtctattacttacctagcttgccaatggcttattaccattttggttgttcgcctctcaagcggatacgaagctgcaggcactctttcgctcgcaatgtccgtgtacaatatcttcgcgccttttgccatctatcgcatgtacacctatcaggtctccgatgtgaagcgcgagaatacagtgggggagtactttgcgtttcgcatcatcacttcgtcggctgccttggtttgctgtctcgtctacgctgcgctgacctgtccggggtcggcgcttctcgctatcgccctgtacgcgatattcaagattgtggggcttctgatcgacgtgcttcatgggctcgatcaggtgaacaagcgcatggactatattggcaaatctcttgtcatccagggcgtcttgacgcttgcggcgttttgctccgtgttcgccgtcacggcgagtcttgagttcgcccttgcttcgatggcgatcgttaccgttttggtgggcgttctgtacgattttccccgttcaagtcgttttgaagcattgaagatcaagatctctcgcaagaagactcttcatctccttaagtattgtctcccgatcgtggttgcggcggtggcttgcgcggccgcgccttcgattcctcgccagttcttgtcgttttcgcaaggagaggcggcgcttggcatttatgcttcagtagccgctccggtcgccatcattcagatgggggcgagctatatatacaatcctttgctcagcgttttctcggagcagtacgctgaaaagcgtgctaaggatctggcggtcacgttttgcaaggtggtcggaggcatcgctgtggttggcgcggtgtgcgccatcggtttcgagcttctgggctcttggctcttgacgcttattttcggccagagcatagagccctacacgtacttgctgattcccgtcatagcgagcaccatcgtttcggcctatgtgtggttcttcaacgatctgctcgttgcgcttcggtgttttaggggcagtttcgtggggaacgtcgtttccgttattattgcgctgccgatcacattattcttcgtgcacgtattcggcatgaacggagtgagctttaccgtgatcgtggcttatggggtaggggctctggttatggcactctacttgctcgctttggtgaggcggggtttgagagaggaatctcgctaagagcggttcaaaaattctttttgttcaatttccggcttgtcttccaataatagtacgtcaatatttttgaagatatcttttttggtggcttctatccaggtaaaatgataaagtctacgatgttcttatgtagcgttatttgcaaaattgttcacacgatacgcttttattcttgttttgaacaaaatgatggcttgaatccttcgcacgtgcatggggagaaagggagggccggatgcttcacttgatgtcgcgccgatcgtttctgctagcgacagttggcggttttgccttgcttgccctccctgggtgcgaatcgttcgcgggaaacgccgtggtgatctactcgtgtgccgaaggtgtgaggaacgagtcgctgctgaccgcattgcggagcaggtttccttcgtacgacattcggctgcgttacgttccgaccgggaactgcgctgccaaactcaaaatggagggatcccgatccgaggccgatatcgtgctcgaccttgagggcgggtacatcgagcaaatctccgatcagctggaggatctatctggatttgactcttcccgatattgctctgatcttctggatcccgacggcaggtactttccttttgcccgagagagtgcctgcatcgcagtgagcagggagggccttgctcgccgagggctggacgcgcccgattcgtacgaatcgctgacggattcgaagtaccgaggtttagtgtgcatgccgaaccctcgttcctctggcactggttacaactttttgaaaagccttgtgaacgcctggggcgaggatgaggccttcgcatatttcgatcgacttgcggaaaacgtctaccagttcacctcttcgggttccggtccggtgaacgcgctggttcagggtgaggcagctatagggctgggcatgacctttcaggcggtttccgagattaaccagggagtcgatttggaggtcatgttcttcgaggagggcgctccatgggccgtgtacggaatgggtatggtggccggtcgcggggatcgtcctgcggtcagagacgtgttcgagtggttgtccaccgagggcgtgcgcatcgacaacgcgctctacgttcccgatcaggtgcttgtggactataaggctgagatagaccattatccacgcgatatacgctatgcggatatgacgggcataaccgatcccgatgagaagaagagattgctggagaaatggaagtactgatgaccgattcgatttgcgaagattcgtccaagctttccgtgcggggcctggtcaagcgctttgatgggaaagagacgctgcacaacctcactttcgatgtgcgtgaaggtgagttcttgtccatcctggggccttccggatgcggaaagacgacgacgttgcgcatcctcatcggattgttggagcctgacgaaggaatgattcttctggatggcagggatatcacgcgcgcggctccggacgaccgcggcatgggcatcgtgttccagaactatgcgttgtttgagaacatgacggttttgggcaacgttgagtacgcgctgaaattcaagccggagctgcgtggtgatcgtcgtgcgattgcgacttccgttttggaacagattggcttgatcgacctaatggatcgtggggttcgggatctttcgggtggtcagcagcagcgggtgtgcattgcccgcacgctggcgctcaatccgaagatcatcctattcgacgagccgatgagcgcgctcgacgtcgaagctcgtctgtcgttgagggccgagctcaagcgtattcagggcgaattcggcaccacgatgatctacatcacccatgatcaggaagaagcgttcgcgttgtcggatcgaatcatggtgatgggagggggtcgtatccatcagcttgccgatcccgaggagatcattgcgaatccggccgacgattacgtgtcggaattcgtcgtgcgcaacctgcgcatcaagatggattccctggcgcgtttcatgggcaggtaggtcgagatgcgtgctttcggtaagataaccgtcgttcgtgcggcgctgttcctgttcttcttgtttgcggccgtccttcccctgctcgggatgttcgccggcctgttcagccccgaagcccagtcggtgtttgggagcgagcgctttgcagcggcgtgtatgaactcgttgggcgttgcactggctgcgactgccatttccgtcccgcttgcgcttgttatgtcgtgggtgctttgccgtacgaacatccgtggcaagggggtagtggccgtggtcatgacgcttcccatgctcataccctctctcgcgcacggtatggggcttgtgttcttgcttgggtcgaacggggtgttcaccaatctgttcgggttaggcttttccatctatgggttctggggcatcgtgctgggatcggtgctctattccttcccctcggctttcttgctgatatacgatgtgatgaagtacgaggatgcttccgcatacgaggccgcacgggttctgggcattccgaagatcaatcaatttaccagcatcaccttgccttacctgcgcaagcctctgatatcggcggctttcgccacgttcacgctcgtggtgaccgactatggtgttcccctgatggtcggagggaagaccatcactttgcctgtgctcatgtatcaggaggtcatcggtctgttaaacttcgacacgggtatagccgtgggtttcgtgctgctgattcctgcggtcatcgctttcgtggtcgatatgttgaatgccgacaaaggcaagatgtcgttcgtttcgacagggttctcgctgtcgagcagccatcttcgtgatgcagcgggttatgtggttagcgcggcaacgtcattgttcgtgttgctgcctttggcgtcgttcgtgctggtttcgtttgtgcgcaaatacccggtggatatgtccttcaccttcgataacatcggtcgctcgctgaacatgggcatgggcgcgtacttgatcaactcgcttgagatagctcttgccgtagcgtcggtcggaaccgttctcgcatatgcatccgcttacgtcacggctcgcatgggcggacggtttgcacggatcctgcatctggcatgcatcacgacccttgccattccgggtatagtgttgggtgtttcgtacgtgatgttcttcaacgggtcgtttttgtacggaacgctgggcatcctggtgctagtcaacctggtgcactttttcgcatcaccttatctgatggcttacaacgcccttggcaaggcgaacgagaacctggaggctgtggggtcttccatgggaatagggcgcatcagcattctcaaggatgtcttggttccccaaaccgccgatacgatcgtcgagatgttctcgtacttcttcgtgaactgtatggtgactatttccgcggttgcttttttggctacgacgctagacatgccgttggctctgctcatcaccgatttggacgcgcaacgcctgactgagtgcgcggcgttcgtctcgctgacaattttgattgctaatatcatcatgaaggtttcggcggtcggagtgaagcggctcgtgagccgcagaggcgaggtccgagtttgagggagcggatcgcaagacatataaagggttatcatgtagcgcaacatagaacggttttcaaggttgcagggcgatggggaaggaatgtagacggcatgctcgatttgaaagaattcaagattttagtcgcgcttgaggagcaaaggtgcaagtctctaacgcagcgtgaaatatctgcggcttccggtctttcggtgggtacggttaatcgtgttatgccccttttacgcgaacggggcttggttcgcgacggagtgcttactgattgtgggctggaagcactcgatccttaccgtgttaaaagggcggtgctggttgcggctgggttcgggtctcgtttggtccctattacgctcaacacccctaagcctctgatccgggtgcatgggcaacgcatcatagactccctgcttgatgcggttctggctgctgggattgaagatatcctcattgtccgggggtacctggcagagcaattcgatcagcttctgtacaagtatcccatggtcaagttcatcgacaatcctctatataacgaagcgaacaacatttcgtccatccttgctgcgggggatatcctgtcaaatgcctatgtgctggagtcggatctgctgctatacaatccgaagctcattacaaagtatcagtacgcctcaaattaccttggcgtacccgtcgaggtgactgatgattggtgcttccatacgcgcagcggggtgatcacgggtctttcagtgggcggaacggattgccatcatatgtttggcgtgtcgtattggagtgcggaagacggcaaacggcttgcgacggacattcctgcgacgtattccatgccgggaggcaaagagcgctattgggacgaggtacctctgcgttatttctcaaagagctatgaggtgcgcgtccgtgagtgctcgttcgacgatatcatcgagatcgatacctaccgtgaactgcaagagctcgatcctgcgtatgctgtgtaaggcaagcacttgtgatgcctttttggctttctggcatgctaatacgcacattctgttttgcttggaaaatgacttttgttcttcgttcgttgatgtcttacacttgtacattcttgatgctctgcaatgcgagtggttttgctcgtctgcgctatggttcgatcgacaggagaggtgcggatcgcttccgccaaacaagttatgcaaaagggatttctcgaggttttgcacaggcacagggtcgatatgattttgatcgccgtcgttgcggtcatgatgatccatgccttgtactgctactcgttcagcgattcggggctcgcccttactttttccggtgtttccgtcgttatcgccgcgctggcgtacctgttgatacggacgcttgaatcgagggtgcgccatcaggttgaaatggcgttcttggtgggtttgataagctgcggcctcttgtattctgtggttttcgcgccggggaccgttcctgacgaaacctatcatttcgaggcgtcgtacaagctcgcggactacatcatgctgcaaggacccaccgtggattccctgccggtgagagaagacgattcggttctgttggacggcatgcttcaatcatgggctctcggatacgacaagtaccgctcggtcatagaccagttcgcctttttcgcgaacgacgcatcccgtgttgctgtcgagcccgtctcttcgttcgactggactgcgaaccctccgtacatcaagcttccctcggctttgggcatcgtgttggccacgctgctcaatctcggaagctttccgctgttctatctgggaagattcttcaatttgctgatgtttgcggcgttggcgtatttcgccgttcgcattacccctgttggcaagaacgccatgatggttgcagggcttcttcccatgacgctgcatctggcgtcttcttattcgtacgatgccggaatcatgggtttggccttcctgttgacgggtatgtgcttgcgagccgtgtacggagagggccttatgagccgaagggaaaaggcggggatcgttgtcgttgcggttctgcttgctccgtgcaaggtggtgtacacggtcatcgtgcttctcgtcatcctgataccgagaaagcggttctcctcggctgccgcttctgcgcggttcaaggtcgtcgcgatcggattcgccctgctttccttgctcgtgtttcgggctgcgggcttgctgcaaatggcgggagtcgcgtcatcgtcgaccgccgagggctcgcgtggcgacgaatacggcacgttctacagcctatccgggctcgtctcggatcccttgaacacggtcttgctttttctcagaacgttcgacgtgcaaggttctttctacctggataccctcgtcggcgggtcccttgcttggttccaagtcgatctcaaggcaccgctctacatcacggtagccctgctgttcatcgtggtcttgtcagcgcaacgctccgaaggcgacaacgtcgtcattcctggtgcgcacagggttttgtgtggaggtttggccttggccgggggtttgggcgtgatactttcgatgctgatcgggtggacgttcaccagcgaaagcgtcgtgcagggcgtgcaggggcgttacttcctcccgctgcttcccatggccgcgttggcgatgcgaagtaaacatatgagtatcgatatccctcttggcatggggttcgtctatatcatgatcgctgtcaacgcgatgtaccttgttcgcaccttctccgttgccgtgggggtgtagcgactggttgagcggctcgggctcgacggttttgtcttggtttgctgtattctaggaaggcgtgttcatgcaggtttcgtattgcggcttgtgccgcgggcatgggaagatatttgtcgccttgcgcatttcctcggtcgatgatgcttgcgtcgtgcggtttcgctcggagggcgaggcggtcggccgattgccatgcgacacgtacgaggaaaacgggttgcgcatcgcggcgctgcccgtcgtcgacttcgaccaagcgctcgtcgtcgaggaggttgattcttcgggtgccgtaaggggagcgttcagaaagaagctctcggctcggagggcgaagtgggaatcgcggttccgctaccgcttcgaccgagagcttgtcgacgtcatccgcaactacgacgggacgtttcgcttcaccgaaaaccatctggagttcgtcgcggcggttcccgatgccgatcgcttcctcgtgcgagcggcgctggtcgtttcgggagtctcctctcctgaggatctgtcgataacctgcatcggcaccgacggtaggagcgtcgatgtcggagtcgtgcgctgcggagggtcggtcgtgaagcccgtcaagggatccgggttctcgtacgcctgcatcccggtttccatcagcgttcccaagtcgcttgagaactactgcttcgagatccgcgatgcggccgattcttccgcgacgcggttcagcgtcctcgaagcgtggctgctcggttgcatgttggaggatttcggcgcattgaccaggaacgctcagatcgattcccgctaccctgcgtggttcgagaaacatcgcgccgacgaggccgtgcttcgcgtgcagcgcgagacggcgttggagggcgcccctgttttcagcatcgtggttcccctgtacaagaccccgcgcaggttcttcgacgagatggtgcagtcggtttgggcgcagacgtacgcccggtgggagctgatcttggtcaacgccagccctgaagacgaggagcttgccggagcggttcgagcggcgagccgctccgacgaacgggtcaaggtcgtggctcttgaggagaacggagggatatcggcgaactcgaacgccggcatcgctgccgcatcgggcgatttcgtgtgcttcttcgatcacgacgacctgatagagcccgacctcctctacgaatacgcactcgccgtgctcgagcatcccgatacggacttgctgtactgcgacgaggacaagaagggggaggacgggcggcacttcgatccgttcttcaagcccgatttcaaccttgacctgctgcggaacaacaactacatctgtcatatgctcacggtgcgacgcggtgtgctcgaccaggtcggcctgttggatccggcatgcgatggggcccaggaccatgacctgaccctgagagtgagcgaatgcgctcggcatatccatcacgtgccgaagattctgtatcattggcgcgtgagcgcaggatcgacggcgggcggcatcgaggacagcaaaccctacgccacgcttgccggcatccgtgctgtcgagaaccacttgagccgcctcggcctttcggcgacggtcgatcaggcgagaaggcctgcaacgtatcgggttaggtaccgtgttccggaggacgagccgctggtgtcgatcgtcattcccaacaaggacagcctgtccgtgctcaggcagtgcgtagactccatcctggacaagtcaacttacgatgcgtacgagatcgtcatcgtcgaaaacaacagcaccgaggtggaaacgttcgcctattacgaagaggtcgcaaaggatgcgcgcgtgcgatgcgtgttcttcgacggtcccttcaacttctcgaagatcatcaaccagggcgtcgaagctgcgaagggggagtattgcatcctcttgaacaacgatacggaggtcatcacgcccgattggatcgagacgatgctgggactgtgcgctcggcaggacgtgggtgcggtcggtgtgaagctgtactaccccgatgacaccatccagcatgcgggcattggcatagccccctccgttgccgcctgtctgcaccagtcgcttccgcgaagcgatgcggggtatttcgccctcaacgacgcgcagcaggacctgagcgccgtcaccgctgcatgcatgatgacgaagcgcagcgccttcgagcaggtgggcggtatgacggaggatctcgcggttgcgttcaacgatcttgattattgcctcaagctgcgagagctcgactatctggtcgtgtacactcctgaggtggagttgtaccactacgagtctttgtcgcggggatctgaggatacggctgagaaggtgactcggttcctgagggagatcgcctatatgaacgatagatgggccgagtactatgctgcaggtgacccgtacctcaacattaatctgagccgtagcgagccgggatcgtactatttccgtcttccccataaagattaagatgaggcaggttttgcccctcaagctatgaggccggtgtctttcatacttttcctggagcaagctagcagtggcagcgtattgtattacaatgaacttttctgcggcagcaaaggagagatctacatgaagggcataatacttgctggaggcagcggcacgcgcctgtacccgctcaccacggtgacgtcgaagcagctgctgccggtgtacgacaagccgatgatctactacccgctgtcggtgctcatgatggcgggcatccgcgagatcctcatcatctcgacgcccgccgacctgccgaacttcgagcgcctgctcaaggacggctcggactacggcgtgagcctgtcctacgccgagcagcccagcccggacggcctggcgcaggccttcgtcatcggcgaggagttcgtgggcggcgacagctgcgcgctggtgctgggcgacaacatcttctacggcaacggcctggggcgccacctgcgcgccgccgtcgagcgcgccgagcgcgagggcggcgcgaccgtgttcggctaccacgtggacgaccccgagcgcttcggcgtggtggagttcgacgaggagttcaacgccgtgtccatcgaggagaagcccgagaaccccaagagcaactacgcggtcaccggcctgtacttctacgacagccgcgtgtgcgggctggccaagcaggtgaggccgagcgcgcgcggggagcttgagatcaccaccctcaaccagatgtacctggaggacggctcgctcaacgtggtgacgctgggccgcggctacgcgtggctggacaccggcaccatggagagcctgttcgaggcctccgagttcgtgcgcgccgtggagcgcagccagggactgagcgtgtcggtggtggaggagatcgcctaccagaacggctggatcgaccgcgatcgccttctggccgccgccgacaagtacggcaagtccgtctacggccagcacctcaagaaggtcgccgagggcaggatcgtgccgcacaaggaggcgatgtgagcatgaggatcctcgtcaccggcggcaacggccagctgggcaacgagctgcagcgcatcctgcgcgagggccgctcggagatcgggccgatcccggacgcctacgcgggcgcggaggtcgtggcgaccgacgtagacgagctggacgtcaccgatgccgacgccgtcatggccttcgtcgcgcagggcggcttcgacctcatcgtcaacggcgccgccatgacgaacgtcgacggctgcgagacggccgaagacgcggcgtttcgcgtgaacgccgaagcaccgggcaacctcgcgcgcgccgcggaggcggccggcgccaagttcgtgcaggtgtcgaccgactacgtgttcccgggcaccgagcccgagccgcgcgtcgaggacgacccgacgggccccgtctcggcctacgggcgcacgaagctggccggcgaggagcgctcgcttgaggcgtgcagccgctgcttcgtggtgcgcacggcgtggctgtacggctacgtggggaagaacttcgtcaagaccatgatgcgcctaggtgcggaccgcgacgaggtcaccgtggtggacgaccagttgggcaacccgacgtcggcgaacgacctggcgcacgagatattgaagatcgccgccaccgagaactacggcgtgtaccactgcactaacgagggaacctgctcgtgggccgactttgccgaggccgtcatggagggcgcggggctcgactgcgccgtcatccgctgcacgtcggcggagtacgcggccatgaaccccgcgtccgcgaagcgcccggcgtactcgtcgcttcgcaacaagcgcctggaggacaccgtgggcaacgagatgcgcccgtggcgcgacgcgctctccgcgtacttgaacaacctacccgagatggaaggctagaggaatgtcagagatcttcgaaccgaagcgcatcatcgtcaccggcggagccgggttcatcggaagcaacttcgtccactgggtggtggacaaccagccggacgtgcacgtcgtcgtgctggacgcgctcacctatgccggcaacctggacaacctcgccggcatccccgaggagcgcatgaccttcgtccacggcgacatctgcgacgaggcgctgctggaggagatcgtccccggcgtggacgccatcgtgcacttcgccgccgagtcccacaacgacaactccatcgccgacccggagccgttcgtgcgcaccaacgtgcacggcacgttccgcctgctggaggccgcgcgcaagcacgacgtgcgcttccaccacatctccaccgacgaggtgtacggcgacctcgcattggacgacccggcgcgcttcacggaggagacgccgtaccgtccgagcagcccgtacagctccaccaaggcatcgtccgacatgctggtgcgcgcgtggttccgcacctacggagtgcgtgccaccatctcgaactgctcgaacaactacggcccgcgccagcacatcgagaagttcatcccgcgccagatcaccaacgtgctcaccggcatccgcccgaagctctacggcgacggcctgaacgtgcgcgactggattcacacagaggaccactcctcggccgtgtgggcgatcctgacgaagggacgtctgggcgagacgtacctgatcggggcggacggtgaaaagaacaacatcgacgtgctgcacgccatcctggagggcatgggcaagggcgcggacgacttcgactgggtcaaagaccgtcccggccacgatcgccgctacgccatcgactcctcgaagctgcgctcggagctgggatgggagccgaagcacaccgacttcgcggaagggctcaaggccaccatcgcatggtaccgcgacaaccccgcgtggtggcagggcgccaaggaggccgtcgaggccaagtacgcgaagcaggggcaataggaggcggcatggcagcgggagacagcgtcaagcacggcaacttcacgttcaccgagacctccatcgagggcgtgctcgtggtggacgtcaccgcctacggcgacgaacgcggctacttcgtggaaacctacaaacgccccgacttcgtcgcgggcggcatcgactgcgagttcgtgcaggacaaccagtcctcctcggtcaagggcgtgctgcgcggcctgcacttccagatagagcatccgcagtccaagctcgtccgcgtggtgtcgggcgaggtgttcgacgtggccgtcgacttgcgcccggacagccccacctacggaaaatgggagggcgcggtgctgtcggcggagaaccgccgccagttcttcgtgccgcgcgggttcgcccacggcttcctcgtgctttccgatgtcgccgagttctgctacaagtgcgacgacgtgtaccatcccaacgacgagggcgggcttatgtggaatgatcccgagatcggcatcgagtggcccatcttggagggtatggaactcgtgctgagcgagaaggacaaggcgcatccggggctcaaggatctcgcctagcttatgaaaatcaagaatcttgtcctgtgcagaggcgacggcaaaggttatgcccgtctccgcatcgttggctctgccggacgtgacgttgcggttgaggcggcgcttgaagatggctcatcgattccgaccctttggctgaaggagtccgatcccgcttcggatgttgtcggggtgttggtgttccccttgctcgacgatgtcacgttgttcgtcagagtcgtgcagcgcggcggggatgaacccttgtgcgcgatgcgcttgcctgccgggaagctgaaatggctctctcgcctgaactaccgcctccgtccgtccctgtgcgttgctttgcgtggcgcggacgagcggtcggtcgatcgtttgcgcctttcgctggtcatgtgtatgccggatggcgaggagggggtatggcgcattgccgccgagtcccgttcgctgggatctcagccgaggttctctgcctgggacggtgtagggcatgcgcttcaaatagatcctattttcttcgaggatcagtgcatacccgatggcactgtcgaaggcgttcgccgtcggatggtggtttcggttcgcgttcccgctgcgacgggcggcttgttcgtagtcgccgaggacgagacgggtgctgccttgcccgccatgctggggttcgataaggctgcgtttttcggcgagctgcaccgcgcgcttcggcgcgtgcgcaacgctgcggacgaggacgactatcgtgcttggcgcgaatcgcggaagatggaagggctttccgggtcgcgcttggatcctgaagtttccctctctccgttggtgagcatcgtcgtgccctgctatcgggtgaacgagcgctacttcgaggagatgctggaatccgtccttgcgcaaagctacgttcggtgggaactcgtcctcgtcgattccgagagcgaatcctcaaaggtgccgggcatcgtcgagcgcatcgctgacgatcgcatcacggtggttccgctgcgcgacaacctcggcatcgtgggcaacacgaacgccggcattcagcatgcgcggggcgagtacgtggcgttcctcgactacgacgacgtgctggagccgaacgcgctggaggcgtacgtccaggctgtcgccgagcatcccgacgcgggcctgctgtactgcgacgaggactcgttcgaggtcgcgggcgcgttcaagaaccctgtgttcaagactgatttcaaccgagatctgctgtactcgcacaattgcatcacgcattggctcatggtgcgcaaggacgttttggccgagacgggcctgtccgacgacgaggtgaatggggcgcaggattacgacctcgccttgcgtgtgtcggaaaccggacgcgagattgtgcacgtgccgcacatgctgtaccactggcgcgtgcatggcgagtcgaccgcaggggacaacctggggagcaagccctacgctcaccaggcggggaagatcgcgctgcgccggcatttcgaccgccgcgggatacccgtctcggtggaggacggcgacgggccgttcgtgtaccgggtccgctaccagctgcccgaccctcagccgagcgtggagatcctcatccccagcaaagaccatgtcgacgtgctggatcgctgcgttcgcagcatcctggagaagtcggcctacgggaactaccgcatcaccgtcatcgagaataacagcatggaggacgagacgttcgcctactaccgcgagctcgaggcgcgcagcgatcgcgtccgcgtcatcgaatggccgcacgggttcaactatgccaagatcatgaacttcggtgccgctagcaccgatgcggatctgcttttgctgctgaacaacgacaccgaggtgatcgcacccgacttcatcgaggagatggcgggctacctgcaacgtcccgaggtgggcatcgtcggcgcgaagctgctgtattacgacggtctcgtgcagcacgcgggcatgctcatcggccctgacggcacggttgtgcacgtaaaccagaacgtgcccgatgcgcaaggctgctatcttggccggtcggtgcgccccggcaatttctcaagcgtgacgggcgcatgccagatggtgaagaggacggtgttcgaagaggtgggtggttactctgaggagttcgcggtggggtacaacgacgccgacttctgctgcaaagtgagcgcagcgggctactcggtgacgtttacgccgtacgcgaagctgtaccacaacgagttcgtatctcgtgggcgcgaagagggggatccctcgaagatgcagcgctggctgcgcgagcgcgctcttatgcaagagaaatggccgcagttcttcgagcagggggatccgttctcgaacccgaacctcgatagggacagcctgtacttcgcgcttccctcgccggaggacgcgcgccgttaacggccgaggatctttttcgcgggtttgaggacggtctcgccgacgcggtacgtcttcgatgcgcgcaattcctcgacttcgcgccaagcgcgcagtgcatcgttcttctgctcttccatgcgccgattcgtttccctgagcaggaagaacaggaaatcgtcggcgtcgtcgcacagcaggtggcgcacctggtcgtaggtgcgcgggtcgaagaactcggtctttttcatcgtgtcgaggccgagttcgacgcatccgcgctgctgcatctcgcgacgcagctcctcgaaggcgtcgcgggctttcaggctgcagaggttgaagagcaccgactcggccgcccagttcttgaagccccgctcgaccgcggcgaagcgcccggcgttctcaaggtgctgcttggcggcgacgaaggattggtggaagtcgaggggggctcgttcgttcgtggcgatgttgctgttcgggttgttcactcgatagtggtacagcacctcgtctaccgtggcgacacggtcggcctgggccagcgcgcagcagacgaagtacaggtcggcgctgcgctggacctcatggaagcgtaggccgcttgcctgtacgaacgaggatcggaacagcttgttccacgtccagttctgaaaggcatagaacagcttgtcggggttgtcgccgggtgacgacacgcggtcggcggggaaggcgtcggcgtccagcgaccagggcatgggaagcgtctcgccggtttcatcgttgtacgaatcgacccggtacgccaccacgtcggcgccggtttcctcggcgcgccgaacgactttctcaagcagctgcggttcggcgaagtcgtcggcgtcgaagaacgcgaggtagcgtccgcgcgccacgtccagtccggcgttgcgggcggcgccctcgcccttgttctcctggtggatgacgcgcatacgatcgtcgcgggcggccatgtcgtcgaggaggcttcccgtgccgtcggtggatccgtcgtttacgcagatgagctcgaagtcgggcatggtctgggccagcacgctttccacgcactggcggatatggcgttcgccgttgtaggccggcacgacgatggagacgatgggggtgtcgctcatgcttctctctatcctctcgcgcgagcgtcgtcgagggcttcgacgagcagctctcggtcgaggcgggcgaccccgctttccttgccgacgaacgcgagcttgtcgacctgcgtgctcgaacgcttgacgaagtcgaggcactggtcgatgtcgtcaaggtcggtgggattctcgagcaaaagcgcgcttccctgcttcgccgcgtacgcgccgcatcccagcagctcgggccattgggaaagcgagagggaggcgacgcacagctctcgccctccgttttgcgggggctgcgtttcaacaagggttcgctcgcagagggcgatgcaggttttctgaggcgtgtcgcaggcgatgcgctcgacggagatgcctcgcttgcgcaaacgatcgtcgatcgtcatgtcggcggcgtggccgactacgagcgctcgattgtgccctgcttcatgcacagcgctctcgagggcgtcgtacgagatcgctccgcgtgtggcgataacggggcaacgcttagcgcttgcaagcggtgctgccgcaagcgattcggggttgtcgtcgaaatcgacgatcatcatctcgtccccccagaacccgcgctcgatgccgtggcgatggatgcccaaagacaggtcgaacaggcttccgtcgcctacgaaaggaatgatggcgggggaccaggaaagccgttcgagggcagcaagcggctcgaccgcattgcgctcggcgtcgacgaagtagatggtggagggcttcgtctccctcagaatggatgcgactgcgtcggggatcctgtcgggtttcaccggcagaacaggggcgtcgacggctccggcaagaccgttcgccatgatcgcgttgatatgggtggaggcgcataccaccacggcggtatcgaacccgttttcccagcctcggtatgcaagctgcacggcagtaccgttggcgtcgtctccggcgatcgtgctgaaatcgctttcctcgtgctctccactgcgctgaagcgcttcgaatacgcgctgttccgcttctgcgctgccggttcgcccgccaaggcctccgtatacgcggcacaccgacgcggcgtcgcccatcatgcgcgtgtgtcccttctcgatccagatgaccttgttgcaaaggcgctccacctgggcgttgctgtgggacacgatgagcacggtcacgccgtgtttctcgataagctcgctgatgcggtcttcgcatttcttctggaacatgaagtcgccaaccgaaagcacctcgtccactacgaggatctcggggacgatcaccgtggcgatggcgaacgcgatgcgcgccaccatgcccgaggaatagttcttgagcggcatgtcgaggaacttctcgatctcggcgaactccacgatctcgtcgaaatgatcgttgatgaactccttcgaatagccaagcagcgcgccgttgaggtagatgttctcgcgagcggacagctcggtgtcgaagccggcgccgagttcgatgaggggtgcgatgttgccgttgatctcgcaggttcccttcgtgggctccaggacgccggcgatgatcttgagcatggtggacttgcccgacccgttcgtgccgatgatgccgaacacgtcgcccttcttcacctcgaacgaaacgtcgtcgagcgcggtgaaaccctcgaaaaagagtttgcgccgggcgatctggatggcgtattccttcaagctgttgagctgttcggacgccatgttgaagatcatggacacgtgatcgactttgaccatagtccgacgattgtcctcgctgaggtcttcgactgcggcggccaaagaagaggtgttgacgttttcaggcataacgaaccttcgtctctatacgtacaggatgaattttttctgctgcttgcggaacacggcgaacccgatgacgagggtggcgacgccgcagccgaggcagatgacattcgctcccaggctcggcgtcacgccgttgagggcgatgtcgcggaaataggtgacgtaatagtacatgggattgaactgcatgatggtccacatccagtccgtgaggatgctggtgggatagaacagaggcgtcgcgtacgtccaggcggtcagcacgacgccccaaagatgcatgacgtcgcggaagaacacggcgagtgacgacagcagcagcccaaggccgaggcagaacaggaagatgtagaacagcagaagcggcaggagcaggatgttccatgtaagggggatctggaagaaggcgatgaccgccgccacggcgacgagcgagatggcgaagttcagcagactgaacacgactttctcaagggggaacagcatcttgttgatgcggatcttcttgatgagaggagccgaatcgatgatggagctcatggcgcccgatgtggcatcgctcatgaacgtgaacagggtttggccgaggatcaggtagacggggaagtttgggatgtcgaaccggaacaccacggagaacactgcggtgagcacgatcatcatgagcaggggattcagcaccgaccacagcacgccgagcatgcttcgtcgatatttgagcttgaaatccttcgaaacgagagaggtgaggatgaaccaatcccttttgaactgtgtcttagctgcactcatatcgctgaccgctgcctctctgatgcgacgcgcccctgcgcggtgtgttctgcaatcttcgcaaaaccgcatgataccacggatcggctcttttctttttcgggcaaggtcgagtccatcctttatgcgctctatgctacccttgcagatgtcgttcgtcagataccgtatttccgtcggcttgccgcgggatggcaggggagttcgcatgtgggttgatttttgcttggctgttctgacaggggctgcggtgctgtatgggccgggctttttcgcttggagagccctcggcatgaggggattggccgcgctgtcctgcgcacccctcttttcgatcttagcgtattccatcttgggggtcgcgtatttcttcatcggcgtgcggtcgactgctttctcagtagggattcccgtggtggtgctgtcgattgcggcctgcggcttcgttctgctcgccgcgcgcaagaaaggtgccgtgctcggttcgggtaagcgtgcggatcggcggctcgatgctgctcttgctgtggcgtacttggccgtcggggtggccgttggcctgttcgtgttcgtccttcccctggatggccccgcgtcgtcggtgcagacgtatgacaacgtgcatcacttcgcctcggtgcgcagcttctcggattccggcatgtggtcttcgctgcacgtctcgtcgtacttgggcgtttctgatcctgcagccaaccctctgccgggaaccggatactatccctcgggatggcatatcgtatgctccatggtggtaagcgctttgggcgtcgaggtggcattggccgtcaatgccgtgaacttcctgttcgcggcaatcgtcttccccttgagcatggcgttcctcatgaaggttctgttctccggcgatcgcgctatcgccttgatcggagcattgggcgcggtcgccgtcggggcgttcccctgggtcctcgtcgaggtgtggcctctgtatccgaacacggcggcgttcgcgctggtgccggttcttgttgcgtgttttgcggcggtttggggccgggacgcctcgaggagggagcgcgtcgcgtacggcgccgtgttcgttctcggttgttgctgcatggcgttcatgcagccgaacgcggtgttctcggcggcggtcttcctcattcctttttgcgtgtatcgatcggcggtcgaggcgggccgtcgatgccgggagccgaaacgtcgcatggaggtcatgctggcggccgggtcggtcgcgctcgcgtgcgttgccttgctgtgggtggctgcgctttctctgcccttcatgcaaggagccgtcgcagtgtactggcctccgatccattcaagggcgcagggtctcgtgagcgtgctcggcatgggattcgccggatcctccgtgcagccgatcgctgcgtgcctcgtcgcggcgggcgcgctgtacacgctgcgcaaacgacgctatctttggctgacgtgctcgtatcttctggcatgctgcatctattacgtttcggccgtggagggagataccctgctcaaacacgcgctgtcgggattctggtacaccgatccttatcgcaccgccgcactggccgggatactggctcttccgcttctggcgatgggactgtacgtcgcgtgcaagatcgtcgggaagactcttgcatccgttcgcgcgccaggcgagaaccgtttgaaggcgctttctctggccgtcgttgccgtcgccttcctcgcattgaacttcttgccggttcgaggggcgctcggactgggccagggcgcgttccagggcatcgccgccaccgcaacggctctcaatgacggttcggcggtaaacgcctacagcgaagagaagagccggttctcgaagcacgtgaaagaggtcgtgccgtccggggcgcttatcgtcaaccagccttacgacggatcgcttttcgcatacagcctcgatgatttgaatctgtactatcgcgacatatcgggttacggtggagaggatgaacggccggagagctcgacgatccgctgtcggctggctgccgaggcgtccaatccttcggtgcgagacgcggttctgacgaccggagccgagtacctcctggttctcgatcgggatgtcgagcgcatgaaagagctgttcttcctctacgatccggctgcctgggagggcatcgagggcgtggtcgatgagacgcccggtttcgagatggttttgtccgagggcgatatgcgcctgtatcggatagcgtacgctgatgccgtacaataggctgtgcaacgcaggttcgaggaaggacggtgagtcgatgcaagatgctctgcctagcgtctcggtggtggttcccatatacaacgtggagcgttacttgccgcagtgccttgaggcgctgtgctcgcagacgctgcgcgacttggagatcgtggccgtcaacgacgggtcgaccgacggatcgctgtctgttttgcaggagtgggcgcggaaggacgagcgcatcgtcatcgtcgacaagccgaattcggggtacggcgcttctatgaactgcggcatcgaggccgcacgcggcgcgtacatcggcatcgttgagcccgacgacttccctgagcgcgacatgttcaaacgcttgctccgcatggcgcagcgacatgactgcgacctcgtgaaatgcaactttttcgagcactacgaagatcgcgacgaccgcatacgaaacttcgccgatttcccctacggcaggcttttcgatcccgtcgagcagccgcgcatcgtctgcacgatccccgcgatctggacggggctctatcgcaaggcttggctcgacgatgagggcatccgctttcgcgagacgccgggcgcgtcgtttcaggacacgtcgttcgtgatgaagtcgtggttcgcggcccgtcggtgcgcgctggtgcgcaagccgctgctgcactaccgcatggacaacccgggttcgtcggtgaagacgacggacaaagtgttcgtcgtgtgcgacgagctggaagactgcgagcggttcttgcgcgtccgtcctgaccgctgccgcgcgctgctgccatggttctacgtggacaaatggagcaaataccggtggaattacgagcgcatcgacgcgagcgcccacgaggcgttcgcgcagcgcatggccgacgagtacgcggcggcgcgggaagcaggcgagctcgatatgcagctgttcgatcctatcagcagagacgttctcggcgaattgctcgacagcggggcggcgaagttcgcagccgaccatccggaaacatattaggaagctttcatgaagcgcaatggcaagcagcccgtcgtatccgttatcgtgcccacgtacaacgcgggggagttcgtggcgcagtgcctcgacagcgtgctcgggcagacgatgggcgatttcgaactgatctgcgtcgacgacggttcgacggacgatacctgggcgatcgtggaagagcgtgcgcagcgtgacgggcgcgtggcggcgcttcgccaggcgaacgcggggccaggtgcggcgcgcaacgccgggctggagcgggcgtgcggacggtacgtgtactgcctcgatgcggacgactacctcgagtgcgatatgcttgcgagctgcgtgaaagcgctcgacgacgcgcaggcagatatggcgcttgtggcgttccgcacgtacaaccagcgggcaggcaggacctatccggccgaatgggggatgcggcacgaggacgcgttcccctcgtaccctgcaggttcgttcacgtgggagacggcgcccgatctgttcttcgagacggtgcagaacgttccttggaacaagatggtgcgtcgctcgctgctcgaggagcgcggcatccgctttcaggagctgcgcttgaccgaggatctcatgtattcgctgcctgcggcggtgtcggcgaggcgcatcgtgcgcatcgcccgcccgctcgtggtgcatcgcgaattctccggcacgaacgcgatggccgacaaagggcggcatccgctcgatttcctcgacgcgttcgccgcgttgcgcgcgtggctgcaggaggagggcttgtacgagccgttgcgtttggcgtaccaggcgtggctgctcgatgcggtgtattacaacttgccgacgtatcgcgacttcgacgcgttcgccgtcgcttacgagcgactggcttccggcgggctcgaagcgtacgacctggcgcacgtcgacgccgaccgcattctcgaccatcgttatcgggaattgctcgaagcgctccagcggggttcgcgcgaacgattcttgctggcgtgcgccaatatcgaggcggccgaggttcaggagcagaagtgcggtttccaggacgcccaaggatcgctcaagtggcttgtgcggcggctgaaggagcgtttgcgctcgaagtgagagtgcggtttgcggttgacgatccgctttgcggcgtttcgcccttttcgggactgcaattgaattctgagatgcgccgtccccgacgctctgtttacgtgtcgactcgcatacgtttccgtactgttataataagggcgttgaacgagcgcatttgcgcgatatccggcaaggacaatcatggaatggtatcaggcggtaatcgtgtttgccgtggcctttgcggtcgcgtactgcatggtacccgtttccaagaagatcgcatttcggatcggtgctatcgactacccggggtatcgtcgtatgaatcgcgagcctatcccgcgttgcggaggcatcgcgttgtatgttgggctgatcgcggcatgtttcacgatgttcctcggagtgcggttcttcgattgggatttgcatgatctgtatattttgagcgacgtgaactacatcgtattgttcatcggcgtgacgacaatgttcaccgtgggtctggtggacgacatcacgcagttgtcgcccggcgtgaagctggcggggcagatcgtggccgcgacggtcgtcacgctttcgggcatcaccatcggcgcggtgcgcacgctggtcgtgggcgactatctgtcgctcggttggatcgactatcctttgaccgtgttgtacctcgtggtgttcgtgaacatcaccaacttgatcgatgggctggacgggctcgcttcgggtttggtggccatagtcgccggcggactgctgtaccttgttttgatgcggggaagcttcaccctcgtgctcgtctgccttgcgctgatagccgtctgccttgcgtttctgcgctacaatttctttcccgcctcggtgttcatgggcgattccggatcgctgttgctcgggttggtcgtcggcatcgtgtcggtggtgggcgtcgttcggacgcagagcttcgtggtcatgctggtgccgctcattatcgcgggagttcccgtgctcgataccgtctcggctatcgtccgacgcaagcgtctgcatcagccggtgaaagacgccgatttggggcatatccatcatcgtctcatgcgcgcagggttgagccagaagcgctcggtggcggtgctgtggctttgctcggcggcgctcgtgctcgtaggttgcctgatgggaaacttctcggggccggtgcgctggatggtatgcattgtgctggctgtggttttgttcttcgttatctggaaattcggcttgttcaagcctgttttgaagcatcattacgacaacaggggcaagcggggcccgcgcgttccgcgccaacgataagctggtagagcgatgactgagatttccgaagtgcataagagacagtcgaagaggacggccgcagcggccgtcgccgtcgttgcggtgctgtcgcttgcgttcattgggctggtgtcgttcttggacaacgcagccgggcaggttcagaccgacagcgtctccatcgaggctgtctcgtcgtccgagccgttctataccttgctcattggctccgactctcgcaagggcacggcgctctacacgggtaagaaaaccgaccatgcccaggtcgaccagcacgccgacgtcatgacgctcgtgcgcgttgatccggaaacctacaccatcacgcttgtcagcatccctcgagacacggtgtttcagggcacatcgctgaagatcaacgactctctgctgggcggcgatcccgaggaggtcgtggcgagcgtcgagcgcctgacgggcgtggctatcgagtactacatgttgaccacgttcacatcgttcgaggcgctgatcgacgcgcttggcggcgtcaccgtcgacgtgccgaaaaacgttacggttcccgatcccatgacggccgagaacgtgtccctgaaagcgggccggtcgcagagtctcgacggatcggaggcgctcgtcctcgctcgtgcgcgcaaggagtacggcgagcatcaagaggcccttcggcagatgaacgtgcgcaacatcgagacggccatgatccagaaagtgctttcgctcaacagcgagaagaacgcgaacgcggtgctcgtcgacttggaggagtacacggataccaatttggacatggcctcggtggggtacttgcttgtggacttcattgcgaatcgtgaagaggtgacgatctattcgaccacggggccttatgcgggcggcgagaacgcggaggggttgtgggtcgtgcaggaggatcccgctgcctgggccgagctgatggctgtggtggacgcaggggaggatcccgaggacatcgtgaagctgccctcccactcgtagaggcgatggcgaatcgttttagatttgttgctatgctattatgtcaatttgtctgtttgggatgtcgaatgggagcgttgtgctgagtactcttgcgacgatattgaaggacaactgggagtggcgcaagcagatcgggcgactggctctgttcgatctggtgaagaagagccgcggcgccgtgctcggttgggcttggtttttcatcaagcctgcgatgtacattttctgcttctggttcgctttggaaatagggcttcgtgcgggcaacagcgatgccggcgcccctccgtacatcctgtggctgtgcgcaggtctcattccgtggttcttcatgcaggacatgttggggccgggtctcgacgtgctgcaccggtattcatatttggtgaacaagatcaagttccctctcagcggtatttccacgatattctctggcgctaccctgatcgttgaactcatgcttatggtggcgttgttcgtcatctatttcgcgtgtggtatgccgctggacgtgtatcttttgcaggttcctatcttgctggtgctcatgttcttgttctggaacactgtgtccatcctgttctcgcagctctccgctatgagcaaggacgtgaagaatctcatgtctgccatgtcgacgccgttcttctggctttcaggggtgctgttcgatgtcaaagatatccatatcggctgggttcaaaccatgctggacttcaaccctatcaccttcttcgtcacggcgtttcgcggcgccttctacgacaagacgtggttctggaacgatccgtcagcttgcgtgggcttcgttgtcgtgttcgcgatcaccctcctggcagcgctgttcgtgtacaagaagttcaatgaggaggtgtgcgatgtcctctaacgacgagtcgttgaaggataccaagtcccttcataaaaccagcgtgagcgacgaagtggtaatcaagttcgatcatgtgaccaagacgtacaacctgtacaagaacgatcgcgggcgtttcctgggcatcttcaactacaaccgcaagggctctttcctgggaagcgtcgatgccagcaaggacctttcgttcgaaatcaagaagggcgaggccgtggcttttctcggccgcaacggcgcagggaagagcacgacgttgaagatggtcacgggcgtgacgcatccgaccagcggagacatcgaggtcaaaggtcgcgtttccgcgcttctggagctcacggcgggtttcgactcccagctgacggggcgggagaatatcaacctgcgcggccagatcctcggcctgaagcgatcggagatacgcgacctcgaaccccggatcatcgagtttgccgagctcggcttgtacatcgaccagccgatgcgcacatactcgagcggtatgaaagcgcgtttgggctttgcgttcgctgttgccatcgaccccgagatactcgtcgtcgacgaggccctttcggtgggcgaccgggctttccagaagaagtgcatcaaccgcatacgcgagatcatgatggacgagagcgtcacggtgctgttcgtgacgcatacgtccgcgaccgcgaaggagttctgcggtcgaggtatcgtgctggaccaggggacgaaggtgttcgacggttcgatcgacgatgcaacggcatattacgagaagaattactaagcgagctcgctcatgatgaggcttgcggcgtggttcatccggttcgcgtacttcgtgtgcgcgttgtttccgcgtcgagacaaggtgtccttcctatctcggcaatcgtcgaggcctttcgatttcgcgctgcttgagccggagatcaggcgttcgcttcccggttacgacatcgtgtggtcgtgcgttccagagtccggctctttcgggcctctgttggcgtttcgtcaggtgtggcatgcagctacttcgcgtgtatgcatcgtcgacggttatgttcccgccgtgagcgttccgaagagccatgaaggggctctatgcgtgcagctatggcattcgttgggcgcgatgaagaggttcggctaccaggctctcgacacgccggacggtagatcgtcgaaggccgcgagcgctttgcgtatgcatcgcggctacgacatggtggtcgcggggcttccgggcgccgtgccggcattcgccgaggcgttcgattgttcggagaagaggattctgccccttggtcttcctcgtgtcgattacctgctttcctccgagttcgaagacgaacgcgctcgacgccagcgtgcggctgtggagcggttggacatcgatcgggatcggtggagggccgtagtgctgtacgctcccacgctgcggcgcggggtggccggaggcgatgcgtggttcgatcgctcgacggaagagctgacaagggctttcggcgaaatcgatgcggcgctcgtcgtggccggtcatcctttgcaggctgatgtccagcatgatggggggaacgtggccttcctgcgcggtgccgcctccattgacgtgctttcgtgggtcgattacgtggtgaccgattattccgctgtcgcgtttgaggcggcggttgcttcgaagaaggtgctgttctacgttcccgacattgaggagtatcgtcgttcgcctgggttgaacgttgatccgctcgaggagtatccgcagctttctttcaaggacgcagattccttggcgagcgctgtggcgtccgatatccggacggacggcagcaaggtgcggcctttcgacgaatgcgcgaaggcgtatctgggcgatttgagacagggctgcacgaaaaggatcgtcgccgaggtggcatcggccgctggtgctggctcgaagacggtcggggatgatgatgggtttgcgcgggcgacgctgtagggaagcgcctcgcggctgaaagaaaggattgagcgatgagcgagaaagacgggatgcagggagttcattctgttgagatcagcgcgaccaatgacgtggtgtacggaagctcgcatgtcgggcttcggcgagttttgacctacggcacgtacgacctgctgcattacggacatatccgtctgctgcagcgggcggcatctttgggtgattacctgatcgtggccttgtctaccgatgagttcaacgcgttgaaggggaagaagagcttctactcgtatgaggttcgccgtgagatgttggaggctatccgctacgtcgacctggtcattccggaaacgcattgggagcagaaggcatccgatgtggagcgctattgcgtcgacgtggtgtgcatgggaggcgactggaagggagaccctcgcttcgaggcgctacggaaccagtgcgaggtggtgtacctcgatcgcaccgacggcatatcgaccacggaggtcaaaggccgtttgggtaaggattcgctgtgaggacagctggacgagtgagcgatgccgctcgagcggcggggtacgcggtgcttcgtcgcgcgccccgcacgaggcttgccgtcaggcacgcttactgggcgttgcagaagcgcaagtacgatgcgcttgcaaagtctatagccacggaggcgcgcacggtgctgttcgaagcgtacggcggacgttcgtacgcgtgctcgccgaaggctctttaccaggagatgctgggcgatgagcggtttgcgggctgcgaacttgtctgggcgtttcgggagggcgctgtcccttcggacgagccggacctggagcatgcgaccatagtcaagcgtggttcgagtgcgtactttgagacgttagctcgcgcgggctgcatcgtcgtgaacaaccggttgccggaatacgtgtacccgaaagacgaccaggtgtacgtccaatgttggcacggcacccccttgaagcgcctggggtacgacgtggagatcgagatggaaagcgctctgaacaccactaacgagcttgccgagcgcttcggaatggatgcacggaagtggactcacctgctttctccatcgccgtacgcgtcgaagcatctggcggatgcgttcgggttgcctctggagaagcgcgggagcgtgatcgtcgaggagggctacccgagaaacgatgccctcgttcgctcgcgaggcgacgaatccgttcgcgcaaggttgcgcgattcgttgggcgtgccggaagggaagcgcgtgctgctttacgcaccaacgtggcgtgacgattcgtaccaagacggcgtgggctacacgttcgattacctgttggatttcgaccttatgaggcaacagttgggcgacgaatgggtcgtgctgttccgtccgcactattatatagccaaccagttcgatttctccgcctacgaaggcttcgtcatcgatgtgtcgaaggtggatgatgtcaacgacctgtatctggcttccgacgtgcttttgacggactattctagcgtcatgttcgactatgccaacctgcgcaggcccatcgtcttgttcgtgccggatcgcgagcgttatgccgatgctattcgcgggttctacttcgacttggaggaggttcccggccccctttgctcgactaccgacgaagtggtcgaggagctgacgcacgtggagggtcatcgaacgaagtacgagcaggcttacgcggcgttcgttgagaagttctgcccgctggacgatggttgcgcttgcgcgagggtgctggaaaggcttgctagttttgtcgcgctgccgtaagaggcttgcgaggcgatcaacgaaatcgaggcgatgccggccgattcagaaggtggcgcatgctggcatccgtcaatgcctgcacggtggcgaaacctccgctccgcggtagcaatcgatcggcttggtaatcacactgattcgctttactttgcgtttcgagcatccgaactgggaaagcgccttcgagtgcgctcggtggatccgaaacgccttggccgagccctcgtcagaattgccaaaccgattgattcctaccgctcgacgccgtttccgctgttaaaccgacattgacatggcttgggcgggtcgcgtctcgtaaaaaacctcgtcggagggatcggtatcggtgcctgttaatgctggcttgatagcggagccaagcactgagtcgcaaaaatcaccgctgtagactcgatgcggggatggcggtcgtcattatgatcggggcctgcgcaaatgcgaggcaggtgcaactggaaggtgccgaatgccgtcaccgggcgctttgaagcttggaattcacttcccatcggtgaattttaagactcgacggccttcctgtcggctgcgttccggcattggcgtaggcggccggatgctcgtggttgacgacggcgttcaaggatccggcaaacccatatcgatattggccgtgcgatagaatctcgaggtttcggcaggaatcggtgggatgcctagtgcctgtttggcaaaggtgtgccgatgccgtgatcgaagaaggttcggcgtggccttctcctattgttgatgttgtgaacgtgcgaatagcgggggcgattattcgcccccgctccaactggctcatcctgtctcgggcgtccgagttagggagttgccttttagctccgaggctcgtcaagctgcataattgcctcatatacccgttcgcagcattttccgtcgcggaaagcgaatgtctcttccattcgctttttgtatacgtcgtcgggtttgaagtcgcgggcggctagcttctcgagttccgccagaaggtcgttttcgttgtcgacgacagggccgaagccatcgcgttcatagtcgaaatagccttgggaatacacctgagctccgccgtagaagaactccctgtcgaattggtagaaaatgcactctttacccagataggccacatcaaacgccattgatgagtagtcggttatgcagacggatgcgctgcaaaagcattcttgaattgagcggtctctattgtttgtgtgtaccgttatatagtcgggaacggagaatgcccctgtctcgatatagggagcaatgttcgcatgtggtacgaaaaggacttcacatgagtttttctttgcgagtttcttcaaggttgagttgttgagaaacgactcccaggtttctttgtattcggaaactaaaaaggaatctttgaattcgcgattatttcctagccccaaagtgtttccaactagcgatgccctccatgtgggagcaatcataatggcatgtcttgcttgttgagaaaaacgcctgctagattgcatcttgagcagtgcatcgtgtcgaggaaagcccgacaaggtcacggattccggtgcaatctcgtagggtgatccgtcatcgacgaaagagtgatactcttccgtcgaagccgcagcaagaagcgatataggttttccgttcaaccatgtagataagttgtgaacagtgagaccgtgctgcaagaatataaattttttcgatttgaaaaaattatcttggaaataggaatggacgaaattgtcggcatgggaactgattatcattgagcatttccgaagctctaactcatgagctttcgatccaaaattaagcaggttaaagccttcttgagcgagcctcttccaatcgggggactccttgcgcaatgcgaacaagcacctttgctcaggatgatttctcatcatataacggtagaagtgctctccgttgtcgtctgcttgcgtgtcgcgatccatgatgatccacgtcgatcctttttgttcgtacgcagaccaatttctggtatagcgtctaatagcttcgcgaacgcttaagctgttttcaaattgcttaccgtcgaccgtaaggcgtgcggattctctctttttgccgacgtacgaaaggacttggttctgcctttcaaacttgaacgaaagttcatacgtgtcgtacagattgactccgaagaagctattcccaacccttttgctccgaatgggggtcagcactttgccgtcaaggtagaaggcgattttcttcgagcatgttcgaatatggatcaacttcttaggaagatcgatgctcgtgacataggcgatctggtaaggaggttcgcgagtcatgaaaaactgcgatatcgccgccttgtgcgcaaaacgcaagaaacgtccagggaaatcgaaaagaactttcgtgtcaatgcatgcgaatatttcacgaagtagatcaaggaactcctcctgcacgccagcttcttcggcaaacctgctgcgttgaggtcgattgacaaaccagccaaggtagtacgacaaatcgtacaagatggttttttgaatattgacaggataaaaccctcgtacccttttagagtattgaagcagatcgaggtagccgtatcgtggcactgaaatcagcttgttggtatcacgccatgatccatctattgtcgaagtgccgctttcccgtttccgatagtaatatctcggcttgcttaaaaatccaactactcccgccgtcagttcgagcaggtacctcccaacgaaatgtccgtcttcgaagttcggtttaatgtcttcgcttattttcagcccacgatccttgattacggacattttgaaaaaagcagtactcattgaaaactgcataggaatgtgctcgtcaagcgccgaatagaatttgtcgccatgcttgtaattgttgttaagcgggtgggtgtcggagtagcgtctccctttttcaaaaaagtacactagtcggcaactgaccatctgaactgacggccatgcgacgatcgctcggtcgacctcctcgaaatagcgctttgatacgaagtcgtccgggtcgatgaacgtcacccattcgctttcggtatgattcatgccgaggttgcgggcggatgcctggcccccgttttccttttttaaatacgtgatggcgccaggccaacgatcttgccagcgcttgatgatctcagctgataagtccgtggagccgtcgtctactgcgatgacgcggatgctttctttaaacatggtttggttgtaaaggctggtgaagaaatcatccaagtaagcctcaacgttgtacacggcggtgaccaccgtgtaggtctggctgcttcggtaggtattcggcttgggctcagatcctttccgagttttacggtaggctcggatcttccgaatggcgggatcgggcagaaccttcttggcggctctcttaatatctttcttcaattcgttcgatgacatgttgacacctttcgtagcaatatgacctggcagcataatcgacgagttatttattcagcacccctttgtcggccagctccttcaaaagacggtcggtgttgtggccgtcccgatgctcgacgatttcggcgaagcgctccgcgtactcgcgcgactgcggcttgccgtacagctcggccaccgccgcctccagctcgtcgggggagtagcaaacgggaccgaaggcgctctgctcgtctatcatcaaatgcgtgccctcgccgtaccgggccatacattcgtccttctcctcccaccagaagacgacgttcgcaccccggtagaatgcatcgaaggcgatgctcgagtagtcggtgatcagcaggcggacgcccctgaggagctcgtcgtagctcccgacggcggctttgcccggcgagccggcgaacgtcgcctggtcgaacaacgggtgaggggcgaccacgaccttgtctcgcaggctttccgggatggacgagacgatcttggctaccatcttggtgtatgcggccttctccggatgctccctcatctcagcgaactcccatatccgccatgtgggcatgaccaggatcttgtcggcgtcatcgttcatgaagctcctgtcgaacttgggcagcccgcacacgatgagctcctcctcggagaagtcggcggagtcgatgaagtgctgcgcctccttgtgggaggatactacgaccaagaaccggcctttgacgtttgtccgtcggaaggaggtccgctgcggcgagtccagcgagatcatgtacatgaccccgtgctgcaggaagacgtgggtcgagcgcctgctcttgagctttctttgcacgaagaggttctgacagcgaagttctaaggcgtgtgccgcggtctccgttcccaagaaggtttggcagcggaagaaccgcacgtaatgcgcgaacgtgtgctggtaaaggaacctcttccgatagcgcggatcgacatcgagctcgttcgcgacgcctcgatcgataacgaagcggacgttcgggcacccctcgtcgaccagccgctcgaagacgacacgcccgctctcctcgtaatgccgtccgttcttctcgtacagcagaatcgggtcgatccagaatgcaagcttggaagccgcccatgcgaggaacagctttgcttgtttcgtccatgagtccgtgacgttcagatgtcggacggtgaaggtcgtacctttcccggcgttctgccggaagtacaggacaaggcgctcgtcatcgagtacatgaaaggctgtgtgcgcagcgaggtacttgggcatgaaagcgctgaaccgcacgccggaggagtcatcggcgaagagggatgcggaggctctaagccgcaccacgttatggatcggcatcgtgagcgcctcttcgagcgggatgtctatgcggattaggcggaggttgagccttccttcccccttgaaggggagggaaggccatacggtcgggcgcggttcgaggcctcccactcgcgcagtcaggctttcagcgtgtcctgcgcagggcgtgcgaacggaagcaagcgacacgagcgacattgcgttgcgtctacgggagaagaacccgaacggcaagacgaaggagaaagcctcgctcctaccgctcgtagcatcgttcttgcggaaacgccagctcatcgagtgtgccttttcgcaaaaaaggagtccttaccaggtgcgatgtatccgtatggcgcattaagaatgaccgaacaggatgggtttacataatcggggttatcgagaaaacggcgcaacatcccaggtcacgagctttacgtgtgacaggatttccgggacttgcctattggagtatttgccagggatagtttttcgggtacaatcgacaggcagtttacgaat

SEQ ID NO: 8788 - DNA, 241 bp, Unknown
  gut microbiota DNA sequence
cggaggcggcgaaggcgatcggctcggggctgtcggcggcggtgcggcgcgatctcgcccagcgcgcggagcactgggcgcagtacgagggcccgatccaagacgtctccaacgccgccaacgacacctacctcaaggcgaacgaccaggccgacggcatgcgcagctacggccgcatggtggacctgctgctggccgagcagcgagccgaaggggagggcgcctagccccagaaccccgc

SEQ ID NO: 8789 - DNA, 628 bp, Unknown
  gut microbiota DNA sequence
gcggatggtgaacttcacctcggacgtgtcgtgggcgatgccggtgatgacggcttcctccatcatgtcggtctcctccttgatataggtgccttcggcgtcggagaacgccgagcgggaatgaatgacgacctggtacttgcgcgcgaactccacggcgcgcatctgcagcacgccggcgcccgagctggacagctccagcatgtcgtcgtacgagatgacgtcgagcttcttggcgcgcgggcacacgcgcgggtcggccgtgtacacgccgtccacatcggagtagatctcgcacacgtcggcgcccagaccgtgcgccaccgccaccgccgtggtgtcggagccgccgcggccgagcgtggtgatgtcgccgttggcgtcgatgccctggaacccggccaccaccgcgatcacgcccttgttcagggcttccatgatgcgctcgttgtgcaccttcacgattttggccttggcgtgcatgccgtccgtctcgatgccggcctgacggcccgtgaagctcatggccttgtagccgcgcgcctcgatggccatcgccagcagcgtcatggacacctgctcgcccgtggacagcagacggtccatctcgcgcgccggcgggttgtcg

SEQ ID NO: 8790 - DNA, 560 bp, Unknown
  gut microbiota DNA sequence
gcgcaaaacttaactttccacctacatcatcaaatgcgtcatacttttctacaccatatttattaaacattttatcaagattctttttgataaaaagaagatcatgatcatgttcttccttcgcatcatagagcttatctatctgagcgaattttctaacgaatactttttccagagactgtgcatctgaacctttcatgaacgtcttatatttacgttccagacggctcaggcgcatattcatactgatattccttaccagcaggaagatagtaagaatcagcagtataataatgatgatcccggaatcaattccaagattttcaaaaatgccactcatattactgtcactcctaaccaatggattcgaaaagatctatgattctttccagttcatccttggaataatattcaatttcaattttacctttgtcatttttctttctgtgaatctggactctggtacccatgatacttttcattttttcttccagactctcatatattgcatcctcagcagaactgaatttgctcttctttgctgtttttggcggctccag

SEQ ID NO: 8791 - DNA, 382 bp, Unknown
  gut microbiota DNA sequence
cacgccgcagaactgctcgggcaagagggcaaggggctgcacgcggctggcggcgaccacttcgacgatggatgagaacgcgatggccatgtctccgtcatcggtggggatgaccagcgcgttattccgccgagcctcttggcggtccttgccgatgagcgtttcaatccagtgcagacgttggctacggtcgcgcatgggttcccctgtccttcgccgcgtcgttcagaaagcgccgtacgcttatcacgatgcagggtgaaccgtcttgcaggatggcgtatccgatgtagctcagttcgtgcatgcaccggcggtcgagcagtgccggaagctgcagcatcgagatccgctcgtagccctcaacgtcgtctgcggccaa

SEQ ID NO: 8792 - DNA, 548 bp, Unknown
  gut microbiota DNA sequence
cgtggtgcgcgccaagaaggcgctctcggccatgggggagggcgtgctcgaagtgctcgttgacaacgagacagcggtgcacaatctggaggcgctggcgaagacgctcaaggtggaagccgtcggcgagaagcgcggcgaagatgcgttcgcggtgaccttctcgaagggcgcggcggcgtcggacggtcaggcgggaagcgccgcgagctgcccggcggtcgatccggccccgacgggcggccgggtggcggtgatcccgtccgagttcatgggctcgggggacgacgagctgggagccgtgctgatgaagggcttcgtgttcgccctgacgcagctcgacgagctgccggagacggtgctcatgtacaacggcggcgtgaagctcgcctgcacaggctcctcgtcgctcgacgacctgcgcacgctcgccgaggccggcgtcgagatcatgagctgcggcacgtgcctgaaccattacggcctggccgagcggctggaagtgggcgaggccacgaacatgtacgtgatcgtggagaagcaggcga

SEQ ID NO: 8793 - DNA, 250 bp, Unknown
  gut microbiota DNA sequence
gtgtacaccttgtccacgggaaccccgtcgagcgccgtcttcacgtcgtcggtcgtgatggccagcgcctcgtcgaacgtacatccttcgagcatggagcacaccacgctggcgcaccccgtgacggccaggcagccgcgcgtcttgaagccggcgcgcacgaacgtccgcgtgtcgtggtcgatcacggcgaacaggcgcagcgccacctctccgcgcttcgacttgcccaccatgctctgggcgttga

SEQ ID NO: 8794 - DNA, 247 bp, Unknown
  gut microbiota DNA sequence
gctgcgctccgccgagaagggcatcatcatcgtcgactacctgcagctcatgtcgccgccgcagtcgcgcaaagacggcaaccgcgccgtcgaggtcggcgagatctcgcgaggcctgaaggtgctggcgaaggagatggacatgcccgtcatcgcgctgtcgcagctgtcccgtgcggtggagatgcgcggcaagaagcgcccgatgctgtccgaccttcgcgaatcgggctccatcgagcaggac

SEQ ID NO: 8795 - DNA, 421 bp, Unknown
  gut microbiota DNA sequence
acgccgtcgaacaggccgccttcgccgttcttcgtcgcgtagtcgatggtgcgctcgaagtcgtcgatgacgggcagcaggctggtgaccagcttctccgtcgcgcgcgccttctcgacctcgcgctgctcggtggtgcggcggcgatacgtgtcccactcggcgtgcaggcgcaggtacttgtcctgccaatcctgggcctccgccttggcctgagccacctgctcgtcagccgaagggccggcgtcttcgatgacctcggcctcgatcgcctcgccttgcggcgccgcttccgcggcgacagcgtcggaagagggggtttccttgctgccgctcgcgtcggcgggctgggcctgcggctgggctttcgcatccgcaggacggtcgtcttcgatgggaatgctcttgcctgcgccttgag

SEQ ID NO: 8796 - DNA, 199 bp, Unknown
  gut microbiota DNA sequence
gcctccccaatcctcggtggcggccttcacgtcttcccaatcatggcagccggccgatgcgcacatcttcttgtcggccgtcacgccatgggtagtcagatgccccgtctcgtcagtggcgaaatctccgcgcacccacgacagcccttcggcgacctgatcggacaacttcgcctcgtggcacttcaaacacgtaacg

SEQ ID NO: 8797 - DNA, 733 bp, Unknown
  gut microbiota DNA sequence
catacgaaacgacaagcgaatcgaccgaggccctgctcgtcaccggaggcgtcggcaccggcaaaacgcaacgtctcgtcgagcgcgctgccgcgctgctggccgaaaacgccgccgcgggcaacgtgctcgtgctgtgcgcgacgccccaggccgcacgcctgttctcggagcggttgacagcccgcgtcggtgccaagcgcgctgccggcgcaaccgtcgccaccgcacgcgccttagcgctcgacgtgctggccgacgacggcgcgcgccgctggtcggggcgcgagccgcgactactgaccgccttcgaagagacgttcctcatggaggacatgaaggtgagcgggctgcggccgaagcggctgcgcgagatgctcaagttcttctaccgctcgtggaccgagctggcggacgacgatcccgattggctgctaccgggcgaggaggccgatgtccatacgctgttgaaagagaacctggtcttcatgcgcgccgtcatagaacccgaagcggcgaaccttgctgcacgctacctccgagaacacgacgaagcgcgggcggcgcattcctacgcgcacgtgctgatggacgactacgcctgcgcaagccgtgcctcgcagacgctggcgaatctcgtcgcaacctgctcgatcaccgtggcgggcgacgcggaaacctgcatcgagacatacgattcgtacccctatgccgccggaatcgacgaattcct

SEQ ID NO: 8798 - DNA, 1232 bp, Unknown
  gut microbiota DNA sequence
gggtcttccagcgtgacgaggttcaccgaatcggtgttcagctggcggatcatcgtgtacatggtggagcttttgcccgagccggtggggcccacgatcagcaccatgccgttgttcgagccgatgagccgctggtacttctccaggttgtcgccctccaggccgatgcccgcagggtcgaacagcgcctcgctcttgtccagcaggcggatgaccaccgtctcgccgtggatggtgggcagcgtgttgatgcgcaggtcgatgtcctgcttcttcaagcggatgtttgcgcggccgtcctgaggcacgcggcgctccgaggtgttcataccgcccatgatcttcaaacgcgagatgaccgaagcctgcagctccttcggcaccgtgaggatcgtgcgcagcacgccgtcgatacgcatgcgcacatgcaggtcgatctcgcgcggctccaggtggatatcgctggcgcgctcggtggcggctcgctcgatgatgctgttcacaagacgcaccgtgggagccgattgcgcgtcggcgtcgtcgcccagcgtggaggtttggaacgatccggtcgaggcgtcgtcagcgcctgtcgtgcgggcgtcgcgcttcatctcctcgatggcgcgggcggcaccctcgttgccgtacagcgtcatgatggcgcgcatcagcgaatcatgcgtggtcaccatagggatgacgcgcttccgagtggcgttcttcaccgcttcgatggccatgaagttcagtggatcgctcatggccaggcacacctcgtcgggcgaagtgcgcacgggcaccacgttgtactggcgtgcgacgttcttgctgatcacgcggcttagctcggggtcgaggtcgatcgccgaaaggtcgacgaactccacgcccagctgcatctgcagcgcctcgatgaggcccgcctccgtgatgacgccttcggcgataagctcgtcgcccaggcggcgtttcgtctctttctgctgtttgagcgcgtgtcccagctggtcctcggtgatgaggcccgcgtctatcagcacgtctcccaaccgtttgtacgccatttacgatcctatcctcttcacggtcatggcggtttcggccgccacgtcctcacctgatgcgatggtgatgcggaaactccaggtctcgttgtccgcgttgtatgaaagctctgccagcttgggcgcgaggccgtcgcgtgccggcacgatttgcgactgctctcc

SEQ ID NO: 8799 - DNA, 152 bp, Unknown
  gut microbiota DNA sequence
cctccatcacccggcaggcgcaggccgacgcgctgctgcaacaggcggtggaggtagtgagcgacgagctgacgtacgcgcgcgacgtggagggcgagggaacgcaggcgcccgataacccgctgtacttcaccagccccacgcgtcacgag

SEQ ID NO: 8800 - DNA, 1197 bp, Unknown
  gut microbiota DNA sequence
aggcggcgccggaagcgctgccggagaaaggagactgtcatggcgaagatagtcaattcttggaacgactgggatccgctgaagcgcgtgatcgtcggcctgtgcgacaactcggtcatcccgcccgaggagcccgcgacctccgagaaggtgccggtcgactccgagatgcgcggcatgtggggtctccgcccgctgcgcacggtcgaggtcggcaacgcctgcctcgagaacctcgtgaaggcgctcgaggagcgcggcgtggtcgtcgaccgcccgacgcccctgcagtggaaccaggccatcggcacgcccgacttccgcaacgactcgatgatgacctgcatgccgccccgcgacatcctgctcaccatgggcaacgagatcatggcctccgccaactccttccgctgccgctacttcgagtacctggcctactggccgctcatgaagcagtacttcgacgaggacccggacttcctgtggacccaggccccgcgcccgcgcctgaccgacaagtcctacaagcacaactactacgacgagaagatctcgctggaggagcgcctggtgcgcaccgccaacaaggacttcgtcacgacggaagtcgagccgatgtgggacgccgccgacgtcatgcgcatgggcaaggacctgttcatccagcacggcctgaccacgaaccgcacggccatggactggttccagcgctactaccccgagcaccgcgtgcacgccgtgaacttcccgggcgacccctacccgatccacatcgacgcgaccttcgtgccgctgcgccccggcctgatcatcaacaacccgcagcgcaagctgcccgaggagcagcgcgcgatcttcgaggccaacgactggcagatcgtcgacgccgcccagccggcccactccgagccgcccgagttctgctacagctccgtgtggctgtccatgaactgcctggtgctcgacccgaagacggtcatcgtggaggcctccgaggtctaccagcaggaggagatggacaagctcggcatgaacgtcatccccgtcgacctgcgcggcgcctacgccttcggcggcggcctgcactgctccacggccgacgtctaccgcgagggcgagtgcctcgactacttcccgaaccgcgtcgccgacccgaccctggttcgcccggagatgtggaacgactagtcgcgtagc

SEQ ID NO: 8801 - DNA, 179 bp, Unknown
  gut microbiota DNA sequence
gtgcccgcgatgatcgaagcgcacgacggcgtacccggcttccagcagccgctgcgtcacgtagtcgtagcggccgaagtgctcgcacagcccgtggacgatgacgactgccgccttcggctgctccggcgcgtcgatgcgtccgaccagcaggaagccctcgggggtctgtttcgtga

SEQ ID NO: 8802 - DNA, 13032 bp, Unknown
  gut microbiota DNA sequence
gagggtacgaacaagaagatccccgcgttgaatgacgccgcgacggggccgtcgttcgggccgttggacgataacgtgtacgtcgaccgcgacttctgggaggggtgcggctacgacttcgcaggcggcatcgagcgcagcagcgtgtattctgccagtcatatcaacaagtgggtcatggactacgacctgggcattcccgtgcatgggtcgtccatcaaggcgacgttcgacttcccgggcgcggccagcgtgagcatcgggacgaccgggctttcgccgacgcaggcgcagacgaccgacaacgcttggaagttcgccgtgcagggcgttcttgccgcggacaatgcggtggagctgagcgcgacgacgaccgatgcacctatggcgaacgggacgaatggctaccgcttcgtgggatggtgtcgcgagcccagcgtcacggtgaacgaggtggccgaagaccccgcgtacttcgagccgatggtgacgggcgattgggtgtcggacagtccggtgtacgaggcttcgaacgccgatcctgctaacaggcaattcgaggacaacgacctgttcatcgcgcattaccaagcgcaggtgctgttccacgacgtggacggcaacgtgatcaacaaaggtaccggcgcggcggatccgaataccgatgacgactggtacgactacttcgacccgctgccgtcgccgagtccggcgaagccctccgaaagctcgaccttcgtcggctggacgacgacaaagaactcggcaggcggcggtggctacaatggcataacatccacagagctcgttgcgatcgtcaacaacggggcgttgtacaaagcgagtgatccggtaactaagcctatggatctgtatcccatctacatagattattcggtgaacatcctcaccgaaatcgagggttatagcgccgatgcagataagacggtgcgcagcagcgtgggctcgacgcatgtggagaaggtgacgaacactgacggaatcacgtcgtatcgtgtgtttgtgaaagatgccaccggcaatgatctgagtgtcgacggggcgcttcccgacggctatcggttcctggggtggtacaagaacgtggacggcgttgaggtgcgcgtgagctccgaccccagctacaccatccccgccgacaccgacctcacccaacagcaaacctacatagcccgcttcgagtaccgggttgattactacgttgcatcagatgcgcaagatgctaacgaattcaagaatcccacgcttcatgctgagagatggcagcggtacgaaagcgctttcgtggaattgcctccacccgcttattacaatgaaatgttcgagtactgggcatcgtacgaccccggtgccaacccagcaataggagctaaatttaccggcgtgatatgtaatcctgaaaaggttgcttcgaagatgacgttcggcggtgtatcgactgactatgcaattggggttggtatcgactttcctggggcaggctccgttgagctgcgtggggagccctcgttgacagggaccacgagtggaagtgtcgaagtcgaaacgaagcccgatttaagtggggactacgtgtttagattctggacaggagaggggacgaagcttaatctccagtggagcgactggaaagagacgaatcgagaaaagacgtttcatccaaagggatccgcttattccggttctcgcgcctattactttcaggctcactacgctgcaaacgtgaagttcgagggcgtgctgaggaccgatgggggtgagtgggctgttgagcgccgttacgaagagcgggttctgctaaatcaagacacctctaatgcgtacggctatccgaaagcgggttcgtcaactggggtgtcgttcacctctgccgcttctcccacggatgctgacatgcagcgtgacgggtatcggttcttgggatggattgacaagtctgccattgctgcgggcgagatgaccccgcaggaatggggctacgttttcgacgtggcgggcgaccagtactgcacctcgcaggcttccagggcggttccctatctgctggctgccgatgcggtttgcacgcggcctatggatctgtatccggtgtacgtgaagtacgacgtgaccgtcactacgaacatcgcgcaggcgggcgtgccctccggcgctggcgtgaacatcccggccgcgccgacagtagccgatgggggtgcgacgcccagcttcaatctgccgtacaacacgtatacgcgcgattctgccgatccgggcactatcacctttggacagaacaacgcaaacgtgactgtgaaggacgaccagacaatcgacctctccctgacggccgaaaacaacgcaactcctgtggtaacggacggacaggcgacgtatctgctgaagtcgtggacgatcgagaagacgttccaggggcagacgcataccgagacggttcccgtcagcgatcctgccgtcgctggcgaaaaccctctgagctacaccatcgagtcgggctcctcgtacaagttcatagcgaactacgagccgctggtggtggtgtaccacgtgaacgacggagctaccgaaaccgtggtgcgcaacaacggccagcagctggggaagggtcccgatccgacgttcgacatcgccgccattgatttgacgaatggtgggatccatgtgttcgtgggctggacggcgacgcgtccggcggcggggcagtacgcaatctggagcgagggcaccgcgatggtgtcttcgagcacgatcgtgcatcggtcgatggagctgtggccggtgtatcgcgcggctacggtgagcgtgaactcgaacatcgacaaggagattgaggccgcgggcaaaaaacccgagagctaccgttcgctgagccgtttggactcgattgcttcggtcaccctcgttgcggaggcgaaggacttccccggctatcagttcgaccactgggcgacggagtacgacagcacgaccggccagggtacgcctgtgactgacaacaacaacttcgtgctgaggggcaacaggccgttcgagaaggacacgacgtacacggcggtgtacgtgaaggtgcatgaggttcgctaccacgacgcgcagggcaacgtgatatacaccgccaacgtgaagggcaacgagcgcacgttcgtgcatgacgtcctcgttgggacggagacggctcccgattccggcgggggaacgactgccggctccggagggacgactccgacgcagcaggtgccgatcgacgtggaggcgtatcacaatatcgccgtggcccttgatgctgctgcgaacgcggacgggcgcgaggcgttcagcaactggcggtgggacaacaacggcaccatggttccctgggagcaattctttgacaagccgatcacgacggacatggacttgtaccccgagacttggcaggtgaaggccaccgatgcgcaagatgtcgccatgaccgaccagctgacttgggcgatagacgtgagcgctttggaaacttcgagcgcgcctgcggcggaggggtcggccgcgacgccgaacgccgagaagcagacctatcccatccaagcgtacttcgggcagggcaactactacgaccagaagcacctgacggttcacgtggagaagcgctcctacaagccttcgagcgagccgacatatcaaccgggcaacccgcttccggccgaccgcgatgcgtctgcggcgttgggcaagcaggtcgctctgtacgacgacagagccacgggcaacgtgttggcatcgcatgtcgacgcggacggcggcttccgggactaccaggaagtgagcaccaagggcacttcggtgtgcacggtggacggcacttcgtacaccacccaaaacgacggcgatgccttgttcgtgttcggcgacatcaagccgctcaccatcgtgaagaagaccacggccaaggaggcggcgggggagacgttcctgttcacggtgaccaacctcaaggacgggtccctgcagacccgctcggtttcggtcaagtgccccgacaagccggacaaggacgggatctacgcggccagcgtgcggttgcagttgggccagggcgaatacttcgtgagggaggacaagtcctgggcgtggcgctatgggcaatcgtaccaggtgaacggcgtgaccgtcccttccggtgccgacggcgcgcgcgtggtggtctcgcgttctcaggacggctcgaccgtggtgtgcgagaacaagctggaaaacgacgcgtggctggatgactcggctcgtgcgatcaacgaattcggacagggggcgatcttgtaatgggcaggggaatgcatgcgaagccggctgatcgtcgggctgcggcgttcgatctgccgcacaagcgcccgggacgcaagcgcgcggcggtggttgccgcgtgccttgcggccatgctgtgctgcgggggcgcgctggcgtggttccatgcggagtcgggccttttcaacatgttcaaggcggcgaatgtcacgccgggcgtgaacgaaacgttcgactcgccgcacacggtgaaggagaacgtgtacgcgaccaacaaggggaacgtgaaggcgtacctgcgagcctcggtgtcggttcgctgggagaccgggagccaggctggcggttccgccgtcgtgctgggcgacgttccggagcttggtaaggactacgcgatgcagcggggcgccgtcgcttcgcctgatgcaaccgctcaacctgcggattcctggattcaggggacagacggcctgtactactggccgaagccccttgctcccgaaagcgatgctaccggaggggttgctcctgagcgaacggcgaatttgatcgccaagtgcgaagcttttcccaacacctcgcatacggatggccgccatctggtcgtcgagatcgacgtgcaggccgtgcaggccgatcctgttgacgcggtttcggaagcgtggggacccgaccgtggcggcgcggttacgggcgttgcgaccgatggcacgctgacggtttcgagcaagggaggtgctgcatgatgacgtgcagacgttcgaggtgcggcgttctggcgttcgctgcagccgcgcttgcggttgcagccgcgctcgccatgccgatgttcgctcggtcggctgcggcctatgccgcgcccgcggggccgcccaccgtggtgtacgacagcgccgcacgcgagttctttgtgcgcaacgccgatggaggcagcctgttcgacacgctggagaacctggtgccgggcgattcgtcgtcgcacaccgtggcggtgcgggtggagaacgcgcgcacgcctgttgcgctgtacctgcgcccctcgtgcgaccgtgctgtcgccgacgtgatagggccggtgcgcgtggtcatgagcgcggacggccggacgctctacgacggcgagataggggagctgcttcgcgaaggggcgcttcccgtcaagatggccgagctttcgggcggccggtcggcggacttcacgctggacgtgctggtgcccgtgaccttgggcaacgaggcggcgggtttggagaaccatgtacactggacgctcatcgcccaggacgagggcggctctgcgggcgcgggcggttccgagggctcggagggcgagggcggctccggtggttcgagtggcacgtgcggcgcgggaaccgtggaggccgacgtttcgacgctcaccaaaaccggcgactccccctacgctcttgcggcgttggcggcggccgtcggcgcggccgccgtgctggcagcggtgttcgtccgctctcgccgcggttcccggtagcgccgcgccttcgctttcccgagcgcccttcttctgcggcttcggcttgccgccttccgcctggcggcgcgtctagcagatgaacatggcgtcgccgaacgaaagcaggcggtagcgctcttcgatggcgtgctcgtaagcggccatgatgtgctcgcgcgaggagaacgcggacaccagcatcatgagcgtggagcgcggcacgtggaagttcgtgaccagggcgtccaccacgtggaactgcgagccgggcagcaggtacagcgacgtcgtctcgcgatcgcgcgcggtgacggcgcccgtctcggggttccaggcgctttccaggctgcgcacgctggtggtgcccacggccaccacgcgcccgctgcgctcgcgcgtctcggcgatggcgtcgacggtgcgctgcggcacggtgtagtactcggtgtggatgacgtgcttctgggggtcgtcctcatccacgatgcggaaggtgtccaagcccacttccagctccacggtttcccagcgtacgccctggtcgcgcaggcgctcgatgagggcgggcgtgaagtgcaggccggccgtgggcgcggcggccgagctttcgcggcgcgagtacacggtctggtacagctcctcgtcgccggcgtagttcttgatgtagggcggaagcggcgtgtggcccaccgcgtgcagcgcttcgtcgagggagggcagcgtcgtggtcaggcgcgcgatgcgctcgcccttctgcgcgccgtcggcccagtcgacgatttccgcggacagcgccacgtcgccctgcgcgtcggcgaagtccaccacggcgcccgtgcccggcttcaggcgcttgcccgggcgcaccagcacctcccacagcgcgcttcggttcgtgcgcggctcgcggtcgtgcacctcgcgcagcagaaacacctcggccgcacctcccgtgccgcgcttggcgcccagcaggcgggcgggcatgacgcgcgtctcgttggccacgagcaggtcgttcggacgcaggtagtcgacgatgtcgcggaagatgcggtcttccagcttgccggtgctgcggtccatgaccagcaggcggcagccgtcgcgatcggcggcgggctcctgcgcgatcagctcggggggcagttcgtaatcgaaatcagaggtcttcatgcgtgcgtccttcgtgcgttgcggtataggcgtgcgaaccacttattatagaccttgatacaagccgacggacgcttatccgtcccactccatctcgtaccagcattccaaggacagccccggcacgcgcttgaattcgtccacgttgttggtgaccagcacggcgttgttcgccagcgccgtggcggcgatgagcaggtcgttcggcccgatcttcttacccgtcatctcgagttcgccgcgtatgcgcgcataggcatgcgcgcatttcgaatcgaacggcaccacttcgaacggcagcgtgaattcgtcgacgagccaccgggctttttccggctgcttgcttttttcgatgccgagcctcagttcgccttccacgatggcgggaatcttgaagagcttcgggctgctgttgcgcatcatgtcgtaggcgtagggaagttctccgcgcatgaagtcgatgcagatattggagtcgagaagatacacggcgttcacctacagcgtttttcgaggcgcgtcgaattcccagggaatctccggcggttcgacgaacgtgtcgtcatcgcagacgccgtacaggtcgaagaacccatgcggccacaggccgttcgtatcgcggtcgcgcagcacgcccgccacgaacttcgagagcgtcttcccctcgcgtgcggcatcccggcgcaagccttccatcgtgggctcgtccatgtacagggaaagttgaggcatggcgcgctcccttcttgacgtgcgcggcaaatatacttgtaagtatacttgctagatgcgctgcacgcaaggcgctacgggcgcgtgttgtgacgctgagccgaccttgcggcgccatctgcgccggcgtgcgaagcctacttcccgtcgcgctcttgctcgcgcagcgccttcagcacggcgcgcttgcgggcctgcctggcgtcgtaggcggcgcgctcggccttcttcgcggcgcgtgcggcttcggcggcggcgcgctcctcggcatgcgccgcccgctcggcttcgcgctgggcggcccgctgtgccttgcgttcggagcgctcggcggcggcttcgtcatccgagaagcggcagccgcagtagttctgccggtacatgcccatctcgcggctgcgatgcgtggcttcgtcgtagaaggggcggtagtcttcgaacagcggctgcacgcccgcggccgaggcggcgcgttccagctcctcgcggatgacgtcggtatattggtaggggctcaccgacagcgtggtgcccagcgcgtcgaacccctgctcggctgccagcgcggcggcctcttcgaagcgcaggcggtagcacgcccggcagcgcgccttgcggcgggcgggatcgccctcggcggcgcccacgcgtccggcgcaggtttcccaggcggcggggtcgtaggcaccttccagcacgtccagctgctcgccggcggcccaggcgcgcagtgtggacaggcggtgcgcgtactcgtcggcgggcgcgatgttcgagttcatataggctatggtcaggtcgtgcccggcggcgcgcagcaggcgcaccggttccaacgagcacggtccgcagcaggcatgaagcagtattttcatcgggtttgcacgctccttcgcaacgtgacgtatactaccatgcctgagcaaccaattcacccgaccaaaggatcgacgcatggcacctcgcacgtatcgcgcaatcttcttcgacttggacggcacgctgctgcccatggagctggacgagttcctgggcgcctatttcgaggccatcgccggcttcgtcgcccggcagggactggacgcgaaggcgttctcggccgggctcaaggcgggcatcggcgccatggcgtcgcacgacgacggccgcacgaaccacgaggcgtactgggaggcgttcttccggcatgccgatgccgacgcggtcgcgtgggaggagctgctgaccgagttctatgagcacgagttcggcgctatcggtgagggcttccagcccaaccccgcggccgcgcgcgccatcgagacgctggcggcgaaaggctacccgctggtgctggccaccatgcccatgttcccgcgccgcgccgtggagtggcgcctggcctgggccggggtggatgcgtcgaagttcgcgcgcatcacgtcgttcgagaactccaccagcgtgaagccgaagctggcctactacgccgagaacgtggcggcgtgcagcctttccggcgacgacgtgctcatggtgggcaacaacacagtggaggacctggccatccaagggctgggcgccgacgcattcctcgtgaccgaccatctgctcgatccgaccgagggcttcgatctgggctccgtgaagcgcggcaccatggaggagttcgcggcctgggccgagtcgctgcccccgtgcgccgaccccgcgcagggcgtcgaagccggcatcgtggcggccgctgcgcgcgaggcggcgctgtccttcgcgaaggagggctagccatggcgctgttcgactgcaagatccaagcgaccagcggccatgcccgcgcgctgtcctacgagaccgcgcacggaacgtttcaaacgcccatgttcatgccggtgggtaccagcgccacggtgaagggcgtcaccgcgggccagctgcgcgacctggacagccaggtggtgctggccaacacgtaccatctgtcgcttcgccccggcgccgacgtggtggccgaggccggcggcgtgcaccgcttcatgaactacgacggccccatgctcaccgactcgggcggcttccaggtgttcagcctggccgacacgctcaagctggacgacgagggcctcacgttccgctccatctacgacggcacgaaggtgcgttggacgcccgagagcaacatggccatccaggagcagctgggcgccgacatcgccatgcagctggaccagtgcacgccgtacccgtccgagaaggcgttcgtggcgaaggccgtggacctgtcggccaactgggcgcgccgctgcctggccgcgcacaagcgtcccgaccagacgctgttcggcatcgtgcagggcggcatggagctggatctgaggcttgagtccatccgccgcctgcgcgagatcgaggacgagagcgcagccgcaggcgggcgccgtttcggcggcttcggcatcggcggctactcggtgggcgaggaccacgaggtgatgttccagacgctgggcgaggttgcccgcgcgtgccccgaggatcgcccgcgctacctgatgggcgtgggcaaccccaccacgctggtgcgcgcggtgcgcgagggcgtggacatgttcgactgcgtgctgcccacccgcacggcccgcatgggcacggcgttctcgtcgaccggtcgcatgaacatgcgcaacgcgaggttcacgcgcgacttcggcccgctggaccccgcatgcacctgcccgacgtgccagaaccatagccgcgcctacatccgccacctcgtgaagcagaacgagatgctgggcggcatcctgttgtccatccacaacctgcactacctcatcgacctcatgcgccgcgcccgcgaggccgtgctggccgacgcgtacgaggagttctacgagcagtggatggcaagctccgcggcgaaggactactaagggacgagatcggggaagggcaccgggcttttccctgatcttttcaacacccttcctttcccgttctcctcggttgtggcacaataggacagttaatgcgcagaagccctcggcttcgcgcgtccaagcatgcacgacaagcgtacataagcgtacaagggagaacgtcacatggcggcaacgcagaagacgacgaagaagaaacccgcgcggtccaccgaccggcgcaacatctggctgctcatcatcacgaccctgctggtgttgggatcggtcttcatgttcatgccgccgcaagagaagatcaaccagggcctcgacatccagggcggcctgtcggtggtgctcacggcgaagtcgacggacggtgccgacgtgaccaacgacgacatggagaagtcgcgcgccatcatcgagagccgcgtcaacgcgctgggcgcctcggaggccgtggtgcaggtgcagggcaccgaccagatcctcgtgcagatccccggcctcaccaacaccgaggacgcgctcaacaccatcggcaagaccggcaagctcgaattcgcgcgcctcgactcgttcaccgacgaggacgtgaagacgaagatcgagaacggccaggcctccggcgagggcaccgtctccgacgatctcggcgtggccacgctgccgacgggcgagacgcagcacctcaaggtggaggacggcacgtacacgcccatcgtcaccggctcgaacatcacgaaggtcgacatcggcaagcggagcgacacctccaccgactacgccgtgaacatctcgctcgattcggccggcgcggcggcgttcgccgaggcctcgaaggacctcgcgcccacgaagggcaagatcgtcatcatcctggacaacgaggtgcaatcggcgcccgcaacgcagtccgagatccccgacggcaacatccaaatcaccggcaattactcgctcgacgaggccaaggcgctgcagaccgtgctggaaagcggctcgctgcccgtgagcttcgagtacgcccagagccagaccgtcggcccgacgctcggccaggacgcgctggcttccggcgtgctggtggccctcatcgggctggcggtggtcatgctgtacctgctgttcttctaccgcggcctcggcgccatcaccgccgccgccatgatcgtgttcgcggtgctgtacctgggcatcctggccacgctgtcgtcgttcggcctgttcagcctgtcgctcgccggcatcgccggcatcgtgctgactatcggcatggcggccgactcgtccatcctcacgatggagcgcttccgcgaggagatccgcatgggacgcagcgtgcgcgccgcgtccgtgacgggcgtgaagcacgccatcgtcacgtcggtggacgccgacctcgtgacgctcgtgtcggcgctgtcgctgttcttcctggccagcgcctcggtcaagggcttcggcctgacgctggcgctgggcatcgtgtgcgacatcgccatgatgctgctgttcaaggcgccgctcatccgcgtgctggcgccgaaggtcatcgcgcggcacccgggcttctggggcatcaaggacagcctggccgcgtccaaggactacgcggcgctcgccgcggccgagggcacgagcgtggccgcggccgaggccggcgagaccatcaacccgaccgagtccgaggaggccgccgagcgccgcgagggcgctgccggcgaggcggccgcgaaggcggcgcgcaagccgcgcggcaagttcatcaagcacgacatcaacttcctcggctaccgccgcgtgttcctcggcgtggccgccgtgctcgtgtgcgtgtcgctggccatcgtgggcgtgaagggcctgaacttcggcatcgagttcgtgggcggcacgtcggtgtcgttccacggcacgggcgacgtgaccaccgagcagatgcgcaccgcgttcgaccaggccggcgagcccgatgccgtcgtgcagacgacgaacgccgacggcgatgagggctacctcgtgcgcaccaccaccacgagcgccgaagaggccacgcagcgtgcgaaccaggtggccgacagcctggggctgtccaccgacagcttcgaggtgaccaccatcgggcccgactggggcgccagcgtcatccagtcgtcgctcatcgcgttcctcgtgtccatcgtgctcatcatcatctacatcgccatccgcttcgaatacaagatgggcgtcaccgccatcgtggcgctgctgcacgacctcgtgctggtcatgggcgtgtacgcgctcgtgggccgcgaggtgaacccgaacaccatcgccgcgctgctcaccattctgggctactcgctgtacgatacggtggtcgtgttccaccgcatcaacgacaacatgcagtccgacgacatcaagtgcacgttcatgacgatg

SEQ ID NO: 8803 - DNA, 306 bp, Unknown
  gut microbiota DNA sequence
caccgaaaccgagggagtggtcacgcatacctggggaagcccgtttcccgacaccgcattcgccgaagcgggcgaggggtttttgatgagcgcgccggaattctgcttcctgcagatggcgggttgcctgtcgctcgtccagctgattcagctgggattcgagttgtgcggcacgtacgccctcgtcgggagcgccccggcggttcgccgtgccgccccgttgacgacgaaggccaagctagctgcttttgtcgagcagtcatccggggcgcgcggttgcaagaaggcggctcgtgccgtgcggta

SEQ ID NO: 8804 - DNA, 149 bp, Unknown
  gut microbiota DNA sequence
ctttcgtacaggttgcgaaaacgcgcgaaacggcgctgccgaggcggcttctctttgggcgcagccacggactccggcttcggctccggctctggtcgcggctcctgctgcggctgcgtcgaggagggttcttccggcttcgtcgcctc

SEQ ID NO: 8805 - DNA, 5507 bp, Unknown
  gut microbiota DNA sequence
ggcgcatctcggcgctgttcttgagcgcgaagcgggcgcgggtggggccgccgcctatcttgacggtccacgcgtcgtcgggcgcggcttcgaacacgtcctcgtcggtgcggtcgtcgccggctgccagcaagaagccgtaggcggggtcgcggaaccagcggtgggccgcgtgccccttgtcgacgccgcgcggcttcacctcgatcaccttgttgccgtccatgagcgtgatgccgcggtcggccaggccgtctcccagtgcgcatctgatctcgatgacgcgccgttcggccagctcttggctgcacatgcggtaatgccacaccagcgagtagtccttctcttccagcagcgatccgggcgtgcggtcgacgaagtcggccagcacggggcggatggcgtccttccagctgttgtcgagcggttcctgcagcgtccatgcccgcccgctcgccgtgcctccgtccgcttgcgcggcgaaccaaacgccgtgctcggccacgaggtcgacgggaagccggcccagccatgcctcgagcgtggcgtggtcgcgccccgacaccaccaccacgtcgttgtccgcgctgccgcccaggcgcgccagcacgtccagcagccgttcgtcgggcgcgacgcgcgcggggtcgtccgagaagggcatgagcgtgccgtcgtagtccagcagcagcgcgcgccgatccgcgcggcggtacgcctccagcagccggccggccgacgtggggcccagcagatgcgcgctcatgcccgcctggcggcgcttcacgtcggccacggcatcgaggaactcgcgcgcccacttcttcgacgtgtagcgtgccaggcgctgttgcatgggtgcgttgcgcttgcgctgctcgtcgggtggcatggtgagcgcctcctgcatggcacgggcgatgcccgcgcggtcgaacgggttcacgcacagagcctcgtgcagctcgtaggacgcgccggccatctccgacagcaccagcacgcctccgtcgccgtcgtggcaggccaggtactccttgcatacgaggttcatgccgtcgcgcagcggggtgaccagcatcacgtcgctcgcggcgtacaggctgaccagctgctcgaacggcaacgagcggtagtagtagtccacaggcgtccagtccatcgttgagtgtttgccgttcacctggcccaccagctcgtcgatgcgcttcttgagcgcgcggtacgacgccacgttctcgcgcgacggcacggtgaccagcatgagcaccacgcgacccttccactcggggtgcttgtcgaggaacgcgtcgaaggcgtccagccgctcgggaatgcccttcgagtagtccagccgttccaccgacagcatcaccttgcaaccttcgtgtcccttctcggccgcgagcgtttccactgctgcttgcacttccggtgtgcgtgcggcgtcgcggaagcgcgcgtagtcgatgccgagcgggaaggcgtccacctgcaccacgcgtccgtcaaccgtgagcgtgccgctcgtgttctcgatgcccgccacgcgccggcagctggacaggaaatggcgcacgtagtcgtaggcatggaagccgatgaggtcggctcccagcacgccgcggacgatctcgtcgcgccacggcagcgtgcggaacgtctcgtagtcggggaaggggatgtgcaggaagaacccgatggacgcatccggcagtgcctctcgcagcatcgacggcagcagcatgaggtggtagtcctggatccacagcgtgtcgcccgggcgcgcttctgccagtgctgcctcgcagaaccgttcgttcacgcgccggtatgcctcccattcttcctcgtcgaagcgggtgaactgggggaacccgtggaacagcggccagatggccgagttggagaagccctcgtagtaggcttcggcgtcgcggtcgtccaagaacaccgcgcggcaatcgcgctcgtcgaacgccgcggccagccgggcgcgctcgtcgtcgtccatgcccgcatccgcgtcggcccagccgatccagaggttgccgtcctgctcgtgcaaggggcccaggcccgtggccaggccgcccacgctgcgctcgagctcgaagccgccttcgccgtcgtcttcgaaacggtagggcagccggttcgacacgatgatcagccgcccggcctcgggcgcgacgacgctgcgcgcgtcatgctgcgcgcgccgagctgccgcgctctcttcccgggggcggtcgatgcgcgcgaggggtaaggggagcggcgtgtcgcgcagaagggtcgccgcggtgctatgagtgtttggcatggaagtccacctttgctgtcttttctgccattgtagggaaggcgccgccgcttccccgaagcggttgcgcccttgtttcgctgccgtcaggcggccgtgaacgcgcctttttctcgcgcgttgcgcagcggcggccgtcgccttggggtatcatgcgaacagtgcgaaaaccacgaccgtcgaaggaaggatatgcagacctacatcgcccattacatctctcccgcggctgctgacgtgcgaggcacggggctcttcgagttcgaaagcgactcgcgcgccaacacgaaggggaacctgcgcgacgcgcgcctcaagatgctggagctgtacggcaaggacgccgtgtcgtggaccatcgacagcgtggagcggaagaaagcgtccgtcgcctcgcaggacggccaactggcgctggacttccgcccgccgaagcccgagcgcaagcgcgcgaagaagaaagagtactggtaggcccgcaacgcccgccgtcggcgccggacgcttcatggtactccggtgacggcctcgcttcatcaccgcgatgaggtggctgctcggacgatgcaagggctatactggttcccataccgaacgaacgcgccgcgcctgcgcgcggcctcgcccagaacagggagcatttatgaagaacaagcaggtgaaattcctcaagcaactgctcgagaccccgtcggccaccggcaccgagatcgccgtggccgaactggtgcgcgagcgcctggccggcacggccgacgagatccagaccgacgtcatgggctcggtccatgcccgcctgtcgggcacgggcgtggccccgtcgctcatgctgtcggcccacatggacgagatcggcctcatggtcacgtacatctccgacgagggcttcctgtccgtgtcgtccgtcggcggcgtggacgcggccatcctcccgggcatgcgcgtggacgtgcacgcgtcgaactccttcgagccgctgcgcggcgtggtgggccgcaagcccatccacctcatcgagcccgacgagcgcaagaacgtcacgcccatcgacaagctggtcatcgacctcggcatgccggcgaagcgtgtgaagaagctcgtcatggtgggcgacgtcatcaccttcggcgtgggcttcgagcgcttcggcaagaacatggctgtctcgcgcgccttcgacgacaaggcgggcgtgtgggtcgccgtgcgcgtgctggagacgctcgctaaggagggccgcgcgcccggcgacttcatcgtggccgccaccgttcaggaggagatcggcacgcgtggcgccattacgtccgcgtacggcctagaccccgatgtggccatcgcgttcgacgtgacgcacgccaccgactatcccggcatcgacaagacgaagtacggaaagatcgtctgcggcgagggtcccgttatcgcgcgcggccccaacatcaacccggctgtgttcgagcgcctcgtggcggcggccgaggccgagggtctgccgtaccagatcgaggccgagcccggcgtcaccggcaccgacgcccgttccatccagatctcccgcggcggcgtccccaccggcctcgtgtcggtgcccctgcgctacatgcatacgcccaccgaggtggtcagcctcgacgacctcgacgcaacggtgaagctgctcgcccgtttcgcgcgcgacctggacgaggacgcctgcttcgtgccgggcatgggcgacgcggtgaccgagggcgacggcgctggcgccgagtccgctgcgcagatgcagttcgacgagacgggcgtggagtaggtacggccgtgaaacgcgaagagaagaccatcgccaagaacaagaaggcgttccacgagtacgagatcctcgagacgctggaggcgggcatcgagctgacgggcaccgaggtgcgctcgctgcgcgacaaccactgccagctcaccgactgcttcgcactcatccgagacggcgaggtgtggctgcacaacgtgcacatcccgccgtacctcaacggcaacatcgccaatcccgatcccgaccgcaagcgcaagctgctgctgcacaagaagcagatccgccagctgcaggagcaggtcaaggagaagggcatggcgctcgtgcccgtgaagatgtacttcaaggacaactcgctcgtgaaggtggagctggccgtggcgcgcggcaagaagctctacgacaagcgcgctaccatggcggcgcgcgattcccgccgcgaggtggagcgcgcgctgaaggaacgcagccgctactaagctgcaacgacgaaccacgccgcgctttgcgccgacgtgcgaaccacgcgaaggaggccatcatgggcttggacgaggaactggaaaccatcgaggacggcgccgagacggaagccgagcagatcgaccaggagaccgaactcgaggacgtcgaagagttccaaaacgacgaggagttcgatccttccgacgacgagaccgacctcgaggaagcctacgagggcttcttcgccgaggaaggccccgacggagagggcgagacgtcgctcgacggcgaggacgggggcctggcggccgtcgcgtcgcaggcggcgggcatcgacctgtccgaggagggcttccatatcgtcgacggcgacgaggccgacgaggaggcgcagctctacgagaacggctcgctcgacagctacgatgccgatgcgctgaacgaggacggcgacgcgaccgccggctccgtgcctgaggtcgacgaggcgaacgccctcgaagagctggaggacggccaagacgacgacgtgcaggacgtggtcatcatcgagccgagcgccgaggacgacggctacgaactggtggagctcgagctcgacgatgacgacatcgtgcgctacatcgaggacgaggacggcgacgtcatcggcttcgtgctcatggaggacggcgaagaggcggagtactactacgtcgaagaggacgaggaagaagccgaagaagaggacaacccctacgatctgggcatcacgaaggaaggtgtggccgaggccacgaacgatatgaacgccatctacaaggacggcatcgccgtggcggccgagctcaagggcgccttcgacgacatcaagagcgcgctcgacttcacgtcttttttgaagaagtagcctgacgcagcctaggaaacgcaaaggagccccgc

SEQ ID NO: 8806 - DNA, 145 bp, Unknown
  gut microbiota DNA sequence
ctgctcgacatcgatgtcggccgcaggcagcgcacgatcggccaagatgatgaccttgtcgtccgtcacctcaacgtaaccgccctgcaaagcgtaatgcacggtctcggaggcgccgaccgccttcacgcgcgcctcgccgtcg

SEQ ID NO: 8807 - DNA, 1721 bp, Unknown
  gut microbiota DNA sequence
ccgccgaaacaagccgacgctgcgggccgctctggcaccccatcttcgcgcgatcccgcaagctcgcgtaccatatacgcgtcgcttgcgcgatcccacgaatctgggccgccagagcggccctcgctgactcgctacgccaacccggtaggttgtttcgcgcttcgcgcgagcccttctgccgatgttcacccaatgccccgtttcctacgaagcagggtattttttgttcattacgattgacaagatgcggaaatgagaaggtttgttcattgcaatgaacaaaccgtgcgtcgcgagcttacgccagcccttggcgttcgtcgtcctcgtcccagtcggcggggcggggacggccggccaggtcgagcgcctcgtcgctgacgggcgggacggtgctggttccccatttggcgcgcacctgctcgcgacgggcgcgctcggcccgcgcctcgctggggcgcatggggtggggcatctcggcggcgacggtgttatcgcgcgacagcgccatgcggatgcgcaggtactcccagatcagaagcacgaacaggatggtcatcacgataaggtagccaatcacggcgccgggcagccccgtgaaattcaccagcaggatgggcacgaacagcgcgaatccgaacgtgatcacgtacagcttcgttgcggcgcgctgttggcgcagcacggtgatcacctggtacaagaagtcgatggccgccgtcacgccgcctgcggccagcatgatgtagcacagtccgcggaactgctcgaagtccacgccgtatagaaagctcatcaccgggatgccgatccatgccatcgcgagcgtcgtgacgccggcaaccgcgacgatgacggccatgattacgacgatgatcaggtcgaaccgcttgcgtttcgtcggatcggcccagacgttcgccatgcgcacgagcaggggcttgtagatgaacccgacggtcagcaggatgccctgcgcggggaagtacagcgcgttgaagtacagctggttgtcgtagctcagcacgccctccatgacgaatttcggcatgttgtcgatgaacgcatacaggaacagcgcgatgaacaggggaaagcactgtttgaacagctcgacgatgctgccgaagttccaccgcttcgacttcggcgtttcgaacatcgccagcgggaacgtgagcaccaggaacgtagcgatggccgcgacggccatgacgatgcacgacacggccagattgcgcgtgatcagcaggcacagcgagaacacgaccagcaccacgacggaacggaacgcctgcgacacgcccgacaaatacagcttgtcaacctgctgcagcctcccctcgtacacgtcggccaggccgtctaccattttatagaggtacacgcccaagctgatggtgaacatctggctctcgtagccgcgcaccatgcagtacgccacgcccaccaacaccatgaacgcgcaggtgatcaggcggtttatctggtaatccgagaacgaatgctcctcggtcacgtcggatacctgataggtgcgcacgccgtagttcgccaggatcatgagcagcgtgccggtgacgaatgcgagcgagaacatgccggcttgctccacgcccaccagctgcgtgaccacgacggtgaggatggggaacaccatgccccatgcgcccacgcccaccgtattccacacgtagtcgcgcgtggtgcggtgcgcg

SEQ ID NO: 8808 - DNA, 958 bp, Unknown
  gut microbiota DNA sequence
gttcttcgaggacgtgctcatcatggacgacgacctcgccctgcgcgagaaccgcctgcgcctgctcaaccgtttcgtcgccgtgttcgcccatgtggccgacttcggcaagatggccaagggcgcgaagtagcccatggacgaattcatcgcctacggaagctccaccgagttgcccacgatccacgtgatcagcgactcggtgggtctgacggcccaggcggtggcccgtgcggccgccgcccagttcggcgtcacgaaccccgtcatcgaggtgctgccgaaggtgcgcacgttcgaggagatcaaggagttcatcgacgagcacagcgccgtgcacaagcgcaacaccggcgatgggcgcatgctcgtgttctacacgctcgtcgaccgcgacctctcgcgccaactggccgaatacgccggcggtcgcgatgacatcgtggcggtcgacctcgtgacggacgccatcggcgccatcgcgcacatgacgggcaagcagccgtccacgaagccgggcggcctgcacgttgccgaccagtactacttccggcgcatcgaggccatcgagttcaccatcgcccacgacgacggccgcaacccgcaggagctccaccaggccgacatcgtgcttctgggcgtgtcgcgctcgtcgaagacgcccacgtccatctacctgtcgcagcagggctacaaagtggcgaacatccccctcgatcccaccaccgagcctccggcggagctcgagcaggtcgaccgcacgcggctgttcggattgatgacgacgcccgaggtgctcatcggcattcggcagcgccgtttggggcgcgcgagtgccgtcgcttcgcgctatgccgatcccgaatacgtgtaccgggacttggaggacgcccgcgcgctcatgcgcaaactgggctgtattgtcatccacaccgaaaatcgtgccgttgaggaaacg

SEQ ID NO: 8809 - DNA, 224 bp, Unknown
  gut microbiota DNA sequence
ctcgtccaaagcagccttggccgccgtgaacgaggccatcgaagcctatcgatccgctgccggcgaggcgcccgccgccgcaacctcgacggagaagggagcagcatgatggcagccatcgaccaaaagccctcggcgctttccgtgttcaacaagggcctgctcatcgagaaccccacgctgcgccagatgctgggcctgtgccccactctcgccgtgaccac

SEQ ID NO: 8810 - DNA, 1381 bp, Unknown
  gut microbiota DNA sequence
atcccgattgggcggagcacgtgtacgcccagggcgtgtacccggcgctgtccagcgtcgtgggatttctgccgtcgcttgtgagcttctcggtggccgagtgggttgcggcgctgttcctgctgttctgcgtgggatacgtcgtgtactgcgtccgcaagctcgtcgtgagcaagggcgagcgcggtacggtcgcctaccgtgccgtcatgggggctgtgtccatctgctgcgtggtgtattttctgttcaccgctttgtgcgggctgaactactaccgctacaccttcacccagcacaccggctacgatgtggaagaagccgacgccgacgcggcgcagcgccaggaggagctcgtgcggctcgcgtcctccctggccgacgacctgggccagacgcgagcgcagctgggcgacgacgcggacctgttcgacgccgagcccggccagttcgagcagtacgcgcaggagtcggtggaggccatgcggaagctggccgagcagtacccggtgctggatcggccgctgtactcgccgccgaagccggtgctcgcctccgagctgatgtcgtacgcgaacatcggcggcatgttcttccccttcacgatggagtcgaacatcaacgtggacaacccgttcttcgtcgttccgtggaccatgacccacgagctggcgcatcagtgcggcttcatgcgcgaggacgaggcgaacttcatcgcgtatttggcctgcaagcagtcggacgacgcgctgatgcgctacagcggctacttgctggcgtacgacaacgccgtatcggcgctgaggaaggtggatccggaggcggcgaaggcgatcggctcggggctgtcggcggcggtgcggcgcgatctcgcccagcgcgcggagcactgggcgcagtacgagggcccgatccaagacgtctccaacgccgccaacgacacctacctcaaggcgaacgaccaggccgacggcatgcgcagctacggccgcatggtggacctgctgctggccgagcagcgagccgaaggggagggcgcctagccccagaaccccgctgcctccgcttcttgcaggatgacctcggaggccagcagcgtggcgtcggcatctccttcatccgggaagctcgttctgcgctctcgcgttgcgagggctcgatctcctgttcttcccgacgggctccatcgaatggaagagctataatgaccgcggatcggtggaaaagcctcggttggatgcggaaggcttcgagatcgatgccgtcgacagctgcttgactaatacatagtgatacagtaggatttagtgcgacacatagggaacccgccgcgcgcgggcatcggtcggcgcccgcgcggcgcgcgatcggaagacgggaa

SEQ ID NO: 8811 - DNA, 4339 bp, Unknown
  gut microbiota DNA sequence
ttacagcggctacttgctggcgtacgacaacgccgtatcggcgctgaggaaggtggattcggaggcggcgaaggcgatcggctcggggctgtcggcggcggtgcggcgcgatctcgcccagcgcgcggagcactgggcgcagtacgagggcccgatccaagacgtctccaacgccgccaacgacacctacctcaaggcgaacgaccaggccgacggcatgcgcagctacggccgcatggtggacctgctgctggccgagcagcgagccgaaggggagggcgcctagccccagaaccccgccgcctccgcttcttgcatgatgacctcggcgggcagcagcgtggcgtcggctatgtcggtgccggtggcgtccaaatagcggcgcaccaggtggtatccgcaagcgtatccggcgcagtagggaaggcccaccgtcgggtagccctgcgccgtggcgatctcgtcgccgtagaggtacgccgacagccctgccatgccctgcacgtcgagggcggcgcgaatggcgggcttgatcgtcttttccagcgcgtcggcgctcgtcttcgtcacccagggcccggcgtgctcttcgccgtacaggctgacggcgaagttctcggccagcccttcgctcaccatcatctcgccgagcgtgatgtcgtcgtgccaggcgacgaactggaagcgcacgttgtggttcgtctcgtgcgcgagcgcggcgggcagccggcgcacggtatcgtcgttcggcacgagccacgccaggatgtagccgggtatgccgccgtcgccgcagtagccgtcgctcgcggctagcgcagggctgtcggggtcgcccagcaggacggagaacaggtagtcctgcacgcgcagctcgatgccgcgctcgacgaagcgggcgagcgcgtgctcgacggcctgccggcttgcgcgccacagctcctcgtcggccaggcgccgaacggcgtcggcccagctctggtccacacgctcgggcggcaggatgcccagcatctcgctggccatcaccgcgtcgtagccgccgggttgcgcaggacgcagcggcacatggtaacagtcccatttcgccttgaacggcgccatgagctcgtgacggtagaggtcggcgcgcttttccgcgggtgcggctatcatgcgggcgtacgcgtcgcccgtgcgcagcgcgcgcacggcgggcggcgcaggggaagttgaggcggcgggtttcttgcgggacacgggatctcctttcgtcgggggagccccatcctacgctctcacgtcgcgtgagggtcaatgccccgagctccatttcttcccggcgcctctcatcaggcagaagggctataatgaccccatgtcagccgaaggggaggagcccttatgatcgtgcttgccgtcgtggtcgcgcttgtcgcgctgcttgcaatcgtgctggtggcgaacgcggcgcgtctcaagcccacgcccgtttccaacccgctgccctcaagcgacgcgcgcggcgacgatgccgcggtcgcgcgcttccaggagctgctgcgccttcccaccgtgtgggacctgcacaaccccgacgccgaccgcagcgcgttcgacgagttcgtccccctgctgcgccgcctgtacccccgcgtgttcgatgcttgcgagctggagctgatcgacggctacggcatctcgcttctgtggaaaggcgccgaccgcgcgctggcgccggtggtgctcatggcgcaccatgacgtggtgtctgccgacgcgtccgagtggacgcacgaccccttcgccgccgatatcgcggacggcaagatattcgcgcgcggcgcggtggacacgaagtgcatctgggcggccctcatggagtcggccgagcatctgctggcggaagggtacgtgccgccgcgcgacgtgtacttcttctcgtcgaacaccgaggaggacggcggcgacacggccccgcacatggtggagcgcctcgaaggcatcgggcgcgtgccgtacatggtgctggacgagggcggcgcggtcatcgacaaccctcccctgggcgtgaacggccagttcgccgtcgtgggcgtggccgagaaaggcatcttcaacgcgcgcatcgccacttgcgccgagggcgggcacgccgcaaccccgtcgcttcaagatgccacggcgaagctcgtctcgggcctcgacggcttgcagaagaacccgccggcgtccaaactgtccgctccggtggcggccatgctgcgcgagctggcggcgcacggcggtttcgggttgcgcatcgtgttcgcgaacctgtggctgttccggcccctggtcgtccgcatcatgcagggcgactccgagacggcggccatggtgcgcaccacgtacgcgctgacgcagctcgaggggagccctgcgcacaacgtcattccgaagggggcgggcgccacggtgaacgtgcgcgtcgatccgagcgaaacggtggacgcggccttcgcgcgcatcaaggagcgcttcgacgaccgcacgacgtacgagctgttcgaggtgagcgagccttcgcccatcgcgccgttcgacggcgatcccgcgttcgagtacctgcgcgccgtcatccgcagcgtgtaccccacggccggcatcgcgccgtacgtgcagaccagctgcagcgacgcgcgtcatttccatcgcatctgcccgcgcacgtaccgcttcgccggcatcctgttcaagggcgaccagcgcaaccgcgtgcacggccaggacgagaacctcgacgtggacagcttcaagcgcggcgtcgggttctacaccgaattcatccggcatctcgaccgattggggaagtgaggcatcgtggccgacgagagacgagccgcaggggcggcaggcgcggcgaaggcgccgaagcaggggaggttcttctacgggtggtggatcgtggcgggcggcctcttgatcatggccacctgctacacggtgttcgtgaactgcatcccgctgttccagacgcacatcgtgcgcgacctggggctgacggtggggcagttcaactcgggcgtgtccatcaccacggtggtggcggtgttcgcgtcgctggtcatcgggcggctcaccgacaagtgctcggcgcgcgtgctgggcacggtgacggtgctgaccagctccatcgtgctggtggggctctcgttcatcacggccgtgtggcagctgtacgcgctgtgcgtggtggccggcatggtggtggtggccggcacgcgcctcttggtttcggtggtcatctcgaactggttcacgctcaagcgcgggctggcggtttccatcgcgttgtcggggtcgggcgtcggcggcgtcgtgctgtcgccggccacgagcgtcatgatcgaggcgtccggctggcgcgctgcgttcctgctgctggccgtcgtgtgcctcgtggcggcgttgccgctcgtgctggccacgttcagcacccggcccagcgacgagggcctgctgccgtacggcgcgggccaggtggagcaagcgaaggccgaccgctcgcccgaccagcccgtcaacgtgtcggtgggatggaagacgctgcgctcgagcgcggcgttctggctgctcgtgatcggtttcgtggccatgggcatcacgaacggctgcatcatcacgaactccatcgcgaacatgacgagcgtgacggtgggcggcaccgaggtggtcaccggcgggcactccaccctgtgggccggcagcgtgtggtcgttctacctggccgtggtcattgtggcgaaggtggcgctcggcgccatctacgaccgctggggcatgcgcaccggcacgatcctcggcacgatcacgtcggctctggccggcgtgatgctgctgttcccggcaaccgattggggtcccatcctggcctgcctgttcttcgggttcgccacctgcatgggcacggtggcgccgcccatcatggtggtgaaggagtacggcaagaaggacctgggcacggtcaccggcatcgtcacggcgttcgagctgttgggcgccgcggtgagcgcggtggtgtcgggcgtgatgttcgatgcgttcctgtcgttcgcgccggtgtggatcatggtgatcgcagcaagcgcggtcatgggcgcggcgctgctgtcgtccatccccgcggcgcgccgcctcgtggcgcggcgggtggctgcgggcgcgccccggctggatgcggaaggcttcgagatcgatgccgtcgacagctgcttgactaatgtatagtgatacagtaggatttagcgcgacacatagggaacccgccgcgcgcgggcatcggtcggcgcccgcgcggcgcgcgatcggaagacgggaa

SEQ ID NO: 8812 - DNA, 820 bp, Unknown
  gut microbiota DNA sequence
cacgatatgccgcgcgcgtccttacgcgatgcgcacgggcatgacgaggtacaggaagttctcgccctcgtcagctttgaagatgccgggcttcatggacgactgcacttcgaggaacacgttgtcggtgctcaccgaggacagcccgtccaacacgtaggcgtagttgaaagcgatctccacgtcctcgccttcgccctcgcacgacagcgtctcctgggccgagcccacgtcctgcgccacggcggacagctgcacggtctgcgacgccatgttgatgtcgaagcgcaccggcgagctggtctgccccagcagcgacgtgcgcttcacgccggccacgaggtgccccacgtccatgctcacgcgcgtggcgtaggaatcgggcagcagctggcggtagttcgggaagttgccttccaggcggcggttgatgaatacggtgtcgtggtacgtgacgacgatctggttctcagccagcgccagcttgaggtcgtcctccgagcgcggcagcgaagatatctcctgcaagaacgatcccgcgatgaccgcctggaactcctcggcgctggattcgggaagctcggcctcggtgatggcgaggcgatacgagtcggtggccaccatcttgagcgtggtgtcctcgagcgtgatcagcacgcccgtgagtatggcgcggctctcgtccttcgacaccacgcgcgccacgcgcttcaccatggaagcgaactgcgtgaaggggatggacacctcctgctgcacgtccacgtgagggaatccggggaagtcctccgcgtcgagcgtcttgatggagaacgacgcc

SEQ ID NO: 8813 - DNA, 1594 bp, Unknown
  gut microbiota DNA sequence
gccgtgatagcacttgacggcaccggcggcttccatctcggcgatctgctcatcggtgtagccgtacttgtgcaggtactcggcggtgtggtagccgatgggcttggacagcaccaccgggggatcgccgaagttcgcgtagcggatcggggtggtgggcagcgcgcgctcgccgaaggcctggtagttcaccttgcggatagcgtcgttgacgtacgcctcctcgtccttgacgatgtcggtgtaacggaagaccttctggctgggcacctgccattcggccaggatgggcagccactcgtcgagcgttttctggacgaatccgccttcgaggatctcgatgagctccggctgcaggtgcttttccttgaggttctcaaccgtggcgtagcgcggatcgtcgaccaggtcgtcgcggccgatgatcttcatcatgtcgttgtaatagcggttatgctgcggctggcagatgtagatccacttgtcgtccgcggttttgtacgtgttgttgaacgggttcggcacgtccttacgcgtcttcgggtagtcggcgccgaactgctgcgcgcacacggcgatgctgccgccccagatggcggagtggtacaggttgacgacgactttgtcgcccctgcccgtgcgcagcttgttcaccagcgcccccaagatgccggcggccatcatggtcgcggtgttgtaatcgccgaacgcttggggaggaatggccggcgacgtgcccttctcgcagaaggtacccgcgacgccgccgcgggcagcccagcacacagcgtcgtagccgggggagtgtgcgaactcgccgaactcgccgtagccgcgcatctgagcccagataagaccggggaactcggcggacagcgtggggtagtcgaggcccagcttctccagggcggccgtgcgcatgttgttcatgaagatgtctgcttcgccgatcatcttcttcgcgatggccagaccttcctcggatttcaagttgagggagatccagttcttgttggtgttgttgaggtcgatggtcggatcctcggtgtcggtcagatcgcagccgaagcccggaccttgcgtgcgctggatatcgccgtcgaacgattcgatcttcagaacttcggcgcccatttcggacaatactctgacggttgcgggagctgcgacgtacgtgcacatctcgaccactttgatgcccgcaagcgggccgtagccattgagtttctcagtgacggtcatacgacggttctcctttcctttatggtgggtggttttctcctgtcgttatactcacatactctaatatttgttgccatggacaattatttatacttgatggtcgctcactatttgtgtcatgcccagagggtttcactcacaggttcaccgatttgttggccatatgccgggcagtgtgggtgcaaatcgacggttccgtccatgcttttggttaattcggccgatttgggggtgatgcggtagggctgtctcagtatactggtaacaagtaatccctgattgcagcgctgcagggtctgcgggaacgcacgcgggcgctggggcgtttcggaggaaagaaggcaccacgtgg

SEQ ID NO: 8814 - DNA, 707 bp, Unknown
  gut microbiota DNA sequence
gatagcccaggtcggtgacgaacacgcccgtgttcaccatgcgcagcgcgctcagctcgtcgttgaggggcaacggctcgcggcccaccaggtggatctgcgacagaccgcccttcagcagcgtcatggcgccggcctgcttcgccagctcgatgccgtcgcctgtgttgctggggctgctgaacgtgtgccaacccacggcacccggcgcgtacagctccttcgcccaatcctggccgtcgaagccgcccgaagccagcatgacggccttcgcgttgatggtgtactcggtcttgccctggcgcgccttcacgcccgcggccttgccgccgtccatgagcacttcgatggcgcgcgtttccatcatgatttccacgccgttcttctcggcttcggcgatgaggttgtccacgatgcccttgccgctggtggtcgacagcatggagcggtcggacacgttgtcgccgggcttcttgtcgaagtcgcagcccagctcaacgagccagtccatggccgcgccgccgttctcggccacgaggcggcagatgtccatgttcgcgtcgccgtcggactggtcgaagaagaactgcgccacctcttcgggcgtgccgtagttcgtgtagcccagctcgtcttgcttcttcgcgccgcagcaatagaagttgccggagcagatggacgaatcgccgccggtcacgttgtgcttt

SEQ ID NO: 8815 - DNA, 3963 bp, Unknown
  gut microbiota DNA sequence
caccagccaatccatggccgcgccgccgccctcggccacgaggcggcagatgtccatgttcgcgtcgccgtcggactgatcgaagaagaactgcgccacctcctcgggtgtgccatagtccgtgtagcccagctcgtcctgcttcttcgcgccgcagcaatagaagttgccggagcagatggacgaatcgccgccggtcacgttgtgcttttcaagcacgaccaccttggcgccggcgcgcgaggcctccacggccgcgctcatgccggccacgccgctgcccacgatgacgaagtcgacgtccttggtttcctgcttctcggccggggtctcggcggcggcttggatggtgtcgggcttctgggcgccggttgcgctcgacgtgttgttggcgcttgcggcatcggagccgctttcggcgcttgcgggcgccgcggtgctttgcggcgcgcagccggcgaggccgcttccggctacgacggctgccgtcgcgcccagtcccataaggaacgagcggcgcgaaacgcctgcggatgcgatgttctttccctctgtgctcatgatgatcctccctgttcgacgatgcttcttgtcggcggccgaccctcctccggtcgatccgctgtcgccatcctgccagggaacggggtcgccccgccagcgccaaagtgggtggattgcgaaaaccctccatagtggaggggtggagggtggaggcacgaaggcgggtcgggaggcggaacgctgctgcacaccttgtcttcctgagcgcagcgccgtaaggcgcggggtcgaaggatcccgtgcggtgccaactggaagcgccgcagctgccgccgcacgggatccttcgaccccgcgcttagcgggtctccctgcgctcgcttcgcgcgctcgggagttcgacagtctgctggcctgtcgaatgctgcgctcgctcaggacgacagcgggcgtccctccgcgtggagctcgacgcggtcgaggaggtcttgcttgtcgacggcgctgctcttctggtacacgttgtggatgtagcccttgatggtgttcggcgacagccccagctcgtcggcgatgtacgtgcgcgtgcggccttggcacaacaggatcagcacgtcggtttcacgggcggtgagggcatgggcggcggcgaacgagcgcagcagatcgacttgcatcgtgcgcacgtcgctcgtctcgggtacaggcgacgacgacggcgcttccttctgcgcgcgtcgggtttccagccgcttcgccacgatggggttgagcgccagcacgaacagcgacacaagtgagatgagcgcgagtcccgtcaccagcacatcctgcgcgatcaccgccgcgccgaacgcgacgcctccgaggatcagcagcgccgacgcccccagcgcaacgctcaggtacacccacattgatacgtggtcgcgttcgcccagcaggcacacggcgatgcgaacgttcatgcccgacaggtagaacgccacgaacacgagcaccgccgcaatcacgtgcacgatgggcgaagtgatgaacggcagcgcgatcagcgccacggccacgatggggaacaggatgtcgtacaaatcgcccaccgacaacgcgtgcttcttgcgcaccacgtacgccagcatgatgccggctgccagcaagatgtccagcacggcctgcgcggcgatgggcacgggctcctcgaccacggttgccacctggctcaccgcgccgaacacgaacgagaacaccgccaggtacgacaccgctttcacgaagtcgcccgcgccgccctgcgcgaggctgacgcgccgcgccgttgcatccatcggtgccgtgcgcgcaagcggcaacgccgaaaccacgatgatggccagcgcgaacagcagctcgaaggtgcccgatgcgacgaagatgacggccgccaccgccccgccgcacagaaacgacagcggcacggtgcgcgcaagcgacacctggccgcgctcgtgtaggctggtgatgcgcgccatccatgcaagctcggcggtggccaatccgtagccgatcaggctcgaggcggcgatggcgtacggccagccgccctcgatgagccccaccagccgcgcgaacatgagggcgttgcccaggaaggctgcggcgaaggcgctgacgatgcgcgcgcggcgcgtgggcttgcggcgcagagcgtaggccagcgcggtgccggccatcgtcagcgcgtacgcgaggaagaacagtgcgccgaacgcatcgcccgccccgtgcgacaggctcatctcctgaaggaacgtgctggagatcatgagggggaacgtcagcccgcacacgatgccgtatcccacggcgctgcccgcgagcgtgcgtttcgcgcccgcggattccggcttggtttcgtgctgcatatcccctccctcctcgttccccgtattctactcgacgcgcgcgccgagtagcggacaggtttcgcgcgcatgcaaaacgcatagcgcatcggaagggagagcggacggtggcgtacgaatgtttcacgtgaaacattcgcgttccgacgcgggagggcctcggcgaggacggcatcgcgacctgccaggccatcattccgcgccagcattcctcctctgctcgcgggcctcgttcgggcgttggcgggcttccccacgagtgcgcgacgctctgctgaccgttcggtttccgtgtgctgcggccgcatgctcgtccgcgcgaccgcgaccatactggaaaggatcacgcagcgataaggagcaggcatggaaggcatagactggacggcgctcgcgcccgcggacgcggcgcgcgtgcacgaaagcgacgaacccgaaaccaccccgctgacctcgaccgtcgacgatgccgagcgcgcggcggcctttgatgcgccttcgaccgcagcacgctccggccatgtctcggcctcggccacgtccgacgcggcccgcgacgcggcggcgcgcacccgcgcgcacgagcttgccgcagcgtcggcgcggcagggcggcgtgcccgcgagcgagcccaaacccgagcattcgcgcggcgtggccgccgtgttcgctggcttgctgctggccatgttcgtcagcacgctgtccgagacggtgacggccaccgcgcttcccaccatcgtgggcgatctgggcggcgtcgaccatatgcagtgggtgaccacggcgtacatcctggcgtccaccgtcatgatgccaatctacggcaagctgggcgacctgttcggccgcaaatacctgttcatcatcgcgctgtccatcttcatcgtggggtcggccacgtgcgggctcgcgcccagcatggacggcctcatcgcgggccgcgccgtggaggggctcggcggaggcggccttatcatcctggcgcaagctaccatcgccgacatcatcccgccgcgtcagcgagggaagtacatgggcctcatgggctcggtgttcgcggtgtccacggtggtggggccgctgttgggcggctggttcgtgcaggtgacggggtggcgctggctgttcgcgttcaacatcccgctggcgctgctggccatcgcggccgtggcgttcttcctgacgaagcccgtgcggcgcgacgaccgcccgcctatcgacatcggcggcatgatggccatggccgtgtcggtgtcgtcgctggtgctggccacggcgtggggcggcacgctgtttccgtggatctcgccgcagatattcgcgctgttcgcgctgttcttcgtggcggcggttgcgttcgtactggtggaacgcaaggcgaaggagcccatcatccccatgctgctgttcaagaaccgcaacttcgtggtgtgcacggtcaccggcatgttcatcatgctcggcatgatgggaaccatatcgtacttgcccacgtacttccagatcgtcgaggggctggcgcccgagcaggcgggtctcatgacggtgccgatgatgg

SEQ ID NO: 8816 - DNA, 6402 bp, Unknown
  gut microbiota DNA sequence
aatgttcatcatgctgggcatgatgggaaccatatcgtacctgcccacgtacttccagatcgtcgaggggctggcgcccgagcaggcgggtctcatgacggtgccgatgatggcgggcgtgctgatcacggcggtgggcacgggcttcctcgccacgaaaacgggccgctacaagtggatgcccatcgcgtcgtgcgccgtgacggccgtggggttcgtgctgctgtcgcagctgaccgtgggcacgccgctggtggtgacgggcgtgttcctgttcgtgctgggcttcggcatcggtctgggccagcagatcctcgtgctcatcgtgcagaacgagttcccgcacgccatcgtgggcacggcgacggcggcgaacaacttcttccggcagatcggctccacgctgggcgcgtcgctggtgggcgcgctgttcacgtcgcgcctgaccgccgacttggccgccaagctgccgcacgtggacaacatcaacatgaaccgcatcacgcccgatttcgtgcagcacctcgacagcggcacgcgcgccatcatcacctcggcgtacagcgacgcgctcgtgcctatcttcctgtacgtggtgccgttgctagtggtgggcttcgtgctgatgctcacgctcaaggagcacccgttggccacgaaggtgaaccacaccggccaccctggcgacacggtgtagagcgagacatcaacctaccggcgcagctgccagaaggctacggcgctggcggcggccacgttgagcgagtccaccccgcaggccatggggatgcgcacggtgtagtcgcagcgggcgatggtgtcgtgcgcgaggccgtcgccctcggtgccgaacaccagcgccaggcgctcctcggcgttgagggcgggatcgtccagcggcaccgagtcgtccgtcaacgcgaaggctgcggtcttgaagcccagctcatgcagcagcggcacgccgtcgggcgcccagccgcccgtgcccgtcgcgcccgcgccggcctcttcgccgatgcgcgtccacggcacttggaacaccgtgcccatcgacacgcgcacggcgcgccggtacagcggatcgtagcaggcgggcgtcaccagcacggcgtcgatgccgagggctgcggccgagcggaagatggcgccgacgttcgtgtggttcgtgatgtcttccagcaccgcgatgcgccgcgctccgcgtacgatatcggccacgctgggcagctgcgggcggcggaacgctcccagcgcgccgcgcgtcagctcgaacccggtgagcttcgtcaactcgtcgtgcggtgcgacgaacacggggacgccgtcgccccagcgcgcggagatctcgtcgatgatcggctgcatcgcgggcagccatttcgcttccatgagcagcgacagaggctccatgccagccgccagcgcgcgctcgatgaccttccccgactcggcgatgaacagcgctttctccggctccagcttgctgcgcagctgcgcctcggtcagccgcgcgaacgcatccagccgcggatcgtccagcgtttccacgttctcgatcatcgggctgcctcctcgaagcatgcctcgcgcactccgcccgccacgtcttccacgttcgctagaccgcgttcgcagaattcgtcgcaggtcatgatgtgggcgccgatgaaggccatgtcttcgatgttcgccgcttgcacctccggcgtgcgcgacgacgtgcagtcttccagcagcaccacattgtagtcgagcgacagcgcgtcgtagcaggtggtgcggatgcagttcggcgtggtggtgccgatgagcacgacggtgcccacgcccaggcggcgaagcaccaggtccagctgcgtggcgaagaacgcggagaaacgcggcttcgcgatcacgcggtcgcccggctgcggcgccagcggttcgtactcgtccagcgtgcgcgggctggcgcaggcgcgcgacacgggcttgccgccttccacccagccgcgatgccgcgcggcttccacatccgagccgtcggcggcgtactcgcggatggcgtggaacacgggcattcccagctcgcgcgctcggttgagcgctcgcgtgcaggcgggcacggtggctgcggctcccgccacgcatagcgccgacgaggagtcgaggaacccgtgttgcatgtcgatgatgatgagggctgctttgcgcgggtcgatcatagggcgctccttcgcacgatctcgaactggttcctattgtagtcgatgaggccgtcccttttcatccgcgacagctcggcgcacatggcactgcggtccaccgacaggtagtcggccagctcctggcggtcgaacgggatgacgaagcggctggcgtgcgcggcttccgcctggtcggagaggtacgacagcagcttggctcgcgtcgtgcgcttcgtggtgtgctcgattttgcgcgtcagcgcgtgggtgcgcttcgccacgatgcccagcaggttgcggatgagccgggcgtggaacgcgcacgacgacgggcacatggtggtcacgcgcccgatgtccaggaacagcacggtcgcgtcttcggctgccaccacgttgatgtcgaaggccaggtcgggctcgcaggcatacacttcggcgaacgattggcccggtccgaacgatgcgaggatgctgcggttgccccagtagtcctccttctccagccgtaccgagccttccagcatgatacccatcgccgtggtgcggtcgcccacgcggaagaggtaggagcctttggggaatgtgcgcttccgcgcgcccaggcactgcagcatgggcgcgaggtcggcggcgtcgatgttcgcgaacaggggcgatcggccgatgaggggcaggtggtgttccatagggctcctttgttgtaaatacaacggaaatgcttgaaccagtatcgtagggtaagcgtcatcaggcaagcaagcgatgaccgagcgctgcgcactgcaccgtgaacggcatgcggcgcgaaggggggcagtcccctttcgcgccgctctggcggggtttgagcgcaggcgcaagagaggacgagacatgggcgatacggcgacgatgttctgcttccaatgcgagcagacggctggatgcactggctgcaccggggcgaccggcgtgtgcggcaagcaggcgagcacggctgttttgcaggacgaggtgacgggcgcgctcgttgctctggcgcgaaccgtacgtgctgcggggatgaacggggacgcgcggcgaacggcggacgatcttgcgatggaaggtttgttcgctacgctgacgaacgttgatttcgacgatgcggccttggccgacctcctcgcgcgcgtccatgccgagcgcgattccgttgcagcgtcggcgcaggtgggggctgcgcccgactacgatctggccatgctgtggaacgcacccgaggacgcgcgttcgctcaagtcgctggtgctgttcggtctgcgcgggctggcggcctacgcctatcatgcagcggcgctgggctatcgcgacgacgcggtgtcgtccttcctgcatgaaggcttggccgcgctggccgacgacgaggccgacgccgacgtgttgctgccgctgtcgctcaaggtgggcgaggtgaacctgcgctgtatggagttgctcgatcgggcgaacaccgagacgttcggcacgccggagcccaccacggtgacgcgcgcggtggaagccggccccttcatcgtggtctctggtcacgacctgcacgacctcaagctgctgctcgatcagacggaaggccgcggcgtgaacgtctacacgcacggcgagctgcttcccgcgcacgcgtatcccgagttgaagcgctatgcccacctcaagggcaatgtgggaaccgcatggcagagccagcgcgtcgagttcgccgacctgcccgcgcccgtcctgttcaccacgaactgcctcatgccgccggcggcctcctacgccgaccgcgtgttcaccaccggtcctgtggcgtaccccggcatgatgcacgttgaggctgcgcccgacggcgggaaagacttcgagccgctcatccagcgtgcgctggagctgggcggttatgcggctgcaaccgatacgaccggcacgttcaccacgggcttcggccacagcgccgtcctcggcgtggccgacaccgtggtcgacgcggtgaagcaaggcgccatcagccgtttcttccttgtgggcggctgcgacggtgcgcgtccgggccgcagctacttccgcgacttcgtgcagcaggctcccgacgacagcatcatcctgacgctggcgtgcggcaagttccgcttcaacgacctggacttgggcactatcggcggtctgccgcgcatcatggacatgggtcagtgcaacgacgcgtacggcgccatccgcgtggccgtggcgctggccgaggcgttcgactgcggcgtgaacgacctgccgctgacgctggtgctgtcgtggtacgagcagaaggccgtgtccatcctgctgacgctgttgcacctggggattcgcggaatctacctgggtccgactctgcccgcattcgtgtcgcccggcgtgttggacgtgctggtgcgcgagttcgacgtccgccccatcaccacgccggaggaggacttgaaggcgattttggcgtagccttcgaccgtccccttgacacgcttgacacactagagcgcgagaaagtggcgcgaaaggggactgtcccttttcgcgccacttagatatccacgcccaggaactgcttcaccaggatgccgatgacgaacgacagcgccgccacgcccaggctgatgccggccatctggccgaatcgtttcttgaacggaagatcctgcgccaccgagagatagtagttgaacaccacgagtatcagcagcacgatgactaccatggtacccatggcccacaggtagtgcgactcgtcgaacagcaggtacggcagaatcagcagcgctaccgtcacgaggtaggcgacgcccgtgtacgaagccgacttcagcgcgtcgggacgcccctcgctcttcgacgacaggtactcgctcgacgccatcgacagggtggctgcgatgccggtgatcagacccgaaagcgcgatgagacgcgtgttctgcatagccagcgtcagacccgccagcgtaccggtcatctccaccatggcgtcgttcatgcccagcaccatgctgcccacgtacgacaggcgctcctcgtccagcatcgccagcagcgcctgctcgtgcgattcctcgtcggcgcggatgcccagcgcctcgggcgcttctttcgccagctcctcgtacgagatctgggccttctcctcgccccgctccatcagcttgacggcgaacgtgaagccgaacacgcgcgcgataagggagaatcgcagcaccttgccgcgctggggcttcatcgcctcgccagtgtagcgctgccagatggcggcgtgcttcgcctcctcgtcggcgatgcgcagcaacgcggcgcggttgctctcgtccttggtgccggccgcgatgcgccggtacacttcggattcggtcacctcgttctgctggaagatgcgaacctgtgcgagcgcttcgggggagagctgctcggccgtggcgggtgcggtatcgatcatgatgctcctcgctgtttctttttcggttcggctgccagcatatccgattttgctatgtcgtggctgctgttttccggttgcgccgcatctttctcgctccgtgtccgatcccgtgcatccgatggtgccgccggtggcgaaaaaggctcgaattcggaagtttcggagcgtgccgcaggcgctgcgaaaaacgctctttctcgtaatacctggtcatcgaagtgcccttcatggatacaggcatgccgtgccctcctgaggggcgcgatggtttccgaattcggcatctttttgccatttcgagcccggggcgttgcacgctctcaggtctggggcgttgcacgcttcacccagagcagccacccgaaggcggccgccatcagcacgaggcctgcggcgtcgaacaggatgaagcgctcgatgctggcggaaagcgcggcgtggccggcgggcagcccgaagcgcagccacgattcgccggcaaggccgatggcctgctgcaccagcacgatgacggccacggcgcggaagcgcagcgggctggcgatgacggcggggtaggtggcgttccacatgaggaacgcgatgccgaggccctgcacggccgcggcgcccggcacgcccgccacctcgaacgacggtgcgtaggcatcgggccaaagcacgaacgacgccgcgcactgcacgttgatggcaaacaccagcagaaacgctgcgcgcgccagccacgcggcgcggcgtacgcgcacgggcagg

SEQ ID NO: 8817 - DNA, 526 bp, Unknown
  gut microbiota DNA sequence
acatcgggccaaagcacgaacgacgccgcacactgtacgttgatggcaaacaccagcagaaacgctgcgcgcgccagccacgcggcgcggcgtacgcgcacgggcaggtcgttcgtgtcggcgggttggttcataccgatatcctttcgcattgtcgtgcagcataccacgcccctcgcgcggcggtatactgctgttgagcaaccgaagaaaggatctccatgactgcctccgaacccacgccgcccatcgcatccccgtctcctgccgcgcccctcgcaagccagcttgcggccaacccctgcagccatccgtcgttcgaccagttcgtcgccaccatcgccgcgctgcgcgcgccggacggatgcccgtgggatcgcacgcagacgcaccagagcatcgcgcacaacatgatcgaagaggcatacgaggcggtggacgccatcgaagccgccgatgtcgcgcacctgcgcgaggagctgggcgacgtgctgctgcaggtggtgttgcaaagccagatagcttc

SEQ ID NO: 8818 - DNA, 1020 bp, Unknown
  gut microbiota DNA sequence
tcagagcatcgcgcacaacatgatcgaagaggcgtacgaggcggtggacgccatcgaagccgtcgatgtcgcgcacctgcgcgaggagctgggcgacgtgctgctgcaggtggtgttgcaaagccagatagcttccgatgccggcgagttcgacatcgacgacgtgtgcgccgacgtgaacgagaagatggtccgccgccatcctcacgtgttcggcgaggcgcaagccgccaacgccggggacgtgctggatctgtgggaccgggtgaagatggcggagaagggcgccgccgacgaggcggccgacggtgcgggcgagcggcgcgaaggcctgctggacggcgtgcccaccagcttccccgcgctcatgcaggcgcagaagatatctcgcaaggccgcggccgccgggttcgagtgggactcgcttgacggcgtgtgggagaaagtgcgcgaggaaatcgccgagctgcaagaagcctacgccgtcgcgcccaaggcggcgaacggcaaggtggacgccgcggccgcttccgcaggcgcggccgtcgaccccgccgcggccgaggcggccgtcgccgccgtcgaggacgagctcggcgacgtgctgttctcgctggtgaacgtgggccgccgcatgggcgtggacgcagaaggtgcgctgcgctccacctgccgcaagttccgcgaccgatgggcctggatggagcaagccgcctggcagcagggtcgaaccatcgaagacctctccagcgaagagcgcgaaaccctgtggaacgaggcgaagaagcgcgagcgatcgtagggtcgcctcctgtcgtcctgggcgcccgcaccgcttcgttcgggtctccgcttcaaccctttggcacatttgatggcgcaggtgggcgtaaagcgctaaactgtatccccatcgtcatacatcctaccaagaaggcgaggagggcgatgcgtcctgcatgggaatttggaatcgaaaaagactcgctggaggaagaaaaaaccgacgggggggggggg

SEQ ID NO: 8819 - DNA, 1773 bp, Unknown
  gut microbiota DNA sequence
ggtgtgtcgaagcatgccaaaccctcgcccctttgccgtccgttttgcgcgagcggtgctataataccaatgaattgctgcattgcgacaatggggagttgcgggcgaggacgagggacggggcggcgcgtgttcaacgtgctcacgacaagctatcttttcctgggaggaacgggagcgggcgccctcgccgtcctgtgcgtgctcgagtgcgcccgcgtgctgcggtggcgcgcgctggccatgccggaggagttcttcgcgcgggcgtggcctgtgtgcgcggtgacgctggcgacgggcatgctgtgcctgctggccgacttggggcgccctgaccgcttgctcggcctgctctcctcgccgacgccgtcggctatggcggcgggatcgttcgcgctggtcgcggcattggcctgcgcggcggcattctcgctgggcgcgctgctggacaccgtgcgcctgccgcgtgcggcggtgctggcgcttgcggcggcgggcgcgctgtcagcggcggtgaccgcgacgtacaccggcgtgctgctgcaaagcctcgcgtcggtgctgctgtggcgcacgccgctcgtgccggtgctgttcgtgctgtcgtcggcatcgtgcggcatcgcgacggcgttcctggcagcctcgttcgtggagacgcggcacccgtaccgcgggccgctcgtgtggctcgcgcggattgacggcggtatcgtggtcgtcgaggctggctgcctggctgcgttcgtgctgctcgcgttcgcgggcgaggagacggccgcggctgctcgggcgctcgcgttcggcgagctggcgcccgtgttctggggcgtgctcgcggtgtgcgggctggccgtgccgctggtgctggagcgcttcctcacgcatgggaacagccgcacgcagcttctgtggatagcggcgctgctgctggtgggagggttcgcgctgcgctggtgcatcgtcggcgcgggcgcatacgatgtgacgcagatgccggaagcgctgtacgggctttcgacgttcgggcttacgggataaggagcgagtgcgatggcgaaacgacgggcaggcgatcggttcgtgaaggacgccccctacgacgtgcgcgacaaggatgccgagatcagggcggccacgtcctacgtgccgcgcaaatcgtcgcgcaacggcgcggtcatcttcaacatcgcgacgttcatcgccacctgcgccgcggtgctgggcatcgcgttcgcggcgacgggaggcgtgggaatcgaggcgatcgttgccatgctgctggcggcgctgctggtgctgtcgtccacgcacatcgcgctgagctgggagaaggtggtggtgctgcggttcggcaagctgaaccgcgtcgtggggccgggtttgtacttcaccatccccgtcatcgagcacggcaccatccgcgtggaccagcgcaccatcgccacgcccttctatgccgagaagacgctcacggccgacctcgtgcccgtcacggtggacgccgtgctgttctgggtggtgtgggacgccgagaaggcgtgcaccgaggtggaggactactacgcggccgtgtcgtttctcgcccagacggcgctgcgcgaggcggtgggccgctccacggtggccgaggtggcgctgcgccgcgaccagctggacgccgagatcaaggacgacatcgagaaggaggccgccggctggggcgtggacattatctcggtgaaggtgcgcgacatcgtgatccccgacgagctgcaggaggtcatgagc

SEQ ID NO: 8820 - DNA, 1204 bp, Unknown
  gut microbiota DNA sequence
gccggcgtggaggccgagctggccgagatgctggccgaggccgcgcgcgtctacggcgacccggaggcggcgctcaagctgcgcaccatgctcatgcagtacgacacggtgaagaaatccaagggcaccgtggtcaccgtgcccaccgcgatgagcgacggcttcacggatagtgctatgatgaacggcgaccgaactactgagagataggcttccatgaacccgctcgcctcattcgaactcgactacaacagcggcctgccggtgtggatccaggtgaagaaccgcatcgcgtacctcatcggctcaggcgagtacaaagcgggcgaccagcttcccacggtgcgctcgctggccgtcgacctcgatatcagctacaacaccgtgaaccgcgcctacatggacttggagcgagaggggtacatctccacgcgcaaggggaggggcacgttcgtggccgagcgccacgccgtgggcgccgccctcgccgccgacaaccccgtcgagctgttggcggacgacctgatccgcacctgcgccaacgccggcatggccgatgacgacatcctggccctggtccaagcccggctggcccagaaaagcctgacgcgggcgtaggcgacccgcgctgggcgggcgctgtaccctcttgggcgcgagcctttgcttgtggacgaagaaacttgtgtcgcggcgattcgcgatgcccgcgatatgcgaccggtgcggtgttcggcgcgcgcatcggcgcgtctctgtcgcgccaagagagaggggggagggcgtccgcgaagcgccctgtacgacgtcagccgattcgtcccgccgtccctctccacattgtcgagccgcaaagtgtcacaatgccggtttcgtccaggcacagatgtttcacgtgaaacatctgtgccgtatcgcttgataaacccataaaaatcctaccgtttccagcatcatttatcctcgaagtaggcatgtttattagattgattgtcgcaatgcattgtgataatgtgacagtcacaaggatttggccaattcttatcaggagcaacagggggatatccgataagagtgcgcttggggacgaggggttcgaaggcgccgcatgcttgggcgcctgctcgacggaccgttttcccgacgccatccgcaaaggggatatcctgacacgatctttgaggaggaaagatgtcaggagcaa

SEQ ID NO: 8821 - DNA, 3968 bp, Unknown
  gut microbiota DNA sequence
cttccgcggagtatgccgtcccaactgtttcgcgttctgccacttgaacgtgcatgtgagagacggaaaagtggtcaaaacctcgcgtgctccgtacaacgagaaatgctacgatcgcatttgccagcgaggactttcgcatgtgcatagaatctacgatccggcgcgcttgcagtatccaatgcgacgcgtggagggaaccgaacgcggtgcaggcgagtgggaacgtgtgagttgggacgaagcacttgacgagatcgccgggaagatcaagtctatccagaccgaatttggcgagagcgccgtggcgttccttaccgcttcaggcaatcagtcgtgcgcgatcacgagcgcgtacggccgactttcctctcttatgaatgctagcagcatcggcgcttgcctcgatatgggcagttattacggcatgcaggcggttgccggcttgtacatcagccctttgatgggtctgcagatgtgggaaggcaatgagccgaccgatgccaagaacgcgaagaccatagtggtgtggggcgccaatattaccgacgcgcaggttcagaactggcacctggtcaaggaggccatgcagggcggcaccaagctggtggttatcgatccggtgtacacgcagatcgcctcaaaagccgacaggtggattcccattcgccccggtagcgacacgctgctgaagtacgctctcatgaacgtggttttggaaaaggacgcgcaggatgtggcgtatttgcaacagcataccgtcgcaccgttcttggtgcgcagcgatacgggcatgttcgtgcgcagaagcgacaccggcatcgccccggttcccaccggcgtgatgaatcctaccacgggcaaggaggtcatggacgatccgtacatggttctctcgaacggcgaactcgtttctgtcgacgaagcgtctgcgcccgacatcgaaggatcgtacgagctcgacggtgtgaagtgtcgcacggcgtatgcgctgctgaaagaggagatcctcgatcattcgcccgagaaggtttcggagcttaccgaagtatcggtcgatgacatttacgagctggccgaaatctgcatggacaccccggtgtaccactatgaaggctatggtccccaggcgtacaacaacggcggccataccacgatggcgggtcttaccctttgcgccctgttgggcaatttgggcaagccgggagcttcttacggtgcgttctggggcgtccacatgggggtcaatcccgcgtatgctgcccctaacggtcccagcacgggttttgccattcccagcgtcgacctgaaaaacgtggtggaaaccggcaagttcggcggcaagcccgcgcagatcaaaatgctgtggatgtattcggccaatccgctgaacacccacaccgacacgcatgcgtggaccgatgtcattattccggctatggaatacgtcgtggtggcggattcggtcatgaccgattccgcacgctacgccgacatggtgcttcccatcgcccagtggttcgaactggaggaggttgcgaatgcgggtcagtgctcctcgctgcactacagcgagaaggctatcgatccgctttacgagagcaagcccgatccgcaaatcgtgacggagcttgcgcagaagctggggctcggcgattatttcaagcttgacaacggtggaatcctcgaagaaatgtacgacaccgatatgggcaaggccctgggtatggacatgggcaacctgcgtgaaaaaaagcagatacgcttcattcccggagatgcggagacggatccccatatcgcgtatgcggatgggaaattcggcacggcatcgggtcgcttcgagttctatcgcgagatgccgatgcctcgcgcggccactaccaagacgcctactcctgaagagatcgatcgcgagcgcatggctcgctggttcccgccgctcgaggcgtggccggaaaacgagttgtacaaaaagtacccgcttgttctcatgagcgagcgtccccgataccgcgttcactcccaatggttcagcacgccgctgttgcgcgagcttgatcccgagccgtacgtgaagatcaatcccgccgatgccgaggcgcgcggcatttctgacggagattacgtcgagtgctacaacgatcgtggcttcgctgttgccaaggcggtgtattcgcaagctattcgacctggcatgttggtgtatcccaagggatggcagctgtcgcagcataaggcgggcggttggtcggagctgagctccacggagttcgatgtgttcgcggtgaacaacaacttcatggacgtgctttgcgagattcgcgtgtggaatgaagggggtgctcgataatggccgagcggctgggtatggtcatagatatgaaagggtgcgttgcctgcgcttcgtgtgcggtggcgtgcaaagtggagaacaacttgcctgacggtgtttggtggaaccgcatcttgacggatggcggggacaatcccgacactccggcgggagcatacccgaatttgacgatggagaatatcgctgttgcgtgccagcattgcgagaatcctgcgtgcgtgaaggtgtgccctgttggagcaacgtacaaagatcctgaaaccggtgcggttcgtcaggactacgataagtgcatcggttgccgcatgtgcatgtcggcgtgtccgtacacgggcgttcgctcgttcaactgggaagagccgaagcatgcgatcggccatgctatgggcgatgccgacgtggcgacgcatcagaagcacgtggtggagaagtgcacgatgtgctggcatcggctggcgaagggtttgcagccggcttgcgtggaggtatgtcccggacgggtgcgcttcttcggcgatttcaacgatcccgaatccgaggtgtcgcgccttcttcgcgaacgcgcccataagcagcttctgcccgagcgcggcacgaacccctccgtctactacctcgtttaagcagaaagggagaatgaaatgtctgagaacactcaggcggcgcctgccgccaaggctcctgctgccagattcgggggcaaggggctcaacatcggcatcgtcgtggcggcggtcgtcaccgtcgcggggctggccctctggggcatgcagctctccggcggcctcgtccaaacgggtatgcgcaacttcgactcgtggggcctctacatcactatgttcatgttcctcgtgggtctgtcggccggcggcctgatcatcagctcggtgccgcgcgccttcggcatgaagggcttcggcggcatctcgaagatcgccgtgtggacgtccatctgctgcacggtgctggccgtgggcttcgtggtgatcgacctcggccagccgcttcgcctgtgggagctgttcgcgtactcgaacctgggcagcccgctcatgtgggacatcgcggtcatctcgatctacctcatcctgtccgtcgtgtacctgtgggcgacgctgcgcgccgaggcgggcaaggtgtcggagaaagccctgcgcgtgatctcggtcgtcgcgctggtcaccgccgtgctcgtgcattcggtgacggcttggatcttcgggctgcagcaggcccacgagttctggcacaccgccctgctcgcgccctggttcgtgtcctcggcgctggtgtgcggcgtggcgctggtgctcgtggtggtcatcgcgctgcgcaaggccgggtacctcgagctcgatcaggccaacgtcgtcaagctcgtcaagatgctgggcgcgttcgtcgtcgtcgacctgtacttcttcggctgtgacctgctgaccgccggcttcccgggcggctcgggctccgagatcgtcgccatgctcgcaaccggcccgctcgccccgttcttctgggtcgaggtcgtcggctgcgcgctgtgcgccgcggtgtgcttcacgccgaagctgcgcacggacccgctcgtcgtggtcgccagcctgctggccat

SEQ ID NO: 8822 - DNA, 202 bp, Unknown
  gut microbiota DNA sequence
cagcgccaacagcgcgaagctgacgtagcggcctgcgatcacgttcgatcgcgacatgggcaaagccagacggaactgctgccagttggcgcgttcgtcaagcgcgaggatggtgatggtcagcgagaaggggatcatcacgcccaccatgggagcggcaacgtagaggtttcctatcacgacggtgatgaagatgcccacg

SEQ ID NO: 8823 - DNA, 313 bp, Unknown
  gut microbiota DNA sequence
agcagaactcaagaaggttgatgccgaacgcgccgacttgatcaagacgatccagcagacgacgcatcgccttgcccgtgcccggtatcacgggcatctccaccatcacctgcgagatgaagcgcttcgcacgggcaagcacgtcgacggcgtcatcgatgatctcatcggcgcgatcgacgtcgagaacgtccagcttgatgctcatgcgcagctcgtcaagcccggcatcgcgcaagcgatcgagcagcggttcgtcaaggaaatcgccggcggtgtacaacctgatatgggcacgcggaaagcgctggcg

SEQ ID NO: 8824 - DNA, 468 bp, Unknown
  gut microbiota DNA sequence
cggtaccagtccatgacctgcttgtagagggggaggatctgctggcgctggtcgcggaaggcggcttcggcggcgtgcaactcggtcgtcgtgtcgtcggtcgcatcggccacgtccacgctcagggcctgttccaggcgcttgcgcgcctgcttgtacgcgcttttcgcgccgtgccccatcttcttcttcgccgcgctgtaatagtcgttcgtcgcgccgatgagcgcgtagcaatcgagcatcttctggatgaggtcgcgcgtggcctggtcgtcggccttatgctcgtccgcgtcggccagcgcccgccggacgtcgtcatgggccacttcgtctccggccgtgaacacgacgatctcggcgttgctgcggtcgaggttcgcggccgatacggtcagcatgcccgcttcgtcgatatcgaagcgaagctcgatttggggcacgcctgcgccgctccacttgatg

SEQ ID NO: 8825 - DNA, 319 bp, Unknown
  gut microbiota DNA sequence
atctccggccgtgaacacgacgatctcggcgttgctgcggtcgaggttcgcggccgatacagtcagcatgcccgcttcgtcgatatcgaagcgaagctcgatttggggcacgcctgcgccgctccacttgatgttgcgcacgcggatgcggcatagcgggatgttgtcgcaggcgagcgggcggtttcccatgaggatgtggaactcggcggccagctggaacgagtcggccgtagagaacatcgcagttgcggtatgaggcaggcgcacgccgctgggaaccgcttcggacacgtatccgccgggcagctccacgttg

SEQ ID NO: 8826 - DNA, 3445 bp, Unknown
  gut microbiota DNA sequence
cagcgggatgttgtcgcaggcgagcggacggtttcccatgaggatgtggaactcggcggccagctggaacgagtcggccgtggagaacatagcggttgcggtatgaggcaggcgcacgccgctgggaaccgcttcggacacgtatccgccgggcagctccacgttgagcgccaaaggcaggacgccgtcgggcgcatcgacgtggatgcgcgcctccggctcttcgatgcgcaccaagttcttgtagacgtcggaatccttgttcgccatgacggctccttctgcatcggtcgggtacgtctcgatcaaccactcgcaaatatcatgccatgttggcatcaaatttgcaggtgaaccttgcagtcgcccggaggcggcgctgtcgagaaggaggaaccgtatgaaagctcaagattgcccgaagttcggtccgctgcaaggggtgaaggtggtcaacctcaccatggccatcgccgggccgttcgcctgcagcctgctggccgacctgggcgccgaggtcatcggcgtggaaagcccgcgcggccgcgacacctcgcgccccacgaaccaagcgttgcagggctggggcacgcagatggagcgccgcaacacgcgctcgctgtgcatgaacgtgaaggacggcgcgggccgcgcctggttcttcgagctgctgaagcaggcggacatcctcgtggacggcttccgcggcggccagatggcgaagtggggcatgaccgatgaggcgctgtgggaggttaacccgaagctgaccatcgcgcacatctcgggcttcggtcagacgggcgacccggcgtacgtgacgcgcgcctcgttcgacggcatcggccaggcctacgggtgcttcatggaaatgaacgggtatcccgaccgcctgccggtgctcgcgtttccccaggtgtcggactactacgcgggcttcatggccagcatcggcgcgttggccggctacatcaacgcgcagcgcacgggcaagggcgacagcgtggacgtggctcagtacgaggccatgctgcgctgcgagggcttctacgcgctgaactacctgaacacgggcgcgctgcctgtgcgcgagggttcgcacagcacgtcgagcgccggctacggcacgtacatctgccaggacggcgtgcccatctacacgctcatcctgggtcccggcgtggtgcgcgcggcgctgccgctgttcggcctcgagtacggcagcgaactgttccccgagggcacgccggtcatctcgttcggaagcgaggcgggcaacgtgctggaggaggcgatggaggcgttcttcggatcgcacaccgccgaggaggccgagcggctcatgctggaagccggcgtgccgtgcagccgcatctacacctacgagatggcggagcgcgacccgcactaccaggcgcgcgaaagcttcaccgagtggaagaactcctacgacgacgagtcgatccgcggcgtgaacgtggtgccgcgcatgaagaacaacccggggcagatttggcgcggcatgccgctggtcggcgccgacaacgaggacatcctcgaagagctgggcgccacgcccgacgatgtcgccagcctctacgacgagcagctcctcaagaaggagaacggccccttcggctaaacgaggaacgggataaagggacgggggtcgatgtctcatcccccgtcccttcgcttttccgagcggccgatcgaatgagacattgaccccgcccccttgccccatcgagcgaggcggcaccctcccggtctcgttccatcccgtgatcgcgtcagcttggcacggtatttgctccacgtctttcatcggaagtttcaggggatttgagacaaggagatgaggacatgggcactgcgcgtaccaaaggagccgtgtgggcttggctcgtcgttatcgggtgcatcgggttctattccatcccaaccggcattatcggcaacacttcgggcattttcgtggctccggtgatggaccagttcggctggacgcaaaccgacaccaccatgtaccgcaccatccagccgctggtggccgccgtgtgcgcgccgatagccggcaagctgatggagaagtacaacccgcgctggatcctcgcggcggtttcggcggccttcggcctggcatcgtgggcgagcgcctacgccaccgagctgtggcagtggaacctctacggcgtggtgtacggcgtgacgtcggcgttctacatgtacctggcggctccggtgctgatcaacgcctggttcaagaagagcgcaggtttggccatcagcatcacggcggcgacgctgtccatcttggcggccgttgccagccccatcggccaggagctgatcaaccagttcggctggcagacggcgcgcgcggcgctgtccatcgtgaccaccgtgctgtcggtggtgctgacggtggcgttcgtgcgcaagagccccacggtcatgggcctgcttccgttcggcgcgggagagcaagacgatgcggccaaccagtccgcagcccccgagcccgacgagggcgccacggtggcgcaggccatcaagtcgcccggcctctacctgctcatcctcgtggcctgcatcttcgtcatgtgcgccgccttcttccagcagatccccgcgttcgccgcgcacggtgcgctgggcgcgagcgcaggcgccatggccgtgtccatcatcatggtgggcggcgtggtgttcaagctggtgctgggcgcgctcaacgacaagatcggcgtgaagtacacgggcatcatcgctgcatcgtgcggtgccatcggcatcctgctggcctacatcgcgggcgagaacgtggccctgttctacgcgggcatggtggtgttcggcggcgggtacgcgggcctcacggtcatcgcgcccatgctggcgcgcgcggccttcggctcgctcaactactcgcaaatctacagctgggtatccacgggcatcttcatcgcaacggccatatcgttcttggtatacggcatgatctacgacaccacgggctcgttcgacctgtgcttcatcctggtcatcggcatgtacgcgctggccgtcgtgctggttcccgtcacgctggcggtgtcgcagaaagcttggaagcgcagcgggaagtaggcatcgcacctgtcacccacgatcgcgacgtgggcaccgccacccctgtcggcgcccgcacgctgcatcgacaactacacgaacgaagagaggactcgaacgcatgagcacgcagtaccccgtcctgggatcgccgttgcaggtgaacggcatcaccttgaagaaccgcatgatcaccacgtccatgtcgccgggcgccggatacgtgaccaaggacaaccgtcccacgcagcgtttggcaaactacctggaggagcgcgccgaagggcagacggccctcatcatccagaccatctgcccgtggaagcgcaac

SEQ ID NO: 8827 - DNA, 641 bp, Unknown
  gut microbiota DNA sequence
gggatacgtgaccaaggacaaccgtcccacgcagcgtttggcgaactacctggaggagcgcgccgaagggcagacggccctcatcatccagaccatctgcccgtggaagcgcaacgacatcgatcccgatcacatccacgagcttcccagctgctacgacgaaagctgcatccccgacctgcagcgctacatgatcgagccggtgcacaagcacggcggcctcatctgcgcgcagccgtactacgtgcacgactggaagcccgacgccgaaacgccggaaggcccctacggcccgtccgacatcgccatcctcaagttcatgggcggctttcgcgccatgacgctcgagcagatcgaggcgttcaagcagcagtacttcaacgcggcgcgcgtgtgcaaggaagccggcttcgacgccatcgaggtcatggcgggcgtgggcggcatcctgtcgcgcttcatggcgctggccaccaacaaccgcaccgacgagtacggcggcagcctggagaaccgcgtgaagctgacgctcgaggtcatccgcggcgtgcgcgaggtcgtggggcccgagttccccatcgtcgtgcgctggtcgcccatcgacttcatcaagagccccgcgggtccgggcctgtccatgg

SEQ ID NO: 8828 - DNA, 514 bp, Unknown
  gut microbiota DNA sequence
gatccgcggcgtgcgcgaggtcgtgggacctaagttccccatcgtcgtgcgctggtcgcccatcgacttcatcaagagccccgcgggtccgggcctgtccatggaggatgcgctgcgcatcgcccccatgctggaggaagcgggctgcgacctgcacgacctttccgtgggctggcacgagaccagcgagccgctcaccacgaaggccatcgaggacggccactggacgttcgtctcgcagcagatcaagaccgtggcgaagaaaccggtggcgcaggggtatcgcaacaccgatccgcgcgtgatggagcagaacctccaagacggcaagctggacgtggtcgccgggctgcgctacagcatcgctgacccggcgctgccccgcaaggtgatggaggaccgcacttgcgacatgcgcctgtgcatcgtgtgctgccgctgcctggacgacgtggtgagccagggcaagccgctcaactactgcggcgtcaacccgcgtttgggcgaggagctc

SEQ ID NO: 8829 - DNA, 4242 bp, Unknown
  gut microbiota DNA sequence
atggacgtggtcgccgggctgcgctacagcatcgccgacccggcgctgccccgcaaggtgatggaagaccgcacctgcgacatgcgcctgtgcatcgtgtgctgccgctgtctggacgacgtggtgagccagggcaagccgctcaactactgcggcgtcaacccgcgtttgggcgaggagctcgaccatgaagcgttcccgcaggcgtcgaagcgcaagaaggtcatggtggtgggctcgggcccggcgggcatcaacgccgcgctgaccgcggcgcagcgcgggcacgccgtcgacctctacgaggaagggccgcgcctcggcgggtgcgtgaagatgagcagcatcttcagcccctaccacgagcgctacctggactacctcctcacgcaggtgaagcagcatccccagatcaccgtgcatctcaagacgaaggtcacgcccgaaacggtgcggcaggccaagcccgacgcggccatcgtggccgtgggcggcaagcccctggggttggacgtgccgggcgccgacggcaagaacgtcgtctcgtcgcacgacttcctcgagatgatcaacggccataagcccgcagggaagaggggcgcgttcaacagcttcatgtggggcgcggggtcgctgttcctcagcatgtactacacgccgtcgttcgcgcgcacgatgaccgagaagtcgccgtggcccatcagccgcaacgtcgccatcatcggcggcggcctgccgggctgcgagttcggccacctgtgcatggagacgggccgcaccaccgccatcatcgaggagcgcaagaaggtgggcttcgacgtgggcgggtccgatcgtttcgggctgatcagcagcttcaagcaggcggagaacgtggagatgtacccgctcacgcgcgtcacggccatcaccgaggagggcgtgagggccgtgcagaccacgccggagggcgacatggagctgttcatccccgccaagaccgtggccatcacgctggggcttgccgagaaccacgatttgggcgaggcgtgcaagccgcttgtggacgaggtgtacctcgtgggcgattgcgagacgccgggacgcatcgccgacgcgacgaagatgggctatcgcgcggcatgcgcgctgtaggagaggaaacgcgagtgagtgtcataaccgaacgacccatcatcccaagcgaagcagccgaagccgtcggagccgacgcgtccttcgcctgcgctcccgagcgcgacgtcgtgtacgccgaacgtctcgaaggcggcatcgaggtcgtctacctgaaccagccgcgcaagaagaacgccctgtccggcgagatgatgaccaagctggacgcgctgctgcgcgcggcggacgtcgacgacggcgtgcgcgtggtggtgttgcgcggcgctggcgacgatttctcgagcggcggcgatctcgaccaggggcccgccctcgaaccgggccccgagggcgcgcgcaagacgctgcgccggtacttggccgtggttcgcaccatccgcacgatgtcgaagccggtggtcgcgatggtggacggctacgccgtgggcggggcgttcgcgctcgtgtgcgcctccgacctcgtatgcgcgtccgagcgcgcgctgttcgtgccggcgttctgccagatcggcatcgtgcccgagatgggcatgatgaagctgctgcccgacctggtggggccgcagcgcgctaaggagctgctgttcttcggcggcaagatccccgcgctccagctgtacgactggggcgtggtgaaccgcgtgttcccgacggaaacgctcgaagccgacacgctgtggttcgcgcgccagctggcggggatgcccgacgcgtccatccatctcacgaagaacatcatgaacgcgctggccgacggcaacctggaagcgtgcctggaagccgaatcgacggcgtcgccgttctgcacgaccacgaaggcgtacgccgccaccatggagaaatttgcccgctgaaccctgcgaaggtgagacgatatggcccagtacaacgtagcggaaccgttcttggcgagcgttcgggcgcatcccgataaaacggccgtcgtgttcgacggacgcgagatcacctaccgcgccatgaacgatcgcatcaaccagatggccggcgtgctcacctgcgatttgggcgtgcggccgggcgatcgcgtggcctacctgctgccgaactgccccgagctccttgagctgtactacgctgtccagaagatcggggcggtggtcgtgccgctgaactacaagctcatcccgcgcgaggtcgcctatctggtgaatgccagcggggccgaggtgctcgtgttcgccagccagttcgccgcatcggttgccgaggcggcgcaatcgttcacgtccgacgtggcgctggccagcgcaggcggggacgtgcccggcgcgctcgatttggagcgcgcgtgcgccgggcgcggcaccgccgagcccccgctgttccgcgacgcggacgccttgtcgcgcatccaatacacgggcggctccacgggcctgccgaaaggagccgcacgcacccatggcgccgacctcgtggagctcgacgccatcatggactccaacggcatcggcgacgatcccgacaacgtggtgctcatccagtgcccgctggagcaccacggcggccacagctggttcaccatcgcgttcgcggccggggcgacgctggtcatctgcgaggcgttcaacgccgagcagatcctccatttcatcgagttctaccgcgtgacgtacatgatcttgctgccgcctaccacgtacctgcgccttctgcggtgccccaccatcgaccagtgcgacctcagctcggtgcggctcgtgcaaagcgcggccggagccaccacgaagcccatcatccaagccatctacgacaagttccccaacgcggtgctcaattacggctggggacagtcggaaagcggcgccggcagcagcctgaagatcacgcgcgccatgctggaggccgattcgcccctgctggagagcgtggggcggccgatgaagcacgtggagatgaaggtggtggacgaggacggcaacgaggtacccgacggcgaagtgggggaggctctgttccggtcgcggtcggtgatgcagggctactacggccagcccgacctgaccgacgaggcgttcacgcccgacggctggctgcgcacgggcgacctcatgatgcgcgatgcggatgggtactactacgtgcggtcgcgcaagaaggatatgatcaaatcgggcggcgagaacgtgttcgtcgccgaggtggagaacgtgctgcgcacgcaccccgccatcgacgactgcctcgtgttcggcacgagcgacccggtgatgggggaggccgtggccgccgtcatccagccgcgcgagggctcgaacctcacggccgccgaggtgcaaacgcactgcaagaaccatatttccagttataagaagccccgctacgtggtgttcatggacgacatgaagcgcgacagcgcgggcaaggtgcgcaaacagggtatcgtggcgtacttcgacgagcgcaaggagcaggccgcgccgcgccaccacgagaagcttcgcagcgatcccgacatccacctcatccaggtgccctactcgggcggcacgcccatcggctacacgaacgcctacctcatcgccaccgacgagcgcaacctgctggtcgataccggcgtcagccacgaggcgtcgtacgaggtgctgcgctcggcgctgcaggatctgcgcgttgacatggcgcgcaccgacgtgttcgccacgcactttcacatcgaccatctgggcctgatcgcggccatcgcgcacgaggacacgcgcgtgtacctgagcgcacgcgacgaagagctgttccgcggccgcggcgccagctcgtatcgcggcacggtgaaggcgcggctttcgtgcgaggggtttccgccggacgagctggacgagctggaacgcaccgacgcatgcctcatcccgcgcgtggagtggcccatgccggagcgtttcgcgaacctggctgacggtgacgagctgcgctatggcggctaccggatgcgcgccgtcgacacgccggggcacacgccgggccatcaatgcctgtacctgcccgatcagaagatcatgttctacggcgaccacctgctgatgaacagctcgcccaacatggcgccgttccccggcgaggcggattccctgggcgactacctgcgca

SEQ ID NO: 8830 - DNA, 157 bp, Unknown
  gut microbiota DNA sequence
tgtgttcgccacgcacttccacatcgatcatctgggtctgatcgcggccatcgcgcacgaagacacgcgtgtatacctgagcgcgcgcgacgaagagctgttccgcggccgcggcgccagctcgtatcgcggcacggtgaaggcgcggctttcgtgc

SEQ ID NO: 8831 - DNA, 1270 bp, Unknown
  gut microbiota DNA sequence
cgacggggacgagctgcgctacggcggctaccggatgcgcgccgtcgacacgccggggcacacgccgggccaccaatgcctgtacctgcccgatcagaagatcatgttcttcggcgaccacgtgctgatgaacagctcgcccaacatggcgccgttccccggcgaggcggattccctgggcgactacctgcgcagcttggacaaggtggcgcagttgccgatggagttcgcctgcatggggcacgggttcgtcgaccctcggcgccaggccgaggccatgcccgagcgcatcgcctggctgcagcggcatcatcggcagcggctcgacgagatcgccgcgcagctcgaggagcgccccggcatgactggcacggaacttgctaagtccatcacgtggaacattccgcatgccgcttgggaggagatacccatcatccagcggtggatcgtcgtgtgcgaaacgctggcccacctcgaccatctgatgggcgaaggcagggtgcgcagggagcgcgccggggatgcctaccggtatttcatggagcaacgctagggagaaccgaaggaaaggaacgacgagatggatttcagcttgaccgatgagcagcagctgctgctcgacagcgtcgacgagctcatggagcgctacggcaccgagcagtatttcaaggagtgcgacgagaagcacgtgtggccccaggagttcaccgacgcgctgctggagaacggcttccagatgctgggcgtcgacgagaagttcggcggcaccccggttgacgtgaccacgctcatgctggtgtccgagcgcatctgcaagaacggcgcgcccatctacgtgtacggcaacctgtgcgcgctcaaggacatgacggagtacggcacgcccgaacagcaggagcagtgctttgccgaggtcatggcgggcaagcccggtttcgtgctgggcttcaccgagccgggcgcaggctccgacagctcgtcgctggccagcacgtaccagcgccgcgacggcaaggtgtacctgaacggcagcaaatcgttcatgacgaacgccgtgaactccaagtacatgctatgcgtggcgcgcgatgccgacgacgatcccgaggatcgcgccaaccgctcccgcttctccatgtggtgggtgccgctgcacgacgacgagggcaacctggctcagggcatctccatcgagccgttggagaagatcggctggaacatgggcaacacctgcgagctgcacatgcaggacgtggagctggaggagaag

SEQ ID NO: 8832 - DNA, 448 bp, Unknown
  gut microbiota DNA sequence
gtgcgtggcgcgcgatgccgacgacgatcccgaggatcgcgccaatcgctcccgcttctccatgtggtgggtgccgctgcacgacgacgagggcaacctggcccagggcatctccatcgagccattggagaagatcggctggaacatgggcaacacctgcgagctgcacatgcaggacgtggagctggaggagaaggacctcgtgggcgtcgagggcaacggcttcatgcaggccatggtgaacttcgaggtggagcgcctcatcgcatgcgcccaatcgctcggcgcggcccagtgcgccttcgaggacgcggtgcgctacgccacccagcgcatccagttcggcaagcccatcggcaagaaccagctcatccaagagcacatcaccgacatgtacctgaagatcgagaacatgcgcaactgggtgtacaagacggcctggaagatc

SEQ ID NO: 8833 - DNA, 491 bp, Unknown
  gut microbiota DNA sequence
tgcggtgcgctacgccacccagcgcgtccagttcggcaagcccatcggcaagaaccagctcatccaggagcacatcaccgacatgtacctgaagatcgagaacatgcgcaactgggtgtacaagacggcctggaagatcgacaacggcgagtcggtgcagatcgattccgccgtggcgaagctgtactgcggccgcgccgctttcgaggtgtgcgacatcgcgctgcaggtgatgggcggcatcggctacacgaaggactgccgcatctcgcgcctgtggcgcgaccagcgcgtctaccgcatcggagccggcaccgacgagatcatgatccacatcgccggccgagcgatccagaagcaattccaggaatagaaaggacttcatcatgcctgaaatcttcaatcccgtggacgaccttatcgccgagcaggcgctggtcgacgccctcgtggcggacttcaccgaggacgactggaaccgcatggcgtcg

SEQ ID NO: 8834 - DNA, 26910 bp, Unknown
  gut microbiota DNA sequence
cgccggcaccgacgagatcatgatccacatcgccggtcgcgccattcaaaagcagttccaggaatagaaaggacttcatcatgccagaaatcttcaatcccgtggacgacctcatcgccgagcaggcgctggtcgacgccctcgtggcggacttcaccgaggacgactggaaccgcatggcgtcgtactgcaccacctggacgttcaaggacgtcatatgccacatcgcattcttcgactactgcgcggtggagctgctggccgggcgcggcgagagcgtgaacgccgtggccgatgcggcgtccgagcaggacgagcactaccacgtcatggcgtttcgcgaccaaagcggcgccgacatcctgaactggtggcgcgagcagcgcacgctcatgacggcatccttcctggagctgggcccgaagggccgcgtgccgtgggcggccggcatcccgcccatgtccgtgcgctcgctcgcgtcggcgcgcctcatggagctgtgggcgcacagcgtcgacctctacgatgcgctgggcatcgaccccgtggtcaaggagcgcatcacgtccacgctgttcctgtcttggcagggtcgtccgaacatgtacaacgtgaacgggctcgcgttcgatcccgagatcccgatgtacctggagctgacgcttccgtcgggcgagctgtggacgaagggcgagccgaacgatcagaactacatcaagggctcggcgaaggactgggcgctcgtggccatccgccgtcgcaactggatggacaccggcctcgaagtggtcggcgacgaggcgcgcacctacgcgggcatcgtgcagacctacgccggccccgccgatcccgcgccgcaagcgaagaacccacgctaggtcgttcgcaaaaccgtcctgaggggggcgacccccccctcaggacgctcagcggtagatcatggggacggggcggcaggcggcgaaatcgcggcaggtgtcgcagtcttcgccgaggtcgggcgagatgcgctcgcgctccacctgctcgcatcccagcgccgtgtagaaaggaaccgccgggccgcgtgcgacgaacagcagcgcgccgtagcgtgcccgagcgtcttgcatgagcgcgcgtcccacgcccagcctgcgcgcctgcgggtccaccacgatggggctgacgtaccgatcgccttcggcttcgacgatgcggatgaacccgacgatgtggttcccgtccagcgcgacgtacgacgttccgcgcggggtgagcgtgcccatgccggcgtcttcggtcaggcgcgcgatggcggcggcgtcctgctgggtagcttcgcgtatggtgggggttgatggatcgcacgtcatgaaggggtccttcctgagctttctccatagattagtaaaacaattagcaaaaatcgtgctagagtttataatatcgcataattggttgaaaatttcacggaatcatcttaaaatgagagcatcagcaccgctcgtcggtgaaatcgcgcagccgccgaggggaagcggccgaagcgcgtcgcagcaagggggttgcatgtcggattatccgagccaagccgtgcgcatggaggcgcgctccaacgtctcggtgcggaccaagcagcatttcgctcccacggccatccaaggcctcgaggtgctgtcgctgccggtcgcgcgcttggacgcgtacgtccgcgacctggtggagcgcaaccccttgctcgatttcgactacgatcacggctccctttcgttcgaggagctgcccgacgaggaggacggcgacgctgcggccgatgccgaaacggctgccgaggggttcgatgcgcgcccgccgtcggcgatcgcctgggatgcccgcgggttcgacctggcccgtctgcgcgacgagtgctctcaaacggaaacgctgcacagccatgtgcgcatgcagctgacgggcgtgcgcgtcggcgaagaggaccgcgctctgcttgacgccctcatcgagaacatcgacgacgatgggtacttctccggcagcatgcatgcgctctgcgccgaagcggggcgctcgatagaggacggccagcggctgctcgagctcgtgcagcagctgtcgcctcgcggcgtgggcgcgcgcgatctggccgaatgccttgcgttgcaaatcgacgacggccttccctatgcggacgttattcgcgacatgctgcgcaccgggctggacgacctcgccgaaaaccgcacgacgaaactcatgcgcgcctaccatttgaccatcgacgacctggccgccatccgcgaggtcatctgcacgctcgatcctcgcccgggctcgtctttctcgcagcgcaagggcaccgtgtacgtcatccccgacatcaccatcaggcgcgatggcacggccttctcggtgcaggttaccggcgagctgtcggaaacgctggtgctcaacggagcctacgaccgcatggcgcagcgcgggggcatggacgacgaggcgcgggagtggttgcacgagaagcgcgccgaggcggatgcggcgctggcgaacatcgaccagcggcgccagacgctccatcggttcggcgtgtttctagccgaggtccaatacgatttcttcatgggcggcgaggcgcggatgcgtccgctcaccatgcagcaagccgctgatgcgctgggcgtgcacgtgtccaccatcagccgtacggtgcaggacaagtacgctctcaccccgtggggcgtatttccgctcaagcacttcttctcaagctcggtcgcctgctccgccgaggatcgccgccatgcgctgtcgtcgctggccatcaaagaccgcatcaaagacctggtggcccaggaggatcgccgcacgcctttgagcgatgcgacgatcaccgccatcctgaacggcgagggcgtggacatcaaacggcgaaccgtggcgaagtaccgcgaggcgctgggcatcggtcggcagtcgcagcgaagacggtaaggtactcgatcgaaagggaggggagcgtacgtggtatatcgaaaagaacacgcgatagaggcctggaagacgttcgtcagcacgggcaccatcctcgaagacaaggtgcgccccgaaatagctcgctcatggcttcgatgccgcgccgccggcgtgaacccgtggtcgagcgatttcgccgagcagaaccttgctctgctggaagagaagcggcaacgttttgcggcatcgctcaaatcgacggtgccggtgatgaagttcctgaaggaaatgctgggctgcaacgtgtcgttgatggacggcgagaacttcgtgttcgagcttctgtcgcctttggcggtgtacccgcgcacgttcggcacgttcacgcgcgaagaggaggtgggcaccggaaacgccaccctggtcgcctacgagaagaagccggtgcgcgtcgacgggttcgagcactatcgcgccatcgtgcaaacgtactcgggcgtgtcagtgccctacctcgatggcgcagggaagtactacggcgcgatgaacatcaacagcccgtttgccgtattgccgcaaagcgcccttcagctgtgccgtatcggcgtttcgttgacgaacgacttgcatcgcgccggcgcgaaggcgggcgctttgctgtccacggtcgacttcttcaagccgcttatgctggcctacgagcatccggtgttgctgatcgactccaacggccgcatcctgggcggcaacgcgggcatgcgcccgtattgtccgggctgggagcagtattcgtacggctcgcaatcgctcggcgcctatctggggaaggacttctccgtgcaggacgtgctcgatctgccggagaagttggaagcgccgctgcccgtgcgattcaagaagggacgctcgcgcgcggtgcacgagctcaacctcgtgaggcgcggcagggtggagatcgaagggcaggagccgttcgtcatgctcgtattcgaagacggcaacgaagccgagcgcaacgcccgcagcgcgactgggcgtcgcagcgatgccgcagtcatgccgaccggcgacaaggtggactacatcggggaaaccgaggagtggaagaagatcgaccgcatggtgcagaaggtcgcgcccatcaagacgaacgtgctgctgttgggcgagacgggcaccggcaaggaagtggtggcccgcgcgctgcatcgtcgcagcggacgcaccggcgagttcgtggccatcaactgcggcgccctgccgcgcgacctgctggccaccgagctgttcggctacgagggcggggcgttcaccggggcgcgcgagacgggcgcggtggggaagttcgagttcgcggacggcggcacgctgttcctcgacgagatcggcgagatgccggtggacatgcaggtgagcctgctgcgcgtgctgcaggagcagagcgtcacgaagctgggatcgaacaccgcgaagacgctcgacgtgcgcgtgatcgccgcgacgaaccagaacatcgagcgcctgatctccgagaagaagttccgcagcgacctgtactaccgtttgagcctcgtggagatccgcctgcctcagctgcggcgacgctccgccgacatcccgccgctggtggactatttcaacgggcagctttcctcggtgctcgaggtgccgtgcacgcccttccccgccgaaaccatcgaggcgctgcaggcttacagttggccgggcaacgtgcgcgaactgcgcaacatcgtggagcgctgcctgatcatgcagggccagggcgccaacgtcgccgtggactcgctgccgcctcatatcgcgaacgcggcgaacgccatgccggacggcccggtggcacacgccgccgtggccgtgcagcaggatgcgggggcgatgcgggagggcgtcgaggacgatgcggtgtcggaggaacgtcatctcgtgcaggcgctgctcgcgcagcacgaaggcgacctcgcggcggtggggcggcagctcggattgacgcacgaagagctctccgagctgctcaaccgccttcacctgcgcgttcgcgtggtgctcgaaagcatggacgacgcgttctagagcgcttgggcaggctggcacgctttttgcttttcggaggtgcggaaccgcattcccgagaagcaaaaggagtgattcatgaacatcgttgtgtgctacaagatcgtgcccgacgagcaggacgcggtcgtgcaggccgatcgcacgctgtcgttcgagcgcgctgcgctcaaaatcggcgattacgacctcaacgccgtggaagccggcgcgcagctggcggcggcctccggcgcgtcgcttgtcagcctgaccgccgggggcgacccggtggaggattcgaagctgaagaaagccatcctcgcgcgcgggccgcacgagaacgtggcggtgaaagacgcgtcgctgcccgaggccggatcggcggtgacggcgcgggtgctcgcagcggccgtcaagcagctggacgacgtgagcctggtgctgtgcggcgaggggtcggccgaccgctatgcgcagcaggtgggcgtgcagctgggcgagctgctggggcttcctaccgtcaacgccgtcagctccatcgagctcgacgacggcgtcgcgcatgtcgagcgcacggtgggcgcggtggtcgagcgcctcgacgtgccgcttccggccgtgctgtcggtggtcgccgacatgaacaccccgcgcatcccctcgatgaaggacatcctgggcgcgggcaagaagccctcgcgcgttctttccttcgaagatgtgggcttcgacggctttgacgaggccatcgacgtggtgagcacgcttgcgcccgagcagcgcgatcgcgcgtgcgagatcctcgaaggcgatgacgacgagacgattcaggcgttcgcggcacgcgtgcgcgagcggctgtaaggaggcatccatgagcgataagacgattgcggtgttcgccgacacggcggaagcgtacgaggagctgtgcagcggggcgcgggcgttgggagggaggccggttgcgctgtgggccggcgacgaggccgacgcgcagcgcatcgcggcgtggggtgcgcgcgtgatgcacgtcggcgtcattcccgagggtgcgctgtacgaggactgcgttcccgcgttccaggaggtcgtccaagccgagcagccgacgttgatcctggcgcgcatgtcgaagcgcacgcagtgcgtggcgggccgccttgccgtgcgtctgggcgtgccggtggtcaccgacgcgtcgcgcgtgaagcttgacgacgagggcgtcgaggcggcgcacatggcgtacggcggtgcggccgagcgcgtcgagcatgcgcgggggatggcgatcgtgctcgtgggctccggcgtgttcgagatcgacgaagcgccggctgccggcacggtggagcgcgcggcggcgtcgatcgagcccggtcccatcaagctggtcgggcgccaggagaagcaggaggaggtggtcgacctcggctccgcgaaggtcgtggtgtgcgtgggccgcggcatccagaacaagcagaacctaggcaaggcgcaggagtacgcggcgcgcatcggcggcgagacggcttgcacgcgccccatcgccgagggcgagggttggatggcgcacagtcgctacctgggcgtttcgggtgccgtcgtgaagcccgacgtgtacatcggcctcggcgtgtcgggccaggtgcagcacaccgtgggcatggcggaatcgcagttcgtggtggccgtcaacaaggacaagaacgctccgctcatgaagcactgcgacctcggcctcgtagccgacctggagaaagtgctccccgtgctcgcagctctctaaacgacccgttagcctcccattgtagcgaaagtggtcccctgtcgtccttttcccgggatggcaggggactgaatgtgatcgctattcgttttccagtatggcttctagcatcgtgcgaagcgacggaaagtcgtccgagacggttgcgtatacgtcttccatgcgcaacgtttgatacttgtgcgcagctatgtcgcgaaagccggcaatggctttccagggcacctgggcgtgtataaggcgaaagctctcggtaagatttttaacgagttcccctatgttgataaccgtcatgcatacggcacgcttgagcttctcatcttcgaggaatgaagcgagatcctcgttctgcatgagcgattcggcgatggctatttcgtcgagcactttgccgacgacggttcgatctctattgttcatagagcgttaccgtttttcccacatccaatatagagccatcgggaatgggcgcatgcacgatgtcgaccgatgtgccaagatccttctccagccgatcgcgcagcgatgcaagcaggaggagcgaaacggctatcgaggtgaattcgattaatagatcgacgtcgcttttttcggtctgacgttcttccgcatacgatccgaaaaggtcgacccttttgatcggaaattcatgcgcggcattgttcacgctttcggagatggtggctatatcgagcatgttggcctcctttcgtattgttgcattatctcatgcgaatgggggctcgtacagcgtgcggcgcaggagggtgaacagggtttcgcatcggggatcgcttcgtttgatggacgagagcatgctgtcccacacgaacgcgcacagcggttcgggggccagcgctcccagcaggcggtcgtgcgccacgttcggatcgcgttcgagcgccaccacgaggccgcggcggatgtgcgcgaagcacgcctcctcgcgcttgcgcgccgatgccaagcccttcgcgtcgagcgcggcgacttccgtcagccagtcgtcgcggaacctcgccagcgctcccgacagctggagcgcaagcccctcgcagaagccgatgaagtcatcgccggcaatggctccgggcatgctgtcggccagcgcttcgttccagaatcgtcctaccacgtcgttgaccaggtcgtatttggtggggtaggagttgtacacggtgcccacggctacattgcatgcgcgcgcgacctcgcggatgctcagcccggaaagacccgattcgctggcaatcgcgaaggcggtgtcgaggatctgctgtttgctgatgacgggtttgttgcccatgcgcacctcccgcgtgcggaagctcgggatccggtcgtttccctcattgtagaggaagactcatgcgtagctcgtgaagaaatggtggttgattttcgtccgtcattgcctccgagcgcaggcctctctaatatgaacgttgttcattaatgaacttagttcatattagcaaagaagaaaggagcgcaacgatgagcatcgaattgatcgtggcgagtgtcgccatcacctgcgcgctggttctgtacaccttcggagtgttcggggagcgtcgttcgggaacgttgtcgctgcgccatgtgctgctgttttggggcggcctcgtgtgcgataccaccggcacgatgatcatgtcgaacatcgcgcagcaatcgtccgcaggaggattcgggatccacgcggtcaccggtctgcttgctatcgtgctgatgctcgtgcatgccgtttgggccacggtcacgtacgtgcgtcataacgagcgggggatgcatcgattccacacgttcagcacgttcgtgtggcttgcgtggctcgtcccgtacatcatcggcatgctggtgggtatcccgatgatccatctgcaggcggtgtgcgccatcggcaccagcgtcgtggtggttgccgtgctggcgttcgtgctgttccgcggcgggaagggtcatgcgcataccgccgcgcactaggcgttggctttcagagtcgcgagcggcatgcgcgctcgctatcaaatccgggatcgcgatcgggcgatcccggatttgcgtgtttgaggatgctagcgttcgccgggcaggatggacggtagcgcgatgatgaagcacgcccctccatcaggcaggttgatggcttccaccgtgccatcgtgcgattccaccaccgatttcacgatggccagccccagccccgtgccgcccgtgcctcggcttcgtgacgcatcggtgcggtagaagcggtcgaacagcagctgggggtcgatgtcgccgaacccggtgccgtcgtccttcacggccaggatggagttgcccttcaggccgaacagctcgatggtgatgtggccgtccggttcgatgaagcggctcgcgttctccacgaggttcgtcacggcctgcttgaggcgatcggggtcgcccagcacgtcgggcgcctcgccgacgatctcggtgttcgcatggcggtcgcgcagaatgggctccagggcgtcgagcacgccggtggccagctcgcgcaggttcacgcgcgatagctccatgggcatggcgttgtcgtcgatgcgctgcagcgtcagcaagtcgtgggtaagacggctcaggcgctcgctttcggcgatgatgatcgagcagaacttctcgtgcagctcgggcggtagatccggatcttccagcatctcggcgttgccgcggatggcagtgagcggggtgcgcagctcgtgcgccacatcgctgatgaatgctgcttggcggcgctccttcagcaccaggtcgtgctgctgcgacttcgtggtctgcacgagcgccttgaaatcggccgacagttggtcggcctcgtacaggcggccgtcgggttcgaacggcacatcggttcccgtgcgataggcggcggttttctttgccaagaggcgtagcggttcagatatgaaatgtccgataataaggctgaacgtgaacaccacaagaccgacgggagcaagcagcaaaaacgccttcgacggagtgtcgaaggcgaggaagcaaatcagaaccagaaccgcgccggcgagaagcgaaagcagcgttgccagcagcgagaagtatgtttgcagtctttttattgcttgaacctgtatccgtagccgcgaaccgtttccaccaagccgggatcgtacccggcggactcaatcttatcacgcagacgcttgatgtgggtgtcgacggtcttggtttccgtcaagtattcccaaccccaggcgtcgcgcagcagatcttcgcgcgaaaccaccttgccggcgttcttcatgaggctggcaagcaactcgaactcgcgcggtgtgaggtcgatctcgccgttcgcgcccgacgccgtgtgggcgtcctcgtcaagcgtgataccgctggcggtgacggcgtggttagcgccggggaagtcgccgcccgatccgcggcgcagcagggcgcggacgcgtgcgatgagctctcgcacgccgaagggcttcgccaagtagtcatcgccgccgatttccaggcccaccaccttgtccagctcggtgtcgcgagccgacaggaacaacacggggacggtcgtcttcgagcgcaggcggcggcacagctcgtagccgtccatgccgggcagcatgatgtcgagcacgaacagatcgtacgagttcttcgtggccaacgccagcgcgtcttcgccgttgtccaccacgtcggtgaagaacccctccttcttgagggcgtaactgacgaattcggtaatagagggctcgtcgtcaacaacgagaatgcgatgcggggtgtcgttcatgtgttgcctttctatcagatggactcccgttgccggtgcctgacagatgcgcgtgggcgggttgttataatgtcgagagcaactataagcattcggggtgcgaccgagggagactgtcaggaacatgttacttgccatcgacgtgggaaatacgcaaaccgtagtggggatctaccaggacgggagcctgcaatatcggtggcgtgtggccacgaacaaaagccatacctccgacgagctccgtgtgaaactggtgccgttgctggcgtccgagggcttgaagctcgatgatgttcgcggcgtggcgctggcctcggtggtgcccgcgctcaccatggcatggtgcgcggccgcgtatcgcatgatcgggaaggacgcgctcgtgtgctcggccgaaacggcgggctcgctgttcgaggccgactatcccaaccctcatgaaatcggggccgaccgcgtggccgacgccgtggccgcgaaggcgctgtacggcgcccccgtgatcgtggtggatttcggcacggccaccaatatggaagtcgtcgacgcggacgggcgcttcatcggcggcgttatcgcgccaggcgtggaaacgtcggcctccgcgctgttctcgcacgccacgaagctgggggccatcgacctggtcgaccctcataccgccatcgggcacaacacggaagaggccatccaggcgggcatcgtgtacggcgaggccgaccgcgtggacggcatcatccgccgcatcttcgcccagctgggctacgagacgcctgtggtggcgacgggcggcctggcctcgcgcgtggcggcccagtcgcagaccatcaccgccatcaaccccgagttgaccctcgagggattgcgtctcgtgtacgaagcgcaggaaggcgccgccagcgtttaaggcgcgcgatgcgttgccctaccctgtttcgcgccgagccgtttcgccgacgcagctgcttcagaccatcattgacgcggggtcgtctcgtagggttcggtgcgacggcgggttcgatgtggcccgacggagcttcatgcgtcgcggcctatttgccgcaacgttggctttcttgcgctgttggaggaatgcttctcgttcccgttgcgttcggcgggtagaatgcttctatcagaaaagccgcgccgtctgcaatgagcgggcgggaacgaaaggaagggcccgacgtgttgagcgacattgaaattgcccaggcgacgaaaccccagcacatcagcgcgatcgccgagaaggcgggcgtgccggagtcgtatctcgagctgtacggtacgaacaaggcgaaggtggactacaacctgctcaccgacgaggagcacgcgcccggcaagctcatcctggtgacggccatcaacccgacgcccgccggcgagggcaagaccaccacgacggtgggcttggccgacgcgctggctcgccagggcaagaacgtggtcgtcgcgctgcgcgagcccagcctgggccccgtgttcggcgtgaagggcggcgctgcaggcggcggatacgcccaggtcattcccatggaggacatcaacctgcacttcaccggcgacttccacgccatcggcgcggccaacaacctcttggccgccatgctggacaaccacatccagcagggcaacgagctgggcatcgacgtgcgcaagatcacctggaagcgcgtggtggacatgaacgaccgccagctgcgcaacgtggtggacggcatgggcggcaaggcccacggcgtgccgcgcgaggacggcttcgacatcacggttgccagcgagatcatggccatcttctgcctgtccacctccatcaccgacctcaaagagcgcctggcccgcatcgtcgtgggctacacgcgcgacgacaagcccgtcacggccggcgacctcaaggcgcagggcgccatggccgcgctgctgaaggacgccctcaagccgaacctcgtgcaaacgctggaaggcacgccggcgttcgtgcacggcggccccttcgccaacatcgcgcacggctgcaactccatcatggccacgcgcatggccatggcgctgggcgactactgcgtgacggaggccggcttcggcgccgacctgggcgcggagaagttcctcgacatcaagtgccgccttgcgggcctcaatcccgacgcggtggtcgtcgtggccacggtgcgcgcgctgaagaaccacggcggcgtggcgaaggccgatctcaacgacgagaacctcgaggcgttggaggcgggtctgccgaacctgctgcagcacgtggagaacatcacgaaggtgtaccagctgccgtgcgtcgtggccatcaaccgcttccccacggacacggaagccgagctcaagctggtggaggacaagtgccgcgagctgggcgtgaacgtggcgttgtccgaggtgtgggcgaagggcggcgagggcggcctggccctggccgacgaagtggtgcgcctgtgcgaagagccgaacgacttccagttcgcctacggcgacgacctgtcgctggccgagaagatcgaggccatcgccacgcgcgtgtaccatgccgacggtgtggacttcgagccgaaggccatggccgagctcaagaagctcgaggacctgggcttcggcggcatgccggtgtgcatggcgaagacgcagtacagcttctcggacgatcagaagaagctgggcgcgccgcgcggcttccgcatcacggtgcgcaacgcgaaggtgtcggccggcgccggcttcgtggtggcgctgaccggcgacatcatgaccatgccgggcctgccgaaggtgcccgccgccgagcgcatcgacgtcgacgaaaccggcaagatctccggcctgttctaagcttggagcgcccccgatttcggttgaaatcgggggcgctcctgtcgtatactacgcctaccggctgtgcccaggatgtgagtttaggtggctacacgatccccttcgggcggcgcaggttaatgtgggagcccgggttcacgcccgggctttgctatctcagcttctccctggttccctccctgagaattcgcgctagatccgcgtctgtttcgcgctagatccgtgaaaggggtcgaaggatatgaaacctgttagcaacggtgcgaaagcggtctttgcggtcgctttcgccctctttctcgcggtcgtccttgtcggcattgcgctttcggacaatccggtaaagaagttcttcaagcagcaggaagttctggatattgcgaagatgcacatgtcccaagtgaaaagtggcgaggtctatacgggcgcgctgcaattcgcagatgacatcgacttcgacaacctcgcgctcagccaggtaatcccaatgtatagcgcgcgccaaaacggagacgtagtgcgcgatgagagcgaaggatacgcggtctactccaacggcaaggtggtggcgttgttcgggatctataagtgcgatcccggtgccgttactggtggtaccaccatgtcgaacgtcgggctcgaggttgttcagaacatgctgagcgatcctggcacctgtgcgctcttgcagccttgcgattcttccggcgcgctgtacgtgacgcctcattcgagtgaagccgtagaagtcttcgacccgggcccttcctttcccggcgaacctcccgagcctcctcccgcacctgaaacggtaacgctggaatcggttggaatcacatcggagatgatctcccaaatcgatttccccgagcatcaggatcccgttccgtttagcgtgtagcaagagggctgaccgtccaagcggtggttgccgaccgaagcgtgcggattatctcaggattccgcgcgtttcggtcggcttgtcgtatcatgcaggtaccaataagcgcggcgacgaggaggatcttcttggacaccacctttatcgacgaattggcgagcgcggctcccacgcctggcggaggtggcgcggcatcctacgtgggggctgtggcatccgcgctcgcgtccatggtgggcaacctgaccgtgggcaagaagacgtatgcggcggtggaagacgacgtgcgcgcgaccctcgaacggctcgcgctcctgcgcaacaagctgctcgcgctcatcgagtcggacgcgcaggcgttcgagcctttggccgcgtcgtaccgcatgccgaaggccacgcccgaggaggcggcggcgaagcaggcggcgctgcagctggcgctgggacccgcgtgcgatgtgccgctgatcatcatgcgcacgtgcgccgaggtcatcgaccatgccgatttcctcgcgcgtaacggcagcaagctggccgtttcggacgcgggtgcggcggcggtgctggcacgcgcggccgtggtggcggccagcatgaacgtctacatcaacgcggcctcgatggacgacgaagcgcgcgccgatcgctatcgcgccgaagccgatcggcttatcgccgaggcgaacgagcgcgccgacggaattctcgcctacaccatggacgcgatacggtaacatcgccagtttcacgacgcgaaccagaaaggcagacatggctgagctactgaaggggaagcccgttgtcgacagcatggcgctcgatctacgcgcgcgcatcgaggcgctcggccgcgcgaaggtcgtgcccgcgctcgcgctcgtgcgcgtaggccagcgtcccgacgacctgtcctacgaacgcacggcccgtaaacgtgccgaatcgctcggcatcgccatcaggccgtacgagttggacgagttcgccccccaagcggccatcgaggcggccatccacgaggtgaaccgcgacgaaaacgtgcacggctgcctgttgttccggccgctgccgtcgttcgtggacgagtcgcacatgtgcgagctgctcgatccgaagaaggatatcgacggcatcacgctggcatcgctggcctcggtgttcaccgatggccacgcgggctacccgcccgcgacggcggccgcgtgcattcagctgctcgatcattaccaggtgccgctccagggcaagcacgtcgtggtggtgggacgcagcctcgtcgtgggcaagcccgtgtccatgatgctgctgcgccgcaacgctagcgtgaccatctgtcacagcaagaccgagaacctagccgacatcatgcgttcggccgacgtggtcatctgcgccaccggtcgcgctcggacgttcggcgcacagttcttcggcccgggtcagacggtacttgacgtgggcatcaacttcgacacgcagggaaacctgtgtggcgacgtggacttcgccgaggtcgagccggttgtggcggctatcacgccggtgccgggcggtatcggcacggtcaccacgtcggtgacgatggcgcatacggtggccgctgccgaagcggcgctggccgcgcgcaccgggaggcgctagacggtgcgagcctcttccccgatgggccgcaagttcgtcattgccgatcctgctacctgcatcggctgtaagacgtgcatggctgcgtgttttcatcgccacgatgtgccgaacgacgtggccgttccgcgtcttacgctggtcactacgcgcaccatctcggcgcctgtcggctgccaccattgcgccgaggccccgtgcgtggacgcgtgccccacggggtgcctgttcaccgacgacgagcatgtgggcgtgcatccggacaagtgcatcggctgtcgcaactgcgtgctggcctgcccgtacggcgcggtggaaatcgtaaccgaaaagctgccgcccgaaccggaagccgcgtccggcaccgaggctgcggcggcttccgctcaggataacaagggcgcccgcgcgcgggctcgcgcgaagaagcgcaagcgcacgaaatcgaccgtggtgaagtgcgacctgtgcctcgatcgcgccggcggcccggcgtgcgcggcggcgtgtcccaccaaggcgctgcggctcatcgatgcgcagttcatggagcgcgcgcggcagaacaagcgcaaggcggcggcgcgagcgtccgcgtcgttcgccagcatgaagctcaacgcggctctggacgagggggagtaggctcatggaaaagcatatggcggtgtgcccgtactgcggcgccggttgcaagatgaacctcgtggtggaaaacggccaggtcatcgatgcggaaggccttcccggtatcacgaatgaaggcgagctgtgcctgaagggcatgtacggctacgatttcgtcaacgacacgaaaatcctcacgccgcgcatctaccatcctatgatccgccgcacgaaaggcgcgccgctcgagcgcgtcacctgggacgaggcgctcgatttcacggccgagcggctccgcgccataattgaggagcatggtgcggaatccgtgatgctcaccggttcgtcgcgcggcgcgggtaacgaggccaactacgtgatgcagaagttcacgcgagcctgtctgggcacgaacaacatcgacaactgcgcgcgcacctgtcatgcggccagcgtcatcgggctcatggaagtcgtcggatcgggtgccatgagcgtgagcatccccacgttggaggagacggactgcatcttgctgttcggctacaacccggcggccagccatccaatagtggcgcgccgcatcgtgaacgcgaaggagcgcggggccgatctcatcgtgtgcgatccgcgcgtcatcgagtcggcacgcatcgcggatatgtacctgccgctgaagaacgggtcgaacctggcgttgctgaacgcgttcgcgtatgcgatcatcgacgaggagcttgccgactgggatttcatcgacgagcacacgacgggcttcgatgtctggtgggaggtcgtgcaggactacgcgcccgaggatgtggaagaggtcacgggtcttccgtccgaaaccatccgccaggcggcgcgccgctacgccaacgccgatacggctgtcatcggctgggggatgggcgtgacacagcaggcgcaaggcgtgcagaccgtgcgcgccatcgcggcgttggccatgatcaccgggcatatcggcacgcatgcgagcgggcttgcgccggtgcgcggccagaacaacgtgcaaggcagctgcgacatgggcatgtggcccagcctgtatcccggctaccagcgcgtgagcgaccctgcggtgcgcgcgaagttcgcagcggcctggggtgtcgacgaggaacgcctgtcgctcaaggagggtttcaaactcaccgacctgccgcacggcgtggccgagggcacgatccgcgcgttctacaacttcggtgaagacccgctgcaaaccgagcccgacacggcgcagatgcgcgccacgctggaaggcctcgacctgctgatcagccaggacatcttcatgacccagaccacggcgctggccgacgtggtgctgcccgccacgtcgtgggccgagcacgacgccgtgtacaccgcgtcggaccgctcgttccagcgcaccaccgccgcgctgccgccgaagggcgagtgccgccacgactggcagattttcgccgacctgtccacgcgcatgggctatccaatgcactaccgcgacacccaggaaatctgggacgaagtgcgcagcctgtgcccccagttcgccggtgcgacgtacgagaagatggccggcacgggctacgctcagtggcccatcttcgccgaggccgcggacgatcccgacaaccacggcacggccgagctgttcgcgggcggcatcttcaccacgcccgacggaaagggtcgcctcgaggcggctgcgtggcgtccgcccaccgagcagcccgacgagcgctatccgctcgtgctgtgcacggtgcgcgaggtgggtcactactcgtgccgttcgatgaccggcaactgcaaagcgctggcagcgctggccgacgagccgggctacgtgagcatcagcccggtcgacgccgacgcgcgcggtatcgacgaggagcagctcgtgtgggtcgcgtcgcgccgtggcaaggtgctggcgcgcgcggcggtggacgagcgcatcaacgacggcgccgtgtacatgacctaccagtggtggatcggcaagtgcaacgagctgaccctgcacgccaccgacggcgaatcgggcacgcccgaagacaagtacagcgcctgccaggtggaggccattcccgatcaggcgtgggccgaaacgtaccttgtggagcgctacgccgagctgaaggcgcagctggcagccgaggccgaccggcaaaacccgcagcccgagaccgagatttcggccgcttcgagcgaagtggccgatgtcgttcccgccgttccgggcggagcgaccgaaggcggcgaagccgccggagtcgaaggatcccgcgcggcgttagcaggaggagtttcgggggcagcaggcgtcccatcggttgccgccgccgagccgccccgcgcgttcgcgccgcacgaggccgaggtggcgggccgcgcgctgtacgcgaacggcgaggaagagacgctcgtatgaaccgcttcgtcgtatccgacccgtcgcggtgcatcggctgcagcgcctgccgcgtcacctgcacggaaagccatcgccgccgcgccctgcggcccgcctcgcgcatctcgctcgtgaagacgcgcacggtgtcggccgccgtgacgtgccatcagtgcgaaggcgcgccttgcatgacggtgtgccccgagggcgccatcgtacaggagcgcgatcgcctgcacgtggacgaaagccgctgcacagggtgtttgctgtgcgcgctcgtgtgcccgttcggggcggtgtacccgtcggcgccctcgaccgcgcacgtcaaggcggcgccgtacagccgcgcttcgtcggcgcgctcggccgggttgctgcgccagaaggagacgggcgcctacacgtcggtggtgatgtgcgacctgtgcgcgaagtcgccgaacggcccgcgttgcgtggaggcctgccctacgaaggcgctcgcgctggtggacgagggcatgctggaggctttgggtcgcacgcgacgcatcgaggccatcgagatgaccgacatcgccatgcgcggcgctttgggagctgacctggccgttcgggtcgatgcgttgttcgacagggaaggggatgcctgatggggacgatcaagccgcgcgtgccgaacgccatctcggcgggacggcccgcttcgtcggcgcgccgcgtccacgagccggtcaaaggaaagcctcgccacgacttcgagcgctgcatcgcttgcgcagcctgcgcggtggcatgcgatgcgggcgctatccgcatcttcatcgacgaggacgaaggcctgctggtgtggacgctcgacctgtacgattgcacgcagtgcggtcgctgcgtgcccgtgtgccccaccggcgcgatgggcctcatcgagggcgcggagttcgccgacgacccggagccgcccaagcgctgcctgttcgcgttggccgagtgcgagtcgtgcggccgttactacgcaacgaacaaggaggtggcgttcgcgaacgagctgctcgagcaggaggagcacgccgatgccgctcgcgctcgcgcgctcacgtccatctgccccgactgcaagcgcctgcacgatgcgaaagccgccgccaggagaagcggcatgaagcgcggataacctcccaaatcaacgcaagcacccagcctctgacgcggtgtgggtgccttcattccctgcatctgagcgtagccctgttagccggcgctcggcgtcaaaggagctgcaagcttcgccattcatatatatgatgaaaatcatcatggacaaaacatgccgcttttcggtagttttcagcagcgaatcggagtgcttggtcaagacaattcgaagaaatgccaggtgagaaagctttcgttggcttcatcctaggcagagaatactgaaaagtgccccgttttgtccatgacttttcggctaatattaacctgcaaccggcaagcaactcgcgggcgtttcatgcgaaacgcccgcattcgcgttggagaaaccaccccggtgacttctttgcgctagccgatcgaaaccagctcgcgggggtagctgttgagcacttcgcagccgtcttcggtgaccagcacgaggtcctcgatgcgcacgccgaactcgccgggcaggtagatgcccggctcgatggagaacaccatgcccgcttgcaccggcgcgtcgtgcgcggccgacacgtcgccgggctcgtgcacgtcgaggccgatctggtgtcccaggcgatgcgtgaagtaggagccgtagcccgcctcttcgatgattgagcgagctgcggcgtcgatgtcgcagaagcgcacgccgggagctaccagcttgcgcgccgcctcgttcgcgcgccgcacggtgtcgtgcacctcgcgcagtttttcgctgggctcgccgaacacgaaggtgcgcgtcatgtcggagcagtactcgcccttgcggcaacccacgtcgaacaggaccacgtcaccgctggccagcggcgtgtcgtcgggctcgtggtgcggatcggccgcgttcgcgccgaagctgacgatgggggtgaacgagtggccctgcgcgcccagttcgcggtagatcgcctccagctggccggccacgtcggcctcggtgacgccctcgtgcacgagccggcggaaacggtccatggcggcatcgttcgcggcgctggcggcgcgcataagctcgcgctcggtatcgtccttgatggcgcgcgcgtcgtctaccgcatcagaggccagcacgaagccgctcgccgcgccgcgctccatgagcggcagcaggaagcgggcaggcaggttcttgtcgcagcccagcggcttgtcggcatcgcacagcccttcgacgatggccagcggatcgtcggtgtcggtgaacgagcgcacggtgcaggcggcgtcggccggcgcggcgaacagcgcattcagcacgagggtgggtcgagcgtccgatccgacgatcagcccgaggaagcgctcgcccggctcgatgaacgctccggtgagatagtggatggaacggggatcgcatacgagcatctgctcgagacctcggttcgcgaggttgcgcctcacggttttgatgcgctgttcgtacatggcgtggctccttacgttgtcgccgacaaggtcggacgggtttgtttgctgcgatgatagctcatcgagcgctacgcgcggcgcatcttccctcgaatgcggggatattcgggagggctggttcgcgcaggcgcgtttagcgtatgatacgaagcatggcaaacggacttacatacatgcgcaaaaccacctcgtccgaggcgacgaaacagctggcggccacgcttgcgccctacttgcaggcgggcgacgtcatcgtgctgtcgggcgatctaggtgcgggcaagacgcagttcgtgcagggcgtggcggcagggctcggcgtgcgcgaccaggtgaccagccccacgttcaacatcttgctgacgtaccctgccggctcgctgccgttgtaccacttcgatctgtaccgactcgaagaggcggacgagctcgaggacatcggctattacgagaccatcgacggcgacggcgcgtcgttcgtcgagtggggtgagaagttccctgaggcgcttccgtacggttatctggagatatccatcagggtggacgacgagggcaaccgctccgtgcggacccacgcttacggcgaccgtgcacgtcggttgctgttcgtgtgggcgaaggattcgaaatcgcggctgatgaagtgcgcgggaggaactgcgtgagcgacatgaatttgcgtcccgaaggggcgtccgagcgggcacggtacgtgctcgccttcgatactgccaacgaaatcatcgctatcgggttgggcgtgctgcatgcgtcgtcgcgtatgatcgagttgacggcttccgtggaagccgaggctcgacgcgcgtcgaacacccagctgctgccccgcatcgacgcagcgttggccgaacacggcgtggcacgcgaggacatcgcgtgcgtggcggtgggccgcggcccgggatcgttcacgggcgtgcgcatcgcgatggctacggcgaagggcatcgcgtcagcactcgaggtgccgctggttggcgtatcgtcgcttgatgcggtggcgtggaacgcgtgggcggcgggcgagcgcgggccgctgtccgtggtggccgacgccatgcgcaaggaagtgtatccggtgcgctatctgctgaacgatacgggcatcgagcggttggaggccgaccgcgtggtgaaggccgaagacgccgcgcgggaacttgctgctgagggcgacctgtccgggtcggcgtctgcgacggtgcccagtcgctcggacagtcctggctcgcacgaaacgtccgcaggacgtttcggctcgacgggcgcggcgccgcggagcgaagcggagcaagtccccgaaggggagactcgcttggtgggcgccatcgcagacgccgaccctgccgagggggacgcgtggccgcaggtttccgcacgtcttctttgcggcgatgcgctgaagaaatatggggagttatttgagggctgcggggcggcgctgcctgccgagttgtggatgccgacgggtcgcgggctgttgctggcgctgcaggcggcgtggcgggcgggcgaggccgacccgctcgatgcgcgtcgccatgaccctgcgttcgcgctgccggtgtacacgcgcctatcggatgcggaggagaacgagcgcatccgcctggcgaagaacgatccgaagaaccttgcgaccggcgtgcaggacgtggcgaagcgggccgaccagcgcgcgaccatgcacgataccgccatcctgaacgcacagcccgacgagcatggcatcacgtacaagccgctcgatgccgcccatgcaggcgctgtcgcgacgttggagtccctagtcatgggatcagacgcttggagcgaagcgctcgtggccgacgaactcccccgcgccgaccgcgtgtggtgggcagcttacgaaggggaagcgcttgcgggttacgccggcgggtggatcgtcgacgggcaggtgcagatcctcaaggtgggcgtcgacccggccatgcggcgacgcggcatcgcgcgcgagctgttggcgcacgtggcggccgatgcgcgcgacctgggcgcgtcccgttgctcgctcgaggtgcgggcggggaatgtcggtgcgcaggagttgtacgccgcgctcggcttccgttcgctgggtgtgcgcccgcgttactactccgacggcgaggacgccgtcatcatggagggccctctgccgttggccaggcacgatgtggccggcatggagctggtggtgggcgctgccagcgacgatgcccgctccctccgtgacgaagtgcaaacggatgtttcacgcgaaacatccgaacgccgccccctcatcctcgccatcgaatcgtcctgcgacgagacggcggccgccatcgtcgacggcaacggcacgcttatcgccgacgtcgtggcctcgcagatcgacttccatgcgcgcttcggcggcgtggtgcccgagatcgctagccgcaagcacatcgaggctatctgcggcgtgtgcgacgagtgcttcgacgtggctgcttccgcgctgggcatcgaacgtctgacctggcgcgatctggattccattgccgtgacgtacgcgccggggctcgtgggtgcgctcgtggtgggcgttgcgttcgcgaagggcgccgcgtgggcggccggcaagccgttcatcggcgtgaaccatctggaaggccacctgtacgcgaacaagatcggcgcgcccgatttccagccgcccgcggtggtgtcgctcgtgtcgggcggcaacacgctgctcgtgcatatgaagggctggggcgactacgaaacgctgggcgctaccatcgacgacgcggtgggcgaggcgttcgacaaggtggcgaaggcgctgggcctgggctatccgggcggtcccgtcatctcgcgcgaggcggccaagggcgacccgaacgccatcccgttcccgcgtgccatgatgcactcgggcgacctgcgcttctcgttgtcgggtctgaaaaccgcggtggtcacctatatcaacaacgaacgcgccgccggccgcgagctgaacgtgccgaacatctgcgccagtttccagcaggcggtggtggacgtgcaggtgaagaaggccgaaatggcgctcgagcagacgggcgcgcgcacgttctgcctcggcggcggcgtggctgcgaaccccgcgctgcgcgacgcgtacgagcagctgtgcgagcgtctgcacgtgcgcctcaccctgccgcccttgagcgcttgcggcgacaacgccggcatgatcgcgctggtggccctcgaccgccacaaccagggcaagttcttcaccctggaagccgacgcccaagcccacgccaacctcgacgagccgtactgacgagtcgaggcgtcgctacgcccttatgcgtactcgttgaacaagaggctgaacaaagtcaatactagaacataagttcgtttttctttatactgagagggtaaggaaaaacggcgttgtgctttgctgcacccttcggtccgaagcgccacggagggaaggggtcacgcatggctcgtctgcgcatcttgttgtatggtatcgatagtgatactattcatgagtagattggagcgcatcgtcggggcgatgcggcaaaatccctgcaacgtcgctttctcggatctcgcgtacgtttgcgagacgtatttcggcgagccgcgccagaaagggacgtcgcatcgcgtgtaccgtacgccttggagcggcgatccgcgcatcaatatccagaacgatcgcggcaaagcgaagccttatcaggtaaggcaggtccttaaagcgatagacatggtatcggaggtgcagtgacgtgaacgatgcagatcgatacgcgtatcgggtcgtgtggtcacaggaggatggggaatacgtcgggacggttgccgagatgccttcgctttcgtggcttgcggacacgcccgaaaaggcgttcgacggcattcggtcgcttgccgtcgaagccgttgccgatatggaagccttgggagaagccgcgcccgccccgattgcgagccgggcgtactctgggaagttccaagtgcgcatccctcccgaactccatcgtaggcttgcgatggaggccgcagaggagcgagtgtccctcaatcgccttgttgcggcgcgcttggcgtagcaccgcctctccgggtcagtgctgacgttccggccgacctccgtcttaacctcatcttaacgcccgcaccctccatctttacgccgtgctcatgcggttcttcctatgctgggttcgtggcggtgctgtcgtatgcgccgccacgcaaaaggaccgataggaaaggatcgagatggaattcgtagcaggcttcgtaggagggttgagcatcttccttgcgctctacctgttctacaagcttctcaggggcggtgacgaacggtgatagacgagctgttcgaatacggcgtgtacctggcgctgctggtggctttggccatcccgctgagcgcgtacctcaacaaggtcatggccggtcagaagaccgtgctctcgcgggtgctggttccggtggagaacgcggtctaccgctgcatccgcgtagacaagtccgaggacatggggtggaagcgctaccttgtgagtgcgttcgcgttttcggtgatctgcctggtcgggctgttcgccattctcatgctgcaaggcctgttgccgctcaaccccgaagggattcccgggatgtcctgggatctcgcgttcaacaccgccgtcagcttcgtgacgaacacgaactggcaggcgtacagcggcgagagcgcgctcagctacttctcccaggcgatcggcctgacggtgcagaacttcgtcacgcccgccgtgggcttgggcgttttgttcgcgctgttccgcggcatcgtgagcgaagggaatccgggcctcggaaacttctgggtcgatgtgacgcgcgcggtgctgttcgtgctcatcccgctgtcgcttgtggtgacgatgatcgacgtgcagcagggctcgccgcagaatttcaacgagtacgagacggtgcagctgctggagccggtcggcgtgaccgctgatggcagcatcgtcgacgccgacgatccggccgccgtggaaaccatcgaccaggcgacggtgccgatgggcccgcaggccagccaggtcgccatcaagcagctgggcacgaacggcggcggctacaacggc

SEQ ID NO: 8835 - DNA, 874 bp, Unknown
  gut microbiota DNA sequence
tgccgacgatccggccgccgtggaaaccatcgaccaggcgacagtgccgatgggcccgcaggccagccaggtcgccatcaagcagctgggcacgaacggcggcggctacaacggcgtgaactccgcaagcgcgctcgagaaccccacgcccctcaccaacctggtgcaatgcctgtcgctgctgctcatccccgtggcgtgcgtgttcagcttcggccgcttcgtcatggatcgccgccaggggcgcgccgtgttcgcggccatgttcatcttgctggtaggcgcgctcgtggccatcgcggtgttcgagcagatgggcacgccccagctggcggccgacgggcaggtgtacatgggcgccagcgggcaatccggcggcaacatggaaggcaaggagacgcgcttcggcgtgaccgactcgtcgctgtgggccgcgttcaccacggccgcctcgaacggttcggtcaacgccatgcacgacagcttcacgcctatcggcggcatggtgcccatcgtgttgatggcgctgggagaggtggtgttcggaggcgtcggctgcggcttgtacggcatgctgggcttcgtcatcctcacggtgttcatcgccgggctcatggtgggccgcacgcccgagtacctgggcaagaaaatcggcccgaaggagatgcgcatggccgtgatcctgtgcatcaccacgccgctgctcatcctagtcggcgcgggcatcatgagcctcgacccggcgacggcgaacagcctgaacaatcccggcgtgcacgggttttcggaagtgctgtacgctgccacgtccgcaggaggcaacaacggttcggccttcgcgggattcaacggcaacacgcctctgatcaacctg

SEQ ID NO: 8836 - DNA, 6776 bp, Unknown
  gut microbiota DNA sequence
aacggcgaacagcctgaacaatcccggcgtgcacgggttctcggaagtgctgtacgcggccacgtccgcaggaggcaacaacggttcggccttcgcgggattcaacggcaacacgcctctgatcaacctggtgctgggattcgagatgttggcgaaccgcttcatccccatcgcggcggtgtgcgtgctggccggcagcctggccgtgcgtcccaaggtggcgacgagtgccggcacgctgtccaccagcaatgcgctgttcgtgttcctgctcgtgctcatggtgctgctgatcggcgcgctcacgatgttccccgcgcttgcgctgggtcccgtggccgaacagctgatgatggtgctctaggaaggcgggcgaaagaaagatgacgactactgcaatgaacgaaactcctatgggcgcaagcccgcaaggtggcaagctcgccgggcgcaaggcgtcgatgagcgcgttggccaagcgcgccgtgatcgactcgttcgcgaagctcacgccgcgcgagcaggcgaagaacccggtcatgctcatggtgtatatttcggctatcctgacgctcggcctgttcgcgctgtcgctgttcggcatcgccgatgcgcatcccgctttcatcttcgccgtatcggcggttctgtggctcacggtgctgttcgcgaacttcgcggaggcgctcgccgagggacgcggcaaagctcaagccgactcgttgcgcgccgcgaagcgcgacatcgatgcccacaagttgaacgaaggcctcgtggccaaaggcacccatgcggacgacccggccgagttcttccggctcaacgccgaggaggtgagttcggccgtcctcaagaagaaggacctgttctacgttgcggcgaacgagcagattcccgccgacggcgaaatagtcatgggagctgcgtcggttgacgaaagcgccatcacgggcgagtccgccccggtcatccgcgaggccggcggcgatcgctcggccgtcaccggaggcaccacagtgctgtccgactggctggtggtgcgcgtgacggccgatgccggtcacagcttcctcgaccagatgatcgccatggtggaatcggccgcgcgtaagaagacgccgaacgagatcgcgctcgagatcctgctcatcgcgctgaccatcgtgttcttggtcgtgtccgtgtcgctgttcgcgttcagcaggttcggcgccagccaggagggcatcgcgaaccccaccaccatcgcctcgctcgtcgcgctgttcgtgtgtttggcgcctaccaccatcggcgcgctgctcagcgccatcggcatcgccggcatgagccgcctcaaccaggcgaacgtgctggccatgagcggccgcgccgtggaggcggcgggcgacgtggacgtgctgctgctggacaagacgggcaccatcacgctgggcaaccgccaggcggccgagttcatcccggtcgacggcgcaagcgagcgcgaggttgccgacgcggcgcaactggcaagcctcaccgacgagacgccggagggccgcagcatcgtggtgctggcgaaggagctgttcgacatccgcgcccgcgtgctggaagggtcgggcatgacgaccatcccgttcacggcgcagacgcgcatgagcggcgtggacttcgagggccacgagattcggaagggggcggccgatgccgtcaagagttatgtggagtcgtgcggcggcacgtacagcgctcagtgcgccgcggcggttgagcatgtctcgcgcgcaggcggcactccgctgcttgttgctcgcgatcatcgtattctgggcgtcgtctatctgaaggacatcgtcaagcatggcatcaaggagaatttcgccgacttgcgcacgatgggcatcaaaaccgtcatgatcacgggcgacaacccgctgacggccgccgccatcgccgccgaggccggcgtggacgatttcatcgccgaggccacgcccgagacgaagcttgccgccatccggcagtaccaggccgagggacacatggtggccatgacgggcgacggcacgaacgacgcgccggcgctcgcgcaggccgacgtggccgtggccatgaacagcggcacccaggcggcgaaagaggccggcaacatggtggacctcgattccagccccacgaagctcatcgacatcgtgcgcatcggcaagcagctgctcatgacgcgcggcagcctgaccacgttctccatcgccaacgacgtggcgaagtacttcgccatcatcccggcgttgttcgtgccgttgtaccccgcgctcgaggcgctcaacatcatgcgcctgaccagccccaccaccgccatcttggcggccgtcatatacaacgcgctcatcatcgtggcgctcatcccgttggctcttaaaggcgcgaagtaccgcgaggccacgtcccagagcctgctcaagcgcaacctggccgtgtacggcctgggcggcatcgtcttgccgttcgccgccatcaaactgctggacatgggcctgacggcgctgggcgtcgcgtaggaaggaaaggatccatcatgacgttcaaattgggaaaccaagcgaagacctggggaagtgcggcgttgttcttcctcgtcaccacggtgctgtgcggcgtgatctacacggcggcgtgcacgggtttggcgcagcttttctttccgcaccaggcgaacggctccatcatcgaagtcgacggaacgaagtacggaagcgagctggtgggccagcggttcaccgacgagaagcacctttggggccgcgccatgaaccccagcacgggcacgttcaccgatgccgagggaaacgacgtgctgtggtacgccccgtccaatctcagccctgcgggcgacgagttcgcgacggcggtgcaggatcgcgtcgagcagatccgcgcggctcatcccgagatggggaacaagcccatccccagcgacctcgtgacgaactccggcagcgggttcgatccgcacatctcgccggctgccgccgaataccaggtggaccgtttggcgaggacaaccggcaagagcgcgtccgagatccgcgacatcatcaagcaatgcaccgagcagccccagttcggttttctgggggatgcgcgcgtgaacgtgctgaaagtgaacctgatgctcgacggcgtgctatgatggcggcaccgatacgactgcgagtgtgattatggactacgaagcaaggcgcgaccccgatgcgatcctgcggcaaatcgtcgaggaggaggctgccgagggcgatacgcgcggcaagctcaagatattcttcggctatgcggcgggcgtgggtaagacctacgccatgctcgaggaggcccacgccgtgctggaaaaggggttcgacgtggtcgtcggttacgtcgaaccccacacgcgggccgatacgatggcgcttgtcgacggactggagcagatctccccatcgacggttcagcatagaggcatctctctgcgcgagttcgacctggacgccgtgctggcgcgccatccccagatcgtgctggtggacgaattggcccacacgaacgccccgggttgtcggcatcggaagcgctaccaggacgtcgaggagctgctgcgcgcaggcatcaacgtgttcaccaccgtgaacgtccagcacctcgaagggctcaatgacaagatcgccgccatcacgcacgtgagcgtagccgagcgcattcccgaccgtatcttcgaccaggctgcatcggtcgagctcgtcgatatcgagccagacgatctgatcgagcgcttggaggcaggaaagatataccttcccgatcgcgcccgcacggcgctcggcaacttcttctcccggaagaacctggcggcgttgcgcgagatcgcgctgcgccgcatggccgatcggctgacgcgcaaggccgaatgcaccgaggcgggcgcgcgcgtggaggccggcgaggacgtgctggtgtacgtaacgcacaatacgggcaacgtgaaagccatccgggccgctgcgaatatggcggagtcctaccatggggcgctcactgcggtggtggtcgagtcgtcgcagagcaagaagttcgattccgaccagcgcggacgactgcgcgccaacatcgatctggccgaagagctgggtgcgcacgtagtcacgctgttcggtgacgatatagcccagcagctggcgcagtacgcggtgacggccggcgcgactcatatcgtggtgggcaacgccacgggtggcctgtcggtgcgttccctgctgcgcgagagcctggtgagccggctgatgaagctcgcgcatggggccgtggtcgacgtcgtgccgacgaaggacttgcctgcgcaatatggccggctgtccgaagccacagggtttcgcctgacaggcgctgacgtttggcgtgcgctcgcgtcggtcgccatcgccacggctatcggactggccatctattcccttgggttggccggttccgtcgtgctcatgctctacctcatcgtggctctgctcatcgctacgcgcgccgacggcttcttctatgcgctgttcgtgtcgatgggcagcgtgtttgcatacaacttctttttcaccatcccgcggttcacgcttcatgcggtagggctgaactatcccatcatcttcgcgtttctgctcgtgggcacattcgctgcatcatcgctggccatccgcatgaagcgtcaggccgagagcaccgcgcgccgtgcgtatcgcatggaagtgctgctggaatccagccgaaagctgcagggtgcccgcaatgcggacgagtgcttccggcttgcggccgagcaggtcatcaagctgctgaaccgcccggtggtcatgtaccgcttgggcatcgacggtcgtcttgcgaagcccgtggtgcacgacgtccctgggacgctgggcggcgatgccggtgcctgcgcgctcgcatcgcccgaagagtccgcggtcgccgcatggtctgcggcgaacaacgagcgtgccggagccactaccgacacgctcgccgattcgcaatgcctgtacctgcccatccattcgaaggacgctgtgttcggagtagccggcatcgcgatggacgacatcgacggggaggaggacttcggggctttcgagaagaaccttttgctggccatcctggacgaatgcggccagactaccgagcagatcgtcttcgccgaggataggcggcgcatggagatgcgcatggagaaggaaacgctgcgggcgaatctgctgcgcaccatctcgcacgacctgcgtacaccgttgaccagcatttcgggcgatgcggacatgcttttgcacgatcgcggcgcgctgtcggcgcagcagaaggagcacttgtaccgcgacatccacgacgacgcgtgctggctggtcacgctcgtggagaacctgctgtccatcacgcgtatcgacaacggcacgctgcagctggccgaacagcccgagctggtggcggatgtcgtgagggaggctctccagcacgtcgatcgccgcgctgggagacgccgcgtcgacgtggagttggaagacgagctgcttatggccgacatggatgcgcgtttgatcgtgcaggtgatcatcaacctggtgaacaacgcggtatcgtacacgccggccgacgggcgcatagtcgtgagcgcgcggcgggtcgtggagcacgatcgtccgcgggtgcgcatcgcggttgccgacgaaggcccgggcatttccgaggaagatcgcaagcatatcttcgacatgttctacaatggctccaccggccggcggggcggaaagagcggcgatttcaagcgcggcatgggcttgggcttgtcgctatgccgttccatcgtcgaagtgcacggcggcactttagacgtgcgcaatgtgaacccgcacggtagcgagttctcgttcacgctggcagcggtggaggccggggacgtggtggcgcgatcgacggaggaagcgcgtggctgatgggtaccggatactggtggtagaggacgacgcggcggtgcggcgccttgtgacgaccacgctcgatttgcacggatatgcgtaccgggaagcccgtacggcgtcgcaggcgctgctcgaactgtcgtcgcagccgcccgatctggctatcctcgatctcggtttgcccgacggagacggggtggaggtcattcgcacgctgcgcgggtggtcgtcgctgccggtcatcgtgctatcggcgcgtttggaggatgccgacaaagtggaagcgctcgatgccggagcggacgattacctggtgaaaccgttctcagtcgaggagctgctggctcgcgtgcgcgtggcgctgcgccgattggatcgggagcgagcgatgaagggggatgcggacgaagccgtctaccgcaacgggagcctccgcatcgattatgcggcaggcagcgtgtggcgcgacgacgaggagattcacctcacgccgttcgaatacaagctcctctgtctgctggcgcgcaataccggcaaggtactcacgcacaactacctgctcaaagaggtgtggggcaccatactcgcgtccgatcgctcgtcgcttcgcgtgttcatggccacgcttcgcaagaagatcgagcccgatcctgcgaaccctcgctacatccaaacccacgtaggggtagggtatcgcatgatgcgcgtggaataggagcgcttcgagcttacgaccccccccccttctctcttcttcttcttcttcttcttcttcttctttcggtcgatcgtcgaatagggttttaa

SEQ ID NO: 8837 - DNA, 3593 bp, Unknown
  gut microbiota DNA sequence
gtttcctttcgcttgcagcgtcccctgttgggcgagtgctgccagttcgcgctgagcggttctgcgggcgactcccttgcgctcgagatcggaaaccgttgcatatccacgatccaaggcgatttgtcttgcaagagaaagcatatcgtgaggacgctccgcgacgggttcgacgttctcgacgtgcagggggaccgtcgttgtgaaaatcgccccctcgttgagaaccggttccgccccagagtagactttggtgtatttgtacaggttccgtgtgccggaacccagctcttccgccagcccgatgttgttgaagaatgcgcctatcagggggttctttgggataggattgaaatcgctcagcgtgattcgacccatgaaaggggcgcgacttgcattttccgtgcgcaacctttcattgtcgatgatgagttttgcaggaaatgggctcgtgtattcgcgatgcacgagcatgttcgagattacctcgcgaacgatgatgtcgcgagggctcacgcgaacggagccttcaaggtggaaccgatccggcagatgtttcgtgcaaaagccggtgagttggtcgaaggcttctatcagattgcttgtgacgatgacgcgatcgtcgtatcgatcctggtcgcttatcctgacaacggcatccgttttataggaagggcacagcgaccgaatgacgtcggcatcgcccaacaacaagacggctgcaaggttgaatcctttttcgcccgtgacgaagttcttgccgaaaagccctgccgaatgcaagaggtcttcgtcggtcatgccgttccaagggtgtcgggttcgttttcccgtggccatcgttcggatggcgggaagcaaatccatgcgcaaatcacttgcttccacatacgggaacacccgctgctcggtgtagatgttctgcttgcgtacgcacaaagccgtaagctggctttcggtgctcacgacaacgtcggcgtcctcgatgcgctcgaatatcctccctttgtatcggtggatcgacggactgggaggaatccatatccgaacaagcgacgagccctcgaaaacgatgtcttcgaactcaagggtggccggcgggtcgaaaacgttcggattgtgaaccacgttggtcacgttccttttcacgggcacgatattctcttcggggattccgattgcgtttccatcgtcttctactcccaggtagatgctgcccccgaagctgttcgcgaaagagcagatggtctcgaacgtgtctcttccaaccgagtttccgcagcgtttgaactcgatggagggggtctctccggttgcgaggtcgctgcgcaattctgcttcgtccatgggcgccctttccgagtgattcagaggaaactcagtataacaacatttggcgcgatttggcgcgatttggcgcgatttggcgcgatttggcgcgatttggcgcttttcgatttctcgattccgactccccgggtggcgcataatcctcggaagaggctcctcgcccccggagccgcgccagcttcctaccaaaacacgttctgatgacggttttggtagagaaaatcccctgcggacatccgcttaggtttctcgaactgggaaaacgttccgcggatcgggtgaaagggaacccgatccggtggtttccctaccaaaaccgtcatcagaacgtgttttcgccaagggaagggtcggcgtgcgggaacgccccccccgtctgcgtcgggaacgcgacggcgcggatctttccagccgatgccttcaccggaggcgaggtcgtagaacgcgatccggcattatgcgttaaacggggagtcggattctcgggttttcgtcatgtgcatggtgatgccgcccattaaacgggacgaggagcttgtcccgccaagcgaatttgacgaaatgtcgggaatatttgcttcaatgcaagcccctgatcagcgagaatggtacccgatggaatcgctgggaaagggatagcgcatggtgggcgagaagcttatgaagctgcggaagaagcgggggatgagccagcaggaggtggcgtccgcgctgggcgtgacgcggcagaccgtttccaattgggaatgcgatcagggtgctccgtcgctcgacaaggcggccgatctcgcccgtctgtacggcgtgagcctggacgatctggtggccgacgaggtggaagtggtagtggccgatcccgatcaggccgctggaaagccgcgtgacctgcatgtgctccgccatctggaaggcaagcaatgccgcatctgctatcggtatacgcatgatgaaatcgacatcttcaaagcggtttcgatgcccgagaaagcgcgcgtgctcgatgtcagcgatggttggctgcgcgtcgaacacgagctgggcggcggtgcgccctggtcgaagaaggaaaccgcagtgcgccttatcgacatcgatatcatcgacagcgtactggcttggccgaacgaggatgatagtccgcatgcggcaacgtgcgaggaggcgatctcgtgacggagcttttgctggttatcgtcatcgtgcagctcggcttcgttttgagcaggctgcccaagaaaaacgattcctcgaaagagagcgtatccgatcgcttcgagcgcgagcagaaggggaacgccgtgttcgtcgcctcccagcttcgcaagttgcacggttgcgcgtgtgcgttcactctctgggcgccagggcgcatttttgctgacgagtctccgtcaacgcaaggacgcggtatcatcctcgactccgacgacgaatgggtgctcatcgagtgtcccgccccgttcggcgcgaagggcgccacgcagcgcctgttccgcatagccgacatcaagtccgtcgcagagatcgtcggttaaagtcacgcagtgttcctccgcgagcagagccgtgaaggaacactgcgtccgatcactcgctcagccagtgtgccgtttgcgccgaacgggcgaagtggatatcgtgcagcacgaccagctcgccgtcgaatgcgtacaataccacgtggggaatcgaacggaattcgaagacgaagcgtcgccttgccttgcccgtgcgaggataggcttccgggaacgtgcgcacattgacgagcgcggcgacaagacttgttttcaagccttggtcgggatcttcgatccctgaaaagtacaagttctgcgttatccgccgaatgttcacatcgaagcgagcggtggttcttactgggaacatggccgcccccaatcttctcggggatattcacgcttaaggcgctcgacttcctcgtgtgcatgttcgaagacctcgtcgagggtgtacgtaacccccgtgcgcttcatctcggcttccgaggcgtctacaatcgcgtcgcagtacgcatcatatgcacgttgctggtcgaccgacatcccaagggacgtcaaaaacggatcaggttgaaattccgccatgttctcacctccttcgattacggcaagcggtacgcgttcatgcatgatacgtgccatatatcctcctaccttgcgggcgcgagttcctaagtcggccccctcgttccctggctgcgaggatcttgcaagcgttgc

SEQ ID NO: 8838 - DNA, 3941 bp, Unknown
  gut microbiota DNA sequence
atcgcagtacgcatcatatgcacgttgctggtcgaccgacatcccaagggacgttaaaaacggatcaggttgaaattctgccatgttctcacctccttcgattacggcaagcggtacgcgttcatgcatgatacgtgccatatatcttcctaccttgcgggcgcgagttcctaagtcggccccctcgttccctggctgcgaggatcttgcaagcgttgcgtcaggcggaaggggaacaccttcgcctcttcggactgcgcttatgcgcagcgcttgtactggctcgtgtacgagttcattttatcaagcagaacatttgtttgtaagtcttgtttccgaggtggaatcctgatatgggagcctgcggcgattccgcgtctacgccttcggctttttcgccacgtggacggcggcgatgccgccggtatagtttttccaggtcacatcctcgaacccggctttctccatcatggctgccaggccttgctggttagggaaggccttgatggagcgcgacaggtacacgaagccctcgcggtcgcccgtgatcaggccgccccagaaggggatgaggtgcttgaggtagaagccgtacagcgcgcgccatacggcgttcggcggcgttgagaactccaggcacaccagcgctccgccgggcttgagcacgcggaacatttcggaaagcgcctggtcgcgctcgggcatgttgcggatgccgtacgccatggtgatggcgtcgtacgactcgtcggcataggggatatgctgtgcatccaccacctcgaagtcaaccggtacgccctcggccttgccgtccgcatagtgcatgcgggccacgtccagcatctcgtccacgagatcggtgcactggatatggcgcggatgcttcgcgcgcgccacggtgaacgtcacatcgccggtgccgcctgcgatgtccagcacgtcggcgttctcgtcgatgggcgcctggcgcatcatgcccgccagccatgtcttgtacgcgccgaagctggagacggcgttgaaccgctcgtattttttcgcgatggtggagaagatgtctttcacgcgttcggacgagatgtccgcgggcgcttccttgccggtagcggtatcgatgctcacaggtgatgctccgttgatcaggaaagattggaagggtgcgcctctcgggcgcgtctttattatacaggaaaggaacctggcgagaacaggctccttttttccgcagggcgagcgtataatctcccgagcccacgaaggagattgaggagcacctttggaacacgagcatgaaactcccgaactcgatcaggaattcgaccccgtattcgaagaagagcagcagcatctgaccgaaacctatgccaagctgcagaccatgggtcgcgatctgctggcgaagatggaggctaacagcaaagacgcggccgccgacaagctggccatggtcgacgagctgtcggtgaacctggccagctacgccgacgccatggaaacctatgccgacttcgccacggtgaaccgcgtcatcgacgcgtacaacctggcgcaaaccgtcgatgcggaaaagctgaccagcatccaggtgctgctcaagcaaccttatttcgccaaggtggttctgcagatgaagcctgggcaggagccgaaggagctctacatcggcaccgccggcatcgccgacgagaactaccgccgccttgtggtggactggcgctcgccggtggccgaggtgtactacaaccaggagaacggccccacgtcctacgaggccaacggccgcaccatccgcgtcgatctcaagctgcgccgccagttcgacatcgaagccgatcggctgaacgcctacttcgacacgaccgtcgccatccaagacgccatgctgctggcgtcgctgtcgaagcgccgcacggcgcagatgcaggccatcaccgccaccatccagaaagagcagaaccaggtcatccgccacgcggacgcgcccaccttgctggtgaacggcatcgccggcagcgggaagacgtcggtgctcatgcagcgcatcgcgtatctgttctaccagcagcgcgagagcctcgatcccagcgaggtgttcctcatcacgccgaacccggtgttcgagcgctacattgaaggcgtgcttcccgacctgggggagcgcaatcccgaatgcctcacgtgggatgagttcctgcgaggcctcatgccgcccgaacggtccggcggacaggcgcctgcgtcgctggacgcgttcgagcgcatcgacgaagcgtgcgcgacgttctcgttcgaccagcatgatttcaaggagatccactgcaacggcgagcgcctggtcacggttggacaaatcctccaagtagcggccaagttcagaaacatccctgctggcccccacctggtcacgctcatgcgcgaggagctgctgcggcgtctggacagccgcttgaagcagctggcggcctcggacaaagtgctcgacgagatctcgatgcttaccctcgaccagcaggtggagctgttccgcgaaacgttcgacccgcacgacgagagccaggtgcgcgaagtggcgcagcagtacgtcgatttgcggttcgccgacgcgcgccgagccgtcgagaacgacgactggctgcgcatcgaccgcatcggcatgcgccttctgggcgtggagaacctcgttccggtcgagtggctgtacctcaagatggcgctgacgggcctcggcaacgcagatgcgaagtacgtgatgatcgacgaggtgcaggactacacggtggcccagctggccgtgctggcgcgctacttcaagcgcgcgcacttcctgttgctgggcgatcagaaccaggccatcgctccgggcaccgccacgttcgaccaggtgcgcgcgctgttccgggaggtgcgcggcccgctggaggagtgccgcctcatgaccagctaccgctccacccccgagatcacgcagctgttcgccagcctgctggacgatgacgagcgcctgagcatctcgtccatccagcgcgccgacaccgcgccggagatcatcgcgtgcgcaagcgagcaggattacgaccgtgagttgcggcgcgttcttgctcaagcggtcggcgacgacggcctcactgccgtggtggtgccgcagaagcatcaggccaagctgctgcggaagaagctgggggacgcggctcccgcgctcatcgacgcggccgccacgctgcccgccagcggcgtagtgctggtgccactcaagctggcgaagggactggagttcgaccacgtcatcgtccccgacgccagcgagcgcgcgtttcccgacgacccgctgtcgcgccgtcgcctgtacaccaccgtttcccgtgccacccgcggcatcacgttgctcgcgcaaggcgagattaccccgctgctggccgcgcgggcgtagcgggggcggcggcaatgcgcgagcaagcgactccgcccatgcgcctgccgattcccctgtgtgctttccccgaagagcgggtcgggaatgctatcatactcatcatgcgattattctaagagattggcgggacagacatgcttttgtgcgcacaatacattcttcccatcacgtccgagccgtttcagaagggcgcggtgcttgtccgcgacaacgtcatccgcgacatcggcacggccgagatgctcaagctgcgctatcccgacgaagaagtggtcgatttcggccaggcggctatcatgccgggcctcgtcgacctgcacacgcacctcgagaactccgtgatgcgcggtatcgtgcacgatgtgccctataccacgtgggtcacgtccatgttggagaaaagcgcaaagatggacgtgagcgactggtacgactccgctatcctcgggggtcttgaagcgctgtccagcggcattacctgcgtcgccgatatcactgccaccggcgc

SEQ ID NO: 8839 - DNA, 527 bp, Unknown
  gut microbiota DNA sequence
tccatgttctcgaaggtgtccgaattcgctcggcgcgagaacgtgcctgtcgccatgcacgtggccggcaaccgcgaagagtacaacttcatcaagtacggctcgtcgccgttctcggtgcacacgatggaccagaagcgcggcttcgtggagatcccgccgtggctgcccaccggcacgacgcccgtgcgctacgctttgaactggggcgcgttcgagtccgacaacgtgctggccatccactgcgtgcacgtggatgacaaagacgtgcagaagctgaaagagtacgatgtagccgtggccgtgtgcccgcgctgcaacgcgcagctgggcatgggcgtggctcccatcaacgagttcatgcgcgccggcctgcgcttgggcatgggaaccgactcgccggccgcaaccgactccaccgacatgctcaccgagatgcgcatcggtatgctggtgcagcgcgcggtgaacgtgggcgagttcctggattcggccaccatgctggagatggccaccatcggcggcgc

SEQ ID NO: 8840 - DNA, 3254 bp, Unknown
  gut microbiota DNA sequence
accatggtgaacggcaccgcgctgtacgagaagaacaagtggaacgtgggcgtcgaggttgccaggaacatcgcccgcatcatcgaaatccgcggtaagttgaggttgtaatctatgggaacgaaccagaagttaacggcacagcagaaaagcgagcgcatccgcgctgctcaggagcgagagcgcaaggaaaaggagcgtcgcgaggcggccgcgcgcacgaagaagatattcaccatcgtcgtgtgcgtcatcctcgtgctggctttgggcatccccaccgtagccctcgccttcctggggaacggctcctagcttccgcccgatgacgaagggcgttcgcagcgtctcccgcttgcggacgcccttcgcgtttcccgtgtgagaatccgtcatgctttttctgtagagctatctcgttcgggtcgacggggagtgtttgtgatactatgaatcgttgccgcgcacggggcgcggagtcgagagtagagtaaccgcacaaaggggtttgctttgtttggtataggtggattcgagctattcctcattctgctgttcgggtttttgatcttcggacccgacaagctgcctgctatggctaagacgctgggcaaggctatcaacaagttcagaagcgcacaggaagaaatgaacaaggtgctcaagacggaggtctacgaccctacgtccgatgagccgttcaagaacccgctggaggcgctgtcgaaggtcggcgagatcggcaaagacgacaaggaggagaagaccgagagcttctccgagcgcaaggctcgctacgacaaggagcgcgcagccaagaaggccgccgaagccgagaaggccggtgctgccgaaacgactgcgacgacggccgcagccgctacggcgaccgccgctgctgccaagccggtggccaagcccgacggatcgttcgtcaagccggaagagccgaaggctgcggagactgcgaagccggccgccaagcctgagtcgaccgccgcgaagccgaagccgtcgcccgacgagctgtacggcacgaaacccgccgctaagaagccggctaccaagccgacggctgcgaaagccgccgccgcttccaagagcgctgcgaagcctacggccaagaccgatgccgagaaggctgccgcacgctctgccgcggcgaagaaggccgctgcaacgcgcgcggcgaacaggaaggcagccgccgaagcggccgccaaggccaacaagaacgagaagggggagtaagccatgcccgtcggaccggcacgaatgcccctattcgatcacctgggcgagctccgcatgcgcctggtgcgcatcatcgcttgccttgccatcgccgtagtcgtgttctacatggcaacgcctattatcagccagttcttgcttcagccgatttctccgtatctgccggagggtaccgatggtttgttggcgggcacgatcgtgctcgatccgttcgaggcgtttgcgactcgtttcaagatatcgatctggacctcggtcgttgcttgttctcccgttatcctatggcagattcttgcgttctttctgccggcgctcaagccgagcgagcgcaagtggttcgttcccacgtttgccgcggccgtgagcttgtttatattcggcacgatcttctgctatctcattattctcgatcccgcgtttcagtggctgacggatcaggctgcaggtctgggcgaagtggtgccgcgagcgtcgacctatatcgacatgatcatcaagttcgagctgggcttcggctttgcgttcgagctgccgctcatcgtgttctacctcgtcatcttcgacatcgtcccgtacaagaagctgcgcggcagctggcgcacggtgtacgtcgtgctcatggtcgtctcggctatggccacgccggacgcttcgccgatcaccatgctgctcatgttcgcggcgttgctggtgctgtacgaaggcagcttgctcatcgcccgcgtcgtcctgcgaaaccgcatcaagaagcagaacgaggagcttgacgcggaagaggcggaggaacgcgctgccgagctcggcatcaagaaggccaagaaatcgaagtagccttattctgatggtgaaggcccgtcgagatcgacgggcctttttgctttttctaggagtcattcgcgccgttgacgcatcgataccttcgcgcgaataactcttgggctactataagcatgaacgatagaggcggaacgggcacgaaggagcaccatgcacgaattgggaatcatgacgggcgtgatggatgcagtgacgacatcggcgcaacaggccggtgcgacgcgcgtgctgaaggtgagcctgtcggttggagagatgaccgaggccatcgaagacgcgctcatgttcgcgttcgaggctctgtcggaaggcacgctttgcgaagacgccgagcttcaaatcaccatggtgaagccgaaaagccgctgcttggaatgcggtgccgaatacgagcacgatcgtttccatatgctgtgcccggaatgcggcagcttcgccaccgagctcatcgccggtcgcgaactgcaaatcgacagcatcgaagtggacattcccgacgatgacgaggagaacgaggactaaccatgcaaatcgatctgaagcagcctatcctccagaagaacgatgcgatcgcctccgaactgcgcgagcgtttcgccgagaaccacgtgttcgtgctcgacctgcttgccagccccggttcgggcaagacgtccaccatcctggccaccatcgacgcgctgcgcgacgagttcaacatcgccgttatcgagggcgacatcgccagcagcgtggatgccgagaagatcaaggcgcagggcatcgccgccgtgcaaatcaacacgggtggagcgtgccacctggaaagcgccatgatcaagcgcgcggtggacgtgctggacctcgagcgcctcgacctcatcatcgtggaaaacgtgggcaacctcgtgtgccccaccgacttcgatttgggcgagaacgccaaggtgatgatcttgtcggtacctgagggcgacgacaagccgctcaagtaccccggcgtgttccaggtcgccgaggccgtggtgctcaacaaggtggacaccatgcccgtgttcaacttcgaccgcgaggccttcgaggcggcggttacgcagctcaacccgcaggcccccatcttccccatcgccgccacgaaaggcgacggcgtggacgcctgggccgagtggctggcgaaccgcatt

SEQ ID NO: 8841 - DNA, 693 bp, Unknown
  gut microbiota DNA sequence
gcctgagggcgacgacaagccgctcaagtaccccggcgtgttccaggtcgccgaggccgtggtgctcaataaggtggacaccatgcccgtgttcaacttcgaccgcgaggccttcgaggcggcggtcacgcagctcaacccgcaggctcccatcttccccatcgccgccacgaaaggcgacggcgtggacgcctgggccgagtggctggcgaaccgcattcgcgccgtttagttccgacggcttgtcagccgtcggaacgaagtcgacgctgcgaagcgccaatgcgcccgatctcgccccttttccgctttccctcacgtgcgaaagcacgcttccctaaagggacttgcgcttcgcgcggcgcagctggcgaaacgggcgatctcgggcaccttggcgcttctcgctgatattggtggatctgcgagatgatgatggaggaagagggagtcgtggagaatagcgaacggtatcgtctctgcgtgaacgcgctcaaaggcttcatggacgacgctggattctccgacgtcgtcatcgggttgtcgggcggcatggactcgagtttggtcgccgtgatgtgtgcggacgcgctgggcgcggatcgcgtgcacggcgtgctcatgccgggcccgtactccaccgaccactcggtggacgatgcgctcgatctggctcgcaacctcggaatccgg

SEQ ID NO: 8842 - DNA, 887 bp, Unknown
  gut microbiota DNA sequence
gcgatctcgggcaccttggcgcttctcgctgacattggtggatctgcgagatgatgatggaggaagagggagtcgtggagaatagcgaacggtatcgtctctgcgtgaacgcgctcaaaggcttcatggacgacgctgggttctccgacgtcgtcatcgggttgtcgggcggcatggactcgagtttggtcgccgtgatgtgcgcggacgcgctgggcgcggatcgcgtgcacggcgtgcttatgccgggcccgtactccaccgaccactcggtggacgatgcgctcgatctggctcgcaacctcggaatccggacgcgcaccgtctccatcgcggaaccgtatcgggcgttcgaggccgcgcttgccgaggcgtgcggcggcaagctctcgggtctggcggccgagaacacgcaagcgcgctgccgcatggtgtgcctcatggcgctgtcgaacgcatacggctggatgctggtgaacacgggcaacaagagcgaggccatgatggggtattccacgctgtacggcgacacggccggcgcgttcgctcctatcggcggcctgtacaaaaccgacgtgttcgccgtcgcccgctggcgtaatcgacaagcggagatcgccggcgaggttccgcctattcccgagcatgtgttcgtaaagccgcccagcgccgagctctcacccgaccaggaagacgagaagagcatgggcatcgattacccgacgctcgatcgattgttgaaagcgcatgtggatcgcggcttggatgccgcagcgttggtgtccgaagggttcgatgcggccgacgtcgagcgcgtgctgcgaacggtgcgcgcgaccgcattcaagcgagctttggagcccccgtgccccgacgccacgttctac

SEQ ID NO: 8843 - DNA, 426 bp, Unknown
  gut microbiota DNA sequence
ctggtgtccgaagggttcgatgcggccgacgtcgagcgtgtgctgcgaacggtgcgcgcgaccgcattcaagcgagctttggagcccccgtgccccgacgccacgttctacgagtagcgtccccttggcacctcccttggcacgctgggctcgtttcgcagtctccattgcgcagattgcgtgacggcatgtcggcgcctcacgacaaaacgttttcgcgtcactatactctgaggccgttcgtttccgtttccgtcgcaaaggaggtcgtccgtcgtggagcgtcgttcgttcttcaaacttgcaggcttgtccgctgcggtattggccgtgggcggaaccctcggcgcatgtgaggcgggaaagctgccggacaatcctctggcggcgacgaacaaagccaacgaaaccgctggtcaatcaagc

SEQ ID NO: 8844 - DNA, 319 bp, Unknown
  gut microbiota DNA sequence
gctggccgtgggcggaaccctcggcgcatgcgaggcgggaaagctgccggacaatcctctggcggcgacgaacaaagccaacgaaaccgctggtcaatcaagcgtaatggggcagccgcccatcgccttcgatgctgacgtggatgtgttgatcgtgggcagcggggtagcggggttgtctgccgccatggatccgctcgaggcgaagcgctccgttatggtggtcgagaaacttgatctgttgggcggcgaaagctacgagtcgaacggcgttatgcgcatcgccggcacgactgcgcagcaggatgcgggcgtgaat

SEQ ID NO: 8845 - DNA, 487 bp, Unknown
  gut microbiota DNA sequence
ggcggggttgtctgccgccatggacccgctcgaggcgaagcgttccgttatggtggtcgagaaacttgatctgttgggtggcgaaagctacgagtcgaacggcgttatgcgcatcgccggcacgactgcgcagcaggatgcgggcgtgaatgcgacggttgacgaggcatggggggcgcgcaaaaaggagttgagcgctgcaggcgacgatgatcttgatttcgcaaagaccctgttcttcgcggccaccgaatgggcgaatcgcctggcatccgattacggggcgcagttcgccgatccgaaaaccttcgtggacggcaaggtgaatgcggctatcatgctgcccaagaacggcctcggtgacatgcagagcattatgatgccgctgcgagacgccctcacggcgaaaggcgctacgttttctacgggccatcgggcggtcgcgttcattttggatgaggacggcgcggcgtgcgggatgcgtttc

SEQ ID NO: 8846 - DNA, 5954 bp, Unknown
  gut microbiota DNA sequence
gaagaacggcctcggtgacatgcagagcattatgatgccgctgcgagacgccctcacggcgaaaggcgccacgttttctacgggccatcgggcggtcgcgttcattttggatgaggacggcgcggcgtgcgggatgcgtttctatgcagggtcgggcgcatcggtgctcgacgtgcgggctcggcgcatcgttgtcgcgacaggcgggttcgccagcagccagccgctcgtgcatgagcatacgcccgattatgagcgcgtggggtgctacaccgtcgcctccatgggcgagggtcagcagctgtgcgcgcttttgggcggtcagctggtgaacatggacaaggctgcgccgcttaccggcagcttgccgcaggcgaccgcctggggcttgttcggccccacggtcatcgtggatgcgctggggaagcgtttcgcgcgcgaggacgatgcgaacgctgcggcgggcgcctgcttctcggaggagcgcggctactggtggacggtgttcggaaagcagctgaccgagagcagccaatcgcgcagcgttgcggaagtggccagcaagaacgcaaagcgtcttatcgggccgttcgacgacctggacgagcttgccgagggcatgggcgtttcgccggacgtgctgaacgccacgttcgaccgctacaacggcttcgtgaaagacggcaaggacggcgatttcgggcgcacgttgttcttggaggagttggaaggcccctactacgcgcttaaacagctgccgcagcggtacagatccaacggcggcgtgaaaacaaatcagtccggtcaggtgctcagcgtcgtcggcgccgtcattcccaacgtctactgttgcggtgcggcagctgcgtcaagcatcggaggcctcgcgtcgaacggcgcgttcggcatgctggcgggcaaagcggtcgccgccgcactcgacgacgaagatgctgcgaagcaagcttctgactaaagagacgttaaccctgtccctctttctcgttttgactaatgtcccagggtgtcgctttgcgttgccgacgggttgccaaggtgcaaagcggcggataccgcgtctctatagactcatgacagaatgtccccatacctactaaagccgcatgcggcgcgcatccgtgctgcttgagaggccgtagacgcggatggaaggacttctatgttcggggaaagcgaggatgaacgtggtgcgggcatatcccgtcgcgcgttcctggcgggcgcgtgcgttaccggagctgcggcgatggtgggcggcctgaacgcctgcgcgccgccgcaagacgccggccccggcggcgccggcggaaccggttctggtgcgaacgggggcgcggtgcccgtcagcaaggcgccaagcaaggtggacaagacctacgacgccgatctgcttatcgtgggtgcaggcggcagcggcttggcgtgcgccgtgcaggcggctcttaacggaacgaatctcatccttgtggacaagagcaaccaggtgggcggcaatgcgaacttcgtcgagggcatgttcgccgtcaattccacgttgcagctggagcaaggcatcgacatgcagccagccgagataatggaagccgagctctcgcgcggtcagcatcgccaaaacggcgatgtatggctcgattttgtgagcaagtcggccgacaacatcacctggtgcatagagcagggcgtcatgtactccggcaaggtggacgactatcgcgtcggcctattccccacgttccactggttcaaagacggaaaggcggctgtgggatacgttgagccgatgaaggcgcggctcgaagagctgagcgtgcagctgcatctcaaaaccgcagtgaacggcctcgtcatgaagaacggcagggtgatcggcgcctacgcagacggaggcgagggcgtggtgcggtacagcgcgaaggcggtggtgctcgcaaccggcggcttcggcggcaacgaggagatcgtcgccgagcagggttggaacaccgatggcatgcgcatcgtgggctcgccgaacgctgcaggagacggctatcgcatagccatggacaacggcgcatgcagcttcatggccgattcggctcagtccatcctgtacgctatcgaggcttttcctcccatcgacttccacgatgcggctgaaaacccgctctacggctatttcggcatcgcctcgggcggccccgtgctgtgggtgaacgaggcgtgccggcgctacacgcgcgaggacctcgcgaacgacaacctcgcgttgcagtgccttccgggtaagggcaacaaggggaattacgtggttttcgaccaggccatcttcgatcggtttttcggtaaaaacgacgatgcgaagaaagccttctacgacgcgatcaaggctaacggtggaggcagcatctaccagagcgattccttggccgatctcgccggaagattcaacctcgacgccgatgcgctcaaggctgcggtcgattgctacaatgaactgtgcggagagggggctgacagcgacttcggcaaggcggccggcctcatggtgcccatcgagacgcctccgttctacctggcaaaactgtcgtacaactacttcttctcggttggcggcatcaccaccgacgggcggcatcgcgtgctggacgggcgccgcaaccctatcgagggtctctatgccatcggcaacgacggcaatatgctgtaccgcaacgtgtacaccgtcaacatgccgggcgtcgcgttcggccatcaagtgaacagcggccgcgaggcggcgaatgccgtgttggaatatctggatcggtagagaatgcgccggaaggctcccggagcgggagccttccggcgttgagggaggggacaggatgctttacgccttcagcgcttcgactacggctttgccggagatgaggccgctgcccgcgttcggagagagatcgctgccgctatcggccacggtcgaaccggcgcagtagacgttggggatgggattgccgtccttgtccgtcaactggctgtcggtcgtgatcttcatgccgccgtgcgtcttgtagcggtacgggaagtgcttcatcgcgtaatacggtgcggaaagcgactgcaggaacagcttcttgccgaactcggtgtcctcgcctgcggccaccatggcgtcgtaggtctcgaacgtggccttcagcgtgtcggccggaacatccatcgctgccgccagctcatcgagcgagttgcacgggcccacgaggcggtcggcgttgctcttcatgttcatctcgacgttccatttctggctgctgttgatggcttgatcgtcgaagatggtccaccagaagcccaagcccaactcgacggccttgtcgggcgagtcgtggctctgatcctccttgatgaagcggcggccctgcggggttacttggacctgcggcgagaagtagccccacaccgtcacctgagcgaggtcgctcatgcggttcgcttccatgtccatgtgggtgtacacgccgccgatggccttgcacagctggtggccttcgcccatggagttcacggtcagcggccccaagcgagcctggctgggcaagtacgtggacaccatctcctggttgcaggagaaaccgcccgtggccacgatgatcttctttgcgcggatatcgacggtcttgttgttcttctcgtcgttgaagcgcacgccgatgggcgctccctctccgtccacgatgaagttcgtggcgcgcaggttcagcttgtacgtggcgcctttctgctccaagcccttctgcagcggcgtcagcaccgcctgcatgtcgccgatgccgttgccgggcaacagcatggacgtgggcgcgcccgtgttcatgtagtcggtgatgggttggaacaccgaaccgtagtcggcggccacgcggttcgcccattcggtttggtagacgtagacgttgtgcttgtagtccatgtcgtcggtctcgccctttttctcgagcacgggcaggaacttctcccacatttgctcggggtcgccctcgatgccggcgtctttttgcatttttgatccaacgacgttcatgacgccgcaagcgatgaagctctctccgcccacgcggtcgagcttgtccacgagcatcactttatggccggcttcgaccggatccatggctgccgacatgccggcgatgcccgtgcccagaatgagaacgtcggtttcttcgctgaacgagacgggggcggtgccaaccacctgttcggcctcgccggatccgccggtcgagccgccgttcggcgagcatcctgccagtgcgccgcctgcggcgataaccgcacccgaggcgatggctgccttcaggaaattgcggcgattcattgctgattccatactgttcctccctgttgtcgcatgatggctcctttgcgtcgcggttgagcgacgactggttcaccctacgttcgatctggggaatcgtcaccgtccgtttcggactaaattgctgtggaaggccggaatcctgcatgtttgcttcgtgcgcttccgacgtttccggtatgatgcccctatgagggaaacgggagggaacagacaaaagcagccgtcgcgcgcgtgggctcatcccgctgtatactcagccgtggtcattttgggtttcggattgtatcgcggcgtgaattcgaacgtctacctctccgcatacgcgttcgtgaaggcgcccttcatgttcgtgcccgatctgttcttcaacgtagtggtggcatgttccatcatcgtgtgctcggccgtcgctgtcacccttgcctggacggggcgtctcaaggcgaacaccatgccatacgtgctgccgacggcattgttgttggcggggaacctcgctgcgttgctgggcgtgatcttgtcgctgccgcctgatctagcgctgctggttcccggcttgctgtacggtgcgggcagcgtcatgctgtcgctgttctggatcgaggtgctctcggcgagccggcccagctccatcgtggtgcagattgcgctcggcatgttgctgaacgtggtggtttcctcggtgctatctccgttgcccggagacgtccagatgcgttcgagctgcgttttgctgctcgtctcgggtctgtgcgcgtggtttgtgcgccgtcggttgcgagccgcttcctgcgaggtggaaacgcataacgaacggccgatcgccgaaacggtatccgccgaacctgccgaagcgctttcttcgaaaacttccttgcgggctcgttggggcgcgtatcgcgatgcatttttggagttgggcgactcgctggtggcgtttttcgtgctggaagccgtcatcgggttgctcaacagcttcatgctggcgggatccatcgatttcgagggctcgggagccgtgtcggctgcggccattgtgggcgcaatcgtcgtgttctgcttcatcgtgttcgttgcgcatcgcatccccaaggtgtccacggtatcgcgtgtggtcatgcccgtgctcgcggccatgctggtgttcctgccgtttctcagcgagcgctacaacctggtgttctccatgctgttgctcggcagctactacttcgtcgcgctgctcatcacctatcttatcgccgaggcggcacagacgcgcaaggtatcgccctacgtgctgatgggcgtggccatgggcgtcgcgcgcgtatgcctggccgtgacgctgttgtcggggtacgcggccggggtcgccggcggcggtccgggcgacgaggccgagcatacgatgcgctatctcgtgatcatcgtcgtggtgctgtatgctctgtgcatggcgctcgtgttcttctcgcgcgatcgcaagcgacgacgcgccgaagaggcttctgccgatgcgccgaacgagagcgcggtcggaaccgattcggtttcggtgcccgagatcgactcgacgcttgacgcgtgctgtgcaagcgtcgcccgggaa

SEQ ID NO: 8847 - DNA, 869 bp, Unknown
  gut microbiota DNA sequence
ccgcaagcgacgacgcgccgaagaggcttctgccgatgcgccgaacgagagcgcggttggaaccgattcggtttcggtgcccgagatcgactcgacgcttgacgcgtgctgtgcaagcgtcgcccgggaagggggcttgaccgagcgtgaggccgagatcctcgtctaccttgcacgtggcaggacgaaggcgtacatcgccgacgcgctgttcgtcaccgagaacacggtgcgcagccatgtgcgcaacatctattccaagctcgacgtgcacacgcgccaggaactgcttgaccttctggagcgttgaaaggtcgccatcgggcgaacatacatcggctggggtatggcgcacctcgggcgggtcgcgtagtatggggtcatggatacctttctgatgaacaaccgaccgatgggtcccaaggattgggggttcgatgtcgcggtaacggcagcggcgttcctgttcggctgcgtgcagctcatgttggccgcttcgtccatcgtgattcccgatctggcgctgcgccagtatctcggcatggtgaacgtggtgcctaacgtgcaggtgttcgtagcgctggcggtcaccacgttgccgctcgtcgtgcgccgtaggttcccgtggcccgtgttcctgttctgcctcgtgtcgtttctaggtttgcagaacgcgttcaacgggttctcgctcaccatcgtgggcccggtggtcgccctgtacaccatcgccagcgagcgcggtcgtgccgagacggtcgcggcggtacttctagcggtggccggccttctgttcgccgatgcccatgccgccacggccaacatggtgctgttcacgcgtttccagaatattgtgctcgcggtggccg

SEQ ID NO: 8848 - DNA, 1187 bp, Unknown
  gut microbiota DNA sequence
tcgagacggtcgcggcggtacttctagcggtggccggccttctgttcaccgatgcccatgccgccacggccaacatggtgctgttcacgcgtttccagaatattgtgctcgcggtggccgccggcttggctggctatgcgtatcgaacgcatcgcgcctacgtaaaggccaccgaggatcgcgctgccgaagccgagcgcacccgcgaggaagaggcggctcggcgtgtggaggaggagcgcgtgcgcatcgcgcgcgaagtccacgacatcacggcgcattcgctgtcggcggtcagcattcaggcggcggctgccgagcgcatgatcgatcgcgatcccgccgcggcgaaggaggctatctccgccgtgcgcaccactgcgaaaggcgcgctcgctgacattcgcagcatgatcggcgtgctgcgctgcggcgatgacgcggccgaaacgtcgccgacatccggtaccgagcggttggacgatttgcgtgcctacctcggaaacgccggaatcgaaaccacgctcgacgcggccgcctactgtcgtgcggacgtgccggcccacgtggacatggcgttgttcggcatcgcccgcgaggctgctacgaacatcgtgcgtcatgctggtgcgcgcaaggcgctcatccgcctggccgtcgaggacggacgggcgcgcttggtggtggaagacgacggcgtcgggtgcgggctctcggcgtccgcggccgcatcgggcgcgctgccccaggctgtcgacggagaggggcacggcattgccggcatggccgagcgcgtgcacctgttgggcggcacgttttcggcgggcgatcgagccggcggcggcttccgcgtggttgcctgcttgccgatgaagggagcggaggcgtaagtggaagagcgcgtgcgggtgctggtggcggacgatcaagatctcgtccgcagcggtttcaagctcatactgatgtcgtacgacggcatcgacgtggtaggcgaggcgcgcgatggccatgaagcggtggaactggcgtcgcggctgcatcccgacgtggtgcttatggacattcggatgccgcgtatgagcggcatcgaggccacgcgcgccatccgcgacgacgccgcgcttgaaaacgtgcatgtgctcatcctcacgacgttcgatctggacgaatacgtgtacgatgctttg

SEQ ID NO: 8849 - DNA, 3448 bp, Unknown
  gut microbiota DNA sequence
catggacattcggatgccgcgtatgaacggcatcgaggccacgcgcgccattcgcgacgatgccgcgcttgaaaacgtgcatgtgctcatcctcacgacgttcgatctggacgaatacgtgtacgatgctttggccgccggggccagcggctttttgctcaaagatgccgagcccgacgagatcgcttccgcggtgcgtgttgtcgcccagggggatgcgctcatcgagccctctatcacacgccgccttatagagacgttcgtcgctgcacggccggcttcgctcggcggtgctgcagccgttgcggccggtctacgcactcttaccgaccgcgagcgcgagatcctcgccctggttgcgcgaggtttcacgaatgacgaaataggttccgagctgttcatctcgcccgccacggtgaaaacgcacctggcccgtatcatggcgaaactcgatgcccacgaccgcgcccagctcgttgtccgagcctacgaaggcggcctcgtgaggccaggcatccggtagccgttcggtggcaagcgaactgatgccgcatgccaaacggcgactcgagtaaattgtgatgatcgtttgacgattgcgcaaaatctcagtcacgagcgctcagatttctttgaatgcccttgcattcagtgttgatgatgctatgataacgcagtgtttagcactcgttaccgatgagtgctagcagtcaccactgctgagtggttaaatagcgaacatgcgacaaacgggttcgtgcatacgtcggacgaaaggaaggcaacgttatgaatttgaaacctctgggtgatcgcgttatcgtcaagcaggacgaggctgaggagaccaccgcttcgggtctgttcctcgcgacggaggcgaaggaaaagccccagagcggtaccgttctggccgtgggcgagggcaagctcgacaaggacggcaacctcgttcccgttcccgtgaaggtcggcgacaaggtcgtgtacggcaagttcggcggcaccgagatcaacgtcgaaggcgaggacgtgctgatcctccgcggtgacgacctctacgctgtgtttgcataaaaggcgccggttgattcaacgttggtaatagcagggttttcgtggtgaggctcatagccacgaaggttccgggtgcttgagctaagcggccttattggccgtgtgcgaaagctcccgggttctgagcggctaggaggccgccacgaaaagccgtcaggttgaaaggatatgagcaatatggctaaagagattaagttcgaagccgacgcgcgcagcgcgcttgctgccggcgtcaacaagctggccgacgccgtcaaggtgacgctcgggccgaagggccgttacgtggcgctggagaagtcctacggtgctccgctgatcacgaacgacggcgtaaccgtggccaaggaagtcgagctcgaggaccccatcgagaacatgggcgcccagctggttcgcgaagtggccgtgaagacgaacgacgtcgccggcgacggcaccacgacggccacgctgctggctgacgtcatcgtgtccgagggcctgcgcaacgtgaccgccggcgccgatgccctgggcatccgtcgcggcatccagaaggccaccgacgctgtggtcgaggccatcaaggccgacgccacccccgtctccaccaaggagcagatcgcgaacgtcggcaccatttccgccggcgacgccgagatcggcgagaagatcgccgaggccatggatgccgtgggcaaggacggcgccatctccgtcgaggagagccagacgttcggcatcgacatggacatcgtcgagggcatgcagtacgagcgcggctacatctcgccgtacatggccaccgacatggagaagatggaggccgtcctcagcgatccctacatcctcctcaccgaccagaaggtcaccaacatccaggacatggtgcccctgctggaggagatcatgaagtccggtcgtccgctgttcatcgttgccgaggacgtcgagggcgaagcgctggccaccatcctgctgaacaagctgcgtggcacgttcaactgcgtcgccatcaaggctcccggcttcggcgatcgccgcaagcgcatcctcgaggacatcgccgccgtcacgggcgcgcaggtcatcgacaaggacttcggcatgaccatggccgacgcccgcatcgacatgttgggccacgccaagacggtcaaggtcacgaaggactccgccctcatcgtggacggcgccggcgacaagaaggccatcgacgatcgcatcggccagatcaaggccgagctcgagcgcgtcgactccgacttcgaccgcgagaagctccaggagcgcctggcgaagctgtccggcggcgtggcggtgctcaaggtgggcgctgcgaccgagtccgagctcaaggagaagaagtcccgcatcgaggacgccctgcaggcgacccgcgcggcggtcgaagagggcatcgtcgccggcggcggcgtggctctggtgggcgctctgcccgcgctcgacaaggtggaagcggccgacaaggacgaagaggtcggcgtcgccatcatccgcaaggcgctcgaagctccgatgcgcgctatcgcgcagaacgccggcttcgagggcagcgtcgtagtcgagcgcgtcaagggcatggctacgggcgaaggcctgaactgcgccaacggcgagtacggcaacatgatcgagatgggcgtcaacgacccggtgaaggtcacccgcacggctctgcagtctgcggcctccgtcgcggctctcatcctcatcaccgaggccaccatcaacgagatcccgaaggatccggatccggcggctctggcggctatggccggtgccggcggtggcatgggcggcatgatgtaagctgcggcttgcgataaccgtgtagcgtcaaccataactcggaaggcggggcgaccatcggtcgtcccgctttgctgtatatgagggaatgagggcgatcgtcccggcccaaaacaggacggtcgcggcatcgtcggccagacggcgcccgcacgccttctggagcgtgccgccggcacggggatgcgccctcctcgcgccgcacgccctctcgccccgggccgttctgagcgagcttttccgagcttttcgaaaatgcccccttgcgcccggggccggaagcgggtaacatgctcgggctgccttctccgcgggagagggggagggcggcggcggggccccgcggccccccggcgccggaaggcgccgggaaaaaagtccgagaatctcgaaaaaagttcttgacggcggggcaacggacgcgtaatatatctccttgcgcttcgggtggaaccgaaagcgacggggccccgggaggggcgccgcagaaccttgaaaaccggatactgaacagcgaagaagagaaaagccaagcaaacgattcttgcgaacggaa

SEQ ID NO: 8850 - DNA, 439 bp, Unknown
  gut microbiota DNA sequence
cgatcgctcgtgcgacgtgtcggtggtgttcggcggcgcggtgatagccggcacgcgggcgcgcaagcagcgtacgatgagctttgacgcgttcaccagcgtgaactttcctgagatcgcgctggtgcgcggcgagcgcatcgtgagggcggggtcgcctgcgacgtgcgcgggcgtcgggggagcgccgcgcgtgtacgatagcctcaacgagcgcgtgttcgtgctcaagctgacgcccgagatgaatccgagcatcttcgacctgctcaagcgcgattacgacgctgtcatcctggagacgttcggcatcgggggcatccccgactacggcgactatcgccgcgccatcttcggatgggtggattcggggcgcacgctggtcgtgaccacgcaggtgcccgaagagggctgcgacctgggcgtgtacgaggtcggg

SEQ ID NO: 8851 - DNA, 289 bp, Unknown
  gut microbiota DNA sequence
ggaacgctcggctgcgatggttccgaggcgcactgtgtgcagcggcttgtaagcggcgcccgcgcggtcgagcgtgctcttgtaaagggtgacgtcgtacgcctcgtcgtcttggggaaacgccaggtgcggcaggccgacgtgcgggatgcgagcgcggcgcgcgagggtgaggtgcgctttgaagggcttggcatcgaagggcacgtcgcgggcacgcagctcgtcgcgcagacgcgccgccagttgctcgagctcgggtgcggcggcgatgcccagccacaacgtc

SEQ ID NO: 8852 - DNA, 337 bp, Unknown
  gut microbiota DNA sequence
cgatccgtacacctcgtggcagcacgacttcttctcgctgccgcccaacgccaccatgctgccgggcgaccgacccggcttcgcgctggtggagcgcgacggccaaccgctgtgcctgatcggcggccgcggctactacaaccaaacgtggccgatggacgagtgcatcgccgaaggcgtcacgcgcgaagcggccgagcaggcgctagccgtccagcatccgcacgctgcggaagccccgttcgcagtgggcctgctgcacaccggcctcaacctcgatccggtgaaagccccggtagaccccgccgtcctcatgcacgcgggcatggactactgg

SEQ ID NO: 8853 - DNA, 1314 bp, Unknown
  gut microbiota DNA sequence
tcaagcgctgcatcgccgtgggcgggcagaccgtggacatcaacgacgaggacggcctcgtgtacgtggacggcgtggcgctgtccgaaccgtacacccgcggtttgccctcctacacgctggccagcgacgtctcctatccctacacggtgcccgagggctatctgtggatgatgggggacaaccgcacgaattcgcaggattctcgattcttcggagccatacccgtctcctcggtgacgggaaggggcgctttggtgtactggccgctcaatgatttcagcctactcgactagcgcacgcggccgaggggtacgggtttgatcgagacaaggagaaccatgtcaaccgaacatgcatccgccgctgcggagcagggggctgcagcgcagctccctccgacgttccaggacgtcatcatgaacctccagcgatactggggggaccagggctgcgtcgtcttgcagccctacgacaacgaggtgggcgccggcaccaacgccccggccaccacgctgcgctcgcttggccccgacacgtggcgcacctgctacgtgcagggcagccgccgtccgacggacggccgctacggcgagaacccgaaccgcacccagcactacttccagttccaggtgctcatgaagccctcgcccgacaacatccaggagctgtacctggggtcgttgcgcgccatcggcatcgacgtggacgcgcacgacgtgcgcttcgtcgaggacgactgggaaagccccacgctgggcgcctgggggctgggctgggaagtgtggatcgacggcatggaagtgacgcagttcacctacttccagcaggtgggcggcttcgagtgcaaccccgtgccggtggagatcgcctacggcctggagcgcctgacgatgtacatccagggcgtggacagcatgttcgacatcgtgtggagccgcggcgccgacggcgtgaacttcacctatggcgacgtgtacctggaaaacgagcgccagtactcgcgctacaacttcgaggtggccgacaccgacttcctgttccaggagttcaacgaccgcgaggccgagtgcctgcgcacgctggaggccggcctgccgctgccggcctacgacagcgtgctgaagtgctgccacgcgttcaacctgctggacgcgcgcggcgtgatatcggccaccgagcgcatggcctacatcctgcgcgtgcgcaccatcgccaaggcggtgtgcgcctcgtacatggagcacgtggtgggcatcaagcccgccgaggacgacgaagcagggaaggaggccggacgatgagcagcctgca

SEQ ID NO: 8854 - DNA, 256 bp, Unknown
  gut microbiota DNA sequence
tgtggccgtctacaccacgccgcgccggctcatcgccatcgtggccgatgtagccgacgagaccgaggcgctcgaagaggtgttccgcggcccgtccgtcaagatcgccttcgacgccgacggcaacccgacgaaggccgccacgggcttcgcgcgcggcaagggcgtgggcgtggacgcgctcgaacgccgcgaggagaacggcgtggagtacgtgttcgccacgaagagcatcgccgcccgcgacgtggccgag

SEQ ID NO: 8855 - DNA, 975 bp, Unknown
  gut microbiota DNA sequence
cgcagccgtctacaccacgccgcgccgcctgatcgccatcgtggaggacgtggccgacgagaccgaggcgctcgaagaggtgttccgcggcccatccgccaagatcgccttcgatccgcaaggcaaccccacgaaggccgccacgggcttcgcgcgcggcaagggcgtggacgtggacgcgcttgaacgccgcgaggagaacggcgtggagtacgtgttcgccacgaagagcatcgccgcccgcgacgtggccgagctgctgcccggcgtgctggaaggcgtgatcacgggcacctcgtggccgaagtcgtgccgctggggcactacgagcgagtacttctcgcggccggtgcgctggctcgtggcgttgttggacgagcgcgtgatccccgtgcggttcgcgggccttacggccggcaacctcacgcgcggccatcgcttcctctcgcccggcccgcacgaggtggcgacggccgccgacctcgtgggcgtcgtcgaagccgcgcacgtggtgtgcagcgagcaggcgcgcgaggcggtcatccgcgagggcgtggcgaaagccgagcgcgcgaccggcgcccgcgccgagctgcccgagaagacgcttctggaggtcgtgaacctctgcgagcagcccacggtgctggtgggcacgttcgacgaggagttcctgcgcgttcccgaggagatcatcgtcgacgccatgctcatgcaccagcgctacttcccgctgtacgacgcggacggcaagctgaccaacaacttcatcgtcgtgtcgaacggcgacccggcgcacgccgacaccatcacgggcggcaacgagcgcgtggtgcgcgcccgcctgtccgacgcgaagttcttctacgaggaggatctcaagcatccgctggagacgtacgtcgaccgcctggacgaggtggtgttccaggagacgctgggcaccatgaaggagaaggccgaccgcatcgtggc

SEQ ID NO: 8856 - DNA, 190 bp, Unknown
  gut microbiota DNA sequence
ggccgcgcccagaaggccgatctcttctgcgatggccgcgaagatgaagtcgctctcaacgacggggatctgatccgccaggccgcgcccgatgccgacgccgaacaagtcgccgtccgcgatggagtagatggcctgcgtcagctggtagcccgtgttctgcgcatcggcgaaggggtcgagccaggtg

SEQ ID NO: 8857 - DNA, 32564 bp, Unknown
  gut microbiota DNA sequence
gtcgatggagtcgacgccttcgaacgtcacgaggaaggcgtctctgcccgcgtcctgcacggacagcacgcgcgcacggcgcggcgcatcgtgccgaggcggcacgaaggccacctccatgccctcttccagcaaaaaaggaagacccggcgcgcagcgcgcgacgagccctcctgtcaaggtcttcgttttagatagctcggctacgttcgcccacgtgcgcatttagtcgagaagctccacttcgacatgggtgttcgtacgcgatgcagcggcacgcgccagcgtgcggatggccttgataacccgcccctggcgaccgatgaccttgccggcatcttcttcgttcacgcgaacttcgacgagaatggtaccgtcctcggcgtcgctcgacgtgatctccagctcgtcgggaaactcgacgagcgggcgcacgacggactcgacgagaccgacgatgtcttccgtctgctcggccatgatgcttacgcgttctcgcgagcgcgcttcagcaggctggcaaccgtatcggtcggctgggcgccgttcttgatccactggtcgaccttctccaggtcgaactgcaccatggcaggctcggtgcaggggttgtagcggcccacttcctcgatgaacttgccgtcgcgcgggcaacgggaatcggcgacgacgatgcggtagtacgggcgcttcttggcgccgtgacgggccaggcgaattttgactgccatgaagatgaactccttttgcttcttacattcgattcgatgcgtgcagcgcgtatgcggtgcagcgaaaacagcaattgcttatgatacggcgtaatctatcgtttgacaagcgattaccaagcagaattgtagcgcggcgaaccttcaggcgcatccccgacctcccgcatcctcgaaaatcccatgtttggcagctacgagcaccgaaggccctcgtcgcgcgaccgcgcggctagcctcccaggcggcagccgaaacgccacacggtttgcaggtacaccgggttcgacgggttctcctctatcttctcgcgaattcttctgatatgcactgctctttagcgccgatgaacaactgcccaaaaaagcgcaaggcattagtcgggcctactccacatagttgttcagcatgctgagcagctgctgcttcttatgaactcccaccttcgcatagaggcgccgcatatgggtcttcacggtgttctcggagatgaacagctcctgggcgatggccgccatggtatagccccgggcgaacaggtgcatgacctcgatctcccgctgcgacaggtagtacttcttgccgatgaggtcgcagcgtatggacagcctatcggcgtacttgacgtcgtcgtcccacggcaccgccgtttcgccgtcgtccccctcgcccgttcggtgggccttgcgcgaaagcgagaggaattcgatatcgcggccctcctcctcctgcgaaatggacaggccgcgggtgaggtacatcaccaacgccagcatcgccaccgagatgagcgctatggacgccaggggcgggatgctcgacaagaccgcgatgttgaccgcgttcccaagcaggtagccgaggccctgcgtgcatagggatacgcctatctggaagcttatgcagaacacggggttgacgccgtagtcgtgggcggtctggaggcacagaacctgcaggctgagccccatgaagctgtacgtgatgtagatcgcggccgccgtcacgacgagggaatccatgccgatgaacggaagcgcgcacaggacgacaacgaggaacgggaacatgacccggaacaggtggttgatgctgtaccggatcgtcctgaaccgccatatcgccacgagggcgagggccgatacgagcccgccgagaacggaagcgtagttgatgtacatcatcgcgtcggcctgcagcgagagggagcggatgacgccccccaggaaggcgaacgagccgccgtacagaacgcatttccagatgctgcgcagggcatgcacgtagctcgccctgttctcgctgggcttgttggccaccatgggcaggctctcgtcgacccgcttcgactggaagagcagcagcccccacatcaggcagacgagcagcgccgagatggcgagcttcgccgcacccccgtcgaagaactcgaagaatgcgcggagcaggacggtgagcacccaggcgagaaggatgctgagaaggccgttctccatatcctgggcggcgacgaggaagaaccaggcgaatatgaacaggtaggtccccgccacgggaatggcgtagcccacgagcaggttgagcggcagaaagaccgcggagcccggaagataggagtagagaagcgcgagcaccatgacgggcgggtaaaccctttcgaggaacagcctcagcgaccgggggctcgcgcaggaccacgcgaaggcggcgaggcacacgagcacgccgaccagcacgccgaccccatgcgagctgtagatagacggaatcgacgagacgagccagctgctcttccatagaatcagggaagacagcgacatggcgatgcctaacccgacagaagcgcgagcgacttcgcgcgtatcgatgagcttcattaaggcctcccccctacctgcctctcgtagtttagcatgacgcgtctccggaggggcgagcggatgcgccacgcgcaggccggccccggcccagcggggcgcgtttcggcgaattagcgaaaaaaggtgacagcatccgcgccggttcaccagttttgggtctcaggccccttccccaaatggtgcgagactggcccgtgcggaaagcccccgcgcctggggcggggctttccggaaacaagaaaaaccaaggaaggagaggttcatggaccaacaagaagggatgggggtctcgagacgctcgttcgtcaaggggtcgaccgtcacggcgctcgccgcattggccgccagcggcggcgcggcgagcctgttcggctgcgcccccaaggaaacggcggaggaaccgggcgggcgatccgacggcgccgtgttcgccaacgaggtccccgaggagggggaggtcatctggcagagctgctgccattgcggcttcgtcgcatgccccatcaaatgccacgtcgtcgacggcacgctccgctggatagacaacgacacggacggcgatccggaattcggggggatatcgttcaggccctgcctgaaggcccgctcggtgcgaaaatggatcaacagcccggagcgcctgaaataccccatgaggcgaaccggcaagcgcggaagcggcgagttcgagcgcatctcgtgggacgaggcgctcgacatcatcgccgagaaatggacgtacacgcttgagaaatacggccccgaggccttctacaattgcgcgacgggcacccgcaactacccgatacagcgcctcatgcacctcacgggcggctgcctcggcaccatcaactccgagtcgaacggccagatcgcccagaccgtgaactacctcttcggcatggatcccaagaactacgactgcgccggcggcctggggagccacacgtcagccgtcaaagacgccgactgcggcatcttcttcggatgcggctcgggcgaatcccgcatgtgcggcatgggagaggtctacgaagtcgcgaaagcccgcgaagccggcatccccatcgcattcgtagactaccgcctcggcgaaggctcgtcgggcaaccccgacgaatggttccccatctaccccggcaccgacggggccctcgccagcgccatggcctacgtcatcatcagcgaaggcaagcacgacaaggggttcctcgacaagtacgccgtcgggttcgacgccgacaccatgcccgaaagcgcgccggagaactcgtcgtacatggactacatcatgggcaccggctacgacatggttcccaaaacgccccagtgggcggcccccatctgcgggctccccgccgagaggatcgaatacctcgcgcacttcatcacggaccacgaaacctgcttcatcacgcagggctacggcccgcagcgccaccacaacggcgaatggaacgcggcggcgatcgcggccctgccggtcatcacgggcaacgtcgggcgcgccggcacgagcccggggctcaacggcaagggcatgcagatgagcttcgacgggggcatgtggaactcggttcccatcggcgagaacccggtcaagaagaagatatccatatccggccgattcaacgccatcgaccatcccctcgagatgacggccctgacggacggcatcacggggggcgacaagctggaagtcggcatcaagttcatggtgctgtacgaggccggctgcttcgccaattcgagctccgacctgaactgggcggcgacgatactcgaagacgagagcaaatgcgagttcatcctcggcgtagacgtcatcatgtcgacgtctcttccctactgcgacgtcatcctccccgacctcatgtaccaggagcgcatgaacttcgtgtcgagcgtcacaggcggctccgcctacggcttcgtcttcggcaagcccgtgcaagagccccaattcgagtgccggctgtcctacgactggtgcgcagacctcgccgagaggctcggccttcgcgacgagttcacggagggtcgcacgtgggaggagtggatggagatccgctacgaggaggtcagccggccgtcggcgccccacggcaacgccccctccttctccgagggcgtcgagatggggttctggcgcgatcccgagccggcggagccctacatcgcgctgcagccctacatcgaagaccccgagggccgcgctcggaccacgccgtcgggcaagatagagctctactccgagcggcttgccaccatcagggacacgtggacgttccacaacggcgaccgcgacgtcgtgcgccccgtgccgagctacttccccgagatcgaaggcgccgaagacgtgaacgacgagtacccgctcatgttcgccacctggaaggcgaagaaccagttccacagccgctaccaggtcatcgaggagctccagcaggcctgccggcactgcctgtggatcaacccgctcgatgcagagccgcgcggcatcgagaacggcgacatgctcatcgtgcgcaacgaccgcggcgccgtgcggatcatggcgcgcgtgacgccccgcatcatgcctggcgttgtcggcatgccccatgcccatcgccgcgagatcgacggcggggtcgacgtgggcgcgaacgccaacacgctgaccggccaccattggtcgccgatttcgaaaaactgtccgtcgacgggctccacgctcgtccaagtcgagaaggcttaggaggagcaagatgacgcaatacggattctacttcgattcctcgcgctgcaccggttgcaagacctgcgagctcgtatgcaaggactaccacgacctcggccccggcatcctcttccgccgcgtctacgactacgaggggggagcgtgggccaggaaagacgacggcacgtgggagaagacggctttcaactaccatgtggccctctcgtgcaaccactgcgactccccggcctgcgtggccaactgcccgacgggcgccatgcggaaagacgaggagaccggcctcgtgaactccgaccccgccgtatgcatcggctgcggaacctgccgaagcgcatgcccctacgatgcgccgcgcatcgacgccgactcgaacgtatcccgtaaatgcgacgggtgcctcgcccgcgtgcgagaggacgaggagccgatgtgcgtcggcgcctgcccgctgagggcgctcgagttcggccccatcgaagagctgcgcgagaagcacggcgacctcgcccagatccccccgatgccggagccgtccacgtcccccaacatcgtcatcggatcgtgccaggcgatcgattccgatgcgtacgacgtcggcgaaggatacgtggccaaccccctcgaagtggagtagcgggatggaagccgaacttgccgacgcaggctcgtgcgccacgctccttggggctttgcttttgcaaagccccaagggcggccccgtcgccgaagcagccgaagggctgtgcgccgcagacctcgaaagcgagtggcctttcggcaccgaagacgagctggaggagatcgccgccctgttaaaagaggctcgccggctcccgcccgaagacctcgaccgggagttccatcgcttgttcgtcggcccccggcgcctcgatgcgcccccctggggatccgtgtacctcgattcggaatccgtggtcttcggggactcgtgcatggagcttgcccgctggatgcgcgcgaacggcatcgccctgcacgagggggaaagccgcgagccgaccgatcagatcgggcgcatgctcgtcctcctcggctggatgtgcgagaacgagccctcactcgtcgacgactacctgcggctgcatctgctcacatgggcgccgcgctacttcgagcgcctcgaggctgcggcggacggaccgttttaccgagccgtcgccgagctctcggccctcacgctccgcggcgtagccgaacagagggggctgaccgcggaagaccgcgaccggggtttcgatgcgctatgaactttcttctcgtactgctttgcactgtggtattggtcttcgcgctgaaaaagccggtcaagcggttcccggtgctgttctacggcatcgcggttctgctcgatgtgctgttcatctgcaacgcgttcgttccgttcccgagggtcgtatcgagcgcgctccttctcctcatccataaatgcacgctttcgctcgccctgttcgtcgtcgtgatgtacgtcggcgtgttcgcccaggggtcgaaggcgaagacgtacttgctgcccatccgggccgagctgtcgatcatcgcgtggatcctctcgctcggacacatggcggtgtacctgatgtcgtacgtgccgcaggtctcccacagcgtcgagcatatgagcggcgcgacgcttggcgcgctcgccgtcgcgctcgtgctgttcgcgttgctgctggtcctgggcgtgacgtcgttcaacttcgtgaagaagcgcatgaggaaggaatcgtggaagcgcgtccagatgctcgcgtacccgttcttcctcctcgtctacgctcacctgctgctcatgctgctccccgccgcgctcaagggcgggctggccgcgcaggcgagcgtcgcggtgtactcggccgtcttcgtcggctacgtctcgctgcggctctatcgggccgccaagggagagccgaagccgagtcgggccgggcaagcgatctggggccgcctattagaggcggccccagatcgcttgcctattcggcggggggatgctgcgggatgcgaggcggttacgcgctgggtcggcgtatcacatcgaaaaacgccgacgcgccttccgcgagcggaccgtacacgccgtcggaaagctcggccgtgcgctccatgaacgagggcatccaacgcagcgcatggccttcgaggaatcgctcgatgcggtcgctgatcagctcctcgccctccgcattttcctcccatgccgtcgcagcgaggttcccgtacaggtaggaaaggaagctgaactcccggaagacgctgtcgcacggctccctccgggcgtcccggggcgccatgcccgcctcgcgcatctgccttcccacgtcgagcgtggaggcggagcggaagagcggcggcgccccctttcgcccgcgttgggcgtggaggtaggcgctctcgtagggcagcaccggagccgttgcgcctggcccgaggaagagaagggagtactcgcgcctcacctcgcccagcagaccatccgcatcccttcccgcatacgcgcgcaggccgccctcgactgaggcgacgacggctcgatctatgccgcagtccgagcagcaggaagcaaagtcggcggacagccgcccgtcggccagcgcttcggcaacgcggcgttcggggaaggcgaaagccgcccccaggagctcgcacatgtcggctctgccgacggcttccgcaaaccgctcctctcgtttcatcgcacacctccagcccggcggcgggcgcggcccgggacggcttcgccccgggccgcgcccgcgattacctcagatagtagatgctcggccccgtgcccgcatcttcctgcaggaattcgtactcgcggccctcgatggccttgcgcacgtccgattcggggtcgtcgagatcgccccagtggcgggccctccccgggcagagctgcatgcaagcaggctcctcgccccggtcgacgaggttcttgcagaacgtgcacttctccactgtgctcggcttgtgggccggcgcgtcggcctccccgacaaccacgtcgaggtagtagtcgggatcgtccccgatgagcgtgcggacgccctggtaggggcatgcctggatgcacgatccgcatccgatgcaggtttcgccgtcgaccgtcacgatgccggtcttctcgtccttctgggtggcgcccgtcgggcacaccgcgaagcaggcgggggtttcgcaatgctggcactgcatcggcaggaagctcagcgtgcagttggggaactcccccgccgccgtgtcgaaagagtctcccccgacggtcataaccctgttgtacgccagatcggccggcaggttgttcgcaaccttgcatgccacctcgcatgcgtggcatccgaagcaccgtttgaggtcgatcgccattccatagcgcgtcatgtcgctacccccttacgccttctcgatcgagaccgcgacgtcgttcacgatcgaattgggaatcatctggttgttctcgctgctcgaaagcgacgcgaagtgcccttcgatgaactcgaagctctggaagctgcggcccgaggagagcatcttgcggggcaggccgctgttgacgaccgccctcatgacgaccgatccgtgctcgttgcacagccggacagcgtcgccgtcggctatcccgtactccgccgcgtcttcggggttgaggcgtacggtgggctcggggtcgaactccttgacgtagcccgtgtcccaccattgcgtatgggtcctcgtgcgcatgtgctgcgagaacgtgaagaaggggtactcgccgctcctcgactcgctcgcgggatcggcgtacctcgaaggctcccagtacagcgtgcgctctttggcgaagtcgatctcctgccccgccccgtaccagggcatgggggactcccagtacaggctgaagcgccccgtgggcgtggcgaacccgttctcgaaggcgacgaaattgtcgacggtgaactcgcgcaccgtcttctgctcgcgaagcgtttcgggcgtgcaccccacggcgcggaacgcgtcgctgtcgagcatgaggtcgatgaacccagcggtgtcgtaggtgaagaagtcgccgtaccccatcttctcggcgagcatcttgcagatatcgtaatccgatctgctctcgaactggggctctaccgccttgtcctgccacatgacgatgggcgtcgagcctccccccgccacgaagtcctcctgttcgaaccaatggcacacgggaagcaggatgtcggcgtacagagccgtttcgctcatgaccatttcggcgacgaccacgaaatcgatcttcttcatccattcctcgacccggttccggtcggctccggtcgccagcacgttgcgctggaagatggtgatgctcttcagggggaactcggcgccgccgtacgagccggtctcgaggatgtccccgatgctcgccaagggcagcgcgttggggttcgccccctgcgcctggttcccgttgacgtcgaccggtgcgtcgcccgccgccgggttgacccatcccgacccctggctgtacgtcatgcccgcagccgcgccgctcttgcacaggttccccgtgaaggccgccagcgtgtagatgggccagtagttgtagtggccgttcaggtaatggtcggggccgaacatgacgagcgtggtcaccggcccgtcctgggcgaacgtccgcgcgagctccctgatgtcgtcctcgggcacgcccgagagctcggacgccctggagaccgggtactcggcgacggcatccttcaccatgtcatacacgagcgtcacggcgacgccctcgatctcgctccggctttcgagcgaagggcgcttcgcttcgggcgcggcgacgggcccgcccgcctcttcgtcccaaacgacatacgggtcgacaacgctcggcttccccgtggcgggatcgacgtcgccctcctggggctcgacgcccagatcgctcatgcgcaggaacgtgccgtcctccttgacgaagaagggcgcctcggtccgctcgcggatgaagccctcgtcctgccacccctgatcgagcaggtggttcagggcgccgaaggccagcgccccgtcggtcgaggggttgaccgggacgaaccagtccgccttgcccgcgttcgcgttgaacaaggggtcgatgacgatgtacttcgccccgttctcgatcgcgtcgaggatgaaatgcatggtctggggcgtggatatcgtggggtcggcgccccagcacacgaacgtcttggcgttggggaagtcggccagctcgttttgggtgccgaacccgccgtagcccatgacgtgcccgttcgcgaagctcgcggcgaggtcgatgctgaagttgatcagcgtcccgcccatgacggccttcagacggtcgacgctcttcagcgcgacgctcccgaagttgcccgacccgatgagaaacgcgttcgacgcggggccgaactcctcggcgtacccgctcagcttgccggcgacggtctcgaccgcctcgtcccagcttatgcgctcgaacttgccctcgccgcgctcccccgtgcgcttcatggggtactgcaggcgcttcgcgctgtacacgcggccgacgtggctgagccccttcgagcagatgcggttgtagcggggatcgcacatctcccccgccgtcgtcctgacgacctgcccgtcgcgcacgtgcacgtccaggaagcagtgccccgcgcacccgcatcggcacaccccggcgaaatgctgcgtttcggagtctgcagcggggggttgcgcatcctcggtgtcggccgcctgcgggctgcacccggccagagcccccgaggcagcaaccgccgctgcgcccttgatgaagctccttcgcgaaaacggatagggcttcctttcgctattcgacatagctccctccttctcatacctcatacgctcgtcttctcgcacgcataggcaatgcggccgcgttccacgcggcgaatgggaagcgtgcaaggaaagcgtacgggagagcgcgtcggcgcaacagaatttggttattgcgccaagcgcaagccgaggttgccacctcaggccgaaaagagcctaacgcggccgggcggcgaaggcttacgaggggatcatctcgctgggatcgttcttgcagaagatctgcctcaccagagggttctcgggcagccccttcttcgtgataacgcagtacccccactccatgaagggctcctcgaacgggatgccgacgacgttctcgaacccctcgtagctcccgcggaccccgtaggtgacggcggagccggcgctcacggagccgaggctgtcgtacacgctcgggctcgtatgggtcacgtccaggcgaaaccccagcttcaagcactccatggccataagatcgtggatgtcgtagccgttcccctgggtcgcgaacgggaggcccctcatgtccgatagcgaaacggattccctcaacgcgagcgggtggcccttgtcgaccatgaggtggatgcggcccttcctcgagaggaacacgtcgaaaagggcctcgtcgaccccggtggcaagcagaaacgcgcatacgagggattcgccgagcaccttgcgcctcagttcgtcgcagctgtccgaaacgaattcgacggcgacgttctcggggtagacgtacttctggttcgcgtatatcgtccggagctcctccttcgtgaacacgatgttcgtgttgggggccgatcccaccctcagaagcgtcttccccctcatgcccgcgacatcgcgctcgagctcgccgaaggacagcagcacgggctgcaccgacgcgtacaaaaggttggcggccgatgtcgcaacgagcttgttggcttcgttcctgaacagcgtctggccgatctcccgctccaggttctgcatggcctgcctgagcgcctgccgggaaacgaacagatcggtcgcgctcttggagtagttgaggctctcgtacacggaagagaagtaccgaaggtgaagtatgtccacagaagccgcctttcgcatccgacgcataccacgatagcacatgcggcggcctgcccggtgccccgtttccccgacgcgggcggggcgaaacagaaacatcctctgttcctggggtaaacagcgcggggccggccaggaaaccggccggccccgcgccatcatcgcccgttttcgctcttttcgccgaagcgcctacaccgcttcctcggcgacgctgcgcgccgcgatgcgccccatgcagcccgaagagctgttgcagcctccgacgatatgctccgacccgtttccgtggatcgggaaaaacgctgcctcgccggcggcgtagaggccgggaatgacctcgccgtcgcggtcgagcacctgcgaccgggggtttatcttcgctccgcctttcgatgtcgcgacgacgatatcctgctcgatgccccagaacggcggggtttctatcttgcggtcgaacagaacccgcccgaagggatcgggcccgcccgactcgacatacccgttgaactcgtcgatggtcttcttaagcccttgcgcggggatgccgaaggcctcggccagctcctcgatggaatcggcgctgaccaccgtgtccgttatgttgttggcggcagcgtcgtcgatgatcggctgggcatgcgcctggccgtccgccgactgccgcgctgcgtcgtcgaagacgacgacgtgccacattcccggtatgtcctggtagggccgctcgctgaaatactccgagaaatccgactcgttgttgaagcgcttcccttcggagctgacctcaatcagattatcggaccatacgtagggaaggaggatggcattggccggctcgttcgggtccacgacgactccgccgccgccgtaattggccaaagtggggtatatgtagccgttgactgcatggatcatcgccaatccgtcgcccatgcaggtttgcggagccgccgacagcaccgtcttcgcctcttccttgatcaccctcatggcgggcgcataagtcgcccacatgtcgatgttgccgccgatgccgcccgtggagaccaaaacgcccctcgttcccttcacgttgagcgtctgcccgtctttcgttgccacctgcgccccgacgacacgcccggcctcgttgcggcagagcgttgtcgccctggtctcgtaaaggacctcgattccccgctcgtttatcgcgccttccaatccgaccatccaccccagcccgttgccaatcggattggtcatgtagtccctggcgatcgaatgggagttggatccggcggttttcgcgtcgaaggtccgttggacgacgtcgcatccgagctcctcgagccagtcgacggtctccccgctgatctcgccccaagccctgatcacatcggggtctccgaagtctcccccgcacctccgcacgtccttgatgaatatctctatatcgtcctcgatgccgtcgatttcctggagctcggtgttgacaccgcacagccatccgccgctgagcgtgcaggagcatttcttgatgtcgtcgagggcttccaccacgagaacactgagccccagatcatgcgcttctacggcagcgcatgcgccggcgatcccgcagccgaggatcaccatatcggcctccttgtcccatgattccggctccgacgcgacgtacgagggcgcgacgcccggttggcgggcttcggtgtccgcgccgcagcccgctaaagccgccgtcgctacgccggcagccacgagggcgcctccctgcaagaaactgcgcctcgacaaacccgtcggccccgtcgtcgacccgttattccccttgctcatttttcctccttcattgcattccgatagcatctgctcgaaagcccatcggcccgaagcagagattcccgtacaagccgcccgatccggatccgctcccttcgcataaagcaccatggcgcgagatcaggcgggcgaaagcttcattcgtggcaggtgccgcattcgtacacgtcggcgtgatggcagctgcgacagtattcttgaggatcggagtcgccgtgcattttgtggcagtttttgcacgccggttcctcgttatgctcgccgtttgccggaatcgcatgcgggttcacaacggttcccgtcttatcggtgaggacggtgccgtcggcggtcttctcggctaaagcctcgtagctgccatggcaggtaaagcagagctcgttctctataggcgattcgagtcgcttgatcttgcccggcgtcgagctcttggccgcttggtggacctctgtaagcccttggctgtcggcatggcagtcggcgcacggcatgccggaatgagccgacgcggcgcaagaggggtcggccgtcgactccgcctcgacggaatggcaggccgtgcaatcggattcgatgctccactgagtcatgtcgatctgcgccccggcgccctcgctcgttttcgcctcccccgtttccgcagcggtgcttttcggtgcgctgggagcgcatcccaccagcagcgcccccgcgagcgcgacggccgctaaagccgctggaatggcgaagtctttggttttccgctttgcgaacatgaagtcctccttgctgtatcgtgacggaaccacaataggcaaatgggatggactactaaaaattccatgttcgcaccccttcccgccgacggcgagaaggagcattccgatgcagaatagccccattccacaatgggctttcgcatggcgttcctgtacaatcttctcggaggagtacatggggaacggtaagacgggatctgccatgcaaatagaaacgctcgaggagtacgtcgtactcgcaaagcaccttaacttcagcaaagcggcgatcgagctcagcatgacccaatcgacgctgagcaagcacatcgcagcactcgagagggaggtcggcttccccgtcgtggagcgctccggctccgtaaggctcactcaggcgggggcgcttctgctcgattgcgcacagcaaaccgccaacgcgtaccgaagcggattgtcaagatgcaggaagctcttggcggaagcatcgccggtcaggctccagtggttcgacgcccacgactatttcaccgattttctctcaagcgtcgacgacatcccgttcgtgtttgtctcggcgacggagggcgaagggggctcgtacttctcgaacctcgaaaggaaccgcgtcgacgtcgtttcgacgatagacatcacgcgtgtccccgagctcatggacattgccgaaagcaagggcatcacggcgattggaacgggtaccgacagggccgccgtcgtgatgtcgaaagacaatccgctggcttcgcaagaaagccttcgcagaatcgacctgaaagacgcggaagtgttcatgccggacggagcgtgcttcgacgaatggcgaagcggcatccttgcccttttcggaagcgacctcgatctcaagttcgttttgaagcccatatacaacagcatggcgaatctgcagcgggccgatttcggcgatatgatctggatttcttcggttttcgacgtcgagaacctctgccgggtgcgcgacgacgtagtcgcgcgttacgagctgaacgacagccccatcctgctcccgcgtggaatcctgtacagggaggataacgacaaccccaacgtcgccatcttcgtcgaacgtctggcagaattcttcgtcgcctgaaagaaggggcatggcgttcgtcaggccgcgggggtatccgctcaacctatgcgcagaagccagaaatagaaccagcatctgccctatgggacgctggacccaagatcaccacaccccgaccgtcatatgcagcgtagggatccgaaaaacctaccaacagccgcgccattcccctctcgaaggtttcgaatcgcgccgcaaagcattcgaatggctaccgaagaaccggaatgccctgctaaaacaacgacgccgctagcttccgcgccgcctcatatcatgttcggagcaggctgcaacgcgcatgccaccgatcaagaggaggaaggaaaatgggagaatctatcagcaggcgatcgttcctagtcggagcagcgggggccgtggcggcggctggcttggccggatgcgccccccagccttccgggcaagcggccgcggcgggagcggaatcggaccttcccgaggcctgggacaaggaagccgacgtcgttatcatcggttcgggcgcgggcggagcggctgctgcctggtgggcgctcaaaggcgggctgtccgtcatagtgctcgaagagcgcgaggaagccggcggctcggccatcgagaacgcggggcagatcgcagtaggggcgacctcgatccacaaggagcgcggctacgacgccacgagcgaccagttcaaggcgttcctgaaagcctgcggcaccgacggcgttcccgacgagctgctcgacatcttcgtgtaccaggggcccgagatgatcgactggctgacggacatcggggtgaagtgggcgccggaaaccatcgaagacaactgcctcatcatccaaaacgaagacgggtcgatcgataccgacgcggtttcaaggtgcggcttgaactcgctcggcaacgagttccatccgaactacatcggaggttgggacggccatccgcagcccttgtgcctcatggcgacgtgggacgacctcgaggacgaggagttcgtggaataccgcaaggactgcatgagctcgttcgcgatggactgtcaccacggcggcgcggcgtacatgctccccatcctgcgcggcgtgagggatatgggcggcgagatcctgctcaacaccacggccacgcgagggtacaaggacgagaccgggcaggtcgtcggcgtgtacgccgagcagggaagcggcggcatctccgtcaaggcgaacaaggcggtcgtcatcgcggcgggtaactggatgaccgactcggatctgctcgagcaatacgccggccacgtgcagtacgtcggattctacccgctgagcgtatcggacggcggcacggccatgaagatcggcctggacatgggcgggcacatcgtgaactcggacagctactggctcagctccgaatcgagcttctacctgttctccagcaccaccgggagaatcggaaccaccgcgccagccatctacgtgaacgcagacggggcccgcttcaccgccgaggacgaatacacgcctggcacctgcgggcgccttgcgtacgaccggttcgtctcgcccgtcgagaagaggaaccgctacgtcatcctgcgcgacgaggagtacaaccggcacatggctctgctcaagtggcgggtcgactcgggccttgcgggcacgtacgccgtcggaggcgtcgacgagaatgccgaatacgaatgcgactataccacgatgacccacgcagacaccatccccgagctcgccgaagcgctcaacatgcctttcctggaaacgcagatcgcaatctacaacgattcggtcgagaagggcgtcgacctccaattcaaccgctttccggagaacctccggccgttcaaagacgaggacggtcccttccacgcgggtctggtatcgcccacctggctaggcggctactcccacgggggcctcgacatcgacacgaacggccaagtgctcgacagcggctacaagcccatcccggggctgtacgccgccgggcggtcggcccgctccatcgcggaaggcacccacgagccctcgacggggctgagctgcgcgcaggcgatggtgctcggcatggtcatcggcaagcacctctcttcggaagcttagggcaggaccgccatccgtacgggcagttcggcggcagcggcatgaggcccgctgccgccgatcaaccccgctcggcaagcaaaagagacgatcaacccgcatcgcgggccgccgaagccagggcgtcgaacatgggcgcccgatccggatccctcctgaaaacgcagtagtagtcaagctccacctcgaaaccctccaattcccgcacgacgtatcggctctgcgcggcgaacccgctcgactgcaagaaaggcttcggagcgaacaaaaccgaagcacccaaatcgatgctgtcccatgcgtttaccgcgtctgtcgagtaaaacggttttttcggagccacggacacgccggagcctgcgaacagccggacgatcgcatcggccatcgacagctcgacgaagcccctcccttggttctggaactcgcacccgtcgagatcgcagactccgatctcatccttcgagttgaggggatgcctcgcatccatgacgagctcgaaccgctcgcgcccggccctgacggcgtcgagcccctcatgcctgaagcgttcaacgacgtcgccttcgtcgtcgtccggggtctgcagggagaacacgaaatcgaccaccccgccgcaaaggcacttggcgagcgaaagggactgccagtcctccgaacgaacgtaggtcggccgaatgacgagggggctgttggcctcctcgaaaacgagtttggccttcgagacgaaagagtagtagtcgtctatgagcgtcaggtaatccggaacgagcatctcaacggtggtttcgttcaggttcttggcgctcatcacgacatcctcgatcacgcggaccgtttcgtcgagcagaccggctgttcgcttgtggaattccacccccgcgggagtcaatctcgtagcaggctgcctttctatcaaccgaaagcccagatcctcctccaaagccgccatgtgcttgctcagcgttggctgggaaacgtacagctctttcgccgctgctgaaaaattgaggcactctgctagcacattgaactcgatcataaattcaagatacacaacagctccttcccccgtatgcagattcaaacccaatccttcggcccgacgaaggaataagcgggtgatgcgctgatcgcgtagaccaagcttagcctaaacgccagccaaccgagatcccaatcaaaaacatcgagaatacactccgatagagttcaagcatatccaaccgcaaagccaacaaaagagccagcacaaccagagcgaatcagtgcaacctcttttttgaagcgcgcattattcttggccttcatcagcgctcatccctgaccgcatccccgtggcttgcttgaacacgcagcccttctcttcgtcgcatgagcggagcgactcgaagattctccgaatcgctcctcgtccccgaaagccgcgcgaccgcgcttgcgcgctagcctcagcaggggcgccgcccgtccacgcagctcttgtagtagatgtgcatgtcctcgtagccgcccaggaagttgcagaaaccgccggggacggtgcccacgcgcgtgaagccgaggtcctcgtacaggtggatggcggcctcgttcgtggcgaccacgacgttgaactgcaagccgcggaagcccttgcgggcggcctgcgcgagcgagtccttcacgagctcgcggcccagccccaagccgcgcgcgctggacgccacggcgtaactggcgttggccacgtgcacgcagcgccccacgttgttcggatgcaggatgtacaggccgaacagcttgtcgtcgatcgcagccaccgtggtcagcgtctgctcggcgaagaacgcgcgcgccgtgtccatcgtgaggggctcgatctgcgggaaggcctcccccgcttccaccacttcgttccataccttgatcatgcccgcgagatcctcctcgcggtacggccgtatctccagcgccatgcgcgcctccttccgttgcgtacggggagcagtatagcgcaaacgcgcgccctcgccccctggcgcgccgacgtcgtgcgcgtcgcgccgcgccaggaagggcggatggcgctactcggccaccagctcgcgcacgtccacgcgcttcaccttgcgggcgctcacgtaggcggcgaccaggaacagcgcggccaggcccagcgtgaggccgcccaccatgagcggattcgtgtcgatggcgaacttcgacacgccgaacaggccgaacagctgccccatgagccagctgccgccgagcgccgtcaccgtggcgcccgcagcgcagccgccgagcgccacgaggaagaagcgcagggcgaactgcaggcgaagcgcctgcgacgtgaagccgagcgcgcggtacacgcccaggtcgtggcgctcggcggtgaacatgcgcccgatgatgagcgacacggccaggaacacgagcgccgccgcgacggccgccatggcgtagcccatgagggagaacagctgctggatgaggccgatcatgccctcggtgtcgctgaacatgccggaaggccgcgcgtccaccgcgtcgccgaagcgctcctcgagagccgcgcgcgcctcgtcggccttctcggggtcggccaggacgtactggcgctcccggtcggaggcgtccgcctcgttgccggccagatcccgcaccccgtcgtacgtgaggatggtgccgttgccggcgttgaacatggcggagagcagcccgcacaccacgaaccttcgctcctcgccgtcagcgccgtccaccaccagctcgtcgccgatgtcgaggtccatcgtcttcgcaaggttcacgccgatgagcgcctcgttatcgcggaccggcgcccgcccctccgtcacgcccgtcacgagcgagaggtcgctcaagcccgcgaacgagtggctctcgcccccgaagctcaccatggcgtacgactcgttccacgacttctcgatggggctcacctcctcgatgacgcgctccacctcctcgaagctcgcgtcgggcgagacgagggtcgccgacacgtcgctcgtccacatgccgaaggcctccttcgcggcgttcggaccgccgagcgcgctgcctatgccgaacacgagcacgatgaaggcgcacatgaccagcgcgcaccccgcaagccccacgtagcggcgcttcgccgacgcgatggcgcgcacggctagcccccagctcagatgggagccgcccagcgggcgggcggccctgctgcggaacgacacgtcggccgcgccgccccggaaggcgacgagcggcgagatgcgcgcgagcttgcgggtcttgaacgccacgatggccgccaccagcgcgagcagcgccgccaagagcagcatcgccgccgccggaggagcatcgttcgtcgccagcacgccggtgaactgcgcgaagaagggcaaggcgaagggaacgagcgccgaccccagcgcaaggccggccgccagccccagaaggctcacgcccgcgtactccacgcccagcatgccgcgcaacgagcggttcgacagaccgagggccttgagcgtgccgtagtcggcgtagttctcctcgatggacatcgcgatggcgtgcgtgcagatgacgagcgctatcgcgaacagcaagagcgcgaacacgcccaggacggcgctgccgatgaccacgaccatcatggcatagccgaaaagcgtgtcggaggcgaacatgcccgtcgcggtgttcgcccaagaaaccttctcggcgatgatgcgcgtcagatcggcgccggtcaagcccgcctcgcgcgcctcgtccgacaggtgcgcgttgagctcggccatgcggtacgcggtcagcttcgactgcgcggggaagggggcgtccggttctcccccctgcgcgacggcctcgtcgacgagcgagcccacctcgtcgtaggccgcccgcgctaccacgtagcgcttcatctccagaaacggcgtgccgagctgcgggtcctcgaaaaagcccgcgatggtgaaccggcgcgcctcgtcgcccaccagcacctccagctcgtctcccacctgcatgccgggggacaccttgagcgacgccggcacgtaggcctcgtcgggccccggctcgggagtctcgtcggcaagacccatcccgtcgtcggagaacaggcggaagtcgaggacgtcgccccaggccacgagcgccgtgcccgaagtggggttcttgtccacggcctcgccgtccgcgccgtagaacctcacgggaacggcgagggcgccgttcagccgcgcctcgcccacctcgggcagcgcctccacctgggccgccacctcgtcggtgaggttcgcagcgacatcgacggcgtagacgtcgcccgccccgatctcggcgagcgcggcggcctcgcgtgcgttgaggtccgcgtacatgctcacggtgaaggtgagcgcggcggacgtgagggccatgagcaggaagatgccggcgaacgagcccttcccgcgcttgaggccggcggcgaccagcgttcgcatgagagccatctcgcaccccctaccaggccagcgacgacagccaggcgttcacctgggcctcgcgcgctttgagataggcggcgtcgccgtccggtcggaaggcgggcagctccagctcgcctttgatcgcgccgtcctccaggtacagcacgcggttcgcgcgcagggcgcacagcacgtcgtgcgtgaccatgcagatggactggccgcctcggttcagctcgcacagaagcgccagcacctccagcgtgttcgcgcggttgagcgcgccggtgggctcgtcggcgaacacgatgtcgggatcgttcaccacgctgcgcgccacggcgcagcgctgctgctggccgccggacgcctggctgggaagatggtgcgcgtcctgcgtcaagcccatgcgctcgatgagcgcgctcgcggcggcgcgcgtgtcggcgggagcgcggccctccttgaggtagccgggcacggcgacgttctcgaacagcgtgaggttgctcacgaggtgcgcctgctgaaacacgaagccgaaacgctgcgcgcgcagctcggccatgtcgcgctcgcgcagggaggtgatggaggcgccgcggtagcgcacctttcccgccgtgagcgcgtccatgcccgacaggcagtacagcagcgtcgacttgccggagcctgacgggcccatgacggcggtgaagtcgccttcgtacaaggtaaggtcgacgttgctcagcacgtgcgtctgcacgccgtcggccgcgtagctcttgcagagcttctcggtttcgatgatggggttcttcatgatgccctctcgtctcgctcggtcgttggaaggcatcgtatacgcgccgacattaaggagtccttaaggcgcgagggggagttccaggatggcggccaggccgggctcggcgtcttcgaggcgcagggagccgcccatctgctctgccaggtagcgcacgatgaacaggccgaggccggcgccgggcgcgtcgccggcgttcgagccgcggaagaaccggtccgaggcgaacggcaggtcctcgggcgggatgccggggccgcggtcgcgcacgcgcacgcggtagacgcgcgcggcggtgtccaggacgccctccacctccacggccgcgccgggcgcgtacttggccgcgttcgccagcaggttctccaaagcctgctcgaggcgcttcggatcgcagctcgcctgcgcctcatcgaggcgcccgagcgtcacgccgcccgccgcgtcgaagtccgcgaccgcccgcgccacgacgcgggcgataggcgcgtcctcgcagcgcacctggatgcggtcgaggtcggcgagcgcatggaggaacagatcgtcggtgagcgacgtcacctcgtcgcacttgcgcacgatggtgcgcgcgtaatcggcccgttccccctcgtcgcgcgcaaggcccagctcgagcgcctcggagtaggcgcggatggacgcgatgggcgtcttgatgtcgtgggacagcgccgcaacagccgtcttgccctgctccacggcttcggcctcggcggcgcgggcgcgcttgatctccgcgcgcatgttgtcgaacgcccaggtgaaccggccgaacggattgctgcgctcgtaggcgagcggagcgtcgaggttgcccgatgccacgtcctgcgcgaacgcctcgagcctcatgaaggggcgcacgacgctgaggtagaggtagccggcgataagccatgcggccgcggcgccgagcgcggcgagcgcccagacgagcgcgagggaaaggccgctcttcgcgtcggcggcggcgcgcagcgcgtcctgcgcgcgggagagcgccacgtcgggggatccctccccttcgggcagctcggcgcgagccgcgttcagctccaccacctgcgcgcgcatctgggcgcccggctcgtcgctcgcgagcagggccgtggcgacgagcgcggcaagggccagcgcgagcgtcgcggcgagggcggcgcccgcgagccgccgcgcgatgcgcgcgccctcgcgcggagcagccgttacgacggctcccccgacgcgtcgaagcggtagccccggccgcgcacggttttgaagtaggccgggcgggaggggtcgtcttccagcttcgcgcgcagccagctcatgtgcaccgacaccgtctgcggctccacctccgagaacgcgccccacacctcggccagcaggcgctccttcgacacagcctcgccctcatgggcgatcagaaagcgcgcgagggcgagctccttgggcgaaagcggcacgttctcgccgtgcttcgcaagggtgcccgcgccctcgtcgagcgaaaacggaccggccgcgagcacgccgcctgcgctgcccgcacgcccctgcgagcgtctgagcagggcgttcacatgcgccagcagctcgcgcagcgagtagggcttcggcaggtagtcgtcgccgcccgtgtccagccccacgatgcggtccgtctcgctcgtgcgcgccgaggcgaacacgatgggcacgtcgctcacccgccgaagcgccgcgcaggcggcgaacccgtcgtcgccgggcaggttgatgtcgagcagcacgaggtcgaacgggcgcgcggccagcacgtcgtaggcctcctcggcgcttgcggcgcgctcgaccgcgaacccttcgctctcgaggtagcgcgccgcgatggcggacaggtccgcatcgtcgtcgactatgagaatgctcggcacggctctcccctcccagtagattcgcgcgtagcgcgaaaacaacgagccaggttggcgctagcaagtcagcgaggccggccgcagcgtcggcacggcgggctgtatcgaaagcgccatgaatacatcttcgtaggggcgacctgctggccgcccgttcaacaaggcgcgtcttcgccggtcgagcgggcggccagcaggccgcccctacgggacgaacgccgggaatcgcgcgtttcgacggcttccgatacggccccaacctctttattcgcccagcatgtcctggagcttcttgaggtcggccatgttcatgccgcccatgccaccgggcaggcccatgcggcgcctgcggcccttcttccctttctttcctttctttccgccctgcatctcctccacggcgggcatcatcttcttcatcatcttcttcgtctcgttgaacttcttcatgagctggttcacgtccgagacgctcacgcccgcgccggccgcgatgcgcgcgcggcgcgagccgttcagcagctcgggcttctcgcgctcggccttcgacatggagttgatgatgacctccatgtggtcgaacgcgccctcgtccacctggccggccgccatggccttgtcgccgcccggcagggcgctcagcagcttcgacacgccgcccatcttgcggatctggcgattcatgtcgatgaagtcgttgagcgtgaggttcgcacgcatcatgcgctcggcctgctcctgctccacttcctcctgctgcaccttgacggcgctctcgatgaggctgaccacatcgcccatccccaggatgcgcttcgccatgcggtcgggatggaactcttcgagcgagtcgggcttctcgccggacgagatgaacttgatgggcttgccggtgacctgcttgatggacagcgcgccgccgccgcgggcgtcgccgtccatcttcgacatgatgacgccgtcgaagtcgacgcgctgggagaacgcgctggccacgttcaccacgtcctggccggtcatcgcgtccaccaccatgaggatctggtcgggcttcacggcgcgcttgatgttctcggcctcgtccatcatctcgtcgtccacgtgcagacggcccgccgtgtccacgatgaccacgtcgcgcaggttgtcgatggcgtcctggatgccctcctgcgcgatcttcaccggatcctggccgtcgccgcggtacacgcgcacgccgatctcgccgccgagggtttccagctggtcggccgcggcggggcggtacacgtcgcaggccacgagcaggggcgaatggttctcctgcttcaggcggtaggccagcttcgcggcagccgtcgtcttgccggagccctgcaggcctaccagcatgatgacgttggggatgcggctgctcaggacgagcttgctgtcggtgcggcccaacagctcggtcagctcgtcgagcacgatcttgatgacgttctgcgccggcgtgagcgaatcgagcacctcggcgtcgaggcagcgctccttcgtgcgggcgacgaacgacttcaccaccttgaagttgacgtccgcttccagaagcgccatgcggatctcgcgcatggcgtcgttgatatcgtcctcggtcaggcgacccttgccgcgcagaccgctgaatatgccctgcaggcgcgtcgataggttctcgagcatggtagatgactcctcgtcgtatgcgtcgattgagcgtaatgcatggaattatacgccagcaagacccgccgagccacaaacacacaagcaatccgagcgctcgtcagaaccatccgccgcggaggcatccgttgcggaatactttttcaaacaggaaacaataaagtattccgcattcggaatactttattgccatcgagcaaaccaacgcgttcggacggttataagctcttcatcggaatcaccctggaaatcgcaagatcgaaaggatggagctcgttttcttcttcgtactcaaacgtaacgcacgatccgttttcgtattccatgcgttccagatttcctcttgcatcgtacccaaaagaaatgcttccgcagaacgtatcaccatagtactcgtcgcaaaatgtcacctgtccacgaccgtcagagcaaacgcgcgcgaacccttcgacagaacgcagcggaaggaaaatgacgacaggctctcatttctgccccaccgttttaacatacatgagctttcctgcgaataatcaagaatactatcgacgcggcaatacctgccggtatcgcgaacatcggcaagcacatgatcaaactcgagaatatcatagggacaatatcagcatcactcgtatgcccttcggcagtccaatagccagcacaatagacgatgcttgaaacgactgcggtcggacagaaacaagatatgaaaaggtctgaaaagcttctgctcgtcttacaacataaagtcaaggcagtcgcagcaatcacaagggtcagcaaaccactccctaacacgaaagccatagcgaccttctcagcttcttctatgctgtaggacatgaaatacgcgggcaaaagcgcaggaacgactatcataaagactatggacaacactgccaacaagcatcccgcagcaaagctacccgaacctcgatcgacatccctttcgaaaaagtaaaagatcttcaaagccgttcctctattcatttttcagatgcactttcacaagagcgttggatacgaaaaacttatgcggtagcgcattctacgtcaattggccaaacatcgtctgtcctgcacgcgacagaatcgaagccattgttgaaggattttctactttttggtattcatactcaaaagagtaagctgaagcatatgcattagctatcgaaatggatttgagatttccgtagtcatcataagcgaaagcgcgctcctcaatcactccaagaccttcttgagatacagaaacagcgaccaatctaccagactcatcgtattcgcatgacttcgagtagctatcatcttcgtagttgccgctcacgccgataagaaacccggtttcgtcataacacgacgatctcgcatagctttccccattttccgttttcgattcgcttgatatttccgccaaaccaccttctggactatacgagtagcgatccacgccagaagcacgagtaactttatcggagccaaagctcacttcagattcccactcagcacttaatagtcgcccttcgccgtccggagtgcattggaacctcgtcgaagttacgacggtacctgcagtttcgtctgacaacttcttctcaacgattcgtccgactggaaaacccctctcatcgaactccgactcgacgaccacgatatcggagccgctgtcctggttgcgataaaccgctcggataacatttcctctatcgtcgagttccatggttgctatattctgaaccacgttgaccgcactaccatcatgaattgtagcgtgagcatcgatgctttttaacacgaacgcaggttgcaaattagcatcttcttgctcttcatcacctgcatcatggactccgttgcccgaacatccgaacaagcaaagtacagcgatcaagctaaaagcagtcgttagacccctcatcgttttcactccgcccctccttaacaaagcgcaactgctttccactagtcgctctaatcgaattaatccgagccttgtacacttcctttgatgacttgttatagcaagtcatcaaaggaagtgtagcacatactctgaaaccatgaaaagcgacggccgtagaataatactgggcaagacaataaagatgctgcgcgaggagcaacacctttcccaacgtcgtttcgctcttatggtgggtacgaaccaaactcacttatggcaaatcgagtgcggccaggtgagcgtcgggatcgatctcttgtgcaggattgccgatggactcgatatcaaggtcaaagatctcatagatttctaaaaaccagctttgcagacagccgattcaaccacgccataatcttcaggaacgcaagatcaggacagtcccaacaacgcttccaaccgcaagcggatgtagccgttcaaaagctccgtataccgctcgtcgagcgggaagtcggagtgcggagcaaactcgaagccgcgcagcgtcgcgagacgatcgcgcaggtcgtccgtcatcacgcgtttcgcctgataatccagcagcacgttcgacgggctcttgtaccacgcggctgatcgatccaggtcggaagccgtcaaacccgcgtcgatgtcgcggatgaacagcgacaggttgttgtcgaagatgggcgcagcggaaacgagcgagcgcgtccggttgtcgaacaggaatccgaagttcccaagatgacgatcgtcgttggcgatcagcgcgtcgaagaccgtcatttccgagaaacgctcgaacgcctccgtcccctgttcgacgtagaccgccgccacctcgtcgaacgacagcgtgccgaacatgctggagaacgtcgcgaagccggtgtcgcgactcgtgaacaaggggctggcgctgcacaactcgccatgccatcgcgccagatcgtaggacgcatgggaaaagcccagggcttcggccagctgcgccgcatagtactcggcatggggctcgagcccgttcgagttgggagcgccggccttgtacagatagcgctcgccgtcgacgacgcgccaggctttcggaaactggccgctcgtggtcagctcgcccgacagtccctccggcaccctcgacgtgtcgatcacgcccgagaacgccgccgtggcgacgagctcgtcgaacggattctcgtacaggttcttctccgcgaacatcgccttcgacccgtcgggaacgacccaatacgcatcgttgagcgaaaggccgttgcacgcgtcgagcatctgcatcgcgtcgtcgaaccgtatgccgtactggcgcacgatacgggaggcgaacgtccggttcttcgaaagggtgcgcgattcgatccaccgctcgaacgaagccgcgtcgcccgtcacgcgaaacggcagcagcccgcgcttcgactcgtcgcattccgcgctcgcgcaacgcacggcgccgctcgcgtcgcgcaccaaggtgaacgacgcgaggtcgtcgtcgtagagcttcagcaggtatgtccgcgtttcctccatgcgctcattctaccatcgcgccgcgaagcgcgttcggaacgcttttccaacgtacggcgccgaaaggcgtctcgcgctcggatacgccgccctttagaaataccgattgatccccgattcgtccttctcgcggcggatggcgccgctgccgaccaggtggttgaggatgacgacgccctcggtgacgatgcaccagcgctgcacaaaggatatctcctcccaggtgggatacgggacgttccacttgatggcgcggatgacctcctcgccggccagccccggccggtcgcgcacgatgccgcacgtctcctccaggcgctccaggtggtgatcgcgcagccagccgatgcgctcgtcgaaatcgtcgcgcggctcgccgtgcgcgacgaacagtttctcgcagcgcagcgcccgcaccttgtccaggctgtcgaggtaggcctgcaacccgtccgctccgtcggggaacagcgcgatgctgggcgatatgacgaacagcacgtggtcgccgccgaacaggatgcgcgattcgggctcgtagagcgccaagtgcccgggcgtgtgtccgggcgtctccaccacgcgaaaccggtagcgccccacctcgatggcatcgccgtcgcacgacgccacgagctccagtcgcgaggcgtcgaacaggcgcggctccacggcgtagcgcgcgtaccccgacgcgtcggacggcggcacgccctcggccgtgaacgcgcgccgcgccgcatcataggatgaagccgcgcgcgacgcgcgcaccgactcgaagtccacggggctcacgtacagcttcgcgccgggcagcgccaagcggtcgaccagccccgcatggtcgagatgcaggtgcgtgaggaagaagcgcatccgcgtgcggtcgacatcgagctcggtcaacgcagcatcgaggatagcgaagccctcgtccgacggcgctccggtgtcgatgacgagcgtctcgtcgccgtccttcacgatgtaacagttcgtgtcgttcgtggagatgttctgaaacggcacgcgcacctcgagcacgtcggggtcatgatggacctggacgaacgccatgctacgcccgctcgtcgaactcgcctacgagcgcgcgggcgaaatcgtgcgcgtcgaagtcgcgcaggtcgtccaatccctcgcccacgccgatcttgagcacgggaagccccagttcgtgggacacggccagcgcgatgccgcccttggcggtgccgtcgagcttcgtgacgatgacgccgtccaaatcgagcgcgcggtcgaactcgcgcgcctgagaaaggccgttctggccggtggtggcatcggtgaccagcacggtgtacacaggcagctgcgaacgcttgcgcaccacgttcaccactttctccagctcgcgcatgaggtcggccgacgtgtgaaggcgccccgccgtgtcgatgagcacgaggtcggcgccgcggctctcggcgcgctcgatggtgtcgtagcacacgctggccggatcgctgccgcgctcgcgggtgaccacctcgacgttcgcgcgctccgcccacacctccagctgctcgatggccgccgcgcggaacgtgtcggcgctgccgaggatgaccgtgcggcctgcgtcggtcgcctccttcgccagcttgcccaccgtggtggtcttgccggtaccgttgatgcccacgaacagcacgagcgcgggctgaccgcccagcacgtcctcgccgccttccgtgaacgtggaggcgatctggtcgttcagcaggtcgagcacggcgtaggcgtcgggcagcgccttgcgcgtggcctgatcgcgcagaccctccacgatctcggcggccgcggcgcccccgacgtcggccaggatgagcgtctcctcgaggccgtcccagaactcctcgtcgagatcggggccgcggtcgagcaggacgttcatctgctccttgaacttgtcgcgcgagcgggtaagcccctcgctgatcctatcgaaaaatcccatgtcgggctcctttcttggtcgcctgaacagtgtatcccaaat

SEQ ID NO: 8858 - DNA, 529 bp, Unknown
  gut microbiota DNA sequence
aacaccgtgcaggccgcgaggcacgcccacgaccccggctcgtttccttgggcggagagccgcgcctgcaacgcgaagagcagcgccgccgccagcgcgcagacgagcgccgcccagcccaagcccgcccggctcgcgccgatcgtctcggcctgcgcgtcgtcgtcggtgtacagcgggacggtgccggcctcggcgcgcacgatctgccacgacggccccagcgccacgctctgccagccgccgatgcggtacagctcctgcgcctcggccgagaagtcgcgctggaagtccactgcgtagtcgtacgcatggggctcgcccgcctcgaagcggtacaggatcccgcacgagaacccgctcagatgccatccccgcgcgctcatgtccgcgagcatcgccatgtcgtgctccggcataatggccaacccgccgcacaaccggtatctagccatggttctcctcgcccgcctctcccagctgcgcctccgcgaaggcgaccagccgcttgcgccgaacgaaatcgcgc

SEQ ID NO: 8859 - DNA, 690 bp, Unknown
  gut microbiota DNA sequence
atcgtgctccggcatgatggccaacccgccgcacaaccggtatctagccatgcttctcctcgcccgcctctcccagctgcgcctccgcgaaggcgaccagccgcttgcgccgaacgaaatcgcgctcgagcaccgcgcgcccctcgtcggtggccgcgtacaggatgcggctctcgtcctcggcgatctcgacgatccaccccgccgccttgagcttcttgagcgtcgtgtacatggtggccggcccgatcttcaccgcgccgtccgtggactcctcgacgccctgcatgatccggtatccgtgcaccggctcgagcgtagccagcaggatcaggaagatgctgtcggacagctcccccgtctcgtacgggctcttcttcgccatttcgttcctctcgtatatccatgatggatactatgctacaatgagcctgcttgcaagcgaacaatcttcgatcttcccactatactctatctggaaatggagcgtcccatcatggctgaagagcgtttggaagcgtcggctgcaagcgagcaggcagcaggaaatttcgcatcaggagaaagctccccttggggcaaggagcgcggcaaccgggcgttccggatcatcacgctgatcgccctgccccttctgtggatcgggttcttccactcccttttcacgggcaacgagggcaacatgtccag

SEQ ID NO: 8860 - DNA, 388 bp, Unknown
  gut microbiota DNA sequence
ccctggccgacgagctggacatggatccgtcgtatctcgaccgcgagctgggcgtgggcttctcgggcggcgagaagaagaagttggagatgctacagctgctattgctggaaccgaagcttgccatcctcgacgagacggactcgggcctcgacgtggacgcgctgggcgtggtgtcgcgcggcatcgacgcgtaccgtcgcgccacgggcggcgcgctggtcgtcatcacccacaacacgcgcatcctcgagcacctcgacgtcgaccgcgtgcacgtcatggtgcgcggccgcatggtggccgagggcgactcctcgctcatcgaatcgatcaacgagcagggcttcgagcagttcgagcaagccggtgcggaagcggcgcgcga

SEQ ID NO: 8861 - DNA, 14807 bp, Unknown
  gut microbiota DNA sequence
tggatgctcgacttccgcctcaaggcgctcgacacctaccagcgcttggaggcgcccgactggggccccggcctcgaaggcctcgacatggatcacatcgtgacgtacgtgaagcccgccaccgaccaacaggccgattgggaaagcctccccgacgacgtgaagaacacgttcgaccggctgggcatccctgaggccgagcgcgcctacctggccggcgtcggcgcgcagtacgactccgagctggtgtaccacaacatgcagaaaacggctgccgacatggggatcgtctattccggcatcgaggaggcgctgcgcgagccgaagtgggaggcgctcatccgggagaagttcatgacgctcatcccgcccaccgaccacaagttcgccgcgcttcacggcgcggtgtggagcggcggctcgttcgtctacgtgccgaagggcgtgaagctggacttccccctgcaaagctacttccgcctgaacgcgaagggcgcaggacagttcgagcacacgctgatcatcgtggaggacgacgccagcctgcacttcatcgaaggctgttcggcgccgaagtacaacgtggcgaacctgcacgccggagccgtggagctgttcgtgggcaagcgcgcgtccttgcgctattccacgatcgagaactggtcgaagaacatgtacaacctcaacacgaagcgcgccgtggtgcaggagggcggcgccgtggaatggatcagcgggtcgttcggcagccacgtgggctacctctaccctatgtccatcctggccgggcgcaagtcgaccagcagcttcaccggcatcacgttcgccggcgcagggcagaacctcgacaccggctgcaaggtggtgctggccgcgcccgacacgtcggccaccgtggagacgaagtccatctcgaagggcggcggcgcctccacgttccgctcgtccatcgtggccaccgagaacgcgcgggacgcggccgccagcgtgtcgtgccagtcgctcatgctggacgacatcagccggtcggacaccatcccggccatggacatccgctgcaagcacgtggacatcggccacgaggccaccatcgggcgcatcggcgacgacaaggtgttctacctgatgagccgcggcgtgtccgaggaggaggcgcgcacgatgatcgtgaacggattcgccgaccccgtgtcgaaggaactgccgctggagtacgccgtggagatgaacaacctgatcaagctagaaatggaaggggccatcggataatgggaaccctcacgatagaacacgcgaacgcgatgcccgcccctacctggcatcgcctgcacgtcaacgacgtggacatagagctgccgagcggccttgcagccgcccagcaggtggaagtgtcgtgcgaggaagggctgtggggagaagcggatgcgttcgaccgcgcactcctttccttggatgcctgcgcccccatggccgcggagagcggagcctccccagaagaggacgctgccatggaggggctcgacgctcccgcgctctcagcctaccagcttcaggcgctcgagaaccgctacctcccccctgccgacgtcttcaccaccggcatgggcgacgaggcgcgcgaatacctcgagttcgtggcgggcgagcccgtcgtgctggccacgcgccctgacgagcgcacctgcgcaacggtgcgcgtcgagggcgtggacggcgctgccaacgcggctgccgtcgacgtggtggccgctccgggctcgtcgctgtcgctggccgtcgcgctcgattcgcccgcgccgggcgcgggcgtcgtgggcgtgcgactgcgcgtgttcgccggcgccgatgcgcgggtggacgtcgccgtcacgcagacgctcgacgacggatggatcgcgctcgacaacgcgggcatcgtagctagcgagcgcgcccgcgtgcaggtgcgccacaccgtgctgggcgcgggccgcgcgtacacggggctcgacgccgacctgcgcggcgacgacgcgcgcctcgacatcgacacgcgctacctggggcatgcctcccagcagcgcgacttcaactacgtcgcgcaccagcgaggacggcgcaccgtgtgcaacctcgacgcgaacggcgtgctggcgggcgaatcggagaagacgctgcgcggcaccatcgagctcgtgcacggctgcaagggttccgtcggctccgagcaggagacggtgctgcttgccgacgagcgcgtggcgaaccgcaccgtgcccgtcatcctctgcgacgaggacgacgtggccggcaaccacggcgccaccatcggccacgtgcgtcccgagcagctgttctacctggccagccgcggtatctcgccggacgacgccgagcgcttgttcatcaccgcctccttcgaggaagcggccatcaacgcgcccgaccagcgcacccgcgcatccgtaacccgcctcgccgccgcccgcggcatcgagatcgaggaggccgtcgcatgagcatcgacatagccgcgaacccctacaagcaggacttccccctgctggcggccaaccccggcctcgccttcctcgacagcgcagccacggcccagcgccctgccgtcgccctcgacgcgcagcgccgcttctacgagaagatgaacgcgaacgccctgcgcggcctttatcgcctgtcggtggacgccaccgaggccatcgacgaggcccgcgcccacgtcgcgcgcttcatcggcgccgccgatgcgcgcgaggtcgtgttctgccgcaacgccagcgaggccctgaacctcgtggcgaaggcgttcgcccccaccgtgctggagcccggcgacgaagtgtgcatcaccatcatggagcaccactcgaacctcatcccctggcagcaggcgtgccgcgcggcgggcgcgcgcctcgtgtatctgttccccgacgaggacggcgtgatcggcgaggaggagttgggcgcgaagatcggcccgcgcaccaagatcgtcgcggccgcccacgtgtcgaacgtcctcggcatcgagaaccccatcgagtccatggccgagcgcgtgcatgcccacggcggcttcatggtggtggacggcgcgcaatcggtgccgcacctgcccgtcgacgtgcggaaactcggcgccgacttcttcgcgttctcagcgcacaaggcgctggggcccttcggcgtgggcgtgctgtggggcaagctcgacctgctggaggccatgccgccgttcctcacgggcggcgagatgatctcgtcggtcacgcaggaaggggccgtgtgggcgcccgtgcccgagaagttcgaggccggcacgcaggacgccgccggcatcgtggcgacggccgccgcgctgggctacctcgagggcatcggctgggacgcgttgcaggcgcgcgagcaagcgctcgtgcgcgccgccatggaacgtctggcggcgctgccctacatccgcatcatcggccaccccgacccggcgcagcaccacggcgccatcagcttcgaggtggacggcatccacccgcacgacgtggccagcatcctcgacgagcacgacgtggccatccgcgccgggcaccattgcgcccagccgctgctggcgtggctggacgtggagtcgtgctgccgcgcgtcgctggcgttctacaacgacgagggcgacatcgacgcgctcgtcgacggcctggacggcgtttggaggaccttcaatggctagcatctacaccgcggcgctcatggagcacaacgcgcatcccgactacaagtaccagatggaagagcccacgtgcacgcacgacggcgtgaaccccagctgcggcgacgagctgacgttggcgctgcgcctgaggggcgatcgtatagaggaggccgccttcaccggccacggttgcgccgtgagccaggcggcggccgatatgatggccgacctcgtcaccggcgagaccgtgggcgaagcgcgccgcttgagcggcctctacctcgacatgatcaagggacgcccgctcaccgacgaggagcgcgccgacctcgacgaagccgccgagctcgaatccatcgcccgcatgcccgcccgcgtcaaatgcgccgagctggcctggagaacgctggagaagctgctggaccagcaactggaaaaggcataggactcagtctgcgcgtcgtccgcaacgagcgacgcgcaaacgctcgtacgccttccacaagccgaagccgatcgaaccgccgaccacgttcaagatgacatcatccacatccacgacgcgatacagaccgccaaccatcgagctagcccaaccgtcagctgggctagctcgatggctgccgaacacgcaaccaggacaaacaacgttgtgcgaaatcgatgaaagcgctcggacagcaacggcggcatgaaccccagcggaacgaacataagcacgttaccgcccacgatagttactgcgatcgtccaccaccagccggtctgcgctgcatcggccaccgttcgagcgataccggcgaaaggcacgagattgatcgtcgcgccccatacgacaacctgatcctgaggcgagcccagctggagacccaccggaagcggaaagagggtgaccgccgccacggcgccgacgtagaccgtaagcaccaggtagaggcacgtgcgccgcattccgacccgctgcgccaagcatacgacgagcaccgcgaccagcgccacgcacgtcggcaacgccatgaaccctcgatcgaacatcatatccgcctccgccccacgccgcctccatctctgccgccgctttcattatacaggcatcaccagacgcgtatctctcacaccacctggtgccgcctgaacgcgcgggcggccaggggcacgcacgccgccagcacgagggcgtagacgcacgcgagcagacctatgaggtcgatgacgaacgacccgaccggatacgatacgagcgagttgaacagcacctggtcgttcaagccgttgatcggaaacaggtacagcgcgtgcagcagcacggcgttgccgccggaggggatcatgcccgtaaggaagatgagcgccgcacaggcggcgaagatggccagctgggagcgcagcttcgacgacaacagcagcgtgagacccgccaaccccagcgtcatgaggtaggctatccccaccgccgtccaggtcgcctcggccatcgtgaggtcgtacgggatggacagcgacagcacctgcaccggcaagtccccgccctcggcaccgaagaacgcgagcgccgcgcccatgatgatgagcgtcgccagcgcgaagtaggccgtggcgaaggcgagcgcggcgacgatcttcgccgccaccagcttcgagcggccgtagcgcgacgagagcagcacggcgtcggtgcggtcttggtactcccccgagaacacgggcgtgagcgcgatgcagacggccaccatcgcgaaggcgaagaacccgaggcaagccagcacgtcgctccatcctcccgcatacccgtaggccaaaggctcgcccaccccatcctgcttctccgtccagtacgcgcgctcggcatcggaatacgtccacgtaccgcccatgccgttgtcgagcgtgcgctgtagcttgcccgcgatggcttcgtagaacccgtcggcggcgccgtcgtcgagctgcgccgccacctggtacggctcgagggcgcctgccttccacggcgagaacaggtagacgtaatacgggtcgtacagcatgcggaactcgtcttcgccgtacgcctgcttcatgagcgcgtacgccgcgtcgtcgctcaggccggccacgtcggcgggatccaccttcgagaacgcgagcgccaggtaggcggccacctcttcccgcacgcgatcggcgtccagcacgccctcgtgcgcgacggccttctccttctgatgcgcgatggcggcggtgccggtcagcacctcgtcggcgttcgatgtcgtcctcgtctgcgcgacgttgagcgccatgatgccgcacagcatcacgaggatgcctgcgcaggcaatgagcgacgtgcggcgcacgagcagcttcttgagttcgaatctcaccagatcaagcatggtatattccttctctcaccagttgaataaaagtcagcgagaagcgtcgaggtgctcgagatcgccccgtttcgcggccgagcgtgcttcgcacgtgagggcaagcgaaaaagaggcgagatcaagtgcatcgacgcttcgcagcgtcggcacgttccgctgtccgtcaggacagcggaaccacctcgtcgcggaacacgtacaggtacacatcttccagcgtgggatcgagcgcccgcgcgccggccaccggagcctcgtcggccacgacgcgcaccaccgcgtgcccgtcggcagcgtagtggacgttgctcacgcagctcgcagccgccagctcgtcggcgcggcgcgcgtccacatggcactcccacaccttgcccgtcaccgtcgcgacgatatccgtcggcgcgccctgcatgatgaacgcacccgcgcgcatgacgaggatttcgtcggcgatgtactcgacgtccgacacgatgtgcgtggacaggatgacgatcttgtcttgcgcgaagctggcgatgaggttgcggaaccgcacgcgctctttcgggtcgagcccggccgtgggctcgtcgagcaccagcaccgccgggtcgttcagcacggcctgcgctatgcccagccgctgcttcatgcctcccgagaacgtgcgcaccttctgccgcgccacgtcggcgaggcccaccgtttccagcagctcgagcgagcggcggcgcgccgcgcggcgatcgagccccttgagcgccgccaggtagcacatgaagtcgagcgccgagaagtcggggtagtagccaaagtcctgcggaaggtagcccagccgggcgcggtactcgtcgccgagcaggcgcacgtcgcggccgtcgaagcgtatctcgccggacgtggggcgcagcacgtcgcacactatgcgcatgagggtggtcttgcctgcgccgttcgctcccagaaggccgtacacgccgggcgtcaaccgggtcgacacgcggtcgaccgcgatctttgatccgaactgcttggtcaggcggtctatcgtcaggtccatgccatgctccttgtcatcatagagtcgtcgaattccgggattcgccggcatcgccgggctcatcgggcagccgacgcgggggcgaacacgtcgaggccgccctcgatgccgcgaatccacgtgcgcacctcgtgcgcggcccagccgagcgagcccgccgccacaagcgcccatgcccatgtcgacgcctgggcgtacgcatcggggacgagggagaacgccgcatacgttcccgcgatcaccagcagcgcccacgcgcacgacagcgccagcgcctgcgatgaggggcaccggcgcgccacgagcagcgcgcccgcgcacgagaggaagtagggaacgcacgcgtgcacgagcgacgcgaagggatcggcgccgagcatgacaggcgccgcgagcgcgatggcggtgaccgtcaccacgtccgaacaccccagcacgatgagccgcgccagcgcgaccgcgcggcagtcgaagcggcaggcgtactcgagttcggccacgcggtgcgcagcgctggctagcagctcgggcaggcccacgagcaccgtcgccgccgccagcatgcccgagacgaccgggatgccgtgcgccatgccgctcgacgggaggcagaggaccgccatgacggccacgagcgcgagctgggccacccatacgcgcggatggatgaagcgcgcctgagcggcgacgaacccggcgaacgtcgcctcacggctccgctcgcccacggttgcgcccgccgcggcctccgcgctcgcgctcgaccgctgctccgacgccaccgccgcgcgcacggcggcgagggccgccgccttcgacatctcgtccggcgcgccgcgctcggcgcggtagtgcgcccgcagcagccgctccacgtcccgctttcccacgtcgctcatgcttcgtcctttccttccagccctcgccgcagctccgcgagcgcacggttgagccgccggttcaccgcgaaccgcgacactcccagcacgtccgcgatctcgcccactttgaacccctggtcgaagcgcaactccaccacatcgcgcagctcaggggagagcgcgtcaaccagcgcacccacctcgccgtccccgatcgccatcgccgggtccgcatcgggcgagccgtcgggcacgtccacgtcgagaggcccgacgggaagacgccgcgcccgcgcggcgtcgatgcagaggttgcgcgcgatggtgaacaggtacgcgagcggcttgccgtcgagcggcgagcgcccgctgcgcacgaaacgcaggaacgcctcctgcgccacgtccggcgcgtcgtcgtagaacggagcatgccgccggcagtacgccagcacgtcgtcgtaatgctcttcgaccaagcgatcgaacgcctcgccgtctcgcagcctgttcttcaagccccgcttcacctcctctatcctctataacgaatcctacgatcgatccgtgcgggttcagctgaaaatgtttggaaacggcgagtaccgcaacaagggaatcgtaccgtgcgcacactccgacgcaggctacgaaggcgttgaatgccgacaccccttcgatcgacgaaggggcgcatcagatcggttgcgtgcgaacgcggcgactacgcaccgctttccacctttcagaccacgtgtgcgaaacggtgggaaatcgtcgtatgcctcaggtggaaccgggcgggggtcggccgccccgtagcacggcgcagggacggctgtcgcacccgcgaaccgcaccggcacgcccggcgaggtatagaaactttgacccctctggatgtggaaatgcaggtgcggttcggagccgcagcccgatccgcttcgccgcttggaggaggagcgcatcttatcccacgaccgtgcttttctcgaattcgatatcagatagcctcttcagatccttcgtcgtgctcagcaatgcaacgttccaacattctctcgattgcgcccacgtcgtactcccttcccctgctgtcagttggcagtctgagcaacggaagcccgcaccgctcgagaaccgcatccttcatccgatcccgctcgtattgcttcgtgccttccttatggaactgccaagcatcgacctcgacggccaacaagggacgcttgttcatctcgcggaagaaaaggaaatccacgtgcgtacgcgggttcctcacgtacctctcctcatgcggcgacaggacgaccccgtcacctaccagcgtggacaaccccacatggcaccggaacgacacctgcgcaaaacggcccgttgcgagcatatcctccaaagccgccgccatgaggttctcggaatcgtagcgggaaacgcgcggtcgcttgcccaaatacctcgcacgctcttcggcgtattccttgtacagcaagtcgaacacggacctgatttggctttggacgatctcgaatccgttgtactcaatatagcgcgcaagctcctcgatatcgttgtccttgcgtcctcgaagattctgtgatgcgacgacgcgaagtttcttgaccgcacgggaaaccgcaacgttcaccatttgcgggtcgccgacgaaggatccaatggcatcctcgacggtggagagcacgatggcatcgttctcgcgcccttggaacttgtggaccgtcgcaaccgaaacgccttcgggaaccgctttcttcaactcgcacacctgaggattgaacggcgctatcacgccgatatcccgaacccccgaatcgaccaggtcaggtatgatttcgtcgcacaccacggagatctgacgcatgttcctgcgcccccgctcgtggttccccgacacggtgcgatggaaggagagcacgtcgcgctccccctcgtccttcgtcatgatgacaagatcaccgtcgtagtacatcttgttgcagaagccgattatctgaggatggcagcggtagtgctctttgagcaaagtcggctgcaatgcaggccaaaggcagagaaccgacgtgagcatgctgtgcttcgcatagcggtagcaatctgagacgcgatgcttgtcggcaatgcggtccgtttcgtctgcacgctccctcttcaccacgttggcgagctgcttatggtcgcctacgatgaccgcgtttttggcgcatgcaagagccaaggctccagctgccacgctaatctgggaggcttcgtccatgagaacgctgtcgtacctaaagcccggaccgagggaggtcgtgatcgagtgcgtcgtgctcaacaccaccggatactctttcgcgaacgccaccgatctgctccagaggcccctcaactcgaacgtcctacgatcccgattcgccgagtaacgttttgcaagctgggctttgaacgcccgcatggacttctcctcgatagtcgccatgttcgcctcgaagtcgtacgacctttccttgaggaggcgagcctcatccctcaactcccttagcttcgcacgatagaacgcgtcttgcagcaatggcacgacgaggaagtcgtcacgtttgaccgcatcaaggtagaacccgccgaagaaagccctgatgtaggcgcggtacagaaaaccaacggaacgaccctcctcgacgcgctgaccctccctaacccaaaaacgcaggatgtttcgagaagcccgtccgaagcgcggatcatgctgctcgacggttcctgtgccaaggctctcggcataggccttgaagtatccgtattctctttcgtacgcgtctatcgatgcgtcgatttcggcgagacgctcacgatctttaaaagctcgtcccaatccgcccaccaactcgctcacctcggcgagaagcctttcacgatcctccgaagccatatcccaggcttcgagagaatctggataggtcggttggttcccgaagaacttctccttggtttcgcccctccccagtagcgcgcagacgaaatccaaatcgttccggcccaacttgtccacaacgttctctacggctgacacgttgttcgacacgacggccgtggttctgtcctgcattatgttgttggcgatgatgttgagaatggtctgggtcttccccgttccgggaggcccctgcacaacactgagcctatcggaaaaagctcgctcgacggccttcttctggctcgcattgaggccaaagggatagatgagcggcgcgggatcgtcctgctgggatccaagacattcacccgataggtagcatgagagcaccgttccactcgcgaccgccccgatgccgtcgtagcgctcttccaaaatgggcctttccgtacgctcgttcagaagctcgtcagtggatgctaaggcccgcagataagcaaatacatttttcggacgaggatcctcaagcatgttctcttcgagggacacctcgccgattctgtaccttttacagctgccattcgagaagcggacggccacatgggcgtcgtaaaccgctatgcgttccacattgtcgaacgacctgccgcccctcctgacaaccgtccgacacggatcaagcgtttctttcggatgctcctccatcacgcgagtcaccccatacggataggccttctccccctttttgtgcctgatccagcatcgattccctgctcgttcgaactcgtacacgtcggcaggttcggctccgaaagggaccgaaccgttttcccttatgaaaaacaactgctcgacgggatccgctagctccatgcgaccacctccaggatagtcaacgacacgaggatggccaacgccgtgcttgcaagggtaccgacgaggtagcactcggcgaactccttgtcatcgagcattttgaaacgagcgatgctcttggccgtcaacacgaaggcgatcgcgccgaactggccgcagagcgcgagcacggagatgatggttcgctcaagcatgcctatccagcgtcccgcccgcagctcttcgaccgtgctctcgccatcatgcatcgcatcagcaccctcaatcctcaccgattcgagcaggaggcgaacgaaaatcgcccccggacgccagatgatcagcagcaccaggcccgtcgccaaagccgtcgcagcggacggcggactcatgacgccggcaagaaccccgacgacgccgatcgccggcgagccgccgcagaacgccgcgaccaccgctgcgcacaataatatgtgaagcgtctgatcgatcacgaaaacgacaagcgatgatccggctcgtttctcgagtcgcgccttgccgaaatctatcagcgcatgcgaaagcgacaaggcgagccaaacgggaacgatgctatcgagcgggagcgttaaggaaacgaaaagcgccatgcacagcgcatagtacccgcaatgcaaagcgagcagggtcccgctttcgcccttgcctcgagcgacgcggttcgtctgtagatagaaatcggcgatgacgtgccctgtcagcacgagcaccaaagcgaatcccagcgtcatagagcactcaccgcccaaactcacgcatcgagcaataagagaacaaggctgcggcgttgcgctcttcggcgacgcatccctgagcgagaaggcggtcgatcccctgacgcgacataccggagcgttgggaaagcgcatacgaagcacccacgagatccccttcgaggtagtgaaacgaactggcacgctgtccgacctcgagtctcaccggctcccaaaagctgtccgctccgtcgtcaagggacgatagcaagcccttgaacagatccgatccagcccgacgacgcgaagcgccgaccatacggagctctagcagatttttgcgtcgtgttttcaagttgtccgaaaacatgtcacaaccccaagcggccagcaccggatagaagaactcgaccgcaagcgccatgtcgttttgagtcgccgtcctcattttgccaatgctcagcgagtgatccataagggtggtcagcacctcgtctggaagcccctccgagcggagaacaagatcgaagcgcctcctcttctgagcctcgaggatagcggagcgtgcataatggtaggcttcgccgtcctggcttgtggacgctccttcttcaaggcgcacgtcccacgtcccaacgcccaagccgccccgaagcactccagggccaagcaggaagcatagaaagcgatagtaaaggaaagctgtcgcaggttctcggaaaagtccttggacttcgtcgcctgcgctgaaaacaacttccttctcgatgccctccttgaagagctcgttggcgaaaagaagcgattcgtttgtcaggtcctgcaaatacccacgttcttccgctcggtacttgcgagatcccttgatgtccgcaatgagcgccacatagtactgcatgaatccctccttggcacggaagctgtttgccagaggctcttactatagcaacagaatatattgctttcaagaataagcaacgttttttattgctaaccttcattagcaataaaaaacgttgctatgataagctgctcctgccggatgccttccggacatgcgcggcaccaatctcgcctaccgcccgcaatagcggtatactttcccaaccctatcaccttcgagaaaggaattccctgtgaagacgcttgccaagatcagcgacttcgcgggaaagtacatggcgatcatcgcactcgccgttgcgatgatcgccttggtctttcccgccgtgtccgccgtcgtgaagaccagctacgtgaacatcctgctgggcgtcgtgatgttcggcatgggcatgaccctcaagctggccgacttcaaggtggtgttcacgaagccgaaagccgtcatcgtgggcatcctggcgcagttcgtcatcatgccggtgctggcgttcctgctgacgatggtgttccagctgccgcccgagctggccgtaggcgtgatcctcgtaggctcgtgtcccggcggcaccagctccaacgtcatgacgtatctggcgaaaggcgacgtggcgctgtcggtgggcatgaccgcgtgcaccaccatcatggctcctatcgtcacgccgctgctcgttctgctgttcgccggccagaccgtggacgtgaacgtggtcgatatgttcctgtccatcgtgcaggtggtgctcgtgcccatcgcgctgggctttctcatcaactacttcttcgagaaggcggctcgggccgcgtcggccgttctgccgctcgtgtcggtgatcggcatctcgctcatcatcatggccgtggtggccgccaaccaggcgaagctgctgacggtggggccgctcgtcatcgccgtggtgatgctgcacaacctgctgggctacgcgctgggatacctgaccgggcgggcgctgcgcctgtcgaaggcccaaatgcgcacgctgtccatcgaggtgggcatgcagaactccggcttggccacttcgctcgccacggtgcacttcgccagcatgccgctggccgcggtgcccggtgccgtgttcagcgtgtggcacaacatctccggcgcagtgtacgcgaacattctcgcccgctcggccggcaaagacgccgtcgaggcggacgaggtcgaacaggctgccgcgtagcgggcgcacgttgccgcgggaaggcccgcacgaagcacacgaacgaagcctgccggcttagcgcatggggcgcaggccactcgttccaccgcccgaaccacgcgtcacgaaatcggcgtttggtgccggggcgccgctggcgtacaatcgaatcca

SEQ ID NO: 8862 - DNA, 367 bp, Unknown
  gut microbiota DNA sequence
cgctcagtcgtcctgtccatcggcgcccacctcctcgaacgcatcgtcggcagccacgagaacgaggctgaccctccctgcgaactgggcttcgcgcaccgcgtcagcttcctcgggcgacacttccaccgtgacggaggcggaaccgctctgcacgccggttgcatcgtcgcccaccgcaacgacgcgggcacgctcgcacaccgtctcgaggaacgcctcgcccgccgacgcgccctccgcagacacgatgcgcaccgtgtcgtagggccgcacgtggcccgcgagcccggtctccacgtccaccgcgagcgtcaccgcctgcaagcccgctcccagctcggccgagaggcgatcgcctcccatc

SEQ ID NO: 8863 - DNA, 1147 bp, Unknown
  gut microbiota DNA sequence
ctcccggtcgtcgtcggcgttctcgagcccttcgtggcccgtggtgaagccgatctcggcctccacgtcggcgccgtactcgtgggccagctccaccgcgcccagcgtcaacgccacgttctcctcgtagggaagctgcgagccgtcgatcatgatggccgagaaccccaggtcgagggcgcggcgcacgtagtcgatatcctcgccgtggtcgagcatcacgcacacgggaacgcgcgaggcctcggcgcgcgccaccatgatggggccgatcacgtcgatggacgtctcctcctcgtgcagctgcgcgtgctggatgatgaccggctcgtcgcgttcctcggccgcgccgatggccgcgagcaaaagctcgaggttcggcgtgtcgaaggcggcggccgcgcagtcgttctcttccgcccaggcgaggacggttctcaaagatacgagcatgggcctcccctacttcttcaggtacggcgtggtgcagggggcgttccataggcgcagcagctcgtcgtccatgcgcgccatgaacatctggaacccggcctgctcctgcacggtcagcatctcgcccacgaagttcgccaccacttcgatgtcctgcttcgccagctccttgaccgcggcgcggtacacgatgagctgctccatgagcgtggtggcgcccgagccgttgatgatgagcatgacccgctcgcccggctcgatgccgatgtccttcacgagcgcgttcaccataatggcggccgtctcgtcggcagacttcaggggctggcggccgccgccctcctcgccgtgctggcccatgccgatttccatctcgtcgtcgccgagctctgccagcagcgtgcccgtctgcggatgcgtggcgccgcgcacggccacggccagcgtcgccatgttgtcggcgaagcgctgtgcgacggccgccacctcctcgaggcttctgccctcggcggccgcggcgccggcgatcttgtaggtggggatgcagcccacgaggccgcggcggtcgtcggcgttctcgcgcggggcgttcgacacgtcctcctgcgtgaccaccttgaccacgttgaggccctgcttcttgcactgcttcatggtcatgttgcccgtcagcatgtcgccggcgtggttgagc

SEQ ID NO: 8864 - DNA, 880 bp, Unknown
  gut microbiota DNA sequence
ataatcaaaaatcagatataaaatttgttataaatatataacaaattttgctaggaggcacgtatggttatgcaagccgctttgccccagatcaggcccatcagcgatctgcgcactcgtttgaacgatatcgagaacctcgctcgcgagtcgcgcgagcccatcatcatgacgaaaaacggcaccgcctcgctcatcgtcatcgatagcgacgcttatgacgagcatctgcatcacgagcgcgccgtgcgcaagctgcgcgaagccgagatagaagagaagtatcgacccgccgccgtctcgtacgacgaagtgaaggcgcgcgtggatcagctcatcgaagcagcggagcatctcggtgcgcacgattgagttcaggccgcgggccagcgtcgatctcgatggcatcctcgtatacatcgcacttacattgaagtcgccgcaagccgctcgaaataccgccgatgccatcttcgccgcaatcgagagagccgccgagcttcccgaactcggccaaccgttcttcgacgaagatctcgatcatcaggggtatcgccgcgtactcgtgaagcgctactggatctattacacctacgatgcccatacgcttaccgtgcgtcgcgtgttccacacgatgcaagacaccgactgctacgggttcgagctgctggacgactgatcgcatccgaagcacgcgccgctcgcgctgcgacgggcgcaagcgcgaatgcaaagaacgcgacaccttcagaaacggcgcccttagcctgccacgccctgcttgatggtctcctgcaaccgagccaggtgatcctcgtcctcgatccactggtggctcagcgtgcccagaggcaagtcgaagccgcacgcctccaacgcc

SEQ ID NO: 8865 - DNA, 275 bp, Unknown
  gut microbiota DNA sequence
tgtcggtcatctggtcgagggaaaacgtgggttcgatggttttgaagaggtcgaaaaagctgaggggcttcgaacttccgtcgtccgcgcacagaagttcgctctcgcccgagtcgtcagcctcttccggcaaggcggagagatccgtatccagggtgccggcgcagtcgaaatggaactgctggttccatccgttgttcctcgggtaggcgataagggggcttccatccgccagctggaagttgcacagatcgacaaccagcccgtttctctta

SEQ ID NO: 8866 - DNA, 1014 bp, Unknown
  gut microbiota DNA sequence
ctgtggcgcgcgatcctgctgttcacggccacggggctgttcttcctgcccgtcatcggctcggcatgggcgggctgggcgctcgtgctcatctccatcgcgcagacgctcgtggtcatgctgttctggacgatgctggccgacgtggcgcatcattcgcgcacgtcgccttacgtcatcttcggctcgggctggatcgcctactcgctgccgttcgcgttgggcgagctggcgggcaaagcggaagggctgcacggcgccggatctgcggtgctgctggcgttggcctacctgctgaccatcgccgcggtgttcgcgctcaacgaggcgaacttctcgcagcgccgcatcttcgccgatttggagggccccgcgcccgaacgttcgatgttcgcgagcatcgacgagggctgcgagcgcttggggtcccagcggggcctcaccgcgcgcgaagtggaggtgctgcagctgttgtgcaagggtcgctcgaaaagctacattgcagaaagcctgttcatcagcgagaacaccgtgcgctcccactcgaagcacatctacgcgaagctcgacgtccattcgaagcaggagatcctggacttgatcgcgcggggctaggcgatccctgccaccttgccgttcctgtccacgaaatacgcgcccaggatcgcatcgcgctcgcgggcgaacgcgatgccgcgttcgatccccaatgccagcagggtggtcgagtagccctccgcatcgatcgaacggcgcgccaccacggtggctcccgcggcgtccgtctcgacggggaaacccgtcttcgggtcgagaatgtggtggtagaacacgccatcttgctcgaagcagcgctcgtacacgccgctggtcacggccgaggcgtcgcgcacggtcacggcgcccacgatggagcgcttgtcgcgcggatcctgcaagcccacgcgccatgggctgccgtccggcttctgcccgtgcgccatcacgttgccgcccaggttcaccacgaacgag

SEQ ID NO: 8867 - DNA, 1604 bp, Unknown
  gut microbiota DNA sequence
aggccccgcgcccgaacgctccatgttcgcgagcatcgacgagggctgcgagcgcttggggtcccagcggggcctcaccgcgcgcgaggtggaggtgctgcagctgttgtgcaagggccgctcgaaaagctacattgcagaaagcctgttcatcagcgagaacaccgtgcgctcccactcgaagcacatctacgccaagctcgacgtccattcgaagcaggatatcctggacctgatcgcgcggggctaggcgatccctgccaccttgccgtccctgtccacgaaatacgcgcctaggatcgcatcgcgctcgcgggcgaacgcgatgccgcgttcgatccccaacgccagcagggtggtcgagtagccctccgcatcgatcgaatggcgcgccaccacggtggctcccgcggcgtccgtctcgacggggaagcccgtcttcgggtcgaggatgtggtggtagaacacgccatctcgctcgaagcagcgctcgtacacgccgctggtcacggccgaggcgtcgcgcacggtcacagcgcccacgatggagctcttgtcgcgtggatcctgcaatcctacgcgccatgggctgccgtccggcttctgcccgtgcgccatcacgttgccgcccaggttcaccacgaacgagtccaacccgtgctcggccagcagcgcggaaagccggtcggcgatccatcccttcgcgatgccgcccacatccacggccgcctgcgggtcggccagctgcgcccaggacccgccggcctctccggcctcgcttacgcgcagcgcgcgccaatccacgtgcgccagcgcgcgctccacgtcggcgcgctcgggcaccgtgccctcgtggaagttccacagccgcaccgccgagcccacggtgacgtcgaacaggccctcgctgtcggcgcagtacccgatggccgcgcgcagcagctcggccgtgtcgtcgtggacggccacgcgcttgcctgcagccgcgttcagccgcgagatgtcggagtgcggcagcgtgcgcgaaagccgccgctcgaacgcgcgactcgcgccgcgggccgcgtcgaacgcgggggcgcactgcgcggcatcggcgtaggcttgcaggatgatgatcgtgttgaacgcgtagaactggtgcgtcatcatgcccgcgtcgttgggcccgtgcgtttcgtgcacgtcttccagcgggatggggtcgtatgcgtcgcgatattccatgccgcacagtatatcacccggttcgtgtcatggcacaacctgcgaaaacaccccgtccgtgtactgttgcgccacccgtttgcgccgcatcatgaacccatcgcgatcgaccggcgggcattccctccctgatcttcccgctcgtcagccgatcgcgatccggcagcggctcagcgaagggtcgcgccgcgacggtgagggaagcagacacaaccaaggaggagccatgatccagaacccgaacgaaatagccgcccgccagcgtatggaagaagccatgagtcgcatcgaggcgaacgtgcgcacgcgcctgcagatgaaccgtcgccagttcatctgcggcagcgccgctaccatggcgctggccatgctcggcc

SEQ ID NO: 8868 - DNA, 662 bp, Unknown
  gut microbiota DNA sequence
cgccgcccgccagcgtatggaagaagccatgagtcgcatcgaggcgaacgtgcgcgcgcgcctgcagatgaaccgtcgccagttcatctgcggcagcgccgctaccatggcgctggccatgctcggcctggccggatgctcgccgaaggccgacgcgaacggcaacgcgggcgctcaggcttacaaggcgggcacgtacgaggccagcgccgagggccgcaacggcgccgtcaacgtgaaggtcacgttcaccgacgacgccatcgacgccatcgatgtcgagcacgaggaaagccgcaacatcggcgacgctgccatcgatatcctcaaggacaagtatctccagtcgcaaagcctcaacttcgacaccgtcacgggcgcttcgctgtcgtccatggccttcgccacggccgtagccgagtgcgtcgaccaggcgggcggcgacgtgaaggccctcaagaaggccgacacgggcatcgagcccgcggccgccatcgacgaggactgcgacgtgtgcgtcgtgggctccggcggtgccgcgttcgcggcggccgtcaccgcggcggaggccggcaagacggtggtcatgttggagaagatggacatctacggcggcaacacgaacgccggcgagggcacgctcaacgcgcccgaccccgagc

SEQ ID NO: 8869 - DNA, 331 bp, Unknown
  gut microbiota DNA sequence
ttccggcggcgcggcgttcgcggcggccgtcaccgcggcggaggccggcaagacggtggtcatgctggagaagatggacatctacggcggcaacacgaacgccggcgagggcacgctcaacgcgcccgaccccgagcgtcagcagcccctcggcatcgaggactctcccgacctgttctaccagcagacgttcgaaggcggcgacgagctgggcgatcctgcgctcgtgcgcatcctggccgacaacgcgctggacgctgtgcactggatggaggaccacggcctggtgtacgagaaggaaccgttcacggccatcggcggcctatggcag

SEQ ID NO: 8870 - DNA, 1189 bp, Unknown
  gut microbiota DNA sequence
agagcccctcggcatcgaggattcgcctgacctgttctaccagcagacgttcgaaggcggcgacgagttgggcgatcccgcgctcgtgcgcatcctggccgacaacgcgttggacgccgtgcactggatggaggaccacggcctggtgtacgagaaggaaccgttcacggccatcggcggcctatggcagcgcggtcacgccgtcgaggtggagaagaagggcgagcagggcggcagctactacgtgtcgtgcctgaaggacagcgccgacaagaccggcaaggtcacgctgtacaccgacgcgaaggtcgaacagcttgtcgaggaggacggcaaggtgacgggcgtcgccggaacccgtccttcgagcggtgcttccgttgccgtgcgcgcgaagtccgtggtgctggccacgggcggctactcccgcaacgccgagctggccatggagtacgacaagcgcgtgacgaaggacatgccctcgtcgaatgtgtgctcgtctaccggcgacggcttgggattgggcgaaggcgtgggcgcgggcctgcgcaacatggagctggtgcagatccacccgctgggcgatccccagaacggcggcgtggccacgttcgtgggcaactggctgggcgtcgaggactacgtgatggtcaacgacgagggcaagcgcttcattcgcgaggacgagcgccgcgacaccatcgccgacgccattctggaacagcccaacgacgagatgtggctgctcgtggactccaccgacatcgcggccgaccgcgccgaccagatcgccgagctggtggagaagggccacagcttcaaggccgacgacatcgaagatctggcgaaccagatcggcgtcccggctgatgcgctggccgagacggtggagggctacaacgcctgcgtgaaggccggcgtcgacacgcagatcgccccaggcaaggagctgctgggcaccgagctgtccgatcccgcgtattacgcctccaagcgcatccccaccatccactacaccatgggcggcttgtgcatcaccaccgacgcgcaggtgtgcaccgaggcgggcgaacccatccccaacctgttcgcgtgcggcgaagtcaccggcggcgtccagggcggcaaccgtctgggcggcaactcgttcaccgacctcatcgtgttcggccgcatcgccggagcctcg

SEQ ID NO: 8871 - DNA, 7979 bp, Unknown
  gut microbiota DNA sequence
tgacaagaccggcaaggtcacgctgtacaccgacgcgaaggtcgaacagcttgtcgaggagggcggcaaggtgacgggcgtcgccggaacccgtccttcgagcggcgcttccgttgccgtgcgcgcgaagtccgtggtgctggccacgggcggctactcccgcaacgccgagctggccatggagtacgacaagcgcgtgacgaaggacatgccctcctcgaatgtgtgctcttccaccggcgacggcctgggattgggcgaaggcgtgggcgcgggcctgcgcaacatggagctggtgcagatccacccgctgggcgacccgcagaacggtggcgtggccacgttcgtaggcaactggctaggcgtcgaggactacgtgatggtcaacgacgagggcaagcgcttcatccgcgaggacgagcgccgcgacaccatcgccgacgccatcctggaacagcccaacgacgagatgtggctgctcgtggactccaccgacatcgcggccgaccgcgccgaccagatcgccgagctggtggagaagggccacagcttcaaggccgacggcatcgaagatctggcgaaccagatcggcgtgccggccgatgcgctggccgagacggtggaggggtacaacgcctgcgtgaaagccggcgtcgacacgcagatcgccccgggcaaagagctgctgggcaccgagctgtccgatcccgcgtactacgcctccaagcgcattcccaccatccactacaccatgggcggtttgtgcatcaccactgatgcgcaggtgtgcaccgaggcgggcgagcccatccccaacctgttcgcgtgcggcgaagtcaccggcggcgtgcagggcggcaaccgtctgggcggcaactcgttcaccgacctcatcgtgttcggccgcatcgccggagcctcggcggtggcgaacgcctaagcggcggcgtttcgactacgccctgcgtttcgcgtctgcggtcaagaaggtcggcgtccgtgcaagggcgtcggccttctcccgttcggcgctactttcccgaggcggcgcgcgagagcttcagccgagccagctccgattgctccgcaacggcgcgaagcgcctcgtcgcggatgtaggcggaatcgtctacggtagaggttccgcaaagaagcgtagtcaaagctttggagatgtcgatgaggcgcttgttcagttcacgatctgcgggagtgttcatcagcgtcatccctttcaagtccggtggttcgctcgtggtatcatctagtgcgatcgttgaagatcgctgtttatgcgcgcaatggcaatgagaggcttccattgcgtccggcggtcacgatatgctccgatcggctgatattcatgacggcggctcttttccgatgatcgtggctctgcagtaatcttaacgtcagacaatttatcataaaacattaaatctgtgatggtggcttcgccgttttgttccgactgaatgcccagatggactgcaaaattcctaattgtaatcatcggattacgcaacttgtcgcaccggtatttcagaagccccctagcagcaaggtttcattgaatgctagtatgcttttgtaagcgtggagagacggttttgcgccatgtttgtccgggatgcatcgatcgtacgacgaggggctgggtgtatgaggtttaccgaagaggtagttctgttcgacttcgcgggaatcccgatggtgggctgcctcggtaccggatatgcgatcggtttgaccgagcagggcgctgcggtttgcgcgcgcatgctcgaggaggatgttcccgaggacgatgtgaccgcggtggatccggcgttgctggaacatcttgcgcgcggcggcttcttccagcgggtcgttgccgagccgcgcgtgctttcggcgtacctgcacgtcacgcagcgctgcaacctcgcatgtgcgggctgctactcgctggacgagcatcgcaaccgcctggccgacgcgcctctggccgacatgaagcgcgcggtggaggggcttgccgccgccggattgtcgcagctgatcatctcgggcggcgagccgttcttacgcgaggatcttcccgacatcgtggagcacgcgaagcgcgtctgcggcatcgcgtcggtcaccgtgctgtcgaacggcacgcgtatgaccgaggaagcgctggaacggcttgcgccgaacgtcgattgcgtgtcggtgtcgttcgacggctgctcggctgctgcgccggcgtacatcaggggcgagcagcgcttcgacgagctggtcgaagccgtgcgcatggtgcagcgtgcgggcatcccggcgcacatcattcccacggtgcatgcgaagaacgtggacgacctggcctcgtacgtgcagctgtcgcgcgatttgggcgcgtcgctgaacttcagcctgctcacctgcgagcctgacgacgaggtgttgggaggcctgctgcccggcgcggacgagctgcgcatgctgggtcgcgcgctgctgacgcttgacaacggcaagccccttcccgcgatggatgcgcccgtaggcgtgaacctcacggtgaagcgcaactgcggcgccggctgcaagtcgctcagcgtggacgccgacggcaccatctacccgtgccacatgctgcatcgcccggagcttgccatgggcaacgcgttcacgggcgccgtgctcgacgcgctgcagacggatgtgtctcgcacgttccaaaccctcgacgccgaaaagttcgaggactgcggagcgtgccggtatctgcgaatctgcgggggaggctgccgagcccgctcgctgttcgaatcgggcaacctggagtcgaaggactcctactgcctgatgacccaggaattctacgacgtcctgggaaaagccatgtcagaatcgctacaacaaaggaggtgaaagaatgctgttctatagcgaagtggatacgtatgcaaactgtcctgttcttggctttgggggcatctgcattgctcctggtttttagaatgctttcgattatcgaaaagggtctctttcttgaaacgggatccttttgctatttcgatatccgaataccctaatgctatgattctctattcaaagagattttcgaggaggatatatgcaatgtgaggacaaggtcgaaacggaacactcgcttgcaaaggtgcataaggtatgtcggttgatagggatcattgtcaaaatcatttttgtagtcttctgtgtttgttggctttcaaccgttctattaatgatttattcgctaattaatcctagcgaattgggagctgctgagggtgtgagcgttcctcgaatcgcgttgtacttcgtacatggttttgcggtagcgctaatctttgttgtgtttattggcatattcgttgatgcggtgaaaggtcaatctccttttgtaatgaagcaagtgaaaagacttcggctgatcgcaggtctcttagctatttatgccattgtcgatgttgtcatttctgggcatattggattagtccaatatgcaggattaaattctggatacgtgtctaccggcggcaatgagatcatacctattaacttagcgccaattatcggagcatccgttgcgtttgcattctcttttgtgttccagtatggcgtccttttgcaagaactttcggacgatacgatataggtgcgtattcgatgccaatcgttcttcatctcgacgaggtcatggcggatcggcatatctcgctgaacgagcttgctgacaaggtgggaatcaccaacgtcaatctctcgcgcatcaagaccggcaaagtcagggcggttcgcttcagcacgctcgacatgttgtgcgaggtgctcaaatgccagccgggagatatcctcaaacacgtttccgctgacgaggcgaacgccatgttcatcgacgagaatgccgagctgtaggccccgttcgtgtgcattttgcagatcgtctgcaattgccatttgacaaatgcctccaagacaggcagaatattgccccgcgcgataagcgcactacccgtggggatgtagctcagctgggagagcatcacgttcgcaacgtgggggtcgtgggttcgaatcccatcatctccaccacggaaatctgatcggggcgaggccaacggcttcgccccgatttgcatattcggtgctccgtgaagttgctcatttcgattctgcatgctataaactgtttggtcgcatcttatggggcttccaagtgccgggggatgtcccccggcaactctattagcccattggggcgtggcgattgcggataatcgaattgtgaaggtaggctgacggaatcggcatgcctccttacacagcttgttggagcgctctggttttgataaaatgtatactagttggactggctgaaaggcccgggtccacccagcggcgggggaagtcccccgccatttctattcctaaggggtttcgtgtccgagctgagcattttcattgacgaatcgggcgacttcggaagtaattccgagaactatttgctgacccttgtatttcacgaccagtcgaattgcattgatgccgagatccaagcgttagctcatcgtgtacaggaactaggattgccttcggatcgcgcacttcatgccgggcctatcgtccgcaaggaagacgagtatcgcagtgttcccttgtccacaagaagagctgctttgagccgactgtatgcttttacgcgtcgaaccggagtatcttacataacgatttccgttcggaagaaagaatgccccgataggattaggttgaaagcacgactcgcaagagagcttgcaggtttcttccgcgacaacatggcttacttccttagcttcgacaaggtgaccgtctactacgacaacggtcaatcgcctataaccgagctcgtagggacggtatgcggatcggtgttcttcgaggtcgactaccgcaaggtagttccttccgactatcgtcttttccagtcggcagacctcctctgcacgctcgaactcgttaggatcaaagctgatcgacgcggtctttcccattcagaagaaatattttttgaaagcacaagaaagcttaagaagaattatttagacaagctcgaaaaaataagatttcgatagccgtcaaaggatgcatcgctattttaaatgcataacgattgcgatcacgtgcgtgcctcttggcgagatggtgcattcgcgatgctgcagtcgaagactcggatccttttccactgtggagacctaggtggggttgagaccaccgacttcgactccggtttctttggtagcttgcagagcgaaacgtggctttactttgttggctaaggtgttgtcgcttcgattcgatataggtaaagtggttaggtgatttatggagcttatatcgcaaggggcgctatgcaattaccggcaaatttatacatccttaccaggccgaacaataaatgtatgccctcaactttctctcgttttgagcgactgctctcaaaacgagaggagatagtggagttttcggatcacgaaatagcttcgctcgatgcattcgtttcgcttatctccgagcatccgcgtttttcgattgggctgctggatggttttgtgttctcctattcgataccgcacataggaaaagagttcgatctcttaatgatctcgagtgacagtattgttaacatcgagcttaagtccaaaagagtgagcgatgataaaaagtgtgctcagctagcaagaaacaattattaccttagttttatagagggcaagaagatagagttatttacttttacggccgagagtggagatttagagaaatattcgaatgggtcaatagtttcctgtgaaatggatgtattgatagaaaccttgcttcttgctagagataggttttctggagactacgatgagatattccgcgaaaagaaatatcttgtttcgccagttaacgacgtttcccgctttatgtcgggaggatattttctgacccagcagcagcaagagattaaaaatgaaattctccggaaaaattctgaaggggctttacgaggggcggcatacaaaatcactggaacggcaggaaccggtaaaaccttgcttctatacgatttagcaaaatcgcttgtaggagagttgccgtcgtgcgtcattcattgcggccaacttagcgaagggcatcgcttgcttaattcttcgcagagttcattttcggtagttcctgcaaaaggttgcgagaaaatcgcgctagaagactacggagcgatattcattgatgaatgtcatcgcctacggcttcaccaattcaatgaggttgtaagaaggataaaagagaccgaattgccttgcttcttctttcttgactcaaatcagacaatgcaagcttcggaaatccgtaatgagatttctagcaagattatcgagactatgccaaacgcaatttgcaaggaactgtcaaaaaagattagaacaaacaaggagatagcagcttttgtgagacgtttgttctcgctaaaatctgaaagcaaccaaatacgtttcgagaacatcgaagtattgtatgcgggcgagatcctcgaagcgggaaaaattattgaaagctacaaagccaacggatatcaatatatctattacacgccttcacagtacaaaaaatggaattctgatatttgggttcacatttcagaaggatacagtactcatgatgtcatcgggcaagaattcgatagggtaataatacctatggataagaacttcttctttgaaaatggaaagctaaagtcatacgctcatccgtatagagaatatatccttcccaaaatgctttttcagggccttactagaacaagggagcggttggcgattctggtatatgacaacccgccccttttcgaagaattgcttagcattgcgatgaaccctgcggcggttgacgaatagttattcatgatttgcttaacgctcagcatatctcgtgttttcttggacgcaagacatacgacggacacatcaccattttatcttctaaatcaattgtgatcgtttacggatgagctgggagcccaagtggtacgtatacgatcacaactgatatgaaccgcttggcacggttgggtagggcgttgcacttgcaatgggagggtcgtgggttctaatcttctcatctctacctccgaaccttgatcgagaaggctgatagtccccgattttcatgttgcgctatacttctctctgacctgcgattcgataccggaagttgtcacgctgtccgcgaaaaagaagccagaagttggttgagtgcgggctgaggcgcccgcatcatgggggcatcgaccgcacgaatgaaggatggacctatgagctttcgcgacaacatgcagcacttgcgcgctacgcgcaacatgacgcaggagcagcttgccatgctgttgggcgtcagccggtaatcggtgtcgaaatgggaggccgagcgcgcgtatcccgagatggacaagctgctgaaaatgtgcgctttgttcgaatgcacgctcgacgagctggtgacgggcgacttgaccggccgtccggccaacggggtcgccagcattccaccgggaaagtcccagcaggacgtgaccgggtacgatcaagccatgcgcgttttcgcgtggaagcttccgctgggcatcgccgtcatcttcgcgagcgcggcattggccctcatcctgtcggatcctaggctcatgccgatagccgaagtgaggagcttcgcatccgcgctcgtgttcgtcggcgtggccgtcggtctcgcgctcatcctccctgcatcgttcgcgcgcggcgcattccgcaaggcgcaccccttcgtcgacgacttctacacggccgaccagaaaagcaaagcgcgcaccgctctgtcgacagggctcgtcgcgggcatcggcctgctcatggcggggctggccgcgactatcgtgctgcaagcggacgtgtggctcgcaagcgcgacgt

SEQ ID NO: 8872 - DNA, 136 bp, Unknown
  gut microbiota DNA sequence
cccgctgggcatcgccgtcatcttcgcgagctcggcattggccctcatcctgtcggatcccggactcatgccgatagccgaagtgaggagcttcgcatccgcgctcgtgttcgtcggcgtggccgtcggtctcgcg

SEQ ID NO: 8873 - DNA, 292 bp, Unknown
  gut microbiota DNA sequence
acagaaaaaccaggcgcgcaccgctctgtcgacggggctcgtcgcgggtgtcggcctgctcatggcggggctggccgcgactatcgtgctgcaagcggacgtgtggctcgcaagcgcgacgttcttggcgttcgccgcgatcggcgtgttcgttatcgtacgaagcgttttgttggggacgcgttgcaatctggagcgttacaaccgcgcatcgctcgggggcatgagcgaggagcagatcgaggctatgggcgacgacggccttgccgagcgcgcccgccgtgccaagcgc

SEQ ID NO: 8874 - DNA, 740 bp, Unknown
  gut microbiota DNA sequence
tgcagtcggcgtgttcgttatcgtgcggagcgcgttgttgggggcgcgctgcaatctggcgcgctacaaccgcgtatcgctcggcggcatgagcgaggagcagatcgaggctatgggcgacgacggccttgccgagcgcgcccgccgtgccaagcgcgaacgcggcacctacgcagccgttatgcttgcggcgacggcggtcggcctggtgttgatgttcacgccggcgagcaggctgttcctgctggcatggccggtcggcggcctcgcgtgccttgcgatcaaggcgttccgttccgcgcgaagcgacggttaggcgttacgcgaggttcttcgaaggaaaggctgcgcatcgaagcgtgtcaaatcgcacgtccctttgacacatctgacacacctttagcaactaacaggttcgaccagggcgaagctcgcccctggcacgccattcccaaaatcggttcaaaggagagcatatgagcacgacgatcgtcgcacgtgaggtgaagaaatcgttcagcatcgggcgcggaagcaagcgtcgggtcgccgacgtgctgcgcggcgtcagtttacgcgtcgagtccggcgagatggtgggcatcgtggggcccagcggatcggggaagtcgacgctgctgtactgcctgtccggattggaggcggccgactcgggctccatccagatgatgggcacgcagatggtgcatgcgggccgcaacgcgctgtccagaacgcgc

SEQ ID NO: 8875 - DNA, 6722 bp, Unknown
  gut microbiota DNA sequence
tgcgtgccttgcgatcaaggcgttccgttccgcgcgaagcgacggttaggcgttacgcgaggttcttctcaaggcggcggttgcgtactgaggcgtgccgaatccccgactcctcgacgcctctgacgcacgaaggatcggctccatgttgccgttccggcggtttcgccgcccgcattccaaacaacaagcatgttcgaccagggcgaagctcgcctctggcacgccattcccaaaatcggttctaaggagagcatatgagcacgacgatcatcgcgcgagaggtgaagaaatcgttcagcatcgggcgcggaagcaagcgtcgggtcgccgacgtgctgcgcggcgtaagtttgcgcgtcgagtccggcgagatggtgggcatcgtgggccccagcggctcggggaagtcgacgcttttgtactgcctgtccggattggaggcggcagactcgggctccatccagatgatgggcacgcagatggtgcatgcgggccgcaacgcgctgtccagaacgcgccgcgaccacgtgggcttcatcttccaatcgtacaacctcatcccgtcgctgagcgcgggggagaacgtttcgctgcccgcgcgcctggcgggtcgcccgatcacgaaggcgcagacgagcgcggtgctgaaaagcgtaggcctcgacggcaggggaaagagccgcccaggcgacctgtccggcggcgagcagcagcgcgtggccatcgcccgagcgcttgcgggcggcgcggacgtgatcttcgcggacgaacccacgggcgcgttggattcccagaacggccgcgcggtgctgggcatgctgcggcgcatcgccgacgatccgaaacgttcggtggtgatggtgacgcacgatttggaagccgcgtccatggcggatcgcatcctggtgctgcgggacggacgggttgctcaagagctagggcgctcgacgcccgctcggatccttgcagcgttggaagacgcggaggtgccggcatgatgcgcttagtgttctcggatctgcgcgatcacgccgccacgtggatcggcgcgttcctcgtggccgtgggctgcggctacatcggcggttgggcggtgtcgatcgaagcttctgctgaaacgttcgacgtcttgcgcagcgtcggttccgtcgtgatcgcgttctcgtcggttgcggcggtggccgtgctggcgttgacggccaaccttaccgtggacacgcaacggcgctcctatgctctatggcagttggcgaacatgaagccaaggctcgtgagcgcggtggtgctcgtacagttggtagttgttgcggtgctgggcgccatgtgcggcacattgctgacgaccataacgttctctcctctgttcccgtgggtattcggcgcgcgagtggagtacgcgcaggcagttcctcgggtgggtgcagcgtcgatgccttttgtgtggctcgcggtggcgggcacgttcttgtgcggagggctgaagggcgcccgcagcgcggggaggacgtcgcccctggctgtcttgcgcgagtcgaaaccgaggcgcgcgggaatgacgtggatgcgcgtcctgctgtttgcagggttggcaatcggcgcttggcaggttgccgccatcatgatcggctccgtacccggggtggtcatgaactggtcgctatacctgcccattttgacgacggcgggaatcgccgccatcggcccgcttgcgttcgcggcgattttgaaggcgtggacgtccgtcgttccgcagtcgcgctggaatgcgtggtacgtggcgcggcacaccgctcgtttcggcctgagcgccagcacctcggtcgagacgcccatcatggtcggcttcggcttggtggcgggcatctactccgtcatgagcatatgggcggattattcagggcagcacggcatgaccttcaccggcctcgattggactgctgccatcctcatgatgggcggccccgtcctcctgtgcgctatcggggcggcggtcagcgtggtcatgacgtcgaaatcgcgcacccgcgacgtggccctgctcatcgctggcggcgcgcggccgcgcacgctgctggccgcggccgcgtgcgaggccttcatccatgccgtcacggcaacgctggcgggcatggcggccgtggtcgtctccaacgccgtcaccgcgtacgccgtcggcatgccgctgttcgacgggttggctttcggagagggtctggccgtctcgctcgcgggcttcgtcctcgtcctcgccgcgacgctcgtgcccacgctcgccgcccttcgcaaagagcctgcaaccgtcctcgcgatgggggagtgagtcgcggacgtttcaggattggtcttcggcggccgcttcggcaggctcgcgacggaatcggcgcaacagcggaaggggcagggtggcagagaatgcacgctatgcacgatttgcaggcgctttccgctgtgatccatgaaagaaaccccaggtcgtcaaaaaagacgataaagaaaatcgtgcatagcgttaaatctcttccatgcgggagacgacccgctgctgatccggcttcggcagcgggccgttcgagcccctcctggcttgcggcctgcttgggtcggcggctgctgcgggaagttggcaagccgcgccaatgtggccgcaggtgcttctttaccattctgacctgcgaatagttaactagggtttttccctaatggggtggtgggaatccccgaataccctcgtttctcgtgcattccgtcaataaaagttgtatattttgtgaaggagagatcgtcagtcgaagggaggagattgtatggttaagaccaagaggaacaaactcgctgtctggaccgcctccgtctgcgcattcggtatggtcatggggctggttgcatgtgcgccccaggctaccgaagacgctacggagcagaaggcagatgagaacaaaacggtgcagcaggtggaaacgcctgagcccgataagtacggcgtcgtcaccgccgagtcgtggaaggacgcgtatccggaccagtacgcttcgtacatggagaacaagtccaacgcgcctcttcaggatggcggcgacaagcacaattatctggagctgtacccggctctgaacaccatgtacaagggttacgcgttcgcgctcggctatgacgaggcggccagccatctgtacacgctgcagagcgtgaaggaaactccgcgcaccacgcagaaagagcagctcgccggctgcatcacctgcaagaccccgcagttcaccgccatggtgaacgatgagggagaaggcgtgtacaaggagaagttcaacgacttgatcggcgagttcaccgagccggtcagctgctacaactgccacgagaacgatcctcagtcgctcaaggtgaccggttcgtacttcgtgaaggcgctaggcaacgacgcgggcgagggcagcaaggctccgatgaactcccaggtgtgcggccagtgccacaacgagtactacttcgatggcgagaccaaggccacgacgaacccctacacgggcctcgatcagatgaccccggacgccatcctggcttactacgacgagcgcaacttcaaggattggaaccacgctgacacgttcgctccgatgatcaaggttcagcatcccgagttcgagaccatgcacggcggcgagcagtccccgatggccaaggccggctacggctgctccgactgccacatggctcccgctgagggcgcgaacggcgagtacacgtcgcataactgggtgagcccgctcgagaacaagcagctcatcgagaacgactgcagcaagtgccacgacgacctggagaagaaggtcaaggacatccaggccagcgaggaagagcgcgtgaccgcgatcagcgagaagatcgaggacatgaccaacaagatcgctgcgaagtacgctgacgagatcgccgccatgaaggctgcgaacgaggcaaagaccgatatcccggctgcgtccgaggagcttgccaagctgcagaagcttcagcgcaacgcgcagttctactgggatttcgtgatggttgaaaacagcgagggagcgcacaattccaagctgaccaacgagacgctcgacaaggccgaggctgctgccgacgaagccctggcgatgctcgcttagccgacaacgacgttctctccaacgtctttagaggggtggggaaaggaagcctggcttcctttccccgtcttagggtccctcgaccggcttgatgcattgtttttgccgaaaaagggccgaatcacacgaaaaacggggtgaatccgggctaattccccccaaatgggtgataggttttttgtcggttgaccgctagtatgcatgtggtaaagtgcttgtgtttccgtttggcagcgaaatcgatgccactttgtaacggagacgacggaaatgcaagacgagatcatgagaaagggggttagagagcatgagcgaagaggaaaccaaagtggaagccgccactgaggcacctgcgaccgagggctctacgaccgaggaagccgctcccaagaaaaagggaaagaagtggccgatcgtcgtgggcgtcgtcgtggttgtcttgattgcagccggtgccggcttctgggtttggcacgagcagccgagcttctgcgccgccatctgccacacgccgatggacgagtaccttgagacgtacgagcaggagcctggcaccacgggcgtcgacaagtggggcaacgaagtgagcaacacgaacgcgatgctggccgtctcgcacaaggcccagggcaaggactgcatgtcttgccacgtgcccacgctgagcgagcagatgtccgagggcatcaactgggtcaccggcaactacgtgtacccgcttgaggagcgcgacacggacatgctgaccgaggcgcgcggccttgacggcgacgagttctgcctgaacgagagctgccacaacctgacgcgcgacgacctcgtgaaggctacgagcggtatggagttcaacccgcacaaggcgcagcacggcgagatcgagtgcagcgagtgccacaaggcgcaccgcgcttctgtgatgtactgcacgcagtgccacagcgaggccgaagtgcccgagggctggctgacggttgccgaggccaacaagctttcgactgcggcgtaagccactgacagcaccaccgctcgttcgcgagcaaagaaccgaataagcaagagggagcccgccgaagcgccatcgtacgcttggacgggctccttttgtcaaaggtccgaggaacgaaatggtggccctgcgaatgcgagatatgcaggaggcttccacgccgaggcgccgcgcatggtaaatctttgaattcggcgccattgcgctcctcggaactttgaggtacgtgaaaatgacggttggagagaggcaattgaggaggcgagcgtgaacgcgaaaacgaagcgtcgcatggtagtggtgaccggcatcatcgtcattgtgctggtggttatcctagctgtagtcggcggtacgagctcggcgaagaccgtgtcggtggcagaggctgcgacggggagctatgcggatcagaagatccaggtgagcggcaacgtcgtcgagaattcattcgcaaccgaaggcaacgtgctgacgttcgacatctacgatccgaacggggacatcacccagcagctccgcgtgcgcttcgagggcggcgtttccgccacgttcggcaacgacgtgacggccatctgcacgggcaaggtcggcgaagacggcgtgctcaacgccagcgagctggtcacgaagtgcccgtccaagtacgagaacgccacgaacgcgttgacggtttcccagttgacgggatacggcgacgaggtcgtcgacaagccggtgaaggtggccggcgcggtgaaggacggcacgctgaaggcggcgggcgagggcgaccggttcgtgctcgtcgatcccgagaacggcgaagagcttgccgtcgagttcaacgacgcgatctcggaggaagtgaaggatggctcttcgctcgtcctgaccggatccatgaacgcgcagggcaagttctccgcaaccgaagtggccctcgaaggctagaccggtttctacaaacgaagggcggtcgcatagccgccccgaaaggatagtacatgccaactataggtttgataggagtgctcgtcgcattcgccggcgtagcggtgtccatcgtgtgcctggtcgcgggagccctgttgtcccgcaagaagtcgggcggtgcaggcgagacgctgacgtggggcgggcatgtggccgtgctggtgacgctggcggctctgaccgtgtgctgcggcgtgctggtgtactgcttcatgaccggcgataccagcatcgagtacgtgctgcgctatcgcagcgactcgtccagcgacatcgcctggctctacaagctgtcgggtctgtgggcaggccgcgaaggctcgctgttgttctggggttggctcatcgccatcttcaactcggtggtggccgttcgcaatatgaggcagggcaggaagctggattctatggcgctgctcgtgtcgcagctggtgctggcggcgttcgtgggcgtgatcctgttctccgaaagcaacatgccgtttgcggctacgcccgccaagtacttcgacggctcgggcaacctgacggctgcagcttcggtgctgggcatgaacacgctgctggagcactgggccatggccatccatccgccc

SEQ ID NO: 8876 - DNA, 1802 bp, Unknown
  gut microbiota DNA sequence
cacgcccgccaagtacttcgacggctcgggcaatctgacggctgcagcttcggtgctgggcatgaacacgctgctggagcactgggccatggccatccatccgcccactttgttcgtgggctacgcgggtctcaccatcccgttcgcgtacgccatcgcggctatcatcgtgaacgattcttctaaggaatgggtcgtgcgctcgcagcgctacacgctgttctcctggttcttcctgggcgtgggcatcggccttggcgccatctgggcgtacgtcgtgctcggctggggcggctactggggttgggaccccgtcgagaacgccagcttgctgtcgtggatcgtgggcgtcgcgctcatccacagcttcaccgtgtaccgccagcgcggcgcgttcaagcgctggtcggtcatgtgcgcgtgcctgaccttcgcgttcgtcatcgtgggcacgttcatctcccgttcgggtctcgtgcagtcggtgcacgccttcgagggcgatcccgtgtcgctcgcgctgttcggcgcgctcatcggtgcgtccatcctggccggcatcgtgggccttatcgtgcggtggaagagcttcggcccggcctcctcgggcgccgacgacgtggagaacatgctgtcgaaggacgccgcctactacttcaacaacgtcatcatggtggtgttcgccgtgctgctgacgtacatgaccgtgtcctccgcgttgcccgcgcacctgttcggcatcccggtgccgttcggcggccagacggtgtcggccggcacgtacaacgccatcgcccgtccgctcggcgtgatctacctggccatcctggccgtgtgcccgctgctttcgtggggccgcaccgaaggcaagcaattctggaagcgcgcccgcatcccgggtatctgcgccgtcgtgctgttcgccgtgctcatgttctacttcgtcacctacctgctgcccagctacgacgccatcctggcggcgggcggcaccgaggccgacggcctcttggagcagggcccgtcgtggtactacaacggcgtggccgtggtgggcttgctggtggccagcctgctgttcttcaattcgctgttcatgctgggccgcgccatccgcggctaccagaaggggcaccaaggcaacgtgctggcgtccgcttggggcatgctggtgaaccgcgcgtccacgttcggcggcttcgtcgcccacctgggcatggccgtgatcctcgtgggcctcatcggctcctcgatgtacgtgaccgagaagacgggctatgtgaagtacgatgaggaaaccgactcggcttccgagcctttcgtcatccaagacttcgagctgcgttacaccggcaataatatcgctccgcagccgaacgacgatgacatcctctacaccgtgtacttcgacgtgtacaagaacggcgagttcgtcggggccgttgatccgacggtgcagttcgtccagtccacgcagcagcagaagctggtggccagcgtcatcacgttcccgaccgaggatctgttcgtcgtgtaccgcggcgtgaactccgacggtgacttctcgatggacgtgcgcgtgaatccgctgatcctggaagtgtggatcggcttcggcctgctgatggctggcgtgctgatagccaccgtcggccgtcgcggcgcgaagcgcaagctggccgacggcaccgcggcgcccgccggcgccgacggggatgccgaggtcgaggccgccgagaagcccgaacctgagaaagtcgaggcgtaaagcgccatggaggccgttgtggaacctgcgatca

SEQ ID NO: 8877 - DNA, 655 bp, Unknown
  gut microbiota DNA sequence
tcgccgtggcgcgaagcgcaagctggccgacggcaccgcggcgcctgccgacgcggatgcggaggccgaggtcgagaccgccgagaagcccgaacctgagaaagtcgaggcgtaaagcgccatggaggccgttgtggaacctgcgatcaagaccaagaagctctcgaaagtgttcggcaaccgccgggccgtcgacaacgtgtcgatcgaggtgccgcagggcgcgttcctgtccattttcggtccgaacggcgcgggcaagaccacgctgctgcgcgtgttgtccacgctgtcgagggccacgtcgggctcggccacgctcatgggcgtggacttgaaggaggatccggacaaggcgcgcgaccacataggcctcatctcgcacaactcgatgctctaccccgatttgacggccgagcagaatctgatgatctacgcgcgcctctacggggtggtcgaccccgaggcgcgcgtcctcgagctgctggaggcggtggagctgaaacaccgccgcctcgacgtagtgcgcacgttctcgcgcggcatgacgcagcgcctgtccatcgcccgcgcgctcatccatgatcccgacgtggtgtttctggacgagccgtactcggggctcgacccgcacgcggtggagatattcgacgac

SEQ ID NO: 8878 - DNA, 836 bp, Unknown
  gut microbiota DNA sequence
tctcgacgtggtgcgcacgttctcgcgcggcatgacgcagcgcctgtccatcgcccgcgcgctcatccacgatcccgacgtggtgtttctggacgagccgtactcggggctcgacccgcacgcggtggagatattcgacgacctgatcgaccagcagcgcgagggccgcacgttcgtcatggtcagccatgacttgcagaagggcttcgccatgtgcacgcatgcgctggtgctggcgaagggcaaggtggtggcgttcgacgagaaggacgcgttcgatttcgacgagttctcgacgctgtatcgctcgacggttggcatgggggtggcgtagatggcggtcgagctaaagaagccctcgaccttccagcagtacaagacgctgctgcgcaaggacttggagcaggagttccgcacgaaggagatgctcacgtccatgggcatctacgcgcttttggtgatcatcgtgtacggggcggcgctggcgcagacctcgcagaccaccgacgtgctgcagatgagcggcggccttctgtgggcgctcatcgtgttcacgtcgcttttgggcctgaaccgctcgttcgcgcacgagaaggagcagggctgcatggagggcatcctgctggtgccgatggaccgttcggtggtgttcctggcgaaatcgacgtcgaacctgctgttcttgctggtggtggaggcgatcgccgtgccgctgttctacttcttcttcctgaccaccaccacgccgtccgagagcttctggttgctcgtggtgccgctgctcgtgggcaccgtcggcgtggcgggcatcggcacgctgctgtccaccatcacca

SEQ ID NO: 8879 - DNA, 5648 bp, Unknown
  gut microbiota DNA sequence
ttgcatggagggcatcctgctggtgccgatggatcgttcggtggtgttcctggcgaaatcgacgtcgaacctgctgttcttgctggtggtggaagtgatcgccgtgccgttgttctacttcttcttcctgaccaccaccacgccctccgagagcttctggctgctcgtggtgccgctgctcgtgggcaccgtcggcgtggcgggcatcggcacgctgctgtccaccatcaccatcaacacgcgcggcaaggacgtgatgctggccgtgctgttcatcccgctgatcttcccgcttctgtacgcatgcgtgtccgcgacgacggcggtcatcgtaggcgcggaaggatacgcggacatcatgctgacgtcgttggcgcttgcgggcggctacgatgtgatcatgatcctcgcatcgtgggttctgtacgatttcgtgattagcgcttgatgttccgtcggcctgccggccgacggaactgctcgatgctgcgaggcgccctggcgccgaaactcgccgcttttgcgcttgcccttgcgtgcgaaagtacgcgcggccgcgcaacacggcgattttcagcaccaggacccttctcgctgactttggttggacccgtgacagaaggagagtaatgactgagaaaacgaaaaaggcgctcaagctgccggaagcggggcaatggcccgaccggatagcgccgacggtgctcgttgcgggcgccgtgctgtcgacgatcggctttttgctggcgttcctgtgggcttcgccggtgaacggtgccgcggtgaacggcgtcgagatgatcggcggccagatggtgaccagcgtgctgctgttgtcgcagaagatcttctacttccatatgccggtggctatcacgtcgttcatcgcgctggcgttcgcgggctattacgcggtgcgcttcctcatgacgaagaaccgccgcttcgacacctgctcgaagatcgcgatggagatcgcgctgctgttcgtggcgtgcacgatgatcacgggcgacttgtggacgaggttcgaatggggcgtgtggtggacgtgggatccgcgcctgacgacgtacctcatcctcatgctcatcatcatcgcgtacttcatcctgcgcaacgccatcgacgagcccgagcgtcgcgcgacgtacggggcggtgctcagcatcatcgccctcatcgacgtgccgatctgctttatggtaacgcgcctgattccctccagcatccacccggtggtcgtgcgcgagggcggcatgtcggccgatatgggcatcacgctcatgttctgcctcgtcggcatcatgctgatcgggttcgccctgtaccgcttccgcttccgccaggttcgcctgaccgagcgcgtcgaagcgctgaaggagcagttggaagactgagggtccgccgttctgcgaacggcggagcggggcgatctcgggcactgcggaagccctcgctgaccttgctggacctgtgggatgttcgttgttgataaaaggagaaacttatgaatccggttctcgtagagatatacagcaccatcgttccgtcgatgccgttcatcatcggagcgtacgtgctcatgtggttggctattctggtgtacatgctggtcatcacgctgagctacaagaaggccgagaagcagatggcggttctggaagaggccgtcgcggaattgcaggcaaagtagcaggatggcgacgggttttcccgtcgtgctacaataaccgaacaccatggacgaagcgccgcttctgcggcgcttcgcgcacgttacagagaaaggtatgcccatgaaggctctcattcccgctgccggcctcggcacgcgcttcctgcccgccacgaaggcgcagccgaaggaaatgctgctggtagtcgaccgaccggccatccagtacgtggtggaggagggcctcgcgtcggacgccgacgaggtggtcatcatcaacagccgcgagaagaaggccatcgaggagcacttctcgccgaacccggagcttgtggagctgttgcgcgcccgcgggaaggatgcgtatgccgacgcagtggagcgcgtgggcaactacaacgtgagctacgtgtaccaggacgaggcgctgggcttggggcatgcggtgcggtgcgcgcacgagaagacgggcgacgagccgttctacgtgctgttgggcgacgtgctggtgcccgacaacaagatgctgccgcgcatgcaggaggtgtccgacgcacacggcggcgccagcgtcatcgcggtcatgccggttccggacgaccaggtcagccgcttcggcgtcatcgcgggcgcggccgtggccgacgacgtgtggaagatcgacgcgctggtggagaagccggcgttggaggacgcgccgtcgaacctggccgtgttcggccgctacctcctcagcgctcgcgtgatggagcttctggccgacgtcgagcccggcgtgggcggcgagatccagctgaccgacgcgctggacgccgtgctgcgcgaggaggagatgtatgcgctgattatcgaccccgccgacggcttcgacaccggcacggtggaaagctggctggaaaccaacaacgtgctgttcgggcgcgcagccgaatagcgagaacaaccgtcgccgagcgtaacggagcgattgcgaaagcctgccgtcatctggcaggccttcgaatagtataatgtcctatgaggcacgcgcgcggcgaaagaggcatgatcgggcttgcggctgccgttgcctccgtggtcatcgtcgccgttataggaggagcgctgctggtccacgcgtactcggacacggttcgcaatcttacccgcaaggacagcatcggatacttggctgatatatccagccagatcaccgagaacgtgcgcacggtcacctctcagatattctcggcgatggaaaccatcgaacgcggtcagatgacgttggtggagaacggcgccacgctcgacgagctgaacggagaaatggccgaggatagggatcggtggaatctgtcccgtcttgcttatgtggacgaggacggcgtgtggtacttcgccgacaccacgcagcgctacaccaggtcgcaggactatctcaacaagacgttgcttgaaggcaaacgttccatctcgggtatcgagaccatggacggccaggatgtgctcgtgttttcaattcccgtgaacgcggtcatcgatgggcatcacatgaaggcgcttgcgggcgtgtacggggtggacgagatgctgcagctcctgtccatcgattcgttcgaagggagaggatacgcctgcatcgtcaaggacgacggttcggtggcggtgcgtcccgaggatcaaacggccatcagcggcgagtataatatcgtgtcggctttggagagccagaacgccgatgacgaagagccggtccacgttctgcgggcggggctcaaaaagggggagcaaggcgtcgttcttgcgaagtacaacggcgtcagttcgtatttctgctatacgcctgtgggcgtgagcgattggcatctgctgtccatcgttcccagcgattacgtcgatcagaggacgaacagcctgtatctgctgaccgtggcggtgggcgttacggtggcgttggtgttcggcgtgatcatgctgttcatcgtgatcgtgcagcatcgcaatcgtcgacggttggaggccatcgcctacgtggatcctgttaccggcggagacacggccggccggtttcgcgagcgctattacgacgtcgtccgaacggatccgcgcaacttggtgctcgtgtacgccaacatagccaaattcaagtcgtacaacgatcgcgagggcaaggagggcggagaccgtctgctcaggtcggcgtacgacatgatagagcggcagctgcgcgaaggcgagttcgcggcacgcgtctccgcagaccatttcgtcattctgttgcgcgagcctgacgaggcgtcgacaaaggagcgtctaaacgagttcaggctcacatccgagagcgtcggcgagcaagtgctcgtgtcgatggacttcggcgcttacatattggacgacgatgcgctcgagcaagagttcacgcttgtgaccgatgcggctaacttggcgcgtgcgagcgcggagaagcggatgcttccaagcggcgcacgcgttggcttctatgatgatcgcctccgtcggcgcttccttcgagagaaggagctcgaggatcgctttccccatgcgcttgcgaacggcgagtttcatatgtatttgcagccgaaggttgcgctgcccgagcgccgcatcgtcggtgccgaggcgctcgtgcgctggatctctccggaaggtatgctctgcccgaacgagttcgttccgctcttcgagcgcgacggcgttatcgccgagctggatttctacatgttttgccaggtgtgcgctttgttgaagcgatgggagcgggagaggaggccgcttttctgcgtttccgtcaacgtctcgcgctcgaacttcgacgtttcggatttcttcgcgcgctacgagcgccatatcgccgagaaccaggttccggctcgctacctggaattcgagttcaccgagtccgtcgtgttcgatcgcaccggcgagatcaaccaagttattcggcgcatccacgcgttaggcgcacgttgctccatggacgatttcgggagcagttactccagcctcaacatgttgcgtagtctcgaagtggatatcatcaaacttgaccaggggttcttccgcggagataccgacatggacaaggcaaggagcatcgtcaacggcatcgtgggcatagcgcgcgacatgcgtatcgaaacggttgccgaagggatcgaggatatgggacaggtggatttcctcgagagcgtcggctgcaatgtggtgcaggggtacgtgttcggaaaaccaatgcctgccgatgagttccaggatttcaaactagacgatacgatgaggcgaaacggagatcgcggtgaaagcgttgaagagagccggtaaggcggcgaagacgttcgcgtcgatcgtgctagcggggtcgctggtcggcatcggactggtcggctgttccggcgaggctatgggcaatgcgtccggacgcgacgatgagatagtgctgacggtatcgaaatgccagaccaaggagctgccgcaggagctgttggacgagatgaccaatcgccaccccaacctgcgcttcgagttcgatacgtattcgaacagcaactattccgcgcagatcgtcaccgagctcgagcagcgcgatatccccgatatcctgatcaacacgcgcaatcaggatctgaccgaggatttggagcataatctggtggatctcgcggcgtacgatttttccagcgagtaccttcccagcgttctcgatcgcatgaccatcgacggcagcctctactatctgccgggttacctgacgcttgcagggttcttctacaacaaggaccttttcgccgagcacggctgggaggcgcctcagtcgctcgaggaactcattgccctcaacgagcaggcgaaggcggagggcatccggcttatggcgtactcgatggagctgacgggtcaacgcttcctgcagctgaccaatatcgcttcggcgcagtttctgcacacgccgcaggggtcgtcttgggaacag

SEQ ID NO: 8880 - DNA, 1269 bp, Unknown
  gut microbiota DNA sequence
tcggcttatggcgtactcgatggagctgacgggtcagcgcttcctgcagctgaccaatatcgcttcggcgcagtttctgcacacgccgcaggggtcgtcttgggaacaggattatcttgcgggcgaagcgagcatggtgggcacgttcgagcctttcatggacgagtatcggctttggctcgacagcggattgatttcggctgacgacctttccctgtcgaattcggacgccgcggagatgttcgcgaacggtgacgtggccatgatctacggcgttgccaacaacgtgaagaccactgatttcgacttcgatttgggccaagctccgttccttgcgagaggcgagggcgaagataacggctggtacctgtatgcggtcagctcgtactacggtattaacaagaagctggaagagccgggcaacgaggagaagctggccatagcgctggagatgttcgacctgatgagcacccccgagggccagagcatgttcacggatggcgcggaagggcgatatccggccacgagaaaggcggacggcgagctccacgcgccgcttttgagcgattaccgcaacgtggtcgaccgcaataaccttgtggagttggcggcttacactgctccgctcttgctgggaggagaggcgctgggcgggtacatcgctggcaccgtcagcgccgaggaagcgttgcaggcctgcgacgaggctatgaagtccaacaagtcggaaacccagatcggcgacgtagtggcacatatcgaacgcgacctgagccgggaggagaccgtccgatacttcgccgacgcgttcagggagtacgggggcaccgacctgtgccttatgctgcctggcggcatggcagacgggcaaatgcatccttatgggatttccggcaagctgtacgaaggggagctgcacgccaatgagctgaccgtgctcttgcccaatgcggggaagccggtgcctacgctggccactgcgcgcatttcgggcgaagacctgcgcgcggtgctagagagcgggcgcacgttcgagcggaaggacgcgtcgagggaggcctttgctccgttccgctacgaggtgtcgggagccgaggtggactatgatgcagaccgcaaagtgcgatcgctcaaagtgaacggcgttgaagtcgccgacgaagacgtattcacggtgacgtatttcgacggggcggtcgaaacgtcccgcttgaccgatgcggcggtgtcggacgtgaagcccgtccccgcgttcactgcttgcaaggc

SEQ ID NO: 8881 - DNA, 184 bp, Unknown
  gut microbiota DNA sequence
gcggccgtcgtcgtgcgacgccatggcgccgatgcccgccttgagcccggccgagaacgccttcgcgtccagcccctgccgggcgacgaacccggcgatggcctcgaaataagcgcccaggaactcgtccagctccatgggcagcagcgtgccgtccaagtcgaagaagattgcgcgatacgtg

SEQ ID NO: 8882 - DNA, 1035 bp, Unknown
  gut microbiota DNA sequence
cgacaacatcaagctgaccgtccccgaagactacctcatgctggccgctgcggtgcgtaccatgtacatgaaaggggcggaagaatgatcatccgcggaggccttggcgacagtgcccagtcgctcagacagtcctgctcgcgcgaaacgcccgctgggcgtttcggctcgtgcggaactcgcttggtgggcaccgtcgccaaggccgcgcatgtcgttatcggaggaaccgaatgatgcaacctgttgttttcgatcctgccgggttgcgcgtggggcagggatacgatgtgcatgcgttcgccgaggggcgcaagcttatcctgggcggggtggacgttcctcatgtgcgcggcctcttggggcattccgatgccgacgtgttggcgcatgctatctccgatgcgctgctgggaggcattcgcggcggggatatcggcaagctgttccccgacaccgacccagccttcaaggacgccgactcgctgaagctgctggccgccgtggccgacaaggtgcgcgcggagggctacgtcatcctcgacgtcgactccgtcatcgccgcgcaggcgccgaagctgtcgccgtaccgcgaggccatgcgcgagaacctggccgccgccatgggcatcgcggtggagaatgtgggcgtgaaggccaccaccactgagcacctgggattcgaaggccgcgaggagggcatctccgcgaccgccgtctgcctgctgtgccgccgtcctgacgagcaacgggactagccgacgctgcgggcttccgtagcgcctcggcttggcgctccaagccctcctcacgtgcatgagcacgcttcgtcggtctttcacgccaatccgaagcactgcgaaagccctcgctgactttggtggacaggcgggctccgtaaccttcctgtgctacaatctacggtcgaaacgcaccgtcgcgggagcgcggcgccagggctatgcaggatgcgaggacgccatgatcagactctacaatacgaagacccgcacgaaggtcgacttcgagacgctc

SEQ ID NO: 8883 - DNA, 199 bp, Unknown
  gut microbiota DNA sequence
taggagagcgcgtatgtgcacgaacggaatcaacacagggcaattcgagcagatgatcgagcagatcgacgaccatatcaagttggagcgtcgctgggcgcacaacctggggcatatggcgggagatgccggcttcgccaccgtttccgagaagatgcatgccgcccaggccatgctggacgacgtgcgcgcgctgctc

SEQ ID NO: 8884 - DNA, 2352 bp, Unknown
  gut microbiota DNA sequence
acggtcttttcctgggcgctcttgacggcgggcagctcacgcaggccctggtcgggctcgatgcccgccatggagacggtctccacggtggcggaggtgatctccttgtcggcgttgagggtcaggtcgtagcgcaccacctcgccggcattgttcttggcctcacccacagggatgggcgcgctgttgatgtaagtggtgtgggtgtggcccaactggagcacgtccacctcggggcacttgtccaggatggtctgggctgcatcggagccgtcggcggagtactcggctcccaggccggcatgggtggacaccatgatgacgtcggcctggccgccgatctcctggatacaagcggccacggcgtcggccataggctcaaaggtcaggtcagccacgccctgcttggtgccgtcccagcgggggatgttgggagtggtgacaccgataatggccaccttcacgccgccccgctccacgatagtgtagcccgcgccggtgaagtagctgccatcggcgttcttgatgttggccgccagcaccggcatgtccacctgctccagaatggacttgagagtgtccacaccgaaattaaactcatggttgcccagggtccaggcatcatagtccatgtagttgagggcggcggccaccgggtggctggcggtgtccttggagtagaggtcgtcggtcatgatggtgccctggatggtgtcgcccgcgtccaccaggatggtgttggggttctccgagcgcacctggttgacgtaggcggatacccgggccagaccgtctccggtgctctccttcatgtcctcgtaggagtagccccagatattgccgtgggtatccgaggtgccgatgatggtcagatgggtctcgccgttcccggccgccagggcggcggaggagagggagagcgccatggctgccgccagagcggcggacagcagcttgccgaaccgtttgttcctcatatcacatgatctcctttcccattccgaagggcataggtacgccggagcgtgcctgccgtggatatccttatcataccacagggaacggaaaaagtcgacgctgtttccagaaatttgactgccctttcaggaggtgagccgtgccagcagcgcctcgacctgggcgcgggtgaggaccccggtgggatcggccccctccgccaccagtccccagcgccacgcctgcgccacggactccgatgcccagggggcgggatcggaggcgaggacgggggcgccagagcgcacctctgccggggtcagcccctgctgccggacgaaacggaccagcatctgggcggcctcctccagggtgacggcgcaggaggcacggaaggccccgccgggcacgccgttggctacgccggtctggtcgcaccagcccacgccgggggcataataggcgaagggcatcagatcggagaagggggcgggctcggcctccggggcgccggcggcctgccagagcatccaggccaggcggccccgggtgagaggggcgtcgggctgctcgggggcggtatagtccgcgccgttggccagcagccagtccaccagggtgtcccgcccggccagatagtcgtccagggtctgctccacccggaccgtggggaccaggggctccacctgggcccccagcccggcctccagcagtgtgcccaggtcgatgtatttgctggagcagctcacccggatgccggagttgggcagggtgaaggagccggtggagccgaagtggttgacgctgccgctggtgggactgcccgccagcacgccgccggcgtccaccagctctacggcgttgatgatggcggaggagtacgtggcctcgcccaccagaccgtagaccttcacgccctcctccaccaggccgggcaccagcataaggatggggaccagcacgccgtcggagccgccgccgttgttgcggagatccagcagcacctggcggtagtctcccgcctccagctcggcctccacctgggcggcaaagccgtccatgggctgcttggggtcctccatgcactggttaaattgaatgtaataggtggtgtcatccagggactgggcaaagtagtaggtgcccttccggtaggcggtggcaggcgtgctctcccgctgctgggacaggctggacagggcggcgtccccgaagtcctccatgggcagggcctccacggtgaaggagcctccggaggtggtcacctccagcggttcgccggactccgcgatgcccagatagtccagacaggcctccgagtagaggagctgctcggtctggcggcggagcttcacggggttgtcggcgctcaccagggtgccgaaacgggtgcag

SEQ ID NO: 8885 - DNA, 7700 bp, Unknown
  gut microbiota DNA sequence
gggcgtgaacagcctgctctgcgagcgcagcctgggcaacccccgcccgaagccctcccagatggcggtcggcgtcaagcaggtgttcgagctgccctcgaacgtcatcgaggaccgcttcctggtcccggagggcgagggcgcggcgatgctcttcgtcggcgactgcacgcacggcaacgtcggcggaggcttcctctacacgaacagggactccatctcgctgggcctcgtggccaccatctcgctggccgccgacggcgcgaacgagacgccggtgtaccagatgctcgaggacttcaagaaccacccggccgtggcgcccgtcatccgcggcgcgaagctcgtcgagcactccggccacatggtgcccgagggcggctacggcatggtcccgaagtacgtgttcgacggctgcctggtggccggcgagtcggcgggcctgtgcatgaacatgggctaccaggtgcgcggcatggacttcgccgtggcctccggccagatggcgggccaggcggccgtgcgcgcgctggacgcgggcgacacgtcggcagcgggcctgtcctcctacaaggaggcgatggagggctccttcgtcatccaggacctgcgcaccttctccaagtggccgcacgtcatggagggctgggaccgcatgttcaccgagtacccggccatggcgcgcgacgtcttcaacgccatgttcagcgtggacgggaagccccagaagccgctgatgaagcgcatgatgcccatagtcaagcagcgcggcctgttcaagctggccggcgaggttcggaaggcggtgaagtcgctgtgagcgaggtcaaggagatcacggtcaacgtcgacgagtacctggccatcgacaagtacgaggtggacgaggagagcgcgcacatcgagctcgtggacgaccccgacatcgaggagttcctgaagctcgtgcgcgtgtgcccggcggcgctctacaagatcgacgaggacggcaagaagtccttcgactacgcgggctgcctggagtgcggcacctgccgcatcgcctgcgagggcaccatcgtcaagaagtgggagaacccccggcccacgatgggcgtggagtaccggttcgggtaggaggagagcagcatgcgcgaaacgtacagtaccatccgccatctcctacatctggcgacggagcttgatcgcgcatgcgcgctgttcctcagcacgcacgtcagcatcacccatgatgaagcccgcgttctgctggaactgggcgcggctcagcaatcgttgcgccccggcgcgcttgcgaagcagctgaacttgcagcccagcacattatcgcgcgtgttgagaaacctggagaatcgcggcttcatcgaacggcaccgcaccaccgaggatgcgcgcagcctatcactgagccttacctacttgggagcgcgcacggcaaaagagaccgagcagacgcttgatcggttcttcgacgggctcggcaaacatttgggatacgacgacctcgacggtcttttgaatacttttcaggacgcaaccgactatctgtcgagctgctgtccttcgtgcgaaaccccatcgtaggaaaagacgcgtcctttcccatctagcgggaaagaaaacctcggagctacgttcgtctgcgcttcatgcttcatgcgtcaagcggacgaacgcagctccgaggaagctgtcgaaaatagcgagcgccgattgtttcacgtgaaacataaatcgtaaagtctcacaacaatgcgacaagtgtttcacgtgaaacatgttgatacggatagagcatccgttatcgcccgtcgaagaccgaacccgacctctcatctgcctcgatcgttcctcgcccttactatcctcattgattgtttcacgtgaaacaccttcataatgcaaaaaaggacggccaaggccgtccttttcatcatcagtgagagcgaggttatttcgcagcgccgatacggcaaatcgtggtaccgcagtcggggcacttgcccttcgtgataggcttgccgttcttcgtcaggctctcaacgggatccttcatctctttcttggccttgcatttcacgcaataagcttcaatagccatggctgcaaaaacacctctctgttctgtacttgagcaggacgctttcatcccgcaccttttcgtggcataccctggcaataaccagcgcatacaaacccgtattataaggcaggctgaaaaacgcccaccgaggacggataggggcacctatatattcttcaacaactccataacaaagtcggcattcgtttcaagcgtttgctcgtcaacgttttccaacacatcatcgccttgcgcaaagaacgccggtttcgctccgttcatgcctaccagatgcattgcctggtacccttgtttgatggcgtaggaagcagcgctgtccttccatttgatctgcgcgccgcccacgttcaaaccggtggcttgcgaagccttcttgatgtaacgcttcatacgcgaagacgtcttcaccgtccggtacatgccctcctgctcgatcatgcagaggtcgccagcacccaagccgtcgagatcgatgatgatagagccgcgtagctcctgctgatgttcggtgatgaatgcgcgcataccgccgttttgagcgagctccgaacccagcgcgacgaaccacacttccgtgttgatgtcggggttgcggaactggtatatctgcttgagctcggcaggaacgtcgggatcatcgaaatcgagggattcagacgattcgttcgaagcgctgttgaggtcgagttcggccttctccatacgacggggcgagaaagctccgccatgccaaggacgacgctcgtcaggcccgtatccgtcatcgtattcgtcaacgccctcatagtcgtaagagccgtcgaatccgtcttcttcgatcgtatcgtactggccgttctcgtagcccgcgttgtagggatccaattgtgttgtcgcaccgggatcgacgactccctcatcctctcggaagctttcccagccgccgcgctcagctcccaccgtgcgagcatcgaaagactcatccacttcaagccactcctgaggcgaaggctcttggtctttgctcttacggcgcagacggtcgaacagacgatgaacgcgcgatttgggcatttccacgtacccggggccggcgaaggctcccgactcggtgaagttctgctcgtacgcggaatcatcagcatcgtcgatgtagatatcttcagggtcgacattatccagcagctcatcgccaataggcgcgaacgtgcccgttgctcccgcaggaacgaacgcgcccgctgcgctgacgttcgaagttttgccctctgacgcatcggcgcggctgatcgaacccgaaagcgatggcagcatcgagcggagcgaatgcttcttctcaaccgaatcgccgctcgcgttcgaagcgttttcccccgatgcgctttccgtcgaatcgccgctcacgtcgatggagggaagcatgctcagcaggctcttcgcggcagatttaccagacgtctcaacatctgccaacggagcacgttgcttcggcagctctgatatgggaggcagattcgtagccgaaactcctatatcaggcaacacgataggccgatgggcagacgtttcggcctgagggacggcttcctcggtggaaacctcgtagctttcgatgtcgacgtcgattcgtccgcttgcgccgatgggggcgcccgtcacgtccactcggttgccagagcgctgcatgtcggcttgagcagcgcgggcttcttcttgcaccttgcgcggatccaggaacgagggcatgggaacatcgctgatgggcggcatgtcatccggacgaagcccgcttacgtcaataggcggcatggcggttgtcgagaacggatcgccttgagcatcctcgacggcagcctcgtgcgcggcgctcgacggagcttgcaagccctcctcgccggacgggacctcgtaatcgccatcgtcagagagacgctgcgaaccgtccgcagcgcttgcttccgtcatgtgccattggggagcctgcacatcaagagaatcgttgctaccggaatcggatacatccgccgttccatgatccgagggcttgctcgcctcggcgaaacttccggcgctttcgctgtcggctgcatcaagagcgcttgcgaaacgagagcgttgcaccggcttgtctgcgttacggggcttcttcgccttctcctgagctttcttgaaccagtccggaaccccgttgctcgttccgcccgcctggctcacggcatcgtacgacgatgccgccatgccggccgttgccgccgcaatggcggccgcctcctcggcggcgcgacgagcttcctcggcagctgcagcctcggcgttcgccagagcctcctgcatggtatcctcgggaatgctggacaacgcttcgcgcgtctcgtcgcgcagctctcgatagccttcgtcagtagccgcaggcaacgggggttctttgatctggacgaggttctgagcgatatccgacgctgtaacccctgaaacgggcttgcctgacagcgcggcgatggcggctttcgctgcagccaggcgtgcttcgggagtctgcggagcaggcgcaggaggcttcacgttagcggcttcgtacaccagctgcgcgccttcaggaaccaaccccgccttgcgcgccgcatcttctccgtggatcgcagcatcggcgttcgcggccagctcggcttcgctcacacggcctcggcctacacggcgtgcgacttccagcatcacagccgtgcccgcggcgttgcagttcgctccttcgttatacgaagccagcttgtgcagcagtgcgaacaccaggggcaaagcaaccagaaccagcgcgatgcacgccagtacgttcaacacgatggcggtagcgccttcggcgttgaggaataccacgttacgaacgatcagcagcactggcaggaataccatggcgccgaacgtggcccattgcaggatgggaagaatcgagagcagcgggccgttgagctcggcgttcaccttgccgctgtcgtagcgcgataccacgatcaccttgcgccgacgcgatccgcccgtttcggccgagtagccgggctcgtacttcgccacgacattctggctgacacctcgtgcgaaagcgcgggacagcacgggtcggttgaacacctcggcggcgaacaggagagccgctaacagcgtgaccacgatggacactacacccgccgctggcaaaaacagtgcaagaatagtgactaccagcgtagccgcgcagcagataacgcgcggggcttcggctccgggagctccgctgaaatcttctatgattgcggaaagacccgcatccttctgcatctgctcggtaatgtacaacgccgcttgctgctcttcttcagtccccgcaggacgaggtccgatttcctgtgatagatatgcgacgtgatctagtatgtccggcatactcttttgcctttcgttgatgattctacaaggcacacataatgcaagtatacgctatttgctctccgcacccaaataatcactaataaaagcgtctgcgctgcgcgcttgtaaacgtgctgttgaataggcctttgcaacatccgccgtggcttctgcgaaggcttcgtcgatgatgactgcaggatcttcgggaagcgatttcgcaagcaccgccgcttcggcatcggcgatgttgtaagcattgttctgagccgtggcttcttccttgttctttgccagaatcgcatcgtccgacgcgatggcgtaaccaagcgattcctgacgcttgccaatataatcgaagtactgcgagaaatcagccgacgcatacgtcgattgaacgtccgaaaaagcctgataagcctcatcgaaggcagccagcgcttctttcgtcttgttcttagacgcctcgacgttttcagccgtcgtctcggtgaccagctgagcggcctggcgcgccaaatcgtcgcctttcaaaacggttttccaagcacgatccacctgctcggcggcgagctgagcctccgtcgcggcgttcatgagaagctggccctgttcgacaagcgtgtagcgcgctgcgatcgccgctaccgtttggttcgcagcctccttctcgcgagcaccgttcagctccagcgagacagtgcgcgctttttcatcagcatcctgcagctttccttcgacatcctcgagctgcgcttgaatatcaacacgctgctcatcgcttccatcagcaaaaggattcttcactacctcatcgagcttttctatggtctcgtcagcctctttgacgagcagcaacgcatcgtcaagtaccgcaacgtgtccttgttgggtttgataatcgcgatagaggtacacgcctcccgcactcaacaggccggcgctcaccaccacgaccaccgcaatcgcaagccatttgctcagacgacgccgcgctttgcggagagctatctcttcttcgggagagcgttttggtttgacaggggcaaccgctagggtcgtggaagggtttttctccgtcgagccggacgaacgcgacggcggagcaatcattccaagcttcgacgtcggtccactatcatcaaccgacacgaaaccgccagttgaaagcggtaatccacgttccttggtcggcgtgggagcaggctttttccgcttgcccggaagagtgaagagcgagatgcggcctggcctgtgcttcaggccgtcgtcatcgccttccagcgcgttcttagccgcgtcgagcacgctgaacgatatctcgttcgacgtgccgcgcgtatgccttttgatatgcgcggcacgcgttatcttgtcttccctcttacccattcgtaccagccggatcgccttgcgttacccgttgttggagcgctcgagatcggctacaatctcagccgccgtcatcaccttgatggtcctgctcggaagggaattaaggaacgctttgccgtagcttttcgtcaacaagcgacgatcggcgagaataagcacgcccgtatcatcggccttcctgataagtcgaccagcagcctgtttcgtctcaagaacggcggcgggtagcacgtagcgcctccacgcctgatcgtcgcgagccgcccgttcgcacgacaaaggatcggtcggcttcgcgaagggcagcttgggaatgacgacccctttgagcgtagcgcccggagcatcgaatccctcccaaaagcttttgagcgcgaagagcgaaagatgctcgtccgccagaaaatcatcgcgcaaaccttttaccgacacaccccatttttgacacacgacgcgcaggtcgtcgactttgagttggggttgcacctcgtcaaagcaacgctccatctcgcgacggttcgtgaacaaggtcagcatcgagccgttctgcgcacggtgaacgtccaccagcaggcgctgcagcgcggcaagatacgcggcttcgttcggttccggcatatcgctggccacgtacactgtcatatgagcgtcgaaatcatagcttgaatccagcttgcacatctgacaggtcgaatgctccgaagcgttcaatcccagggcgctttcgaatgcgtcgaatttatcgtccacagccaacgtggcagacgcgaacaccgtcgagtgcgtgcgctcgaacaacgtctcgttcatcgcttcgcccacg

SEQ ID NO: 8886 - DNA, 559 bp, Unknown
  gut microbiota DNA sequence
actttcgaatgcgtcgaatttattgtccaccgccaacgtggcagacgcgaacaccgtcgagtgcgtgcgctcgaacaacgtctcgttcatcgcttcgcccacgttgatcagcagcgcttccagcttttctgcgacgcgatctttcttgcgactcaaagtggccgcataggcatacgtttccggagccctgtccaagatgatgtcggcggcgttcatctggtctttgagctccatcgcggtcgatgctatctcgcgctggatctctgccgcgccttcgagctcttccagatatcccacgagctcctgacacacgcgcaccagcttctccgctgcttcggtcatcgctcgaccatagcttgctacctgggcaaacgttgcgctggaacgcacatctgaattgatccacagctcgacgatctcgtagccttttccttttttgttctgatcgaagaacagaaggtccttgaggtgagcggagaattcccgtgcagcatcagcgtaggccttgcccgcagagcgcgccttgccggtaagggcgtagaacagcgaagaaccctct

SEQ ID NO: 8887 - DNA, 721 bp, Unknown
  gut microbiota DNA sequence
ctttttgttctgatcgaagaacagaaggtccttgaggtgaacggaaaattcccgcgcagcatcagcgtaggccttgcccgcagagcgcgccttgccggtaagggcgtagaacagcgaagaaccctcttccatgccgggcaccaccacacggcgctcggcacgcacgaacacgttacgggaagcctcatcggcaccgacacggttggccaggcgcgttatgtcctcggccgaaagcgacaacgagaaagcccgacgagcttcggcttcggctccatgggcctcatccaccacccaatagcggatcggcggcagcaatccaccatctgctacgagatcgcagaacagcaaactatggttggttaccacgatatcggccgcctcggcgcggcggcgcgaaccgtgcacaaagcatgaagtaccgaaataaggacacttacgccgtagacaatcgttcgccgtcgtggtgataagacgacgaggcaacacgcgatagtcgatcttcaagctgtccatgtcatcgtattcagtctgctcgataaacgacagcaaggcggcaagggagggagcctgggtctgctctttgttgccgaacagcttagtctgcgctccttcctcgacgatatggccgatcttacgcaaacaaggatagtgcgagaaacccttgagcggagcatacgtcagagacggcctgtcagggtcggccaaccgaagcgctttttcc

SEQ ID NO: 8888 - DNA, 1048 bp, Unknown
  gut microbiota DNA sequence
cgcctcggcgcgccggcgcgaaccgtgcacaaagcatgaagtaccgaaataaggacacttacgtcgtagacaatcgttcgccatcgtagtgataagacgacgaggcaacacgcgatagtcgattttcaagctgtccatgtcatcgtattcagtctgctcgataaacgacagcaaggcggcaagggagggagcctgggtctgctctttgttgccgaacagcttcgtctgcgcgccttcctcgacgatatggccgatcttacgcaaacaaggataatgcgagaaacccttgagcggagcatacgtcagagacggcctgtcagggtcggccaaccgaagcgctttttccaatgcaggcagctcatggtaaaccaactgatcgagcagggtattagtcttcgttgcaacgccaacggctatgttgttggcccgcgccgtcaacgcggcgggaaccaggtacgccatggactttccaacgcccgttcccgcttcgaccaacaggttctccgaagaagaaaatgcctttctcactgcctctgccatagcgacctgctctatgcgaggctcgaactcttcgtacaacgaccccacgagcccggtttccgaaaaggcttgaacgatatccgcatctgaagggaacgtaagcgagcgttgcggatcggccgcgatatcgtcggcgtccagctttgccgcgcgctccagcttgcccaagcggtcacgacgaagggcgcgcaaagagaatctcaaacttggtgttccacgtgaaacatcttggttcgcttccacctcgtactttcgggcgaactgctcgaataccatcctcgtcgaccactcgtcaggagtcgccatatgcgcgatctcgcacacgagcgccggcggcatcgtcgcaacgcccgccagcaggatgcggaagatggcgcaggtcgcctctacgtcggcatcggcgcggtgcgtcgacaaaggcgcgccgaaagcccgtacaagatcgagcaagcgatgcgatttcatgcggggaagcgcgattcgcgcaagatcgagcgaatcgatccag

SEQ ID NO: 8889 - DNA, 418 bp, Unknown
  gut microbiota DNA sequence
ggcgatctcgcacacaagcgccggcggcatcgcggcgactcctgcaagcaggatgcggaagatggcgcaggttgcctcgacgtcggcatcggcgcgatgtgtcgacaaaggcgcgccgaaagcccgcacaagatcgagcaagcgatgcgatttcatgcggggaagcgcgattcgcgcaagatcgagcgaatcgatccaggtattctccaacaggggataaccgctgggatgacgcgtggtgaacgtacgatcgaactctgcgttatgcgcgaccaccttcgcatcgccaatgaattccacaagcttggccagcgcatcggcgggaagcggagcatcggccacatctctatcgtggatatcggtcaggtgcgcgacatcttccggaatgggctttcccgggttcacgaacgtgatgaac

SEQ ID NO: 8890 - DNA, 2485 bp, Unknown
  gut microbiota DNA sequence
tgcgtcggcgggaagcggagcatcagccacatcgctatcgtggatatcggtcaggtgcgcgacatcttccggaatgggctttcccgggttcacgaacgtgatgaaccattcgactatttcgccttgttccatgcgagctgcagcgatctgcgtcagctcatcatggttgaaagagaagccggtggtctcggtgtccagaaccacgacgttatggtcgagatcgccgaaatccatcgtcgctgcgatttcgggaagcgacgcataccggtcgcggacggcctgggaagtgccatcgcttatgaaactttgcagggtatcctgcgagagcatattttgtttatccataccgtccagcctatcatctatcatgggatcatacaaactgttacgccgacgttgacaaaaagaacggctcgaaggagagaacatgcaggctgagcgttacttcggtacgtacgcacgattcgataccctttcaaagaaagatgctgcaatcctgctcggagccgataatcctataggcgacgtgtttgagatcgtatttcaaaccgacaacggggtgtccaccgcttggatgaaaaaccgcttcggcgcgctgatcggatttctcgatgctgagctttcacgccagctgagcattctcgccgcacgcgagtggaaactgcaagccttgttatcgttcgtcgcgttcaccgaccatcccgaaccgggccactactggggccaagtcgccatcatctgctacgattccaatctcgatcaagctttcaagcctttcatagctacaacggcgcagcgtctttccgatggcgtgcgaccggaaatcgatctcggcgagcaaggtgtcgaacaggtaatctccagcaatggtaattggactccaaaacagaccgtagcatttcctccaaaggaagcgggaacggtgatcatgaagagtcgacgtaaaatgtccgagaaactcatcgagcaggggcgcaaaggaaacaagggctgctatgcggtcagctggctgttcttgctggcgctcgtagcccttgctcttttcagcctcaaatcatgcggcgcgttctagtctttcttcaagagtggaatgtttcacgtgaaacattccactcctccgtttattaactgagagcataaccgataagccgcgtacagagttcgggaaaagaaatgcccgccgcacgcgcggcatcgggaagcagcgatgttcccgtcatgccgggaatggtattcgtctccagcgtccagcacgaaccgtcttcttccaaaatgaaatcagagcgcgaaaccccttcgcacgacaacgcgcggtgggcacgaaccgcaagctcttgcaccatccgcgtcgtttcatccgacagcggcgcgggacacaagtgctgcgaaccaccgggagcatatttcgactcgaaatcgtagaaatcgcttttaggaacgatttcgattataggcaacgcttcgacttctgcgtcgccaatgaccgcaaccgtcaactccttaccttttatatagcgttcaacaagaacctctgaatcgatgtcgaacgccttctcgattgcttcgccgattgccgcagcaccttcgacgatgaacacccccagtgcgcttccttccgtgccgggtttcaccacacaatgcgcgcccagcttctcgacgatagaatccacgtcgtaagaatctcccttctgcagcggtacagaggggggagtagggatgccggcttgttcgtagtacagcttcgacttcactttatccattgccaaagcgctcgaccacaccccgctaccgatataagggagcccaatcgtttccaaaagaccctgcacggtgccgtcttccccatatttcccatgcaaacagagaaaagcaacgtcgaaaggaccgtcgatcaaacgtttcagatcctccttgtcggcaggatcgagctgcgtaacggtatatccggcttcttcaagggcccctcgcgcgccttcggccgatgcgagagacacctcgcgttccccgctctttcctccggcgagcaacgccacgcggcattcagacatgcatccttctttcatcatccttgatacgttcgttgcagtatagcaaagggatgtttcacgtgaaacaatgtataatggcggctatggataaatcaatcaaaacctattcgctgcccgaactcgcttcagtaatgaaagaactagggcagcccgctttccgcgcacagcagctgcaggaatggctctaccaacgacatgcgtccagctacgacgagatgacgaatctccctggttctctgcgagcaacccttgctgaacgttttccactcacgatgccgactgtcgtcgatcgtcagatttcgaaagacgggacacggaaataccttgttgagttcgacgacggtatccgcgtagagaccgtaggaatcccttcgcgcaacggcgatcgcttgaccgtatgcttctccacgcaggcagggtgtcccatcgcatgcgcg

SEQ ID NO: 8891 - DNA, 456 bp, Unknown
  gut microbiota DNA sequence
gcggaaataccttgttgagttcgacgacggtatccgcgtagagaccgtaggcatcccttcgcgcaacggcgatcgcttgaccgtatgcttctccacgcaggcagggtgtcccatcgcatgcgcgttctgcgcgacaggccaggaaggtttcgcgcgcaatctcacaccgggagaaatagtcgaccaagtacttatcgtccaagaagacatggggaagcgtgtcacgaacgccgtaggaatgggtcaaggagaaccgtttctcaattacgacaacaccatggccgcattgcgcatccttaaccacaagaaaggtcttgaaataggagcacgccacatcagcgtctcaacctgcgggattttgcctggtttggaacgcttctctggggaacccgagcaatttaccctcgcggtttcgctccatgcagcgcgtcaaccgattcgcgacctcattatgcc

SEQ ID NO: 8892 - DNA, 1537 bp, Unknown
  gut microbiota DNA sequence
acatccttaaccacaagaaaggtcttgaaataggagcacgccacatcagcgtctcaacctgcggggttttgcctggtttggaacgcttctctgaggaacccgagcaatttaccctcgcggtttcgctccatgcagcgcgtcaaccgattcgcgacctcattatgcctaatgttgctcgctacaaattgccttcgttgaaagaagcgcttcagaactacgtggcgaagacaaaccgccggattacgctcgaatacatcatgatcgaaggcgtgaacgacgcacctgtcgaccttaaggctcttcaaaagttctgctcgaatcttctatgccacgtcaatctcatccctatcaatgcaatagaaggttcggaattccaaccgagctcgcctgaaacgattaatctatggctttccgaaatttcaaagaaaggaacggaagctacgctgcgcgactcccgcggttccgatatctccggtgcctgtggccaactgaaaaacaccttcaagccttgcaactgaagtgtttcacgtgaaacacttcagttgcctaccgttgcaacggatgcacaagagaatacgtatacaagaataagaaagcccggaatgttttacgtgaaacattccgggctttcttttgggaacctttcgacctttaggacgctgcagctatgagctcctcgaacaacctctcgagatcttcctcatcttggaattcaatctcaatcttgttctttccgttagaagacttcacctttacgggtgtgtgcaacacatctttcaaagctttcgccaccgttttaaacgtcttaggcaacggctccttcttcgtcggggcgtcattgcgcttacccgagaacagacgcgctatagcctctgcttctcgaaccgtaagtttttccgcaacaagcttgtccgtcagcttctgacgcccttctttcgtgggaatggacaggattgcgcgtgcatgacccgccgatatcttctcctcgaacaataattgctgcgcctcttcgggaagctcgagcaaacgcaacgcattagccacagtagaacggccttttgacatagcctgtgctacttcggactgcgtgaggttacgacgctccatcatgcggcgataaccgtatgcctcttctataggattaaggtcggaacgctgaatattctccacaagagcaagctcgagcgcttgatcgtcgtccgcatccttaatgcgtaccggcacggttttcaatcctacgattttacatgcctgccaacgacgttcgcccgcgatgatctgatattcattggttccaacgggacgaacgagaatcggctgcagcagaccatccttctcgattgatgctgcaagctcctcaagcgcctctcttttgaagttcgtgcgcggctgatcggggttcgggctgacggactctatcggaacctcgtcgattcggcgctgaacaacacttttaatgattacctggctttcaccatcgacgatcgattcctctttcattggcgtgattgtttcacgtgaaacattctgacgttca

SEQ ID NO: 8893 - DNA, 2608 bp, Unknown
  gut microbiota DNA sequence
actgacggactctatcggaacctcgtcggttcggcgctgaacaacgcttttaatggttacttggctttcaccatcgacgatcgattcctctttcattggcgtgattgtttcacgtgaaacattctgacgttcaaccacgggttcggtatgcatagggatcggtacggcagtctcttcgcgttgttgctccaccaacacccgtttgggcgtagattcgagaggggctgcttcctcaaacgctccaccaagaagcgagttcaagccacgacctaatccgcttttgttcgctttagccacgttgtaccacttcctttgcgaggtttacatacgattgcgctcccttgcccgatggatcgtattgggtgataggctggccgaagctcggtgcttcagacaatttaaccgtacggggaataagcgtcgtaaaaaccgttttaccgaaatagctgcgcacctcttcaacgacttgtcgagaaagagtagtacgaccatcgtacatcgtaagaagaacaccgaagatatcaagggtaggattcagacgagttttgacacgtttcattgaatcaagaagttttgtcacaccttccagtgcgtaaaactcgcattgaattggtatcaacagcttgtccgcagcaacaagcgcgttgaccgtcaataagccgagagaaggagggcaatcgataaatatatagtcatacttgcctcgaaggcttcctacggcgtcttttaagcgattctcacgggccatctcggatacaagctctacttctgcccctgcaagatttatcgtggctggtacgagatcgagcccttcgcccacatccgggatgatgacatcctctattgcaacgtcgttcaataaaacgtcgtacacgcaattatgcacttggctcttctcgatacctaaaccactcgaggagttgccctgcggatcaagatcgaccaacaaaacttgcttgcccaactctcccaatgcggcggaaaggttgatcgcagtcgtggattttccaacgccgcccttctgattgatgatggccatcacctttgtctgaccgaccacatttttgacaggcgctttatctttgatcgtcttgataggagtaggaggaacttcttgctctaccaaaggcttcacagtctctcgttcaaccacttcaatatggtcgatgatcaactcgtcctctacgatctcttcttttttatgttgcttgacagtctctgctgcttttttgtctcgtttgagaccatcgaatagtcccacagggaccccctttcttgaccgcgaacacagtataccttgtttagtgtttcacgtgaaacactcgcccaaaatgtttcacgtgaaacatcgggagcctgctagaaccaaaagtgtttcacgtgaaacaaatatagaaaccgcgttggaaaatgaggtaaacggcgtgagatccgcatagaccgcacgctagaaacctgccatatgcacgtaagaccacatctgtacaatactagataggaaaaaggaggttgctgatgaataccacgcggcgccaattgctcgcccagcgggcaaaaaacatgcgtaatcaaatgacctatccagagcgaaggctttggttctcgttcttacgagaatatcctacaccgttcgtagctcaaaaagtgattggatcatacattgttgatttctattgcagaaaggcgcgtctcagcattgaactggacggtgatagccattataccgaaagccagaaggaatacgaccgcgttagaacaacctttctcgaaatgctcgagatcaaagagctgagattcgctaataacgaagtaatggagaacctcgaaggcgtgtgcgaagcgatccacgctgaagtcctcaagcgtcgtaacgacgttcacggaagcctattccaaaaaatgaaggacaaacattagactccgctggatccgaattcaattcactatctgcgttgtctatgcgagaacgcggcgtttggcgtttactctggatccgagctaaatgcgcgtaggctgcgtgttagaactgaatggaatccgcgtaaggttagcgctagattctaatgcagaatgtttcacgtgaaacattctgcattagagcgggcgtttttgcgcgaaacctgttttgcgcggaagctttacatgcggggtacccgttttttcgaagcaaatgatgcggcggtgattcttgccaagctcaacgatacgatcggatacaagcttcatcgccaagcggttttgcaacgatagggcatgctccatctcttcatcggatacattggctttatagcaaatcaaccgcccaccttcctgcagcaacgggctggcgaattccatgagtatcgacagctgagcaagcgcccgagcggtcaccgcagcgaacgaggcaggttcttcacgagcaaggtcttcgattcggccggtatacacatcaacgttatcaagacctaacgtttgcaccatcgaagcgaggatcgtggttttcttaccgacggaatcagctagaagcgtagaacgaccgctctctatagctaggggaatacccggataacctgcccctgatccaatatcgaccattcgaccttccggtgcttctctcaattcaggc

SEQ ID NO: 8894 - DNA, 232 bp, Unknown
  gut microbiota DNA sequence
ggcgaacgaggctggttcttcacgagcaaggtcttcgattcggccggtacacacatcaacgttatcaagacctaacgtttgcaccatcgaagcgaggatcgcggttttcttaccgacggaatcagctagaagagtagaacgaccgctctctatagccagaggaatacccggataacctgcccctgatccaatatcgaccattcgaccttccggtgcttctctcaattcaggc

SEQ ID NO: 8895 - DNA, 1963 bp, Unknown
  gut microbiota DNA sequence
atcgagttcgagccggcgctgttcgaatacgccgaggagtggcttcccgaacccgtcgagccggtcgacccggtcgagcccgaaaaccctgcagagcccgagaaaccccaagaaccgcagaaggagccgccgaccgtcgtgaacccgcccgacgtgaacggcggcgacagcggagggaaccgcggaggcgtgggtcagggggaaagcgagcggaacgaggcgagcgaagaacggccgaagaaagacggtttccccgccggcggcgaccctgtctcaacggcctcgatcctgccgctgccgcgcaacgaggagccggccgccggaacgcaggacggcgacgggacgcaagaaaacgcgcccgacgagcaagccgggcgcgcaggggaaagcgatgctgcaagcaaggaatcgatgccgggaaaggccttcgccgattcttcgacaagccgcgattcggcggcgacctccgcgggctcgacctcgtcgggaaccgcgcaccgtatgcccggcttcgccctggccatcggaggcacgatcggcgccatggctttgatcagcggcatcgctgccttcgcaagagcacgtagaaagcgctagcgacggcgggagcgcagcgctacgaccaacacaacggctccggcgacgagggcgacagctacgcaacccgccacgagggggaacaagccgtcgccggttgtcaccagcgctttatccgagccggagggagccccggggcttacgttcgtgccgctcggaagcttctcggggctcggcttggcgttcgatccgccggtcccttcaccggagttttctcccggattctgcccggagccttccgagccgtccccggggttgccgccagacccgtcgcccgaaccgtcgtcagggctcccgcccggcgtgccgccggggtcgcccggctcatcgggcccgaccgaagagccggaagcgaccttgacggacaacggagccggcagctccatgcccagctgcttctcgtccatctccacatgcgaggagcttacgacctcgaggctgctcacggacacttccgcaacggaatcgctcgaagacgacaacgcgagggttcccagatcgagacggtcgcccgagaacaggttcccgtccttgacggccacgtagaggttcacgcgctggccaccgtccaccggcttgaagcgcacctgcgccaccgcggcgccctcgaccgccttcgagaagccgaacccggcctccagcgcctcgccgccctcgccctttaccgtcaacgacagcttgagcgcccgaacctcgtcgcctcccttggggacgaccaggctcgcgtcgaccgaaccgttcgaggcgccctcgtccaggaccacgccaggcgcctcccccgcccaggctattcccggggcaagggccaggcagagcgcgcatgccgccaacgcgcccgccgtcatcttcttcatcttcgcaaacatatcttcaaccgttcctctcggcttcaggctaatcggctgcgacggtcgcgttgccgccgagctcgacgtcgggcagattgtcgggaacatcgcccggaagcgagtcgctcaccaggcgctgtccctcgttcgtcaacgcgttgtccacgcggtacagctcggcgcgcacctgcttgggcagcttcatgctcgcaaggtcgccgggctcgatccagtagacccagcttccttcggacacgtcgcccagcatggcgtcgccgggctcaggcgccatgatgatctggctggcaaccgtgctgccgtcggcgttcacgccgcccaccacgttgccgttctcgtcgtagagcaccaccacgttgtacgccgggttgcccttgtacgagccggtgaacacgagcgagcccttcggaatgaactgcttgtccaggttctcgtcggccttctggtacacgaagtcgctcttcaggatgcctgccgcgccgccgttcgcgtcgaggaag

SEQ ID NO: 8896 - DNA, 247 bp, Unknown
  gut microbiota DNA sequence
caccgtcaacgacagcttgagcgcccgaacctcgtcgcctcccttggggacgaccaggctcacgtcgaccgaaccgttcgaggcaccctcgtccaggaccacgccaggcgcctcccccgcccaggcgattcccggggcaagggccaggcagagcgcgcatgccgccaacgcgcatgccgtcatcttcttcatcttcgcaaacatatcttcaaccgttcctctcggcttcaggctaatcggctgcgac

SEQ ID NO: 8897 - DNA, 188 bp, Unknown
  gut microbiota DNA sequence
gccgaggtatggtgctgcacgctctgccccggacgcgtggccggatgcccgagccccacgttcgcatggaacttgcgcggcgcaccgttcaagagctacaacgacgccattcgcgttgctgcgcgagagcacggctgcaacgtggccgacctcgaggcgttcggcatagactacgaggccgtcgacgg

SEQ ID NO: 8898 - DNA, 12781 bp, Unknown
  gut microbiota DNA sequence
ttgcagctgccgtcgttttcggcgtacttcgacctcgtggagtcagggcgaaaccagcaggagcgaaaccggttcgtcaacctcgtcaccacccattacacctacttcctgcgcgaaagcgcgcagttcaagttcctcttcgccacggctttcccggaattgctggccaagcggccgaaccgcccgtggaacatactgtgcgccggctgctccacgggagaagaatgctacagcgtctcgatgctggtcgaggactacgcgcgaacccacccgatcccctccgttcgcatcaccggcatcgacctgtcgcaacctgcgatcgaagaggcgcgtacggccgcctatcccgaatcgcgcatcaacagggtgccccgtcgctggcgcaatgcgtacttcgttcggaacggtcagctgtacaccgttgccgagcgcatccgctcgcgcgtctttctggcgcagggcaacctctgcgacgacgaagtcctgcgcaggacgtacgacctcatcatgtgccgaaacgtcatcatctacctcaaagccgaagttcgcaaccgggtgatcgcgacattgcaccgccacctcgccccatcgagctacctcatgctggggcacgccgagatcatccgcgaacgtacgctgttcgaataccaggggaactccgtttatcgaagacaagcgaaagcgaccaacgtatgagcatgaaaccgagcaacatcagcataagccgcatcttgatgatatcctacggcatcgtcatcgccctgttcgccctttcgatcgcagtggcgctctacggcgtccacgcgaacgcctccatgaccaaagagttctacaaccggccgtacatggtttcgaaaagcgccgtggcgcttcgcttcacgatcgaggagatgtcgacgtacgtcgagcagctgcttaacgcagaaaacgacgcggcgaaacagaaagcgctggtggccatcgaggatctcactgaacaacgcatgaacgagctgaacgtcgtccggtcgctgttcaaagccgatcccgatcttctagaacgcttctcgaacgcctgcgacgagctgggcgcgcgccgcaacgccgtgatcggtgcagccgaagcgggagacatcaaccgcgccatcgacctgtactcgaacgagtacctcgcgcaaaaggaagtgaccgtcaacctgtccaccgaggtcgtgaacaccgcagagcacgttgcgcaggccttcgtcaaagactcgttcagcgtcgaggtcggaacctcgctggccatcgggcttctagggacggcggcaatcgtgctcgtcatcgttatgtggaggcgcatcacgcacagcatcgccgcgcccattcaggagatcgaccgcatagcgaagcggttggccgacggcgatctgacggtgcgctcatcctgcacgtccggcaacgagctgggctcgctcgcttcgtccatgaacgaaacggtagcttcgctgcgcttcgccaccgagcagctcagcgaaacaaccgagcaggtggctcgctcgtcatcgcagatgtcggacagctcccaagccgtcgcgcaaggctccgccgagcaagccaccgccatcgaagagcttgccgccaacgttcagagcatcacgcacgtggtgggagagaacaccgaaagcgtcctgaccgtgaattccaacacctccgatgtactgggcgcggtcgaggaaagcagcgactcgatagcccgcaccgtgtgcgccatcgaggagatcaaagacaacgcccagagcatctcgcagctggccaactccatcgaagacatctcgttccagacgaacatcctcgcgctgaacgcctccgtcgaagccgcgcgcgcaggcgatgccggacgcggcttcgccattgtggccgaggagatccgccgcctcgcctcgcaggtgagcgaagcgtcgcgtgcggctgacgaactcgccgggcgcgccatcgaaaacgtcgaggccggaagcgagctgatcggctccgcatcttcgaacatggaggaagccgttacctctatcgaagacatcaagacggcgatgtcctccatcgctcacgcctccgagcagcagctcgaagcggttgcccagatacaggagagcatggacagcctctcccaggtcgtgcaggagaactcggccgcctccgaggaaagcgcggtcatcggagaggagcttgcggatcgcgcgaacgaactcaagcacctgatcggccgcttcaaaatcgatgcagatccgcacgaaagcgaagctggggcatgacgcgattccgaaccgaaacaggcagcgcgccgagcggatcggaaggcatccgagaagaccgcgaacgcctgcgcgccgacaacgccgccctgaagcagcagctggacgtcatgcgggcgctcgcattccgcgaccagctgaccggcttgttcagccgccactatttaaccgactacctggagcaagagatcgaacgcatgagcggcgaagcgaacatcgtgctcgccctgtgcgatatcgacgacttcaagctcatcaacgacgtgcgcggccatcaggccggcgacatcgccatcgtctgcatcgccgacatcctcgacgacctctccggcaaccatccggtcatccgatggggcggcgaggaactgctgctcgtgctgttctccacgcccgaccacgaggccttgcgtctgtgcaaccagatgcgtgaggaagtggccagctatcccatcagcgacgacttaggcgatttttcgtgcacgctcacgttcggtctgagcgcctacgatccggaactcacgttcggcgagaacttcgcatcggccgaccgcgcgctgtaccacggcaaggagacgggcaagaaccgttgcgtgttcgcgcaatcgaaccagatagagcgtggcggagggaaccggtcgtgaaacgcgaggagatcaccgtgcaggcgaagctcaagcccaattgcgggctcgagaacacgcgcgcttcgctcgtcatgcgccgcatcgcgccgttgtgcgactcggcaacatgccatccgcacgcgatcaagagcagtcgggagacgattccctacctgcgcgaccacggcttgttcgtcaccttcgtctcgcgcacgcccgagcgggtgctcgcagccatcagcggtgcgttcttcgtggacagctgcaccatcgtggaggatcccgaaggcatcccgccgttcgagatgccttccgcatcccaggaagacgatgcagaaaacggagggatcgaagcgatttcttcgttcgccgatcgcgatgcgcgcagcgagcgagacgaaaagctgtcgaacctgatcgcgcagctggaggagacgaaccggtctttgcgagcgcacgccgaaagccttccgaacgaccgcgtgctcagcgatatcgcgttctcgtacgcgcagaccctcgaccacctgcgatccaccgtcgccctttcgcgcatcgaagcgttcgaccgcatcgctccatcgcttcataagctcgtcgaggactacgggcgccagttcggcgttcccgtcgatctggagctcgagcaaggacgcatggatctggatcgttcggtgctcgcatccatcgaggaaacgctcagacgcgcccttcgatcatgtatccgcgacggcatcgaaagcgccgaggaacgcgccgacctgggaaaaccggaacgcgcaaccatacgcttgcgcctggaaaacgaaggttcggatgtcgtttgccgcatcgagcacgacggcaggcccttcgacgcgcaccgtatcgccacgatagcgtcgaaacgcggccttctcgcccgtccgctggacgcgtattccgacgaggagataggcgcgttcatccttctgccgcaattcttcttgccgagcgccgccagcgacggcaacgccttcgcagaactgaacgagataggctgcatgctgcagcgcatcggcgggcgcggcacgatgcgcaacaccgaacgcggcacgttggagatcgtcctacgctttcccgtgccgttcaccgtgttcgaagccgccctgctgcgcaccggaggcgtccgcttcgcagttcccgcacagcagatcgtgcgcttcgaggcgttcgaccccgcccgcgtccagcgcggcggcgcaacgggagaagggtcgaaagcaacctcaacctggtacgaggacgaacacggcgcgcatatcgagatgctcaaccaaggtgccaagccctttccgcttgacgcggcgcaccccgcatataccgtcctgcttgaagctctgggggaacgatgcgctttggccgcagacgacgttgagggctacgagcggatctcgatgctgcagcttccggcactgctcgaccgccggcgcatgcacgaactgggctgcatcggatacgccatcctgcaagacggttcgccctgcatcgtgataagcgtacagcgctttctgaacgacgcggcgaaggacaggggaacccatgcgcgaccgtagccaacgtctgcactggatcgaaacgctcatcggcaaggaccgccaagaggctcggcggaataacgcgctggtcatccccaccgatgatggagacatggccatcgcgttctcgtccatcgtcgaagtggtcgccgccagccgcgtgcagccccttgccctcttgcccgagcagttctgcggcgtgctgttccgcggcaacgagctggctcccatcgtcgacacgagagcccccgacactggaccggggcacgtcgtgctcgtcgaaggggaaggatgcctgttggggctgcagttctacggcacgccctacgtcgtcgacctcgacgaaaccgaacatgccctcttggccatcgagcgccgtccgagcttcccgtcgggaacgcttcccctgctggatatcgacgccgtagcgaaagcgctgctcgccctcgattaacgccgcagtgcgcgagctcccaaccagcgcatcaggtagaatggctcgaacaaccagccaccgcatccgacggaaggacgcatgccatggagttcgcacgcagcacatggaggctgttcgccgccaatgcgcgaaccgctatcctgttcgaattcggcttccgattcttgttcgccatcctgttcgtaccggcatgtttcggcatggtggatctcgcgatggaagcggccggacttgcctacttggccgacacgaacatgacgactctattcgcgaatccgctggcgtgggtgtttttgctcgtggccgcgcttgtgctggccctcggagcccttttcgagatgtgcgccctcgtcgttgtcatgcaggcgggaaagacgggtcggcgcatcggagtgttcgaaacgagccggctcgcattctcttccgcccggcgcatcgcacgcccatcgaactggcttcttgcgctgttcgtgctgctgctggttccgctcacgaacctgaccgtcacttcctcggcgctcaccggcgtgcggcttcccgagttcattatggacttcatctgggaaaacggcgcgctgaccgcggtgttcgtcatcgtgatggccgcactgtacctgcatgcgttttttctggcgttcggcattcacttcttcacgctgtgcgacgaatcctggatgcaggcacgcatctcgagcaggagcctgctgcgcggcaacgcctggcggctggcgcgccgtctgctggccttgttcgccgtgttcgcgtcgggagcggtcgcggccatagtcgtcggcgtcctcatcttggccgccatcctagaaggcggcctgccgttcggagtctccttcgcgctcacgctcgtgatgttcgcattcactatcgtggtcgactgcgtgttcgcgccgctgagctatgccgccctcagcgccacgttctacgaattctcgcaggagcggggcatcgacgtcccttaccgcatcgacgagccctcgcgtacgtgcaggacgaggctcgcgcgcgcagcggtcggctcctttctcgccatgctcggactcgtttcgttgctgtcctacgaccctttgcacggggtattcgaatccgaaagccagcgagagcccgcgccggatttcgcgatcaccgcgcatcggggcggcgcgcgcgaggctcccgagaacaccttggctgcattccagaacgctatcgaccaaggcgcggattgggtggagcttgacgtgcagcagacggccgacggcgtgctcgtggtgatgcacgatgccaacctcaagcgcacgacgggtctggataaagagttctggcaggtcacgtacgacgagatcaaagacctcgacaacggcagctggttcgatcccgcattcgcagaccagcggatatgcacgctggaagaggcgcttgcgttgtgcaaaggcaagatcaagttgaatatcgaggtgaagccggacggccacggcgtcgacctcgagcgaaagacggtcgacctcatcaacgcctacgatatgagagaccaggtggccgtcgcgagcatctcctacgagtcgctcgcgaaggtgaaggagatcgacccctccatgcccaccatgtacgacatgacgttggcttacggctccatctcgagcatcgagcatgtcgattatttcagcgtcgacgacttcttcgtcacccaggaactcgtcgacgaagtgcaaggggcggggaagatcatatacgcttggaccgtcaacgaccccgccaacatgtcgcgcctcatcgattatggcatcgacggtctggtcaccgacgacatcgcacaagctcgcgagctgtacgaagccgcgctgaacgaggggcacgagtacttcgccgccatctgatcgacggcggcgaacgcttgcgaggtgttggcgcgcccgagagcccgcatgggcgccacccgcaaggcgactcgttgccccgcgcttcgatatcgacgtcgtgatggaaacgccgctcgccctcgaccaacgcctcgatggccgaaaaagccgccgtcggacgaggctacttagccgatgcgaccgatgccgcccggtcgacggcgtccgcgaacgttttcggacgctcgtagtggatgtcgtggcccgattcgacgacgacggtttcgcagacagccacgagctgctgcacgcgtgcggcgtcctcgtcggagttggcggcgagcaacgtaccatcctcgccgtagttcgtcttcgctttcaggtacacggcaggacaggttatacagcgcagaaggtcggcctggtcgatgccgtcgaaccacgtgccgtcgtagaacgtctcgctgaaccgcacgtcgaagtcgtcgtagaagtacaggccacgcacccagtcgtgcggcacccaggccagcgtgagatgcgcgtcggggttcgctgatcgctcctgcgccgtccactccgcgattttaggctgcagtcctccgaacaggctgaacaggtagctgtgctgcgcgtagtacacggtcgggtcggcaacgtcgccctgccggaggaacgcgtgcgtcaccatgaagccgtctttccatgcgaagcagcccggttcctgctgcatctcgaccggcgtgacgcggaagaagggcggatcctccagcacgcatgccgatacccgctcggcgtcgttggcggccagccacgcggcgatgatgccgcccgacgaatggcccgacacgagatagcacgcgccgatcttttgcgcagcgaaggacttgagcgcccgcccgatggcctcgcatgagtaaagcgccggatcgtggctcgattcgccgtgaccgaagcagtcgacggcgaacacgtggtagcgctgcgcgagatcgggcagcacgtgggcatagtcctcccactgcacgccctggccgtgcacgaagtatcccgtgcggccgacggcgcacttgatggcgaaaaagcatcgaattcggaagtctccatccagtgcgcaagagcaccgggaatcctcctcctcgcataacaccaggtcacaggatggctcgcttccggcaccatgcatcgagctcgtccgaggctcgcgatttcttccgaattcgatgcctttgtgccatttcgagggcgactggccgcacggaggggcaacgcgtcccgattcgcgatgcaagaagacctccgctgggcgcgaacccagaacaacccttaggcgagcatctcggccgatgctctcccagtggcaaatccgtacaaatgcttcacgtgaaacactcggacgcgcacaaaaaacgccgcatcactatggatgcggcggccaggttcgcgggttcgcgcttcatgcgcttgcgcgagataggtgcgatccgaaaaggctacagcagctcctccacggcgggcgccacgacatcggggatggacgcggtgggctcgaaacggcgcacgacgttgccctcgcggtcgacgaggaacttcgtgaagttccacttgatgtccggcttgccggcgtagtcggggtcgtccttcgacagcaggtcttccagaatgggcgtcaactcgtggccgtcgtcgaagccctcgaagcccttctgctgctgcaggtaggtgaacagcgggtcggctccctcgccgttgacctcgattttcgcgaattgcgggaacgtcacgccgaaccgcgacgtgcagaactgcgcgatctcctcgttcgtgccgggcgcctggtggccgaactggtcgcacgggaagtcgaggatgtccaggcctcgctcatgcaacgcggtgtacagctcctggagctgggcgtacgtgggcgtgaagccgcactcagtggcggtgttcaccaccagcagcacgcgaccccggtagtcggcgagcgacacgtcgttgccctgctgatcctttacggtaaagtcatagatgctggaagccatgggtccttctttcaacgaggggttgttcttcgtctgtgatcgtacctatgataccgccaaatgatactttgttgataacattttacggaacggtcatacttgcgcaccctgcggcgcgaagccgccaaccgaaggatcgcccaccaaaacaaggatgtcgtaatcctcgctccatcctcccgactgatcgctgtcgtagcagtacacgctccccggcccgaccaccttcaacagctcggccagctcctccgcttccgcgctgttttccttgtggtagtacgacacgcgcgtcaacgcagcgttgaagtaggtcgcgttgtccaccgtcacgttctcgaaccccgcgccgcgcaccttctcggccacctcggcagctgcgccctcgacgccgcagccgttgagcacgagcaccgtcacctggtccttgccgatgcgcacggatccagcagcatcgaccgcagccgaagccggctctggcacggaagccgcacgggatagaacgtttccttcagccgacgcagccgtctcgtacgccgactggttcgctgactcctgcgcggaaggctggccggtcgagcacgaaccgagcagtatccccgacgccccgcataatacgagtgcgctcgcgagaagagccccatgcgccgtcttcgcgttcacgctcatcgcaatcaccgcctatcgtgctcgaacatgccgtctcagaaaagagtatacccccccccctgacgcgccgccgcaagtttgcagcaacgcgaaggtttgtcctgcggagtgtttcacgtgaaacatttgtgcgctatgcagggtggcggccccgacccgcctcagcggccgacgcgcacgccgcgcgcttagatgcccgccagcacttccaccacggcgagcgcgaacaccactgcgaaacccacgcccacggccgcgaagctggtgccgccacaacgccgcacgtaggcgagcgcctcccgcacgttcgtcgcgccctgttcgaacgcgcggtccatcgcgcgctcggcgctgacgcggtacagcgagtagaacgccatgccgaacacgaggctcgccaggaagaagagcatccccaccaccgtcgaaagggacttcgacaggaaatcggcgccgaagctcacggcgatccagcagccagccgcgaggtactgcttgcggtacagcaggtacagaggtgtcagcaacagcgcgagccagctgaacccccacccgcgcatcttccgcaccatctggggtttcggactgcctccctcgccttccgcataagccgcgtacaaattgcaaagctcgtacggctctcccgcgggcgtcctcgccatgaaccgggcatcgtcgtccatcgcccaacctccttccgaaagcaacggggcgagccgctccggcccgccccgcgtcaactcgctcgtcgttcgctatgcccgctccgtctcgatttccagcgcgccggcttcttcttggacggcctgggggcggccggcgtccacgaaccggtcgcgcgccttcttcgcctcggcctccttgtcggcaaggttcgccttcgccacgctgatcatcagcttgatgcggttgagctggttcacctcggacgcgccggggtcgtagtccaccgccacgatgttgctttccgggtagcggcgacgcagctctttgatgaccgccttgcccaccacgtggttcggcaggcacgcgaagggctgcgtgcataccacgttcggcgcaccggttttgatgagctccaccatctcggcggtcagcagccaaccctcgcccatcgagttgcacaaggacaggatctcgctcgcgtactcggccagctcgtagatgtcggccggcggctcgaagcggctggagtcctgcagcgccttcgtgacgggcgcccgcatcttcgcgatggcccacagcccgatgcgggaacccagcgcgcccttcgccgaacgaccgagcgggtccttctggaagatgccgccggcgatgccgaacaggaagaactcggccaagcccggcaccacggcctcgcagccctcgcgttcgatgacgtcgacgatctggttgttcgcagtgggatggaacttcaccaggatctcgcccaccacacccacacgcggcttcaacccctcgccggccagcggcagcgtatcgaagtcttccacgatgcggcgcaccgtcttcttgaactcgccgcgcttcaagccactgcgcagctgcgccttgcacgtcgtcatccagtggtcgaacaggcggttcgcgctgccctcctcgacctcgtacggacgcgtgcggtacagcgccatcatcagcaggtcgccgtagaagatggcgtatgcggcctgcagcagcatggacggcgtcaccttgaagccggggttgctctcgcccagatccttgaacgacagcgcgatgacgggaatatgcggcagccccaccgaggccagcgccttgcggataagcgagatatagttcgtggcgcggcagccgccgcctgtctgcgtgatgatgaccgccagcttgtcggtatcgtagcggccggacatgacggcctccatgatctgaccggtgaccagcaccgacggatagcagatgtcgttgttcacgtacttgaggcccgcgtccaccgcgccgtggtcgaccgacggcaacagctcgaagttgtagccgttgcgcttgaagatgtccacgagcaggtcgaagtggatgggtgccatctgcgggcagaggatcgtgtagcccgcatccttcatctcctgcgtgaacaccgcgcgcgggaactcggtggtggcgccttcgcgctggcggaagcgctcggcaacctcgggcgccgccttctgggtgaacgtctcgggggtggcgccggtcagcttcgccgcgatggcggcctcggtctggcccgtcttcgcgtcgatggccgcctcgggcgtggcctcgaacgtgtcgggatcgaagctgacggcggggcagccgcgcggcatgcgttcggcgtcggccttctcgtcggcctggtccttgagcgccgccagcaggctgcgcacgcggatgcgcgccgcgcccaggttcgacacctcgtcgatcttgagcacggtgtacaccttgcccgccgcctcgaggatctcctgcacctggtcggtggtcagcgcgtcgaggccgcagccgaagctgttgagctggatgaggtcgaggtcggctcgctcggtggccaccttcgccgccgcgtacaggcgggtgtggtacatccactggtccacgaggcggatggggcgctcgagcgtgccgaggtgcgcgatggagtcctcggtgagcacggccaggccgaagctggtcagcagctcgggaatggcgtggttgatctcggggtcgttgtggtagggacggcccgccagcacgatgccgtgcgtgcccgtggcctccatccaggcgagcgtctcctcccctttcgcgcggatgtcgcgcttgaaggcctcgtcctcggcccacgcggcgtccacggcggcgtccacctcggcctgcgtcggcgcggcgaccgagcccatgagctcggggtgcgcctcgaccagctctacgaacaggcgcttcttgaggtgctccttctggtcgtagggcagccacggggtgagcagattcacgtcggacgtgcgcagctcgtcgatgttgaggcgcagcgcctcggggtagctggccacgatgggacagttgaagtggttgcccgcgccctcgtcctcctggcgctcccacttgctgcacgggaaccagatgaagtcgggggctttgtccagcaggttcatgatatggccgtggctgagcttcgccgggtagcacaccgactcggacggcatggactcgatgcccgcctcgtaggtcttcttcgtggacgggtcggacagcaccacgcgccagccgagcttcgtgaagaaagtgaaccagaacgggtagttctcgtactggttgagcgcgcgcgggatgcccacgctgccgcgcgg

SEQ ID NO: 8899 - DNA, 253 bp, Unknown
  gut microbiota DNA sequence
gtacaatactagataggaaaaaggaggttgctgatgaataccacgcggcgccaattgctcgcccagcgggcagaaaacatgcgtaatcaaatgacctatcccgagcgaaggctttggttctcgttcttacgagaatatcctacaccgttcgtagctcagaaagtgatcggatcgtacattattgatttctattgcagaaaggcgcgtctcagcattgaactggacggtgatagccattataccgaaagccaga

SEQ ID NO: 8900 - DNA, 494 bp, Unknown
  gut microbiota DNA sequence
ttgcgcgactgcggcggcgacatgagctgcaggtagtcgacgatgatgatgcccttctcggcggagcgcagctcgcggcgggccttggcgcgcagctccaagatggacagcgacggcgtgtcgtcgatgaacatgtccagcttgctcagcgtgttggacgcgtcggcgatggcgccccagtccgactcctgcacctggccggcgcgcaggcgcgacaggttcacgcgggcttcggcgcacaggatacgctgcaccagctgcgccgcgctcatctccaacgagagaaaggtgacggttgcccccgctttggccgcgttcgtggccaggttcagtgcgaacgacgtcttgcccacgccgggtcgggccgcgaggatcaccaggtcgccgccacggaagccgtggaacaggtcgtccacgtccttgaacccgctggggatgccggccatggcgtccttctgctcggccagcttcgtcagctcctcgaacgcctcggt

SEQ ID NO: 8901 - DNA, 802 bp, Unknown
  gut microbiota DNA sequence
atttatggcagacaacaacgattctttcgacgagttcttgaatcgcgccgaagaggattacgacgcgggcgatatcgaagcggccgaggccggcgacgaagacgacgtgctggatgacgtcgagggcggcgaggacgagtcgcgccccggcgcgttcgtgtccgaggagaacaaggcgcgctcgttgatcgacatgtcgtcgatcgcgaacccgcacggctccatcgtcgagggcgccaacggcggcgagggcaccatcgtgcgctccgcctacctcggcaaggagatgcagacgtcgttcttggaatacgccatgagcgtcatcgtctcgcgcgccctgccggacgtgcgtgacggcttgaagccggttcaccgccgcatcctgtacgccatgaacgagtccggctacacgccgaaccgcccgcacatgaaatcggcccgtacggtcggcgacgtcatcggcaagtaccacccgcacggcgactacgccgtgtacgacacgatggtgcgtttggcccagccgttctcgatgcgcgtgccgctggtggacggccacggcaacttcggctccatcgacggcgacggcgcggcggccatgcgttacaccgagtcccgcctggacaaggtggccatggagctgctgcgcgacctggacaaggaaacggtggacttccagcccaactacgacgagagcctcgaagagcccacggttcttcccgcgcgcttccctaacctgctggtgaacggctcgcagggcatcgccgtgggcatggccacgaacatcccgccgcacaacctgggc

SEQ ID NO: 8902 - DNA, 3238 bp, Unknown
  gut microbiota DNA sequence
cccccccccgcatcccaaagcgcccgggatgtttcacgtgaaacatctcgacgggcgcgacaatagcggctgcgccgggagtgaactctcgacaaattgaaaagcgctcgagtcggacggggaagagaacaggaagcaacgagagaagaatccaggcgagaacaggttgcgcgcaaggagaacgcaatccaggcgcgtgcagactacagttcgacctcgttcaaggtcgggtccgcctcccgcaacgcctccaccacttcctcatggcaggtgaacaggatcacctggcgcatacgggcgagctcggccaacgcgcgggcggcgcccgcacgtcgggacgtgtcgaagttcacgaggatgtcgtcggccaggatgggcacggcgcgacccacgttgtcggcggtcatcagcagggcgatgcgcagcgcgaggtacagctgctggcacgtgcccagcgacagatggccgggatcgcgcgtggtcttcaccgcgtcggtcacctgcaagcggccctcggcggtgaggctcaccttcgtccagcggccgtccgtcatcaacgacaacaggcggctggcctgacgatacacctccggctggctcttgctctcccaagtggcgatggcgctttccagcatgcggcgcgccagcagcaggcgcgcgtagtcctgcgcgctctcgtcctggcgcgtgcggatctgctggtacagcagcttgtactcgtcgaagtcgcgcaggtgctgggcatgggaaagctcctgcttgagctcgccgtagcggcggttgaggccttcgctggcctccatgagccccatgcgctgctgcgacttctgcgcgatagcctcgtcgacggcgtcgagggtgcgctcggcgcgcaggtcgattcgctcgtacaggcggcggcgttggcgcttcgcgctggccaggctctcctccagcgcgctgcggcgcgacacgagcgcctgcaaccgctgctggaacaggttgttctcggcgcgcgcgtccttcgcctcgtccagcagcgtacgcgatcggcgcagcgatccctgcgcctcggccaagcccgcggcgtccagctgggcacgggcgcggttcctgaacgctgcctggctttccaggcacgcttccagcttcttcttgtcttgcagcatcacccactgggcgtcctgcttgcgcgcttccttcgcgtcctcttccttgttggggcgaaacagcatcaccatcgcggccagcgccagcatgatggcgaacaccaccagaccgatgccgagcgccgtgaacgacaagctggtgatctcgcggccgtgaatgaacaggggcaagcccgtgcacacgaacatgagcggcagcgcgatggacagccccacctgcacgctgcgctggcggcgagcgcgttcgcgttgggcgcgttcgtcgtcggtttccagcagcgcctcgtaagcggccttcgacgttgcgaagttgtcctgcgccagatcgacggcgtgctcgcatttcgcctcgtcgaccgccagcgagtcgatctggtcgcgcagggcgcgctcttccgacgctggcagctcaaccagctcagacacgctgcggtcggcggcgcaatgggttgtgaccagcacgtcctcctcgtcgcacagcgacgctacctggtcggtcagcgagtctatctcgtgatccagcttctcgatgttcgagcgttggacggtcagcgtctcgatagacgtgttcagagcatcgaggcgcgccagaagctcgttgcgctggggttccagctcgcggaactccttatcctgccgcttgaagcgctcggcctcctcggcggcggccgtcatcttggcgcgcagctcgttctcctgcgtcgcgaggttggcgatggagtgctcgacgccggcggcgcgcgaagtgtactcagccagcttttcctgcacggtggccagcgcgtgagcgggcgaagcgcccgttcccgaaccggcggtgagcagcttagccgtaacgtcggtggtgttgcgcagcgtccgcagctcgtcgctggtcagggagaacatcgtctgaaatgtctctttgtcgatgtcggccacgagggatgcgtcgccttgcaagccgtcgctgttgcgcacgcgcgagagctcgagctcgggcgcgcgagagggttcaggcgtgggaagcggcgcagctgacgccgcgagggaaccgtcggcttcgacggcggcgacgcgcccgtccggggcggcgagggcgggcgcatccgacggcgcggacgaaacgccggaggacgcgtcgcgctgggcgaagaacagcgatccagatcgctccgcattcgcaggcttgtaggtgttgcggctgccgcgcgcttcttcccagccgaacagcacgccgcccacgaacgacgcgagcgtggtcttgccggcttcgttcggcccgtacaccacgttgaggtgcggggcgaacggacccaccgctttgtttgagaacgcgccgaagctgacgatcttgatatgctcgagataggaccgcttcattgctcgtccccttgggccagcaaatcgagcacgaggttctcggccgcctcggcgaatgcatcgatattgcgcgtgtaggcgctgggcagctggatgttcttcttgatgaactcatcctgcaaaaacgcgatggcctcgtcgggattgcgccgctgcgcgtccgccacctgcaggaacaccgcagggaacagcccttcgcggcgcagcgcctccttgtcgcgcggcggcaccgtgaggttcgtcaacgcgtcgcagaagaatgccgaatacgcatcgttcacgtgtttgcgcaggccggcgatcacatcggcgcggtcgagcatggcgtgcatcggggtcgcgccctccagcgcaatgcgcaccaccatctcctcgcaatgcgccttgccgttctcgcggaacagctcgcgcatgatcttgtcggtgatgtcgggcaggttcgcgcaatcggacacgtccacgtgcatccgctgccacacgacgcttgccgtggggatgaactccagctcgtttttcgcgccttcccgcagcgtgacgcagaacacgccgcgctcgcccgtctccttgatgtcgcggccttggatgcagccggagaacacgaggcgcgggtcgtcgaaagaggggtaggcgtacttcatgtggatgtgcccaagcgcccagtagtccatgcccgcgtgcatgaggacggcggggtctaccggggctttcaccggatcgaggttgaggcc

SEQ ID NO: 8903 - DNA, 11919 bp, Unknown
  gut microbiota DNA sequence
tggttcgtgctcgtgcgcttattcagcggcgggctccgtgtagttgcggttcacggacggatcgaccttcacgccggggctcatcgtggaggacaccgtgatggacttcacgtacttgcccttcgcggcggccggcttcatgcggaggatctcgtcgtacacggcgccgtagttctcggccagctgctcggcggtgaagctcaccttgccgaggatgacgtgcgcgatgccgtaacggtcggcgcggtactccacgcggccgcccttgagctcgttgatggccttcgccacgtcgttggtgacggtgcccagcttcgggttcggcatgaggccgcgggggccgaggatcttgcccaggcgaccgaccttgcccatctgatcgggcgtggccacggcggcgtcgaagttgaactcgccggcctggatctgctgcgtcagctcgtcggtgcccacgatgtcggcaccggcctcttcggcggcacgagcggcttcgccctcggcgaacacggccacgcggacggtcttgcccgagccgttcggcaggctcacggtgccgcggagctgctgatcggcctgacgggtgtcgatgcccaggcggaagtccgcctccaccgtctcgtcgaacttcgcgaacgagacctccttcacgagggccatggcctcgaggggggcgcgggtctcctcgccgaccttctcgagagcggcgcgatagttcttggaaagcttcgtcatggttcttcctttcgtggtgagtagcgagcgccctcggcgcccttccactgcgttctatcgaacaacggccgcctttccggcggccggtcattccctacgtcgggcagctggaggctagtcttccagcgtcttgccctgaagcatggccgcgaccttcttggagggcacgtacttgatcttcatctcgcgaccctcgatgcgcacgcccatgctgcgagccgtgccggcgatgatctccatggcggcctcgatggtgttggcgttgaggtcgggcatcttgatctcggcgatctcgcggagctgatcctccgtgagcgtgccgacgggctgcacgtgcggcaggccggaaccgctgttgatgttcagcttctccttgatgaggacggccgccggcggggtcttgcacacgaaggtgaacgacttgtcctcgtacaccgtgatctcgaccgggatgatggtgccggactggtcctgcgtctgggcgttgaacgcctggcagaactgcatgatgttgacgccctgggcgccgagggccgggccgaccggaggagccgggttggcggcacccgcggggatttgcagcttgataaagccggtttgcttcttttcagccatgagagcttcctttcagctgagtaaaatcatctagacaaatctatcaacaaagcggcataggtcgaatgagaagccccggtccacgcgggcacgcgacgccgcttgtgttcgcacctttaaatcttggccacctgatcgaacgaaagctcgaccggagtctcgcggccgaagatggagaccatgaccttcaccttgccggcatcgggcgacacctcggacaccacgccgtcgaactcggcgagcggacccgagaccaccttcaccgactgccccacttccaggctcgacgaagtcttcttcggagcctcgcggctcgtgcgcttcatgatcttgttgtactcgtcgcgcgtgagcggcgcagggttgccgtcggcacccacgaaccccgtcacgcccggggtgttgcgaaccgcagcccagctgcgatcgtccagctccatgcggacgagcacgtagcccgggaacaccttcttctcgctctcgacgcgacggccgccctctttgatctcggtgaccatctctgtcgggatctcgataccgaagacgttgttctcgagacccatcgtttcgatgcgcgtctcgaggttcttcttgaccttgttctcgtatcctgaatacgtgtgcaggacgtaccacttcttcgccatgcgcttagacccccaaaccggaaattgcaatcagcagcggcgtgatgacgacgttgtcgagcacggcaacgtacacgccgaagaacacgagcgcgactaccacgacgacgctccagcgcaggacgtcctgcttggtcggccacgtgacgcgcttgagctccgagcgaacgtccttgagaaacccgaaacgacgcttcttcgcaggcttcttctcaggagccttctcgaccttcttctcgacggctttcgcagaggccttcgcctgcttgccgccgtccacggccgcgtcgcttttctcggccttcttgaagaaccgcttcttaggcgcctcggtcgcagcagcatcggcctcggcgttcttgttcgccttggcagcggcctcttccttcagcgcctgctccttgcgggctgcgcgtgcggcagatgccttcgctcgctgtgtctttgatttcttcgccatctgattccttaaccggggattcgtatccgtgtaaacgccaaacaagcagcctgatcacaagctgctcatccaagcaacctgatgcaagctgctcatatactcgagctggcaggccaggagggactcgaacccccaacatgcggttttggagaccgccgctctaccaattggagctactggcctatgctcgtgcaaacctctgacgcgctatcgggtctctttatgcaccgtgtggcacttgcaccacttgcagtacttcttcaactcgatacgatcaggattgttctgcttgttcttcttggtcgtgtagttacggcgcttgcactccgtgcacgccaaagtgaccaacgtacgcatgaattctcctttatgcctcaactgaaacgagcttggatctcatacacatgaattttcatgagcggggcccgcttggagcgggccccgccgaatcacgctaaaacggtgttacttgatgatcttcgtaacgcgaccggagccgaccgtgcggccaccctcgcggatagcgaagcgcaggccctcttccatggcgatcgggtgaatgagctcgcccttgatctccacgttgtcgcccggcatgaccatctcggtgccctcgggaaggtgggcaacacccgtcacgtccgtcgtgcggaagtagaactgcggacggtagccgtcgaagaacggcgtgtggcggccgccctcttccttcgtcaggatgtagacctgaccctcgaactcggtgtgcggggtcacgctaccgggcttgcagagaacctggccgcgaacgatctcctcgcgcttgacaccgcggagcaggcagccgatgttgtcgccggcctgagcctcgtcgagcagcttgcggaacatctcgataccggtgcagaccgtgttctgggtctccttgataccgacgatctccagcgggtcgttgacatgcagcgtaccgcgctccacacgaccggtggcaacggtgccacggccggtgatggtcatcgtgtcctcgacggccatcaggaacggcttgtcgaccatgcgctccggcgtcgggatgtaggagtcgacggcgtccatgagctcccagaccttctcctgccactctttgtcgccctcgagagccttcagagcggagccacggatgatcggggtgtcgtcgcccgggaactcgtaagagtcgagcagctcgcgaacttccatctcgacgagctcgaggagctcctcgtcgtcgaccatgtcgcacttgttcaggaagaccacgatgtagggcacgccgacctgacgggcgagcaggatgtgctcgcgggtctgggccatcgggccgtcggtggcggcgataacgaggatggcgccgtccatctgagcagcacccgtgatcatgttcttgacgtagtcagcgtgaccggggcagtcgacgtgagcgtagtggcgggaatccgtctcgtactcgatgtgagcgatggagatcgtgataccgcgctcgcgctcctcgggagccttgtcgatgttctcgaacgccgtgaagtcggcacgagcggagccgtgcgagccgtcgttctcggacagcgtcttggaaatggcggccgtcagggtcgtcttaccgtggtcgacgtggccgatggtaccgatgttaacatgcggcttggaacgctcgaacttctccttagccatgtttcatcctccttataggatattttcgcgaaacgaaaacaaaataacgacgcgtccgacaaagcggacgcgaaataatacaatggtagcggtgactggatttgaaccagtgacgccacgggtatgaaccgtgtgctctaaccaactgagctacaccgccaggtagcaaaaaatggagcctgcgatcggacttgaaccgacgacctcttccttaccaaggaagtgctctaccgactgagctacacaggcgaaaaatggtgggcgcgctaggattcgaacctaggtaggcatagccaacgggtttacagcccgtcccctttagccactcgggcacacgcccataattcgctgcttaattcatgtgtatttatcaagctgcctgccgcgcttttcggtgaacccgaacgcgcgagcaggagaataatacgctaggaacatcggcgtgtcaactgtctacacgcccccgggcgtgtctccacgattcctccttttctcgacctctccgcccagcgaatcgagcgacgacctcgcagaagctcatcgcccgccgccgtcccggcgttccaaagtttcgcgaatcggcaaatacgctttcacaagatcgtcgaggcgcatgcgcgcgttcgcaggactggtggaaggaagtcccgtgtgcgcaaggccgggaagttgcggcgcgccgaagcggcgatagagcgccgtcgccttcgagcccgtggtgaacacggcttcgagcggcgccgcctcggcaatgcgcgaaagattgttcgcaacggggtcgacgatgctcgcatccgaagctccgacgatagcgcaggacgacagaacgtcccaaagagcgatgccgtgcgcatagagaaacgccgtgcgtccctcgatgccgagcggctcgggctcgtcgaacagcgcgcccatcaccttccagaaccggttttgcggatgcccgtagtagaatccgatctcgcgcgatttcggagaaggcatggttcccagcacgagcacgcgcgaatcgactgcatatataggttcgagcggatgctcgatgcgaacggcttccacgagccctcccctatgcgcggctgggcagctcgagcgaagcctcgtccagcacatgcccgcgaacggcgcgcctgaactcgttgaggaagtagccctcggacaaaccgagctcgcaatcgagcgcgtacacggtcagcgtgtagtcgtgcgtcttgtcaggcgggtacgggcccgcgtaacgatggatgatgcgcgggtcggtatggctgcctgccagaggcgaccaatcgctgttcgagccctgtacgcaagccagctcgcccgaggcgctggcgttctcgggaacgagcgtcgtgtccggcgcgatgtcgcacgcaagccaatggatccagcagaagccgcctacggggacggcgtcgtagtcgagaaacgtgagcgcaagcgagcgcgcgccttcgggcacgtcggcgatttctatgggaaacgagcggacgggatgcccgtccagctggtacgcttcgggggcgtgcttgccgaagcgatcgggcagcagcccgttgtcgagctcgacgaatatgcgcatggtcgatctcctttcgcgcggaaccaacggttggcaccgtggtatagaagaagggagggccgaagccctcccttagtgatcgtatgaagccttagaactgcagcgcgttcgtgaactgcgcccacgacagcggatcggtgtcgcgcacgtacgcgttgaaggtgggagcgtgcacgtagtgcgagccgcctgcactcaccgcgataccgacgtgaccgtaacgccacagcacgtcgcccggacgcgcctcggaaaccgatacgacgcgcgcggctgccgcgtactgcgcctcgctctggtgcggcagatacatgcccacctggcggtacgcccacgtgaccaagccggagcagtcaaaggagtcggggccttcggcaccccagatgtaggggcagccgatacggctcatagcgtagcccacgaccgagtcgtaggaaccgaccggacgggacggatacactacagaaccgccaccaccgccgccgccggacgaaccgcttccgccgccggagccggaacctgaaccgccgctagcgccgccaccgccgccgccgggattcaccgcctgctccgcctggcgctgacgctcggcctcggccgcagcctccgccgccgcagcggccgccgccgcagcctgctcctgctgaaggagctcctgcgcttcggcatcgagggagctgaccagctcggtagcctggtcgaccttggcctggacatcgctttggatctgtttggcttccgcagccttggccgaggcgatttgctcttggcgagcgaattcgtccttggcagcctgcagctcttcgcgcaaggtcttcgtctggtcgaccatatcggcgtcgttctcgttcatcttgttgagaagatcccaattctgggtgaactcttcgaacgaggcggcacccaggacgaaatcgacgaagctcgtggatccgttgcggtacatgttgcgggcacgcgtgcccagcttgtcctgcagatcgctgatctggctgttagcgtcgtcgattttggcctgctgatcctccatcgccttctgcgcggcatcgcgctcgtcgagggcggagtaatagctgatttcggcagcctcgagatcggcctgcaagccgatcagctggttgcgcaccgcatcggcctcggcctgcttctcagcagccgtctctgcgaacgcggtcgtcggagccagaacggaaagggcgccgagcgcggccgcgccggtgaggaatgttcgcctgctcagtccgattgtatgctcgctcatgtatgaaatcctcctagattgagcacgtagtatgtatgggcaaaagctgaacgcatgataccacgttcgcgccgatggtcaaaaaaggttgtgaacgcgtttcataagcccagttcaaagccgccacatggggcgatgtcgaagtgccgcagccgtatccttcacgtcacgaaaccacaaacaagccctccatcaggcatgacgggaaaaagaggaggccaccaagtgttgtggtggcctcctctagatgttgtgcaaccgtgaacgatccgactactgcacgaccttttcgacggcggctcccccttcgtccatgtaatggtcgaactcgttcgcgaccgcctccgacggggcgggcgtgagcagcgacacgatgatgatggcggcgaacgacaggacgaacgcggggagcagctcgtagatgccgaacacgccgccgagaggcttgatgaagttgtgccagacgagcaccgtgaccgtaccagtgatcatgccggccagcgcaccctgcatgttggcgcggcgccaatacaaggcgcacagggtgagcgggccgaacgaggcgccgaggcccgcccaagcgtaggacaccaccccgaagatagaagagttctcgtcgtacgccacgatgatgccgaacatgaacaccgcgatgagcgtgaggcgcgccacgatcatgacctggcggtcggtggcgtctttcttgacgaccccgcggaagatgttctcagccaccgaggagccggcgatcagcaggtacgaggacgaggagctcatcgacgccgcgaagatgcccgacaccactacgccgcacatgaacggcggcaagatcatctgggacagcacgatgaacacgttttcggcctgagcctgcgtggcgaagtcgacgggaatgatgacgcggcccaccaagccgatgcagatgccgcaggccagcgacacgacgcaccatacgaccgcgatcacgcgcgacttcttcacctcgtcagccgagcggatgcccatgaatcgcacgagcacctgcggcataccgaagtagccgaggccccacgccagcatcgaggcgatggtgatgagcgggtactcggccgcgtcgccgaacaggggcgtcccgttctccacgagctgccggcccgcgtcgtccacgaggggcaccgctatctgggtgccgctgaggaagccggggatgttctgcaggaacgcgacggtgttgtcgacgccgcccgcccaggcgaccgagcccacgaacacggtggccagcgcgaagaacatgagcacgccctgcacgaagtcggtggtgaccaccgaaaggtagccgccgaccagcgtgtacaaaaacacgatgatggcgccgagcaccatcatcgtggcgtagtcgaggccgaacagcgtggcgaacagctttccgcacgtgacgaaacagctgcccacgtacacgcagaagaacaccatgatgatgagcgcggccaccgtggacacgatgttcttacggtcatggaagcgcttgctgtagaattccggcagcgtgatggaatcgcccgccaccacggaatacttccgcaaacgcttcgccacgaacttccagttgagatacgtgccgatggcaaggccgatggcggtccacatggcgtcggacgcaccggtgaagtaggccacgcccggcaggcccatgagcaaccagcccgacatgtcggacgcctccgccgacagcgccgtgagccacggccccaccccgcggccgccgaggaagtactcggccgtcgacgagttcgagcgcttcgcgtacacgaacccgatggtgagcaccgcgacgaaatacaggagcatcgcgaatacgacccaaaaatcgttggaaaccacaggtgtctcctcccctcttctctatgcgaaatgagggaattatacgacaacggcgcgggtcgaagcgcgactaattgcggcggaggcaggtcatcgcccccgccgccccgcctcatgcaggatgaagggacttggaacgaagcctacttttcggctttctcggggtggccgtggtccttctgccagcgatcccaagtggagtagcagatggcggcgcgctggtcttgatcggggaacttgtccttctcgtagcgggtgatgtgctccatgcagcgcgagatgtaggtttccttcttctcgttggcgcgcgggtcgggtatgggcatgagggcctcctttcgtcggatgcccgcatcgtagcgcgcggagcttccggcgcagcggagggcggcggagccgttgcacgcgggacaccggaccgtcgttcggcgaaaacgctatcgacggcctttccccttaaccttatactggggatcgtacgcacgactcacaatggaaggaagcacgatgcccacgtacgcggagatggataacgttcagctggcagcgctcaaggaggagctggagcgcgagtacggcgagatcaaggcgcgcggtctggcgctgaacatggcgcgcggcaagcccgccaaggcgcagctcgacctcagcatgccgctgctggaaaccgtgaccacgatggaggactgcgtggccgccgacggcaccgactgccgcaactacggcgtgggattcggccttcccgaggccaaggagttcatggcctgcatgctggacgacgagccggacaacgtcatcgtgttcggcaacgccagcctcaacatcatgtacgacaccgtggcgcgctgctggatgttcggcacgctgggctctgagccgtggggcaagctggacacggtgaagtggatctgccccgctcccggctacgaccgccacttcggcgtgaccgaggagttcggcatcgagatgatccccgtgccgatgaccgacgaagggcccgacatggacgaggtcgagcgcatcgccgcctccgacgcctccgtgaagggcatctggtgcgtgccgaagtactcgaaccccggcggcacgacgtattccgacgagacggtgcgccgcctggccgccatggagtgcgccgccgacgacttccgcatcttctgggacaacgcgtactgcgtgcaccatctgttcgacgacgcggccgagcaggatcagctgctcgacatcgccgccgcctgtcgcgaagcgggaaccgaggaccgctgcttcaagttcgcctccacctcgaaggtgacgttccccggcgcgggcatctccgccttggcggcgagcccggccaacatcgccgagatcaagaaacgcgtgggcgtgcagaccatcggccacgacaagctgaaccagctgcgccacgtgcgcttcctgcgcgacgccgaaggcctggcggcgcacatggccaagcacgccgccatcctgcgcccgaagttcgagctggtgaacgccaagctgcaggagggactcgacgaggtgggcggctgctcgtggtcgaacccgcgcggcggctacttcgtgtcgttcgacgcaccgcaaggctgtgccaagcgcgtcgtgaccctggcgaaggaagcaggcgtcacgatgacgggcgcaggcgccacgtacccgtacaagcaggatccgaacgacagcaatatccgcatcgcccccaccctgccgccgctggaggagttggacgaggctatggacgtgttcaccgtctgcgtgaagctggcctacgtggagaagctgctgggctagactgcacgcccggcttgcgatcgttcggaaggagccgccctcgggcggctccttttcttgttcggggcatgtaaggcgcacaggttggcgcagtccgtaggccgccggagccgtcggaaccgtcagaacggcgagacgtagaggcgcatgccgtcgggaaggcgcaccaaccccgcatcttgcaggacttcggcaagcggggaatccaggatcgatcggccgttgagcgtttccacgaccaccttcttgcgggcgccttcggctcccgcgcgcctgagggagcgcttctcgtgcgccacgagggcccgcgccgcccgggcgagcgcgtcgccgtcgtccgtgaacgacagcagcgagcgcaaccccgccgcagcgtagagcgccggcacgccgcccagcacgacgacgaggctgcccgcgcgacgcgtcggacgggcttcatgctcttcggcgccctcggcatcggcgcgcgcgaccggcggccaaggcaggccggcgccgtacaggcacgcgggatcgtcggcggcgagcacgacgggctcgcgtggatcggcctcgccgtcgcccgcctcgtaggtgcgcagcacgtcgatggtctcgcgcgcggcgaactgcgcggggccgaggccctgcacgaacgcgccgcgcagcacatcccccacgtcctccatctgtcgcagcacgggaagcaacgcgcccagcccaccgggcacgcccgacagctgcaccacgtcgcgagacagcacgccgtagcgatcgaggatcgattccaccagcgcgatggcgcgcaccgtgtcgttctccggcgacggcatgatgagcgaccaccgccccgtcagagccgcgcccaccgcggcctgcgcggacgctatgccccgcatcgtcggagaatcgacggtgcgcatggcggaccggcggctgctcacgcgtcgacgcggcgcgctgcgcggcttgcccgcagcagcgcccgcgccttcgagcgaggcgcgcaccggcgcgtacgtgtcgttcgtcgcgcgcccgtcccacatgagctcgcgcatggtggaggctacgaccgcctcgtcgacgaactcgggcgcaagccgtcggcgcaccgcatcgacgatctggcggaagaataagccgcccccgaacccgagcgcctccaccacggccgcctcgactgacggcgccgccgagccttccagcttcggcccgtcggacggcgcatcggccagatcgggccgtacgggcgcgaacggcgaatcggtgggatagaacgcgacgaggcctgcggcttcgcgctcgcgggagctgc

SEQ ID NO: 8904 - DNA, 681 bp, Unknown
  gut microbiota DNA sequence
gccgaagccggcaggaacacgccttcgaactgggcgatcacctgggcgagtccgtcgatgccctcgaatcgctcctcgcccagcggccctgctccttgcaggtcgatcaggaagcgcgcgaacgcgctcgggctcaccgcctgcacggcgcggcgcgcttccgccaacgacagcgagcgcagacgccggaacacacccgtctcgacccaggcgcgcgcccgcccgtccccgtcttccccgaagcggccctgcatgaggcgccccgccgaggcgaggcgggcgaggccgtcccgggcgacggcgaccccgatgccgaagcgcgccgccgcggcctcggcggagaaggggccgtgcgtgcgcgcgtagcgtgcgagcagttcgtccagggggtggagcgcatcctcgccgccatcgctttcggccgacgccgcacgggatccttcgatttcgcgctgcgcgcttcgctcgggatcacgtaagggggcttgcgcttggccggattggctggcggggcggttgagcgcgtcggcccacggggggatcgtcgcgcccagcgcatcgcgcagaaacgccgcatcgtcgacggccgcccagagctccttgccgcccaacacgaccgtaaacgcccgatgggcgcgctgcagctcttcgagcagcgcatgcgcttcctcttcggtggcc

SEQ ID NO: 8905 - DNA, 463 bp, Unknown
  gut microbiota DNA sequence
tgcgcggcaaatatacttgtaagtatacttgctagatgcgctgcacgcaaggcgctacgggcgcgtgttgtggcgctgagccgaccttgccgaaccgcctgcgccggcgtgcggaacctactttccgtcgcgctcttgctcgcgcagcgccttcagcacggcgcgcttgcgggcctgcttggcgtcgtaagcggcgcgctcggccttcttcgcggcgcgtgcggtttcggcggcggcgcgctcctcggcgtgggctgccgcttccgcctcgcgggcggcggctcgctgcgccttgcgttcggcgcgctcggtggcggcttcgacgtccgagaagcggcagccgcagtagttctgccggtacatgcccatctcgcggctgcggtgcgtggcctcgtcgtagaaggggcggtagtcttcgaacagcggctgcacgcccgcggccgaggcggcgcgttccagctcc

SEQ ID NO: 8906 - DNA, 281 bp, Unknown
  gut microbiota DNA sequence
tgcgtcgaacccctgctcggctgccagcgcggaggcctcttcgaagcgcaggcggtagcacgcccggcagcgcgccttgcggcgggcgggatcgccctcggcggtgcccacgcgtccggcgcaggcttcccaggcggcggggtcgtaggcaccttccagcacgtccagctgctcgccggcggcccaggcgcgcagcgtggacaggcggcgcgcgtactcgtcggcgggcgcgatgttcgagttcatataggctatggtcaggtcgtgcccggcggcgcgca

SEQ ID NO: 8907 - DNA, 8992 bp, Unknown
  gut microbiota DNA sequence
gatcgccagatcgatgaagaacgacagcgcgcgcttcgtcacgctggcgcgcatgcccgcctcgcgcgcctcctcgttcacgagccggatgtcgggcagcacgcgcatcgcgggtccaaccgtccagaatccgatcatcgctcccagcgtgttcagcatgaggtcgtcgacgtcgaacaagcggtacggatgctcgtagaggccccagagcccggtgagctgggtcgtctcgaacgacagcgtcaccagaaagccgatggcgagcgtctgccaccacgtgcggcggaaatagtagcgcaggtacatgcccagcggcaccagcagcagcacgttgaagaacgcctcgtagacgtacgggtcgcgcagcgcggccagccaggtggacggatcgcttggcgagaacgtcgtttcggccaggaacccgtgcacgaagttgaacggcacgagctgcggcgtctgcgcgtagggcacgacggccgagcggtcttcgggcaacggcagcagtacgaggaagtacgcgcataagaggtagaacgcgaacgagtacaccacgagcgtgcgcagccagggtatggagccgaacctgcggtactggtagatcatgtagggaagggtgatgaagaaggcgatcagcggaaacgagagcgcagcgaacaggatgttggagacgtagacgttcatgcgggcaagcgcctttcgggtataggtcgggaagcgggaagcgggggagaggtcagctgccttcgcccgcgctcgcgcgctccaaggccagcagcgcgccgcgcagccgtgcgttcgcgccgaggggcgcgccgcccgctcctacgatgcggtgatcgggcacgagcaccgccagcgggttcttgtgcacggcgttgcccaccgcgcggtacgacgacggcttgtccagaagggcggcgacgtcggcggtggtgagcgtctccccgtaagggatgcgttccagctcgcgccacacggccagctggaacggggtgcctgcgggtgccaagggcacgtcgaacgcgcgtctttttccggcgaagtactccagcagctcggtggccgtgcggttcgccagctcgctcgggcgtcgctcgcccggaagcggtgcgtcgccgaagacgacccgggtgacgccgcgatcgctcgtggcgatggtgacgaggccgtgcggcgtccgatatgcgtaatgcgtgccaacgcgtgcagccatggagccttcttccagaggggaatcccattataatgcagcacgccgcatcgcggggaggcggtcggccctcgccgtcatcatgttgttttcctccagcgctcgggacagcgtcgcggcgggagcaggccttgcacattggtgaagcgagtcgctctttggccggttcagtcccagatcagcgtgatgcgcccatcttttgcaggggaaacctcgccaacgcggtccaaatacgcggtcatcaaatcgacgttcgttcccacatcagcatgcgcttccaagatggatccgatgtacgactcgtcgatcgatccggcccaggcggccaccgtgtactgcgcgtcgtcggagatttcggttccgtcgggcagcgtcaggctcagcacgttctggtcggcggcgcgccagggcgcgtattccatcttgagacccgagagcgcgtacgtcgcgttgatctcttcgccgccgatcttcggatgctccatgagctttttcagatccgctccgctgatctcgtatgtcgtcaggacatcgtcggtcgtgacgctgcgcaggttgaagcggtcggccagggagatgtccccttgatagagctttccggaattccctttgtaatagtagttgttgaccagcagcgctacgtcggcaccggaggcgtcgcgcatggcgtccgctatgaggttgctggtctccagcacggggaaatcctcggccgcttttccgatgacgggggtctccatcgattcgtacagattgcagggtgcgaagtcgtcggtcgcctctatgatttcctgcatggtcatgttgccgcgcatccattcgaatgcggtttcgaaatcggacgtcataccgactctgtcggcgaagtaaatggagcctgcgtcaaggcagttcttcacgtcccagaactcgggtcgaatgttctgttggtacgatttgacgttgcttatgccgctgaagcactcgaacaggacggcctgcccctcgtcagtgctcaggaagtccagcgcgtcaagcaggatgcgcttcttctccgggttctccatggacttttgggaggccatcatgttcacgcccagagacatctgcatccatcgctcgttgggcgtgtcggtcggaaatcctatgaagtcgatctcgcaatcgggtttttcctgttcgtacaagctgtacatcgacagatcgccggggatcatagcgatctctccggcatacatgatctggcggatttgggtgaggctcgacgtgaaatcgctttccaccacgatccctcgatcgtagagctgcttgagaacctcgtagtacggttcaagcagcccctcacacgaggcttctttgttgaccacatcgtcgtaccaagcgcgttttttcgcggtgccgaacagctcacggctggtcagacccaagccaacgtcttgcacggaatatttcaggcaggggacgaagggacggatgccttcggctgtgatggcatcgcaaaggtcgtagaactcggtaagggttgccgggatttcccagccgtgctcctcgaagagcgttttgttgtagaagatgccctttacggagctgttgatgggcagttgccgcaatgttccgtcaacgctcagcttttcaagcgacgaaaggttgtagcggcccgtgaacccttccgcggacagatcgtacgcgtattcgcccgaccccacgcgcatgccgctgaaaaccaaatcgggcaggtcgtttcgttcagcctgctctttgacgtacgccctcacgtcgttggtgccgggggcgtcgacgaaggcgaagctcgcctcgggtatgcgctcgctcaaggccttttgcaacggctccgaattgaatatggtgtagcgacctatggtgatgacggtcttggtcgtgtccgtcggctcgtaggtcacgatctcgttttccgtgcagatggggtagccgggttccggttgcgagtgcgcgcatgaggccagccccgccatcgtggccatggcggtcaaagccgctataaagatgcgtgcccgggttttcattgcggttcctcctgttggtctataaagcgatggaatacgtcgcgaacatcgtcgagattcatcggtttggacaaatgatcctgcatgccatggtgcagggaacgctgcacgtcctcttcgaatgcgcctgccgaaagcgcgatgatgggaaggcgcgccgcgtcggggtggcccgacgccctgatggcggatgcggcttcaagaccgttcatgacgggcatctggatgtccatgagcacgagcgcgtagcgtccgggctcggaggaggtgaccttctcgagggcttcggcgccgttgcatgccgtttccacgtcgacgccgaagtcggagagcagatcgacgatgatctcgcggttcatctcgttgtcctccgccagcaggatgcacgtgccgctgtagtccggtctcggggtttccgaatcgcggtcgtctgcggggcggcatggctcgtcgagcggcttcaacggtatctccaccacgaaggtagtgcctgcgtcctgtgcgctttcgacgtgcacggtaccgcccatcaggctcaccaggttgtgcacgatgggaagccccaatccgctgccgatttgggtggaggtgagggatgattgctcttgctcgaacggctcgaacagccttttcatgaatgactcgctcatgccgatgccggtgtccttcacggtgaaccgtatgcgcgaatccgacccttcctgcgcgagctcttcgcaagaaaccaggacggttccttgctcgggcgtgatttcaccgcgttcgaaaccaggttgaccaaacattgcttgattctggtgtcgtcgccgaggaagcactcgtgaacaagatggcgcgaagactccttgagcaccacgcccttcttctcggcaggaccgctttgcaaaacgatgatggaatccagaagatcgggcagtgcgaacgggcggttcgccatggccatctttccgctttctatgcggctcagatccagcatgtcgttgatgatggagagcaggtactccccggatttcctcgaggtttccaggtgctttttcagggtctttgaatcgtctatggaacgcagcgccaattcgttggatcccatgatggcgttgagcggcgtgcgtatgtcatgcgacatcttggtcaagaagtcgctcttcaggttcacgcgcgcgctctctatcttgactttctggttcctgcttacgaagtagtacatccagctgatcgaaagcatcgcgactatcagcacgatgaccgcaaccagcccgatgacgctctgcatgccctcgaaggtcttttgagcggttctcgaaacggggatggccatgacgatgttgcggccctcgccgtcggggaagctttgcagaagccacgtgtcgccttggaagctcatgaggaattgagcttccgtgcagtttttcagggaagatctcagcgtgtccaccacagcttgatcaacgtgctccttttcgaggatctgcacgatgttgtggctttcgaagctcttgttggcttgggaatccgaaggcctcagcaggatcacgccgttctcgtccacgacatacgatgctccctggccgttgaagatggggaggatggccacgtcggcgtattgctgggcatccaccactttcagaaggcccgcgacgggcatgccgtcgacgacgacgccttcgacgggtgccgcgaacacccagaaatcgcctttgctttgcacggtgcagaactcggatttcacgtcttcccaggtatggatgttctcggtgagcatggtgctcgatatgacgatggcctgcccttcaagcgacaagcacctcccgtcctcggcaagcaggtacgtctcgttcgagtcgccgaggaggctcttcacctcctccatggtgatcgcgccggagtgcgtgaggaaacgcgccgacatttcggcgtccttctcgtggccttgcttgagcagctcgagcttcttcgagatcaggctgccgatctgctgcacggactcgacacgctcctcgttgatcgactggttgaggttgctgtacgttcccgcgaaggcgaaaaccgagaccagcagcatcgccaagagcagcccgcttaccgctttgagccagacgggggcctccgccagcgacgagccgtctttccgcttcgtcatccgcggggcccttcaagggtttccagctccggttccggctcctgatcctggcggcagatctccgaaagcacggacaggagcccggccatcgagtcctcgtagaagcagcagcggtcccgtccgagctgcttggccgcgtagagcgcctggtccgcgcggtggaacaaatcgtcgtagcgggttgcgtgcgcggggaacagggcgacgcccatgctgacggtcatggggtattcgtcgctcgagcttgcaagcgattcgaaaacccgcttgcaagccgcgcaggggtcttcctcgtattcgatgaagacgaggaactcgtctccgccgatgcgggcggtgacgtccgattcgcggacgctgcgctgcacgcgcagcgccatctgcttcaggattttgtcgccgaacaggtgaccgtagctgtcgttcgccgccttgaactggtccaagtcgaacagcatgagcgcgaatcgcttttcgtcgtgctcatcccgttcgagctgcggcaggatggcctgccgggcggcttcccgatggaacatgcccgtgagcgggtcggtgctcgcttggcgcacgaggctgtcgagcttcagctgctcttcatgcacgtccacgcatttgccgatgaagccggtcagggcctcttcgtcgtttcccagccaaagagggcgtgcgaggatcttatgccagcgcttttggttgttgacgtggagcaggtagctcgagctcacgttggggttgtcgggggtcgcggaaaggatgaggtcgcgcaagctgagcaaatcttcccgcatgatgatctggtgaaggcggacgtgcccgagcgggttcgggatgatgctggacagccccaacatttccgcaccccattcggacagcatcaatagatcggttttcacgttgtattcgaattggatttcctgagacaaatgggcgaagaactggtattttgttcgctcttgctccaaaagggccagcgttcggttggagacgtcgcctgtttgcatcatgctgcgcgtgatgtcgagcatgtcctccttcgtgatgcggccgagcgatttcatatccatttcgctcttcagctgaggggcgatgtccaccaagcactgcaaaagcagcggattgaacgccccgcattcgccgttgaggatcatgcgcatcgattcttcgtgcgagatggcttctttgtacacccgcttgtgggtcagggcgtcgtatacatccgccagcgcaaccacctgggcctctattgggatctgctctcctaccagagcgtcggggtatccgcctccgtcgtagcgctcgtggtgccatcggcaaatgtcgcgcgccacccgcaccagctcctcgtctgggtagtagcgggtgctctccaagatgttggcgcctgccatgctgtgggccttcatgacgacccactcgtcggccgagagggaaccgggattgttcaggatatgctcgggcaccgagatcttgccgatgtcgtgcaaggaggaggcgttggcgatcagcgatatcttcgatcggatggatgcgtagcggtcggacgtgcggcacagctgggtgagcagcatcttggtgatggagcggatgttgagcacgtgcatgccgctttcgccgttgcggaactcgacgatatggctcagcagctccaccatgataaggttgctcttctccttatcgagcatctgctcggtcaccatgttctccagcatgttctgcttggagtacagcatcacggtgttcgacgcgcgccgttgcacggtcttggggtcgaagggtcggctgatgaattcggtggcgcctaggtcgtaggcgttgtctatgtacgaggaagagctttccgcggagatgatgatgacggggacgcgttcgatccacttgttcttgctcatgatggcgagcacttcgaagccatccatttcgggcatcacgatgtcgagcagcacgagggagatatcgaactggtgcttttcaaactgcgagatggcctccagtccgttttcggcttctatgatgtcgtactcgtcggacaggatgtcggccagcatggagcggttcagttcggaatcgtccacgatcagagcaaggttgcggtccttcatggccctatctttcctcggcgtcgtccggcagggcgtcgatgcgggcgatcgcctcttgataaacttgcttggtttccttgaacaaaggcgcgatagcttcgttgggctcctgcgagcgcaaggcttccgtgagtttggacgagcagtctgcaagctttgtcagccctaagttgagcgatgcccctttgatggcgtgcgccgcgcgaaaggcggcttggtagtcttggttttcgacggcttcgcacagatcgtcgaaagaagggtcccgtctcatgatgcgcaggtatttcaccatgcgctcgttcccgccgatcctgcgaagcgcttcggagtagtcggcgtccatgtgagcgtaaaggctttccgacgtcatttcgctcgctcgccccgccttcgtattgattggataacgtgctgattattttactgtaaaacaaaacgggctccatctgaaatcttgagtggattggattcaaatacctttaaatacgttgttttcctccatcgctcggggcaacgtcgcggcgggagcggaccttgcgctagaatgggcgcaacgacgatgaggaaggacacgagcatgttcgaaccggtgaaaatagcgccatccattctgtcggccgatttcatgcatctcggtcgcgacatcgagctgatcgagaaagcgggcgcaggatacgtccacgtcgacgtcatggacggccatttcgtgccgaacctcacgatgggcgtgcccgtcgtcaagcagctgaagaaggccacgagcctgccgctcgacgtgcatctcatgatagcgaacccgctggagcagctgccttggttcctcgatgcaggagcggactcggtgaccgtgcatgccgaggcgctcgacgccgacgggctggcgcgcgccgtcgcggccattcatgcggcgggggcgaaggcggccgtcagcgtcaagccccgcacggcggtcggcgcgctggcgccggtgcttgccgatctggacatggtgctggtcatgagcgtagagccgggattctccgggcagagctacatcgagggcagcgaggctaaggtgacgcgcatcaccgagatggcgcgtgcggtgggcgcctctccgctcatccaggtggacggcggcatcggggaggtcacggctcctatcgtggccgcagccggagccgacgtgctcgtgtgcggaaacgccgttttcgcggccgaggatcctgccgccgcgctcgcggcggtgcaggcggcggccgaggaggcgcgcctggcggcgctggccgtgtcgaaggaggcgtaagcgcaatggcgtccgtgccgaacgactacgtgtacctcgactacgccgcgacggcgcccttgtgcgaggaggctgccgaggccatggctccttatcaggtgcccggccgcgcgaacctcgcggtcggcggcaacgcgaattcgctccacgggcccggccgtgccgcgttcgccgcgctcgaggaagcgcgccgatccatcgcgcgcgacctcggcgcgcgtcgtcccgacg

SEQ ID NO: 8908 - DNA, 5974 bp, Unknown
  gut microbiota DNA sequence
gtggtcaccgcggtcgagcacgacgctgtgctggcgcccgcgaagcgtctggaatcgcagggtttccgcgtcacgcggctcgccccgaaccgtcagggcttcatcgaggagcgcgcgttggaggcggcgctcgacgccgatacggtgctcgtgtcggtgcaggccgccaacagcgaagtcggcagcatccagcccatcgccgatctcgcccgtgtcgcgcacgatcatgccgcgctgttccacaccgatgccgtgcaggcgctggggaaagctcgcgtgaacctgcaggagctcgacgtggacgccgcgtccttctcggctcacaaggtgggcggccccaaaggcgtcggcgcgctgtatctgcgcgcccgcacgccgtttcatgcctacgctatcggcggtggccaggaaggaggccggcgcagcggcacgcagaacgtggccggcatcgtcgggttcgcggcagccgtgcatgcggcgaccgcgatgcaggaggcggaggcggctcgcctgcgggttctgcgcgacaggctgtacgagcggctgggcgccatcgacgcggtggaggccaccgtggacgttgcgccgggcagcgaggatttccttccgaacatcgtgcatgtgctggtggacggtttggaaagcgaaacgctcatccttcgcttcgacatgcagggcttcggcgtgtcgggcgggtctgcctgctcgtcgcactcgctggaacccagccacgtgctgcgttccctcggcatcgacgccgaccgcgcgcacggcgccctgcgcatctcgatggggcgctacaccgacgaagccgatgtcgaagccttcgcggtcgccatggagaagagcctgaactggaactgaggatcgaggacgcgcgagcttggtcgcgtcgatgagcgtcgaggagcgctgagcctatggaattgatcaccacccatacccacacctgcttcaccaaccacggcgagggcacggtggaagagctcgtgtccgccgccgtcgcggcgggcgtctccaccatcgcggtcaccgagcactatccgatgaccgcgacgttcgaccccgaccgctacctgtcgatgccggccgagcggatgggggagtacctggccgccgtcgaggccgcgcgcgaggcgcatcccgagatcgaggtgctggtcggctgcgagatggactggctgggagacgacgaggaccgcgtcatcacggcggaggacgtcgcgccgttccagctgatcttgggctcggtgcatctcgtcgaccgctggcctttcgacgaccccgcccagcgcggccgctgggacgaggtgggcgccgatcttatctggcggcgctacttcgaagtgtggtgcgaggccgtgtcctccgacgcgcccttccacgtgatgtcgcatcccgatctggcgaagaagttcgggttctaccccagcttcgacccgcagccgttgtacgagcaggctgccgaggcgtgcgccgcggccggacgcatggtggaggtgaacacgtcgggatcctactacgcctgcaaggagatgttccccgcgccggcgctgctggccgcgttctgccgcgccggcgtgccctgcacggtgggcaccgacgcgcacgtgcccgccaacgtcgcgcgcgacatcgagaaagcctatcgccttatgtacgaggcgggttatagaacggtaacggtcccgacagccgacggcgaccgtcgggccatcgctatcgagtaacgtgggatcgaaagtctagttcgaacacgagcgaaggagccgcgccatggttgcagcgaagaagaaccagaaggattccaagggtcgggaaggtttggcgcgccgtgcgtcggggttgctttccaagcctgtcacggcggtcaccaccggcgcgctcgagcgcgcgctgctggccgagtttccggctgccgacgccgagccgtgggatcgcaccggcatgtcggtgggcgatccggcgcgcctgatcacgggtgtggccgtcgcgctcgacccgacggtcgaagctatcgaggcggctgcgaacatgggtgcgaacgtgctggtcactcatcatccggcgttcctcgcgccgcccgcctccttcatgccggcctcctcggtggcggccaatccgggcgcgggcgtgtggcgcgcggtcgagcgcggcgtatccatcctgtcgtaccatacggcgctcgacgtgagcgtgcgggcgcaacgcgtgctgcccggcatgctgagcctgacgtttcagcaggtgctcgatcccattcccgggtcgcgcgagaagggctacggtcagctgtgcaccctcggcgaggacgacgggctcacgctgggacagctggccgcgcgctgcacctcggtgttcggccgggcgccgcgcgtatggggcgacttccctcgcgagctcgaccgcgtggtcacctgcacggggtcggccggcgatctgggccgcgcgtgtctgcgggcgcaggtggactgcctcgtgtgcggcgagatcaagtaccatgatgcgctcgagctctcccaggcgggcttggccgtcgtcgatctcggtcatgacaccagcgagctgccgctcgcagccgtgctggctgctgcggtggaaaacgcaggaattcccggtgatctggtgacggtgctcgatcagggagataactggtcgtaccctgaaacggtacgggtataatgctaaggagcgtcgcagcggcggcgctccgttcgaacaaaggatgcgcatgcacgtagacaccgacgatcttgccacgctgctgaagatgcagcatctcgacctggaagccatgcgcgacaagaagaagctcgaagagcttccccagcgcgccgtcatcctggaagcgcgctcgaagaagaaggcgatcgagcagaagcgagcccagctcgacgcgctccatgcgaaagccgacgcgcagctttcgcgtatcgacgacgaggatcgctcgctttccgagaagcagcgtcaggtgcagagcgagatcgacgcggtgcgcggcgactaccgcggcgtggaggcgcgcacgaaggagctcaacggcttcgcgaagcgccgcaacacgctggaagccgacctgaccgccgtcggcgacgagctggcgaagatcgaaggcgtgcaggcgcaggtggcatcggcgttagagagcttggagcgccaggaggccgaggccacggcggcgttcgtgaaggaaggcggcgcgctcaaagacgcgctcgcgcgcatcgaggccgaacgagcgatgctggcgtcctcgttgcccgccgacctgcttgacgcctataagaaaacggccgcgcgcacgggcggcgtggccgtgggacgcttgcaaggctcgaattgcggcgtgtgccgcatggccatcgagggcggccgcctcatcgacatgaagggccagggcaacgtggctccgtgccctcagtgcggaaggctgctcatcctggagtaggggatacggcgcgggccctgctcgcgcccatcgagagaacgacaaaaagcccgcgcgagcgggcttttcaatgtcggcttgttggccggcctcatcggccggcggacgtgctatgcgcgctcgaccttgccggccttcatgcacttcgtgcagacgttggccttgcggacgtgaccctctttgtccttgatggtcacgcgctgaatgttcggacggaaccagcggttcgtcacgcggtgcgagtggctgacgttgcgtcctgcgctcggcgccttaccgcaaacttcacaaatcttcgacatcgttcatcactccatgtacgttgggtactcatcggcaaaaaccgttgatgacaaaaaagccctcacactatagcacataaacgaaaagggttacaagaatttttcgtgtagtatactttcgcctgctaccaggcgcgccgcacagcggcaagcccttgcgctatactgcgttagcaggttttttgtcgtgcgcggcacccccgcgccgtgaaaggaatgccatgaacgatacgatagcgggcaacctccacgttgccaatgacgtactggccgacatggtcggcaatgcagcgctcgagtgctacggcgtcgtgggcatggccgccccgaacgccgccgacggcatcgcgaagatcctccccgcgtcccgcctgcgccgcggcgtggtggtcaccactacggaggtcggcgtgcacgtggagctgtacgtcgtcatcgagtacggcacgaacatcaacacggtgtcgcagaacctcgtcgaccaagtgacgttcgcgttgagcgagtacgctcgcgttccgctcgacggcgtcgaggtgcacgtgcagggcgtgaaggtgcgcaagtagcgcgtcctccctgccatgatgagccgctgcccgcccggagagaggggcgaaggcgctctgcggcataacgtttaaggagaatagatcagcatgccagaaccctataccgcgaacgacctgctcaacgccatcgccgtcgcgagcaagaccctgagcgagcgcaaggacgagatcaaccgtctgaacgtgttcccggtgcccgacggcgacacgggcacgaacatgtcgctgacgctggagacggtcgtcgagaacctggccaacctgcccatcggggcggccggcgcggaaattcgcaaggcgatcacgaccggcgcgctcatgggcgcacgcggaaactccggtgtcattacctcgcaaattttgcgcggcctgtgcgagggcagcgtaggccatgacgagctgaacgccgacagcatcgacgcggcgttcgcgaaatcgcaggaagtggcgttccaggccgtccgcaagccggtcgagggcaccatcctcaccgtgctgcgcgacagcgccgccgccgcgaagcacgcccgtaagaagaagatgggctgcgacgaggcgctggcctacgtggtggaggaggcctacgcctccgtgcagcgcacgcccgacctgctgcccgtgctcaaggagaacggcgtggtggacgcgggcggcttcggcctggccatcttcttcgacgcgttcgtctcagcgctgctgggcaaggaaggccccatggtggacgagctggcgttcgcgcgcggcacggcgccgaaggtggagatcgagcagatcaacgactgggaggggtcggcgtaccgctactgcaccgagttcctcgtgcattccgacacggtggacgtggacgcggccaaggacttcctgcccacgatgggcgactgcgacctcatggtgggcatgcaccccaacttcaaggtgcacgtgcactcgaaccgccccgaccaggtgctgggctggttcctcacgcacgatgcgcagatctccgaggtgcacatccacaacatgcagcagcagagcgccgcgcgcaccgacgcgctggccgccgagcagggggaggcgcccaagccgctcggattcgtggccgtggccgcgggcgagggcaacgcgaagatcctcaagagcctgggcgtggacgtggtggtgtccggcgggcagaccatgaacccgtccacgaaggacctgcttgatgcggcgggtcaggtgaacgccgacgccgtcatcatcctgcccaacaacaagaacatcatcatggccgcccagagcgcctgcgagctggccgagacgccgtgcgccgtggttcccacgagaagcgtgcccgaggcgttcgccgccctgttcggtttcgacgagggcgccagcctcgaagagaacgtcgagtcgatgaccgaggcctacgccgacgtgaagaccggcgaggtgaccgtggcaatcaaggattccaaggacgcgcacgacaaccccatcaaggagggcgacgtcatcggcatcgccgacggggccatcgaggccgtgggctccacgaccgaggacgtggtcatggcgctgctcggcacgatggaggccgaagacgccgacacgctcaccatcctggcgggcgaggatatgggggatgacgccttcgacgcgctgatcgcgcgcatcgaggatgc

SEQ ID NO: 8909 - DNA, 4481 bp, Unknown
  gut microbiota DNA sequence
gacgggctcggcatccgcacggtgcgcgacctggccacgcacttcccgcggcgctacatcgacctctcgcgcaaggcaaccgtggccgctggggtcatcggcgagcagtgcaccgtcgaaggcgcggtgcacgagatcaagctcaagaagcccaagccgcgcctcacgctcgttgagctgtcgctcgtggacggcacgggcgtgctcatggtgacgtgctttcgtcagccatggctcatggaccaggtgaagcccggcatgcgcatcgcggtggcgggcaagctggaattcaactacggcttcaagcgcatgacgaacccgtatctggaagtcctcgacggcgaaggggcggccgagggcatgatcatccccgtgcatcccgcttgcgagaagatatccgctgcgtggatgcgacggctcgtgggaaacgcgttggaggccgtatgcgggctgcatgatccgctgccgctcgagctgcgtgcgaagtaccgcctgatgagccgcggcgcggcgctgtcgtgcatccacttcccgcatgcgatggacgaagtggccgaggcgcgccgccgcctcgtgtacgaggagctgctgctgctcgagctgatgctcatgcgcgagtcgcgcgagcgcacggacgggtgcgaaccggtcgtccacgcggtggacgggccgcgcatggcggcgctcgccgaggcggtgcccttccggcttaccgacgagcaggaggaggccaagcgcgacatcctcgccgccctcgctgcgccgcaaacggcgaaccacctgctgctgggcgacgtgggcaccggcaagaccgtcgtcgccgccttcgcgctcgcggcggccgcggacacgggtgcgcaggctctgctcatggctcccaccgaggtgctcgcgcgccagcacggcaagagtctggggccgctgttcgatgccgccggcatctcctgggcggtgctgaccggctccacgccctcggccgaacgcgaggccgtcctcgcgcgcgtggcggagggctcggtggacgtgctcatcggcacgcacgcgctgctcgaggacgatgtggcgcccaggcggctcagcctcgtggtcatcgacgagcagcagcgcttcggcgtggagcagcgcgccaagctgctggcgaagggcgatgcgcccgacgcgctgtacctcacggccacgcccatcccgcgctcgctggcgctggcgctgttcggcaacctgaccttgtcctacctcaagcaccgaccgcacgacgcggcgcagcgcgccacgttcgtgcatcagaaggccgaccgcggccatgcctacgacgccgcccgcgcggcgctcgcgcgcggcgagcaggtgtacgtggtgtgccccctcatcggccaggatagcggcgagcgcgacgcgaaggcggcggacggcggaagcggcggacggcggcgcgaggcggacgaggaggcctacgagtacgccgccatcagcatcgagaccgatgacgacctggagggcgacgacgtggcggccgccgcgaaagaggcgtcctacttgcagggaaccgtgttcgccgattatcgggtcgagcttttgcacgggcgcatgcccgcttccgagaagcaggccgtcatgcagcgcttccgcgacaacgagacgcaagtgctcgtggccacgacggttatcgaggtgggcgtggacgtgcccaacgccacggtcatgatcgttgaggacgccgaccgcttcggattgtcgcagctgcaccagctgcgcggccgcgtcggccgcggcgagaaagccgccgaggtgcatctcgtgtcggcctcgaagtccgacgccgccctcacgcgcctgtccgcgatggtcgacaccgacgacggcttcgagctggccagctacgacttgtcgctgcgccgcgagggcgacatcctgggcaaccggcagcacggcgcgtcgggcctcaagctggtgaacgtcatgcgcgacggcgcggtgatcgaggccgcgcacgccgacgcggcggccatcctggaagaggatccgaacctggaactgcccgcgcaccgcgcgcttgcgcgcgaggtgcgcatcgtgtacgccaacgaccacgtggcgcaaggaggctgatacgcaatgaggatcatcgcaggcgagtttcgcgggcgcacgctcaaggcgccgaagggggagggcacccgccccaccaccgaccgcgtgcgcgaggccatgatgagcacggtgcacagcgcgcgcggcggattcgacgacgcggtggtgctcgacgcgttcgcagggtcgggcgcgctcggcctggaggcgctcagccgcggggcgcgcagcgtccagttctgcgagcgcgggggcgaggcgctgcgggcgctcaacgcgaacgtgaggctgctcgggctcgacgcgcgccgcgcgcgcgtgcgcaagggcgacgtgctgaaggacgtgccctacgcgcgtccaccgttcgacctcgtgttcctcgacccgccgtacgcatgcgccgccgccgaggtgctcgggctcgtcgtcgcgttgcgcacgcgcgcggcgctgtccgacgatgccatcgtggtgtacgagcatgcctcggcggcgaacgacgaggtggaggaagcggcaaaagcgcgcgatttgtctattgcgcagcgcaagaagtacggggatactgtcgtggacgtgctgcgcgctacagcgctgcacgatgcgatcgactgaaaccaagaaggaacggaaagccttacatgaaacgtgcactgacgcccggaacgttcgatcctatcacgagcggacacctcgatgtcatcacccgagcagcgcagctggtggacgaggtcgtcgtcgccgtggcggcctcgccgaagaagaagcccctgttctccctcgaagaacgtgccgagctggtacgtcgggcgacgagccatctgcccaacgtccgcgtcgaaccgttcgacgagctgctcgtcgaccttgcggcgaagctcgacgccaccgtggtcatcaagggcctgcgcgcaatcaccgacttcgagtacgagtttcaaatgaccgcgctcaactaccagctgaaccaggagctggagacgttgttcatcatgtcgccgccgcagtacatgtatctgtcgtcgtctatcgtgcgcgagatcgcgagcctgcacggcgacgtggcgcagttcgttcccgcatgcgtgaacgaggcgttgctgaagaagttcggcgacgcgtagaaactgcccgttagcaggtcacggtttcgcgtcggcgcggttccgaccgggtaaaatgtgcgcgctttgtgcattggaggttggctttcccaacagacatgctagaatattgcgacgcatgcacgcgaggatacccgtgcgcgccaacgcagatgaaacgcagcacgcctgggtggaaggacaatcatggacgaaacaggagtcttggggctgttggaagagctctcgattctgcttgaggactctaagccggttttcggcaagggcaacatgcgccaggtcgacatcgccgcggcgttcgagatcatggatgagatccgcgacacgttccccagcgagttcgctcaggcccgtcagatcgttcgcgagcgccagagcttgctcgacgatgccgaggccgaggccaaccgcatgatcgaggatgcacgcagccaggccatgaccatcgccagcgagcaggagatcgtccgcatctcccagcagcaggccgaccaggtgctctccgacgcccgcgagctggagcgccagacccgtgccggcgccgaggactacgccgacgaggtgttcggccatgtcgagcagagcctcgatacgctgctcaacaacgtgcggcgctgccgtgatcgcttgaacgccaattctttggcctcggggcgctaaatggacgcgctccgcatccaggtaccccacgagctcttcgctccggcggagagttctcattttgaaggctcgatcgccatccccgttatgaaggccggcccggatctgtacgatttcgcggggccgcttgcctggcaagcggacatctccaacaccggcgacgcgctcctggtcaccggcacggttgaaggcgaggccaaaacggcttgcgcgcgctgcctcgacgaggtttcgttcccggtgacgggcgagatcgaaggctattttctgctcgacgagacgaaggctgcgcccgaggatatggacgaggacgagttcgacgtgctgcccgccgacaaagtcattgacctggaaccgctcatcaccgcggcgctgctgctggagtttcctctgatcccgttgtgcgacgaggagtgcaagggcctctgcccccagtgcggcgcgaacctgaacgagggtccctgcggctgcgagcccgccgcagacgacgatgacgacatgccgccgaaccccttcgccgcgctcaaggactttcccttcgacgagccgcagaactagcttcgcacgaccgaacgcccgcccttcacggcgggcgttctttttttt

SEQ ID NO: 8910 - DNA, 1186 bp, Unknown
  gut microbiota DNA sequence
cagagaggaggcgcgccgcatgaacatcgacccgggaagcgacgtccccttgttcgtccagatcgccgagggtatcgaggaggatatcttcaccggctcgtacgccgagggagaccgcatcccgtcgaccaacgagctgtccgcgcttttgggcatcaatccgcacaccgtcctcaaaggcatgaacatcctcgtggacgagggcatcatctacaagagaagggggatgggcatgtacgtgcagacgggagccggcgagaaggtgcgcgccaagcgccgaaacgcgttcgacgagcggttcgtgcaagcgcttgtcgccgaggcgaagaagctcggcctgacgaaacagcaggtcgtcgacctggtggagaaaggatacgaccatgcgtgagatacgcgtcgaccatgtgtcgaagtcgttcggcaaggcgaaggcgctcgacgacgtgtcgctgtccttcgagcacgggaagatccatgcgctgctcggacgcaacggggcgggaaagtcgacgctgctcggcctcatcgcgaaccgcctggttcccacgagcggccgcatcttcgtggacggcgagcccgccgccgacaacgcgcgagccttggccaagctgtactgcatgaacgacaagaagatgtatcccgagaacctgcgcctcgacaacctgttcaaggagatggggcgcttctacgagggattcgaccggacggccgctgcgggctttgccgaggcgttcgggctggacctgcgcaagaagatcggatcgctgtccacgggctaccgctccatctaccagctggtcgtcgggctgtcgctggacgtggactacctgctgctcgacgagccggtgctgggcttggacgccaatcatcgcgagctgttctacaagctgctgctggacgattacctggagaagcagcgcacggtgatcatcgccacgcacctcatcgaggaggtggcgaacctcgtggagcaggtgaccatcgtcgaccgcggacgggtgctgctggcctcgtcggccgaggagctgcgcgcgagcggctacagcgtgtcggggcgcacggcggacgtggccgcctactgcgcggggatggaggtgctcgacgtggaggagctgggcggcttgagcgtggcgtacgtgcagggcaagcccgacgcggcgcgcctgaacgagcggctggacgt

SEQ ID NO: 8911 - DNA, 1470 bp, Unknown
  gut microbiota DNA sequence
ggttttaaccgcacgctgcggcactgcggaagctaccgaccagacaatcatttccagacacaacaataccgtaccatgtagcggcgttttccctttttcatccccgcgcggaacatgaatcacgatactggcgtctttgctaaaacgtgaatccagagcgtttgtcagcaaaataacagggatccccagccgcctcgcctcacgaagcgttgtcagcccttcccggtgcgctgatttttgcgccatcatgatcagaacatcgccacgttgaagcgcgatcagttgctcggcaaggccaatacccgtacggtttagtgccgtggcaggcaaacctatgcggttgaatagtcgtgcggtatagtccgccagaatacccgaagcgccaatgccaaaaattgcgacttgccgtgcctgcaccaacaacgctacagcttgcgcaagcgcgtggcggttttcaggctctgacaggacattacaggtatacaaatgcccttcaagaacaaagtcgattgcggtgttaacatcgctcgtcaagttactcaccgtcgtagacatcttttcgctggaactaagggctggaccaagccactgttccagagtgcgtttcagatcacgcagcccggcaaaccccagggcctgtatagccctgataactgtggcatcggaagtgttcaacgtggccgcaatttccatcgccgtttgctcgagtaccacttcacgatgctcatttatgtagctggcgacaactcttaacccaggcgttaactgactcgcgcgagtgcgaaaacgctcaccaaaaatatcaacccgcgctttatctttctggatcatttagcctccggtagaggtcgccctgcaatttgtgattgtatctgcgcagccatcagccccagagatgcaaaggagttagaaattgcctcttcacgagaaatcagcacataacgcccggaacgacaggcagtcagaaactgacaccatcccggcatgactttttccattgctgccagctcatcctgaggtttaccaccggtgtcaccgcgccaggttgcaaaaacaaaatcggcatccagttcaggtaaacgctccgcgctcacatccattcgcccaccttcaggaatgctctcaatcagcggcggaaaacgaaaaccagcatcgcgtaatacccgccccagcgaatgatagctatgcatcacattaatttttccctggtttgcctgaatcaccgataccgttattttttggctgtccagcgtcgccttcagcgcattgatttgtgcctgatagcggcgttcaagtatcgccagcttcgactgcgttcctgtaagttctgccagcttgcgatagatttctggcgcgccccctttgagatgatcaatgctcaccgtgggcgcaattttttcaagttgttcaatgggcgtattacgggtcggttctgtgatgatcaggtcaggctttgccgccacaatcgct

SEQ ID NO: 8912 - DNA, 592 bp, Unknown
  gut microbiota DNA sequence
gaaaccggcggcgtaaacgaacgaagggccctacggggcccttcgcgttcgctaggcgagcttcgacgagtcaacggccacgaggtggccgtgctcgtcctcgaagacgcacaggccgccgtcgcgactttcgtacaggttgcgaaaacgcgcgaaacggcgctgccgaggcggcttctctttgggcgcagccacggactccggcttcggctccggctctggtcgcggctcctgctgcggctgcgtcgaggagggttcttccggcttcgtcgcctcgacctgcgcggcaggctcggcaacgggcgcaggatcgacgggctcgggatcgacgggcaaaggagcggactgcgaatcgacgcgcgccacggcttcggccgcctcgatgaagtcgctttcgtcgggatcgttcttcgccacgagatcgcattccgcctgcacgccggcaacctggaaatcggcttcgctcggctcttccacgaaaacctccggctcgatcgacggagcctcgacgatcggagggcgccgtccccctcgatctccccgcttttcgatggcggcctcggcaagcccgccctccatcacttcgataccc

SEQ ID NO: 8913 - DNA, 154 bp, Unknown
  gut microbiota DNA sequence
acgccagcgagacgcgctcggcctcgtcgacgccctcttggagctgattgcctatttcgagcacgcgcgtccacgagacggcgtccatatcctctttgagcgatacgatcttttccgcctcgcgcgccacgcgctttgccgttgatgtgctgaa

SEQ ID NO: 8914 - DNA, 313 bp, Unknown
  gut microbiota DNA sequence
gggccccacggttgagcccatcgacccggttcgctacatctcgaaccactcctccggcaagaccggctacgctctcgcccgcgctgcggctcttcgcggagccgacgtggcgcttatttcgggacccgtgtcgctgcccgccccgcaaggcgtgcatatggtgcacgtgaagacggcgcgcgacatgttcgcggcggccgaggacgctttcgaagacgccgatatcgccatcttcgcggcggcggtggcggacatgcgtccgcgcgaggcggccgggcataagctgaagaagggcatcgccgacgccgagctg

SEQ ID NO: 8915 - DNA, 177 bp, Unknown
  gut microbiota DNA sequence
atgcccgcctgcgcccgagccgaccaccaccacgtcgaacgtttccgtccaatcgccgtcagcagccgacgaaccgcccgcactgcatcccgaaagcaccgatgcggcagcaatgcccatcgcgccggcgaaagcggcaccgacgaacccccggcgagagagatccccttctatacg

SEQ ID NO: 8916 - DNA, 2149 bp, Unknown
  gut microbiota DNA sequence
cttgaaacgagaaatcatccaatctggaggatcaccgcaaccatgactgacgagaacaagaaagtccgcgtgcgcttcgcaccttcccccaccggccgcctgcatgtgggcggcgcacgaacggccatctacaactgggcgttcgcgcgcgccatgggcggcgacttcatcctgcgcatcgaagacaccgaccccgagcgttccaccgaggagaacgtgcaggtcatcctcaacgcaatgaagtggctggggctcgattgggacgaaggccccgaggtggggggagccgccggaccctacttccaaacgcaacgcacggacacctacgccgcggcgctcgagcagatgaagcagcgcggcagcgtgtatccctgcttctgcacgaaggacgagcttgacgccaagcgcgccgcagctgaagcgaacgagggcggctacgcgggctacgaccgcacctgccgcgacctcgatcccgccgaggcggccaggcgcatcgaggcgggcgagccgcacgtgtggcgcctgcgcgtgcccgccgagcgcggggccatcgaattcgacgatgccgtgtacggccacgtcagcttcccggccgaggtgatggacgacatgatcgtcgtgcgcaccgacggctctcccacctacaacttcgccgtggtgtgcgacgacgcgaacatgggcgtcacgcacgtcatccgcggcgacgaccacctgtccaacaccccgcgccagatcctcatctacgaggcgctcgggttcgacgtgcccaccttcgcccacctgtccatgatcctgggccccgacggcaagaagctgtcgaagcgccacggcgcggccagcgtggaggagttctgcgagcgcggctacctgcccgacgccatggtgaacttcctggcgcttctgggctggtcgctggacggcgaaacgacgctcatcgaccgcaaaaccctatgcgagcgcttcagcctcgaccgcgtcacgaaaaaggacgccgtgttcgacgagacgaagctcgattggatgaacggccagtacatcaaggaaatgggagcgaacgcctgggtgcaggcatcgctgccgtggctgcaggaaatcggcgccacgcccgaggacgtcgaagcgcgcccggacttctacctggggctctaccccctcgtggccgagcgccttacgcgcctcgacgatgccgccggcaagctggccttcatgttctggggccccgaggtgcgcgagctcgacgagaagagcgtcaacaaggtgctgaagaaggagggcgcgcgcgccgacgaggccttgcgcgcctgccgcggcgtgctggccgacgagggcgtggcctgggaggccgaagcgctgcaggaagcgtgccgtgccgagggcgagcgcttggagctcaagccgaagctgctgttccagccgttgcgcgtggcggtgtgcggcaacatggtgtcgccgcctttgttcgagagcatcgagctgctgtcccgcgaagacgtgctggctcgcatcgactacgtgacgaaagaggtgttcggtggctgacgcccctgacaacatgcccgagcaggccgacggctcctccgccgatacggagggccgtcccaaccagatcgtcgtgctgcgcgactactgcacccgcgtgcgcggcgccgactgcagccgctgcgcgctggcctgcccgcacgacgcgatcggcttcgctgaggacggccgcccgaccatcgacacggacgcctgcacgcgctgcggtatctgcttaggcatctgcgacgcgttctcgtcctcgcgcgtcacgatgatcgacgtgcacgcgcgcatccgccgcatcgcgctgcgcggcgaggacgtggtgctcacctgcaaggaaaacgtctttcccggtctggagcccgccgccaacgtggtggtgctgccgtgcctggcatgcctgtcgcccgagttctggacgctcgtgctgacggagaacatccccgtgcgcatcgcggccgacctcgcctactgcgccgactgcgagcgggcgggcgagatgggcgagatgctgtacgcccacgccgtggagacagccgaggagtggagcggcgcgaaggtaggctacctcgacgagatccccgagaaggagaacctggtccgcgacctggcgaaccccgagggc

SEQ ID NO: 8917 - DNA, 1495 bp, Unknown
  gut microbiota DNA sequence
ggtgcgcatcgcggccgacctcgcctactgcgccgactgcgagcgggcgggcgaaatgggcgagatgctgtacgcccacgccgtggagacagccgaggagtggagcggggcgaaggtaggctacctcgacgagatccccgagaaggagaacctggtccgcgacctggcgaaccccgagggcgtcgaccgccgcagcgcgttcacgaacctcgtgagcgacgtgggagacatcgcgtcgggcaagcgccgcctgcgcaactccgacgtgctgcagcagttctacgagcgcaaggagcgcgcacgagcccgagcgcgcctcaacctcgtggacggcgtgcaattcaacgacttcgttccgcagggccgcacgaagcacgtcatgtggccgaagcgccagctgctgctcgaggccatcgaccgcaacccggatatcgcggcgcgcgtgcccgtggtgctgtccgaaacggatcgcagccgctgcacgaactcgctggactgcgtcgccgcgtgccccacgggcgcgcgcttccccagccccgagaacggcgagctgtccttcgacgcgcgctactgcatcggatgcggcctgtgcgtggacgcgtgcccgcagcaggcgatcgagctcgtcgaagccaccgcggccgtattcctccccgacgaagacgagaacccggaacccccgatcgattagccctcgaggcaaggagcatcgcatgaccgcacccgagcaacccgccgacgaacgcgacgaccggaacgagcccggcggcctcgacggccggcagaacccgcccgctgccccgacgggcggcgctcccgtgccccctccgctgccggggaatgcgtacgctcctcagcagccgcaacctcaacagcccccctacggcatgccccatcctccgtatggccagcccgcgcagccgccgtacggaggccaagccccgcagcaaccttacggccaaccgccgtacggtgccgcaccccagcctccgtacggctacccggcgcagccgccctaccccgccgagcccgcgcagccgaagaggcgggcgtggccatgggtgctctcgggctgcctgctcgtgctcctgctgggcatcggcggctgcgtgggctgcgtatcgtgcgccgtcatgctggacgaccgctacggcagcccgtacgaatacggaggttcctacctcttcgatgattacggctacagcttccccttcgacggtttcgacggcagctccggcggcaactcgaacggctcggggtaccacacctacgaggccatcaaggaagccgccggcgacctgccgagcgaaatcgcggacggtaagtgctcctcgggcgtgtaccgcgtgggcgcaggccaggacatcgaagcgggccgctacttcttcgagggcagcatggacgaggaaggctacttcaccgtgttcgcgagcaacggttcgtcgggcggctacgacgtgaaatcggttttcacgtatttcggcaactatttcgc

SEQ ID NO: 8918 - DNA, 292 bp, Unknown
  gut microbiota DNA sequence
agccgtacggcgccgcgccccagcccccgtacggctacccggcgcaaccgccctaccccgccgcgcccgcgcagccgaagaagagggtgtggccgtgggtgctctcgggctgcctgctcgttttcctgctgggcatcggcggatgcgtgggctgcgtgtcgtgcgccgtcatgctggacgaccgctacggcagcccgtacgaatacggaggttcctaccccttcgatgattacggctacagcttccccttcgacggtttcgacggcagctccggcggcaactcgaacggctc

SEQ ID NO: 8919 - DNA, 3370 bp, Unknown
  gut microbiota DNA sequence
ccacgcacgtggccgatgcgcgcacctgcgtgctgcatccggccaacgcgacgcatcgccagatgaacgacgaggagctggcggctgccggcatcacgccggatctcatccgcctgtcgtgcggcatcgaagccaccgaggacctcatcgccgacgtcgaccaggcgctcgcggcggtgtagggggctgtggtacgatagggttcctagctcgggtgagaagaccggttcgggattcgatcacggaggtgccctatggaacgcaagaagctgttcgttcgcatcggcattggcgcggcgggggtgctgttgctcgtggcggtgttcgccggcgtcagcatggtgggggagcggaaccacctgcgccacggcatggaagagggcttcgagctgcgagggacgtaccagcttcccagcggcgcatccatcaccttccaggtgttcgacgctgagcgttcgtgggaggcgcagaacggccccgatgccgtcgtcaaaggcacgatcaaggaaacggtggatccgaatatctacctgctcgaagacgagcgcggcgaagaggtgggctgggttcacctcgcctacgcgaacaacgaaggcgagggcgtcttgtacgtgcgctacggttcggacgacttggtggagatcgacaaggtggacagggttccgatctaccaggtgtacgactgacctgcgtttcaactcctcgttgcaggacgatccttcgggtcgaacggcggcgcgcgctcgctatactgatcccagtgaatgcgtcgacgtgaaaggacgaccatggacattcaagccatcatcgacaaggttgtgggcgaggttcagcaggctcccgagatgctgcaggagatcgtcgccgacccgggtgcggcaatcgagaagatcaccggtcactcgctgggcgacaccgacatcgcggccgtggccgagggtgtgctcgctcaggtgcaggaaaagggcggcgacctcaaagagcacctctccggcctgatggagaacggcgcggtgcacgacgtcatcgccaacatcaccggcgaaggctcgccgttcagcggcctgctgggcagcatcttcggcaacaaggagtagcgtgctgcgcacatacggaagcaccgggcccgctcgcgaacgcgcgcgggcctttttgatgcttcgctcgaatagccgttgaggagggccggcgcgtccccggcgccgagccggccgcacgggcgtcggaacccgacgccgcccggtcgctcggccttgacgctgatggggccgcggttctgccgctttctcgcgctcttcccttctgaaatgcaacccttttccccttcggtggtaaatagtttctagtcacggctcagtatcttgatgttcgcgcaccacttctgcgaacatgcacgtgagaagggtatgggaagagggggctcatggcgaagaggctcatagcggacgatttttcgctgctgggcggcgctctgtcgctggccgcgcgcaacgcgcagacgttcgagtcgctcgcggccgagctcgacgtgtcccaggaagacctgtccctgtactggttcgcgctcaacaacctgcgccgccatcagggccacgtgctgcccgtgcccttcgacgcggcggcgcccggcgacgcgcccgacgcaccctcctcctcgagcaactggtacgcacccacgtggcgcctgaacaagctgctggaggaattccagctcaacgagggcttggcggtgcactacgggcgcatcctgaccgatcccgaaggcggccactacgagctgaacctcgcggccagcgaggtggtgcgcgcagtgcggctggagaacgccgacctcgatgcggcccagctcaggcgcgtgtgcgtgcaggcatgcaagccggtcaacggcatcgagctgctcgtgtcgaacgcgggcaagatcctgctgacggtggaggactaccgcgacgagccgctcgacatcgcgttcgtcgagcgcctgtacgcggcactcactgagggcatctccatcaaggaggtgcgcgagatcgagagtcgcgaggcgaacgcggtcgacgagctgcgcgcgaaggcgctcgagtcgttctgcgcgcacgtgcgggtgcccgacggcaaccacaccctcgtcgacgccctcatcgcgctgtattacttcaagacgttccgcctgttccctgccgggaacaatgtgctggcgttcctgctgtactttcttatcctgcaccgcgccggctaccacttctcggcgcatgtgcccgtggtcaagctgctgtacccgcgcgacgacgacggcggccgcggccacggcctggcgtgcgcgcccgaggacctcgtggttgcctgcgacggctacttcgactggacccgcttcttcgaacaggcggtgcggctgatcatcgacgagcagcgctggaccatgaccaagctcgacggcatggcgcgccgccgcgagcgcttccgcgccatcatcgatgccgacgagagcatgaacttccgccagaaggaagtgctgctcgaggccgtcctccacagcaacgccgagttcacctacggcatccacgtgcatcgctacgacgtgtcgtatccctgcgcgcgcagcgacttcgcgcggctgctggaccaggggttcctccgacagcacgacgacggtatccgccacttcttcgtggcgtccgacaacttcggcgaggtgttcctgaactacctcaaggagcattgcgccgacgcgttctcgcgcttctaccgcgaagacggctcgctgcgcgacgcgttcaaaagcgcggacgacatcgcggcggaatacaacaaggacgtgggcttttacgagaagtccctgctggataaaacgtacatcgagcactacgacttccggcgcacgcccattgccgaccacgacgggccgcagcggcgccgccggtcggacgacgagtgacaaaacgaggagaaaggaggattcgggggagttcggccattttcattgtcaaaggagggtcaatgaaagacaccacgaaagagcgtgcacgcctgcacgctcccagcaatgcgaaagcactggtcgtgctggttgcggtcgcgctggtcgcttcgttcgccgtttggggatgcagcccgaaggcaacgagcgacgacgcgaaggccgtcggcacgagcacggaaagcaccgacggcaagacgagcgcgaaggccggcgacggtcccgacgagctgtccgcgttcagcgggttccccaccgagggccgcttcgtcgacggcgtggcatcgctgcccgatttctacaagaacaccgagaagaacgaatccaacgccaaggccgaagcgccgcgccgctacaccgaccgcaacggcaacctcgtgcagccggttcccaccg

SEQ ID NO: 8920 - DNA, 2322 bp, Unknown
  gut microbiota DNA sequence
gatcaaggcgacggccaagcgcctcgacgacgtgaagaagcaggccgaccaggcggagaaggacgccaagtattccgcgctcgaagcccattactgcgagttcgccgaactgctcgcgcccgtggtgccttacgcgaggctccatgatcccaagtggctcaacaagcgccccaccctgccgcaggccatcaaggagcttgacgcgaaggtggaaaaggtcgcgaacgactgggacagcctcaagaagcgcaacctcgaattccacgatgctgcagaggcgttcttcttcgagcacttggacctcggcgcggcgtgcacctataacgacaagctcgtggaggaccacaggcgcatcgaagagcttaaacgcgaaatggcgcaggaggaagaggcgcgggaggacgccccgacgcaagagcagcagccgacgccggcacctacgccgatccccgcgcccgtcgtcgcgtgcgcgccgcagcccatgcccgcgccgatgccggagccggtcccgcccgacgcaggcccttacgtcatgatcatcaacctggcgacgctcgatcagattcagcagatcggccggttctccgggagcatcggggttaccggcgtgttcaagcgcggaacgttggtcgatgcgtatatgcgcgaggcgggaggtgtcggctatggccggtaacgcaatcaatgccaagctgctcgagattcaaagagaactcaaggttgaaaaaagccatttcagcgaagcctacggcgggtttagctatcggaacatggaagacatactcgaagcagcgaagcccctgtgccatgagcttgggtgcaccatcacgtgcgacgacgaagtgcgaatgatcggaaacggatgggtgtacgtggtcacgagcgcgcgcctcacggacgtagacagcggcgagttcgaggagcgccacggatgggcgcgcgaggtcgcggagaaggcgaagaccgacccctcgcagataaccggggccgcgtcatcctacgccggaaagcgcgccctcggcaacctgttcgcgctcgacagctcggccgatgcggacggtcagggtccgaagcaggaacctcctgccaacggcccgttcttcggccgctgccggagctgcggcacccgcgtgcagttcttcgccccggaccagatgcgcacgttccgctgctgccctagcccggacttcgaggtggagtgatgcaggagctttacgcgcagctcgacgagctaaccgacgccctcatgcacgagctggaaacgtgcaagacgagcgggtgccagtatgccgagaacgaggcggaataccgcaaggccctgcgcatcgagatccttacagaacgcgacaagcgtacgccggtgaccatcatcagcgacgtttgccggggcaagcccgagatagccgcgctcaagcagcggcgcgactgctcggaggccatctacaaggcttcgcaagaggcgattaacgtatacaagctgcgcatgcgaatgctcgatgcgcagatcagccgcgtatggagcagcggcggacaaggaggagcagcgtgaaagacttcgtgatggacggctacgtgtgcaagggcgtcgaggtgcgcagcacgcaggccgggaagctggtgaccaagttcaccctcaactcgccggactacaaccgcagcacgcagcagagcgagccggccttcttccggtgcgagtactggcacaacggccagaacgaccccaaggcggcgaacatcgtcgatggcgcgcttctgctcgtctggggtgccctgcggttcgagcagtgggacgacaaatcgaccgggggcaagcgcagcgagatcgtgtgcaaggtgcgcgagatcgggcttatcaagccgcccgcgaggccgcagcagccgcagtacgcgccgcagccggttcagcaggcgtatgcgccgcagtacgcgccgcagccggcccctgcgcccgtccagcagcccgcagcggcctaccatcagcccgcgcccgttgccgtgccgccgcaggcggttcaggtgcccatgtcggtgttcgacgaagatatccccttctaggcgtcagaccatgggtttctacatccaagatgacttctgggaagcgtgcgaagagctgccggagaagacgcaggatgaagtgttcggctcccttgtccgccttttcttcaagggggacaaggagccggatatcaagggcacttcaaaggcgatgttcgtcgctttccgagatcgcgttttgatagcaaagaagagatcggatgctggcaaatcgaagccgaatcaaaacgacgatcaaaacggaaacaaacctggatcaaacgaaag

SEQ ID NO: 8921 - DNA, 1640 bp, Unknown
  gut microbiota DNA sequence
gacgagggcgagaacttcctgtacctcgtcatgcccgtgcgcatcgcgtaaggacgcgcgcggcatatcgtggatctggccatcgcccatatctcgtttctgaacttccgcagctacgaggcgttcgatctcgacggcatcggtccgctcacggtgctcgtgggaccgaacgccgcggggaagacgaacgtcgtcgagggaataggcctgctgacggcgcaatcgtcgtttcgacatgcgcccgtcgaccaattggtgcgcgccggggctcccttcgcgcgcttgacggccgacgtcaccgacggcagccgtcagcttgagctggcggtacagatggccgagggcaagaagaagcacctgctgaacgggaagcccaagcgcacagccgacctgaagggcctcgtaccgtccgtgacgttcacgcccgacgacctggagctggcgaaaggggccatgtcggtgcgccgcgccgcgctggacgcgctgggctcgcagctgtcggccaaccactacctcatccggcgcgattacgagaaggtgctgcgccacaagaaccgcctgctgaaggacgaggcgccggctgcgctggtgggggcgatgaacgagacgctggtcacgtgcggcgcgcagctttcgtgctaccgcgccgcgctgttcgagaagctggcggcttcgatggcgtcgtactacgctgagatcaccgacgggcatgagcggctggacgcgggcttcgtcccttcgtgggaagagcacgatcccctttcgttcgccacgcgcacgttcgggcgcgacgaggcgcgcgaggcgctggcggatgcgcttgcgcgccgcggcggcgaggagcgcgtgcgaaagcgggcgctcgtgggcccgcatgccgaccgcatcgagttcttcatcgacggcaagaacgccgccctgttcggcagccaggggcagcagcgttcggtggtgctggcgttcaagctggccgaggccacgctgatccaggacattttgcgccaaaagccggtgctgctgctggacgacgtgatgagcgagctggacgccgcgcgccgccgcgcgctggtggcgttcatctcgggcgacatccagacgttcatcaccacgacgaacctcgcctacttcgacgacgacctgctgggcggcgctcgcatcgtagagctggagaaaccgcgcaaaaccggcgaaatgcctgacgaggatcgaatgtttcacgtgaaacattcgccgatcgacgcgcaaccggcgcgcggggaggccgaagagcgcgacgggcagccgtccgatccggccgaacaaccttcggcgcgaatcgagggggactcatgaggaagctgggcgagagcatcaacgagctgatggccgcgctggccgccggcgacgacgcgtcgcgcaaggcgcagcgcgccgccgccgtgaacgtggcgtggcgcaacgcggtggaggccgtgtacaaggatgccgcgcagatggtgctcgaccacgtgaacgccgtgtacatcatggccgccgacgaggtggtgaagggcacgccgaccagggcgtcgcatgcgggaacgggcgcacagctggtggtgtacgccgacgacagcctcatccgctcggatctcgatgcgcgccaagagttcctcaagatg

SEQ ID NO: 8922 - DNA, 2229 bp, Unknown
  gut microbiota DNA sequence
gcgacgacgaaggcgtcgcatacgggcacgggcgcgcagctggtggtgtacgccgacgacagcctcatccgctcggatctcgatgcgcgccaagagttcctcaagatgaagttgaaggagcagggcgagcacgtggagacgttcaagatcctgccttcgcgcttcgaaatgaaggctcgccatcccttccgccgcgcggaagaggacggtgccgtcgagcgcgctgcgcgcgcgagtcgcgaggaaaccccgcgcacgcctttgtcgcccgaagaggaagctgctctcgaagccagcgtgggggcggtggaaagtcccacggtccgcagggcgctcgagagggcgatacgtgccgataaaaatcgcatttagcggttcgatgcgaaaaataatgatcgaatacgagatcgcggctcgtacggcttctaaaacccttcatacttgatggattttattggtatcaaggcatggttatggtagaattttcaggttagcgcgaatcagcgctgcactcacacatcgcactataaaaggagcatgtcagtggcaaacaaacctgaccattacgacggttctgacattcaggtcctcgagggcctggaggcggtccgcaagcgtccgggcatgtacatcggctcgacgggtcctcgcggcctgcaccacctggtgtacgaggtcgtcgacaacgccgtcgacgaagcgctcgccggatactgcgacgagatcaaggtgtggatccatcaggacaactcgatctcggtcgacgacaacgggcgcggtatcccgatcgacaagcacccgaaagagaagatccccaccgtcgaggtggtgctcaccatcctgcacgcaggcggcaagttcggcggcgagggctacaaggtgtccggcggcctgcacggcgtgggcgtctccgtcgtgaacgcgctgtcttcccgcgtggaagtgcaggtgcgcaaggagggcaaggagtacttcatcggcttcgaccacggcaagacgtccgagaagctgcgcgaagttggccccacgaagcgcggcaacggcacgaccgtgtcgttctggcccgacccggagatcttcaccgagaccaccgtgtacgatttcgacactctggcgaaccgcttccgcgagatggcgttcctcaacaagggcctcaagatcgtgctgtacgacgagcgcgtcaccgatgccgacggcaagccgcgcaccgaggtgttccagtacgccggcggcatcgtcgacttcgtgaagttcctgaacgagggcaaggaaacgctgaacaagcccatctacttcgaggccgagaacgacgacggcaccgttgaagtggccatgcagtggtccacctcgtactccacgaactccgtcatggcgttcgcgaacaacatcaacacgcacgaaggcggcacgcacctcgacggcttcaagcaggccgtcacgcgcaccatcaacgagtacgcccgctcgaagggcatcctcaaagagaaggattccaacctctccggcgacgacacgcgcgagggctgcgcggccatcgtgtccgtgaagctgcacgacccgcagttcgagggccagacgaagacgaagctgggcaacaccgagatccgtccgctggtgcagaacgccgtgacccagggcctggccgagtacctcgaggagaacccgaccccggccaagcgcatcatcggcaaggccacccaggcgctcaaggcccgcgaggccgcccgcaaggcgcgcgagatgacgcgccgcaaaggcgtgctggactcgttcgcgctgccgggcaagctggccgactgctcgtccaagaccccggagaactccgaactgttcatcgtagagggcgattccgcaggcggctcggccaagcaggcccgcgaccgcaagacgcaggccatcctgcccttgcgcggcaagatcctcaacgtggagcgcgcgggcttgcaccgctcgctttccagcgacaccatcagctcgctgatcacggctattggcacgaacatcggcgacgacttcgacgccgaccagtcgcgctaccaccgcatcatcatcatgaccgatgccgacgttgacggcgcgcatatccgcatcctgctgttgacgttcttctaccgctacatgccggagctcatcaaccgcggctacatctacatcgcgcagccgcccatcttcggcctcaagaagaagaactcgcgctcgccgaagatcgagcgctacatctacgacgag

SEQ ID NO: 8923 - DNA, 2688 bp, Unknown
  gut microbiota DNA sequence
tatcctgcccttgcgcggcaagatcctcaacgttgagcgcgcgggcttgcaccgctcgctttccagcgacaccatcagctcgctgatcacggctatcggcacgaacatcggcgacgacttcgacgccgaccagtcgcgctaccaccgtatcatcatcatgaccgatgccgacgtcgacggcgcgcatatccgcatcctgctgttgacgttcttctaccgctacatgccggagctcatcaatcgcggctacatctacatcgcacagccgcccatcttcggcctcaagaagaagaactcgcgctcgccgaagatcgagcgctacatctacgacgagagctcgctgggctcggtgctggccgagtacgacgatccgaacaagttcgacgtgcagcgctacaagggcctgggcgagatggacccggaccagctgtgggagaccacgatggagccggctacccgcacgcttctgcaggtgagcatcgacgacgccgccgaggccgagcgcgtggtgagcgacctcatgggagaccaggtggagccgcgcaaggagttcatccagaagcacgcgcgcgacgtccgattcctggacatctagcgttctggtggtctgacgaccgccggaatacctcgctgacttactacgccaacctgtaaggtaggagatttatggcagacaacaacgattctttcgacgagttcttgaatcgcgccgaagaggattacgacgcgggcgacatcgaagcggccgaggccggcgacgaagacgacgtgctgaacgacgtcgagggcggtgaggacgagtcgcgccccggcgcgttcgtgtccgaggagaacaaggcgcgctcgctgatcgacatgtcgtcgatcgcgaacccgcacggctccatcgtcgaaggcgccaacggcggcgagggcaccatcgtgcgctccgcctacctcggcaaggagatgcagacgtcgttcctggaatacgccatgagcgtcatcgtctcgcgcgccctgccggacgtgcgcgacggcttgaagccggttcaccgccgcatcctgtacgccatgaacgagtccggctacacgccgaaccgcccgcacatgaaatcggcccgtacggtcggcgacgtcatcggcaagtaccacccgcacggcgactacgccgtgtacgacacgatggtgcgtttggcccagccgttctcgatgcgcgtgccgctggtggacggccacggcaacttcggctccatcgacggcgacggcgcggcggccatgcgttacaccgagtcccgtctggacaaggtggccatggagctgctgcgcgacctggacaaggaaacggtcgacttccagcccaactacgacgagagcctcgaagagcccacggttcttcccgcgcgcttccccaacctgctggtgaacggctcgcagggcatcgccgtgggcatggccacgaacatcccgccgcacaacctgggcgagaccatcgacgccacgtgcctcatgctggacaaccccgacgtcaccaccgaagagctgatgaaggcgctgcccggcccggacttccccactggcggcataatcatgggcaagaagggcatccgcgacgcgtacgagacgggccgcggctcgctgaccgtgcgcgcgaagtgcaaggtggaagagggcaagaacggccgcagctccatcgtggtcaccgagatcccctaccaggtgaaccgccagcgcctgctggaaaagctgggcgagctggtgcgcgagaagaagctgcccgagatcagcaacatccacgacggcgccgaccgccacggcatcgacatcatcatcgacctcaagaaggacgccatcccgcaggtggtgctgaacaagctgtacaagcacacgcagctgcaggtgggcttcggcgtgatcatgctgtcgctggtggacggcgcgccgcgcgtgctttcgctgaaggagatgctgcactactacatcgcgcaccaggaagaggtcatcgtccgccgtacgcgctacgagctggcgaaggccgaggagcgcgcgcatatcctcgaaggcttgatcatcgcgctggacaacatcgacgagatcatccacatcatccgctcgtcgcagaccgacaaggaagctgccgagcgcatgaccgagcgcttcgccttgacggacaagcagaccgccgccatcctcgagatgcgcctgcgccgcctcaccggcttggagcatcagaagatcgaggacgagctgaaagagctgctggagaggatcgcgtactacaagcgcgtgctctccgacgaccagctggtgcacgagatcatcaaggaagagctgctcgaggtgaagaagaagttcggcagcccgcgccgcacgctcttgtccgaggcggcgaaggacctcgacgtcgaggatctcatcgccgaggagagcatggtcgtcacgatgacgaaggccggctacgtgaagcgcctgcccgtggccacctaccgccagcagaagcgcggcggcaagggcatgtcgggcgtgaacctcaaggacaacgactacgtggagcacctgttcgtggcatccacgcactcctacatgctgttcttctccacgaagggcaaggtgtaccgcctgaaggtgtacgagcttcccgaggcgtcgcgccatgcgcgcggcacggccatcgtgaacctgctgccgcttgagaagggcgagaccatc

SEQ ID NO: 8924 - DNA, 475 bp, Unknown
  gut microbiota DNA sequence
cgagcacctgttcgtggcgtcgacgcactcctacatgctgttcttctccacgaagggcaaggtgtaccgcctgaaggtgtacgagctgcccgaggcgtcgcgccatgcgcgcggcacggccatcgtgaacctgctgccgcttgagaagggcgagaccatctcggccgtcatcgcgacgaaggacttcccgtccgacgagtatctcatgttcgccaccgagcacggcatggtgaagaagacgtcgatggacctgtacgaccgcacgcgccgcgacggcctgatcgccatcagcctgaaggacaacgaccgcctcatttcggtgaagcgcgtggctccgggcgagaaggtgctcatggtgtccagcgcaggcaaggccatcatgtgggacgagggcgaagtacgtgccatgggccgcgacaccatgggcgtgcgcggcatgaacgtgccgcccatcgccaaggtgctgggcatggag

SEQ ID NO: 8925 - DNA, 529 bp, Unknown
  gut microbiota DNA sequence
ctcggtgaagcgcgtggctccgggcgagaaggtgctcatggtgtccagcgccggcaaggccatcatgtgggacgagggcgaagtgcgcgccatgggccgcgacaccatgggcgtgcgcggcatgaacgtgccgcccatcgccaaggtgctgggcatggagatcgcgcagcccgacaccgacctgttcgtcatcaccgagaagggctacggcaagcgcacccccatcgccgagtaccccgagcaccatcgcggcggccagggcgtgttcaccatcacgatgaccgagaagaagggcctgctggccgtcatgaagatcgtcgccgaagacgacgagatcatgattatgtccgaggaaggcgtgtgcgtgcgcaccccggtgtcgggcatctccgagctcggccgttccacgcagggcgtgtgcgtgatgaagacggccgacaaggaccgcgtgaccgcagtggccatctccagccgaggcaagaagaagaaagcctccggcgcgcaggtggaaggcgaggagctggacgag

SEQ ID NO: 8926 - DNA, 187 bp, Unknown
  gut microbiota DNA sequence
catgtccgaggaaggcgtgtgcgtgcgcaccccggtgtcgggcatctccgagctcggccgctccacgcagggcgtgtgcgtgatgaagacggccgacaaggaccgcgtgaccgcggtggccatctccagccgaggcaagaagaagaaagcctccggcgcgcaggtggaaggcgaggagctggacgag

SEQ ID NO: 8927 - DNA, 2491 bp, Unknown
  gut microbiota DNA sequence
taattccgctattctaccccggagttcgcccgatcaggaaaaacaacgcctgccgtccacaaacggttaccccggcgcaggccgaggcttcttgcggccgcctttttagcggtggtagatcaaatggcagacgtcgtcgccgcgggcgatggtcttgggcaggtcgaggtcgcagccgtaggcttcgccgatgccgcggtcgccgcacatggcccagtcgcagaggttggaaatctcctcgtcggtgcagccctgcttctgccacgccttcacgagcgggcagtagtggaactccagctcgaagcggtcatcctgcacgtccttcacgtccatctcgaacaccatctgcgcaggcttgccgaacaggcccttcttgaggctcttcaggctgttcgtgccgccgcccttcgcgaccagctccgcgccctggaacaacccgcagcgcttcacggccgccggcgcgaacgcggccgggtcggcgcccgccttcgccgcctcgtcggtgagcaggtacagccacagcgcgcgatgctccagcagctcgcggatggccttgacgagcgggttcttgctgcgcggttcgttgacgattctgctctcggccatggtgccctccccttcgtgccggaccctcttcgttgctgcgattatacggcaacgaggcgccgcccaacccacaaaacctgcgcattgtcccccattcggtcattgcgtggttgccagacggcaacaaggtcgctacaatgcagcgcatggattctgtttcagggcgaggtgcaattcctcactggcggtaatccggccgcgatgccccgcatcggcgagccgggagtccgcgaccctgcgaacgtccccgatagggagtgcggttgcaggctgattccggtgcgattccggaaccaacggtatagtccggatggaagaggcagagatccgcgtcgaccacgccccgcgtgcgtcggctcggaccccaagaagcctgtatggaaggaattcatacgggctcgttttctctttaggccgggaaacgtgacccgaacgtcacggcctgcaagagaaaggggttgccatgaccggcaacgcaccgggcaccaacgcccaggacacgtacgaattcaccaacaccaacaagtgggacacccgccagctcgtgacgatggcgctcatgtgcgcgatcggcgtgctgctgtcgttcgtggagttcccgctgctacccggcgtcacctggctcaagtacgacgcctccgccatgcccgccatggtgtgcggcttcgccttcggcccggcggccggcctcgcggtgggcgtcgtgggcgccgtcatccacggcatcctcatggccgacttctcgggcgccgtcatgaacatcctcgtggtggccggcttcatcctgcccgccgcgctcgtgtaccgccgttcgcgcacgttcaagagcggcgtcgtcggcctcgtgctgagcgccatcacggccaccgtcatggccatcctgggcaacctcgtcatcacgccgatgtggctgggcgtgccgctcgacgccgtcgtggccatgatcctgcccatcctcacgccgttcaacctcatcaaggccggcatcaacgcggtgctcacgctcatcgtgtacaagagcatctccaatttgatcacacccaagaagaagcaggtgaagggacgctaaccgcatgatcgagttcaagggaacaggcttcacgtacgacggcgaccgcttcgtgctggacggcgtggacgcgcgcatcgccccgggcgagttcgtgtgcatcctcggcggcaacggctcgggcaagtcgacgctggccaagcacatcaacgcgctgctcgtgcccgacgaaggcagcgtcaccgtgctcgaccacgacacgcgcgacgagcggtccacctacttcatccgcagccatgcgggcatggtgttccagaaccccgacgaccagctggtggccagcctcatcgagaacgacgtggccttcggccccgagaacctgggcgtgcccaccgacgacctgcgccagcgcgtggccgacgcgctggcggacgtggggctgcagggtttcgacaaacgcgagaccgcggcgctgtcgggcgggcagaagcagcgcgtcgccatcgccggcgtgctggccatggagccctcgatcctcatcctggacgaggccacggccatgctcgacccgcgcggccgcaagggcctcatgcgcgtgtgccacgagctgcacgaccgcggcatgaccgtcgtcatgatcacgcacttcatggaggaagccgcgcaggccgaccgcgtcatcgtattggaagagggccgcgtcgcctgcgacggcacgccgcaggacgtgctcgtgcaggccgagctgctggaacatctcaacctcgacctgccgttcgccgccgagctgtcgctcgagctggggcggcgcggcgtgcccgtgggcatgcacatcgagacgaccacgttgaaggaggagctgtgccgattgctttc

SEQ ID NO: 8928 - DNA, 236 bp, Unknown
  gut microbiota DNA sequence
cagatgactgctgtccaaaactacgaatgaccaaaccccttgtttcaatctaggcatccgttgataatgctttcaccccactgaagagaggagagcccgtgctcatgcgaatgcaatcgccccaacccacgcgccctggtgcctgccttcatctgcattcagttctcccgctgccataagcgcgccgagagcattgcatgcgaagacgggaagcctatggcttctttttttaccct

SEQ ID NO: 8929 - DNA, 718 bp, Unknown
  gut microbiota DNA sequence
cgcgacgcccgtggcagaggtgttgcccttgttgccgaacaccatggactgcacgttgacggcggtgcccaggtcgtcggcgatcttgttctgcttgcggtacagcgtggcgcgcgggttgttccagctgccgaacacggcctcgatggccagctgcagctgcacgctgggatcctgcgggaactgcacggcgccgtcgacgacgaggctcgggtacgccgcggcgtccacgttctcggcgaagatctgcttgaactcgctcacgagctcctgcaggtcctcggcggtgaggtcggtgtcggacgcagcgccgcgggcgtgcttcatggccgtgatggcgttctcgaacagatcgccgtcgaggttcatgaccacgttggagaacatctggatgaagcggcggtaggagtcccaggcgaagcgcgggttgtcggtctgcttgatcaggccgttgatggactggtcgttcaggccgaggttgagcacggtgtccatcatgcccggcatggacatgggggcgccggaacgcacggacacgagcagcggatcctccgcgtcgccgatcttcttgcccatgcgggcctcgaggtcctcgcgatactcctggatggtgtcgagcgcgccttcgggccacgtgttgcccgcgttggcgtactccatgcaggtctggcacgtgatggtgaatccgggaggcacgggcagcccgatgttggccatc

SEQ ID NO: 8930 - DNA, 2198 bp, Unknown
  gut microbiota DNA sequence
atctcgaaacagcctccgttcgcgcagcgtcgacccgctctcctcggccgaaccgctcatggacgcgtcggccgaaacgtacgccaccgctacgggcgtcgacgtgccgttggaacaatctgtttccaacggcccggttctcctgcgcagcgcaagatccctgcctgaagacgacgcggtgagcatggtgctggtgcggcaggagggtacctcaaccgaggatctcctgcgccagctgcaggacgacccgcgcatcctgtccgccgagccgaactacgtgcagcggctggacgaccccgatcagacggcgctcgatgagagcacgccgcaagtcgctgcggcattggggctggattcgtcggacgcggcgccgtcggctccggcgagcgcggatgcaagcggcacggccgctgccgacctgtccggctaccagtggggctgccgcaacaccggagaagtcatggtgcaagaagaggcgccgccccttgccggtttcgacatcgcgccgccgaattggaaccaggtcggcacaacgaacgccgccgacgtcgttgccgtggttgacactggcgtggactacaaccatcccgacctcaacggcatcatgtgcgacatgacgcagtacacggacaggggcggacgctacgggatcaacgtcgtgcccggcatggatcccaccgatccgatggacgatcattaccacggaacgcactgcgcgggcatcatcgcgtcgcaatgggatggcgtggggacgagcggcgtcgcgtccggcgtgcagctggtggccgttagggtcgcaggtaggcagaacacgatcgagagtgcggataccatcagggcatacgagtatcttgccgaagccgttgatgccggcttgccactgcgcgccatcaacaactcgtgggccggaaggacgatgagcaaagcattcagcttggcggcgacgaagctgggcgagaaaggcgccgtgaccgtcatcgggtcgggcaacgatgccgccgacgttgacaagataccgatgaccgcatccgtgctcgcgcataacccgtatgcggtcgctgtcgatgcgtcggattcttcagggcagctcgcctcgttcagcaactacggcgtggaaacgaccgacgtggtggctccgggcatgaacatcatgtccaccgtgcccctcggcagggcggcctacgctcccgaagccgacggctcccctttgagctacgagacgttcgaaagcgacgccccgtcggttacggcgcgcgcgacgccgacgtcgtccgaggatatagatgccgtcgtgcagggggcgacccatttcgatgcgaggggcggagctctgaagatccccttttccgaaatgctcacggaagagacggcgctgggcatcagttttcgaagcgtcgtggtgtcgatggaagtcgatccgtcgaaccaagagggcgtccggtacgtaggaatgaacgcgacggccacgaaccagaacaacgacaacctgctttaccaggttgcgataatgaaagacggcgcgcttgattggacgccgatgggacagacggctgtcgcggcccttgggaaggaccgaggttggacgaccatcgccttcgacgcccaggcgcttgcccagaatgccggcggcaccttggcgttcgaaggcggcaagctgcaggtgcggctgacgttcgcacgcgccggcacgccgatcgccccgaccgatgccctgtacctcgacacggttggaacgggcagggccggctccgcgattccctatcaatctttgagcgggacgtccatggcaactcccatggtcaccggcgcggccatggtgctcgcgcaggatgtcgacggctccaccccggccgagcgcgctgcgaagctggcggcgctcgtgaaggcctccgtgcgtccggtggacgcgttctccggcaagtgctcgtcgggcggacaccttgatttgagggttgcgtcgggcaacttcgtcccggtggtgtcgggcgctcggatggaatccgacggcgacgccgcactcgtcatggtggagggtagctacttcggcgcagctcagggtgcgggaagcgtgcacatcggcggcaaggaggctgcggtgcgctcctggtcggacggctccatcgtagcggagtgcccacagggtctcaaaagcggcgtgctggtggtagaggtaacggccggcaacggcaagagcggat

SEQ ID NO: 8931 - DNA, 596 bp, Unknown
  gut microbiota DNA sequence
cagctacttcggcgcagctcagggtgcgggaagcgtgcacatcggcggcaaggaggctgctgtgcgctcctggtcggacggctccatcgtaacggagtgcccacagggtctcaaaagcggcgtgctggtggtagaggtaacggccggcaacggcaagagtggatcgaagggcttcctgctgcaggttcccgagcgaccggacgaccaatccacgcccctgttcgagaagaccatagcgcttcccacgtcggatgagggcctgccggttggcgtgtcgtacggtcttctgaccgggctgggcggttcgctatacctgctgccaaacgacttcagcatatcgcatgcgggtacttatgcgctatggcgctacgaccccgatcaggacagctggacgcagtgcgccgacctacccgaggctctcagcagcgcatcgatgaccgtgttcgacggcaagctgtacgtatacggcgaagcgggcgagacggatggggcgttggctcctcgtcttgtcagctacgacccggcgacgaacgcctggacttcccatgacgcttcccgcctgccgtttcatgcgacgatagtgaactgcgatggag

SEQ ID NO: 8932 - DNA, 1989 bp, Unknown
  gut microbiota DNA sequence
atacgtatacggcgaagcgggcgagacggatggggcgttggctcctcgtcttgtcagctacgatccgccgacgaacgcctggacttcccatgacgcttcccgcctgccgtttcatgcgacgatagtgaactgcgatggagcgatgctgctggtgggcggcgccgcgtacgacggtgtcaaatgggtcgagctgaccgaaggcaacatcgccgtgtacgatacgcagacgggggcggtaacggctgcgggatccctcgcgacaggccgctcgactccctttgtcgtagcgcgaggggccgagctgttcgtcgccttgggcgatgtgcacgacgtgacgggctcttcgacgacgagccccgtattcgagcgcatcgtgagatccggcgactcgtacgttggcaacgacctgtccgccgccctgcctgcgcttgcgcccggctacgacgattcgttcggcttggcagcggtcaaagccggagtggtgctgtcgggccgtatcagcgtcgaagaagccgacggcggacgcgagctcgatcaggacacctatctgttggacttggcgaacggagacaaaagtttccaaggcatcgacaagcgcgcctcccgggtgccgctgtacttcccgagctcgacagcgtacgacggatggctgtacaccatgggcttctcggtctacgagaacggtggccgggtgatacgggccacaccgatggagacgctgccccaacccggcgacctacctgaacctggacccggccctacgcccggacctggccctgcagctgcgccggaaccggttgtcggcaagggggatgcaacgtctctggcgagaaccggcgacccattaggcgctttcgtgccggctatcacgctggccgccggtgtcatgctcgcaagcataggcgttgccacggctgcacgacgaaaagcgaaaaagaacaggctatgaagacggcagcggatgccaccggatcttctcgatgcgcgcaccagagcctatcggggtcaaaggaagtaaaagaaggatgtctttgcaaaaaacgaccggttattcgatctgaaacaggagataggttatgagcgaatccaagaagcacgactctttgagcgccgaagagctggacggggtggctggcggcgtattttttcggagggatccctccgaatcgttctgcccgttctgcagtatgagcacgaaggatcccaagtttaaagacactcacctatatcttggcgaaggagagcgtttctgcgaggtggaatgcaaaacctatcctggcgacgaaatctggtgagatatggtgaaggccgtcgagggatcgacggccttcacggaagaatggaagctcgcgcttacgcctcgatgccgcggctctggcgcatgatgtcgtaggccagccacgtgcaggcgccgatgaccagcagctccaccgcgccgctcgcgccgatggacgagagcatgccctgcgccgcgagccagacgtcgccggcgacctcgatggccaggccgatgacgcacagcacgaagaacggcttgaccttccgcggatcgcgagcgccgcgcaggcccagggcgcccacgaccaggtcgacgacgccgctgccgaccagcacgacgcccagcaccaggcccacggcgatgccggccaccaggtccgggtcgttcgggtccatcgcgttcacggcgtcggtgcccaggccggcggcgatcagcgccaggaacgcgaggcccagcacgatggagatgacggcgaacaccaccagcacgatggagatgacgcgcagcgccttctggctgcccgagcgctcgacttcggccttggcctcaccaacgatgcctcggtcatgctccttcttcaccacgtcggcgagggtggtgcacaccagcaggtagacgacgtcgccgataagcaggaaggggtcgtccaggaatgtgccgcccaagaaccagttgtacacgatcatcgccaggatgacgatggagatgcc

SEQ ID NO: 8933 - DNA, 2749 bp, Unknown
  gut microbiota DNA sequence
gtcgtccaggaatgtgccgcccaagaaccagttgtacacgatcatcgccaggatgacgatggagatgccccagctgagcgcgcgataggggccgaccttgctcgcatcgttggaagcgcgcaggccaaggaaggcaacgatcagctgcagggcgcccatgatcaggaccaaaatgcccacggccatggtaaggatgcccgccgtcgtctcggtgccctggaagttcactgcgtcgttcaggccgagcgagtcggccgccgcgccggaggctatgatgatcgcgcccgaaagcgcaaccaaaactccgaagatgatcatgatgatagaggtgatgcgcagagctttctgcgtaccggtgcgagggggatgcgccatagtacgtcctttctcgaaaacggatcttttaagtcgaagtataggagcgctgcgtccgataggcgcgcgaaagagcccgacaacggaaaggacggcacgagcgcggcatatcccgaaacgaacgccgacgagcccgcgcagatccctagtccccgccgacggcggacaaaggcatggcgaccccgctcgcaagcactggcgacccgccgggaaccgtcgcagcagcaacagcccttttcgctgccgccgcgctcgcaactgcggcggccatcgcgcgacggacgcgtacgggacgcgacgatcagcgtctgaagcgaaagtccgcttactcgcgaaacagcgtgtaatccagatccgacttgttgcactgccacacagtggcgttgctgaagccgaagcgctcatggtcgttcgtaaacgcggtgccgtagagactaacggcaattttcatcccgcagtaagggcagatgccgccgggcaccgctttcggaagagcggccacggccctgtcggacagagcctcgccgccggacacctcttcaagatcgtccaagccaagctgctggaatttatcggaatcgttcatgttcgatccgcctttctgtcagccctttaagcgaacagacccccacccctacatggtctggcgctccaccagttcggcgaatacgccgcccaacgcgcacagctcctcgtaggtgccgtcctccaccacgcggccgccgtccagcacgatgatgcggtcgcatgcgcgaatggtggacagccggtgcgccacgatgatgcgcgtgcacttcatccgatcgagcgcctcgctcacctgtcgttgcgtcacgttgtccagcgcgctggtggcctcgtcgaagaacagtaccttgggtttgggggcaacggcgcgcgcgatgaggatgcgctggcgctggccgcccgagattccgcccgcgccctcggacaccatcgtattcatgcccatgggcatggcgcgaatgtcgtcggcgatccccgccagctcggccgcctcccacgcatcctccatcgtgagccacggcgcagccaccacgatgttggagaagatgtcgccggtgaacagctttccgtcttgcagcaccgtgccgatgttgcggcgcaaactggccacgtccagcgtctcgatgtcgcgcccgtcgtacagcacggcgcctttctgcggcttttcgaatcccagcagaagcctcatgagcgtcgatttcccgcagccggtcttgcccaccacgcccacggactggccggggcggatcttcagcgacagatcatccagcacggcaggcgcgccttcggcgtagcggaaagtgacgttgtccatctcgatgcgaccggaacaatgctcgagcacctgcttgcccccggcggactccggcaccgatttcatgatgggtgcggccatatcgaggtgcggcttgatggacgcgaagttgccggcgacgccggccagcgacatgaacgcgcccgtggccatgccgtacgccagattgaacgccatgtactccgatgtcgacacaccggtctgcacggcggtgaagtagatgacgatggtgcccaccaccgagaccgccgtctgcacgacgttcgagtagcgcatgaggcgcgggccgttgtacgtcagcttgacctcgtctttgtacgaatcgacccaggtggcgtacgcgcgacgctccgcaccggccagcctgatcttctggatgccggtgaacaaggcgtattcccatcccttgcggcgcgcggagtgctccagcttgcgcttggtcacgctcacctgcaccagcacggacgccaccgacactgccgcgctggccaggatcacgcccagcgcgggcaaggccaaaccgggtgcgtacgcagctatctgcgccacgtacgccagagagaacaccgaggtcaaacccgtggtcaggacgatgttctgcagcatgctcgccagcgtctcgatactcgagaggcgtgtggacagatcgcccgatgcgtacgcgcggtagaacggcgccggcagggaaagcgtacgcatcatggcagcggcttgcaccgacaggctcagcttcgtgccaacgcgcgacatgaccagttctttcgcgccgccgatgagcacccgggcgcacgtgaccgacgccagcagcacggcgatgggcaccaccacgcccacgttgccgctatccaccaccggtccgaaaatcagactgttcaccgcaggcagaagcatgcccaacaacgtcacggccaacgtcgccgccacgatcatcacgtaatccgaaaggtccaggctgcgcaccatgtgcagcagcacgtccctcacgcccagctctcgctgcggcaggggctggtagaagcagtacgcttcctg

SEQ ID NO: 8934 - DNA, 15325 bp, Unknown
  gut microbiota DNA sequence
cgctgccagcctttcgacaacacgacgcgccggcacatcacgcctgttccccgcagctgggcgtctatgaggtcgcgcacgctcttcgggtcgcgcggggcatcggccggcttcacgcggtagtacgccagcacctcgcccacggcatcggccgcggctttgcccgcatccacttccgcgccgcccgccgcccgcccggtgatggccacggaaaggtcccaggccgcctgagagaccaggtcctcgtcatgctccagccgttccttgatctgactgtcgaaccaacccatgcgcacctcctcctattcctgggtcaccagctgcaggtacatgcccccgcgctcgcacagctcttcgtgagtgccgcgctccaccacgcggcccttgtccaataccacgatctcgtcgcagtctcgcacggtggacaggcgatgcgccaccacgatgcaggtgatgccgcgcttgcgcaccgcgctcatgacctcctgctcggtcttggcatcgagcgcgctggtcgcctcgtccatgatgagcacggtgggatcctgcgccagcacgcgagcgatttccaagcgctgcctctgtccgccggacaggtcgcgcccgccttcggacaacacggcgttatagccgccgtcgcgctgcatgatgacctcgtggatgccggcatcgcgcgcggcaaggatcacctcgtagtcctcgatggaggtgtcccacaggcggatgttgttggcgatggtatcgttgaacaacacgatgtcctggtcgaccacagccaccgacccggtcagcacctcgcgcggcacctcgtccatgggcgagccatcgaagctcaccgtacccgaccaagggcgaaacaagccgctgaccagcttggcaagcgtggacttgccgcaccccgaagggcctacgaaggccacgctacgtccggattccacatcaaggtcgaaatccttgatcaggggttcttccaacctcgagtatccgaaggtcacgccctccatatgcacggcgcccttgagcttctcgcacgatgcggcgcggtcgagcggagcctgggagaacgccggatcatccggatagcgcatgacgtcctcgatgcgctccatgtcggtgcgcatctcctgcagcgtctgcatgacggacgtcaacgtggaagcgggagccatgaactgcgacaggtagccttggaacgccaggatcatgcccacggtgaactggccttgcagcaccaagtacacgcccgtcatgagcacggcggtgttggtcacctgcatgaccagctggggcaccagccccagtcgctgccccaagcgcgcgaagcggacctgttgcgtgttgaaacctgcctggaagccggcccaacgctcgaaatagccgccctccgcgccggcggccttgatggtctccaccatttcgatgccggaaaccgtggcggcggccagcttgcccgcatcgcgcatctgcactcgcgtcacattcacgcgcttcgccgagatcaagcgcgccatgcccaggtttatcaccaccgacgctatgccgatggcggccaacagcgggctgtaggcaaccatcaccacggcgtacagcaccagcagcacgaagttcagcagcagcggcgccaactgcttcaccagcgatgcggcgatggtggtgttggtggccgcacgagccgataggtcgccggccatgcgctgcgagaagaactccatgggcaggtgcagaaccttccacatgaacgacgagttggacactaccgccatcttgccctcgagacgtagcaggtacatggcgttcagcacctcgaccacgatgcgcaccgctcccacggctatcagcaaggcaatgaaggggtacagccattccgggttcttcccacccagcagccgatccatgaacacttgggagagcgccggattgatgatgccgacgacggccgtcaccgccgccgtgatggccacgaacgcgagcgcggcgcgcgagccctgtaggcgcgggccaacgaactcccataccgaccggggcttgccgctgggctggaagtcgggacccggcacgaagcgcagcatgacgcccgtgaaggcggcatcgaactcctcctccgtcacggtcacctcgccgcgtgccggatcgttcagatgcaccttgcctcccttgaaaccgcggcacaccacgaagtggctgaagttccagtggacgatgcaagggaacacgccctgcgagcgcagcgcctcgggctgcatacggaaacccgaggcctcgaatccgtaggcgcgagccgcgcgcaccacgttggaagccttggatccgtcgcgtgatacgccgcagtccgcgcgcacctgctcgagcggcacccatttaccgtaataagccgctatcatggccaggcaggccgccccgcattcgagcgcttccatctgcatgataacgggaaccttgcccgccatctggccaggcttgcctgcagtgcgagcgcggcgcgctcccttacccggcagcatcacgatgcgccccccagaatcaggctgatgggagcgaactcgcttgtggccacatgggcatcgtacacgccgtcgggcaggtctatggtcacgtcgacgggaaacatccagctcgttgcgttcaccttgtgcgctgcgtactcgtccagctgcgcggccagtgcgtcgggagagaggggcgtggttcccacggacgctacggcgcctttggcgctgtcggcgctcaccgtgtcgccgacggccacctgacctacctcgtcctcggcgacgtagcaggtcgcgtggccgccttgcaccaccaacgcagtaggcatcgtgtcgaccaagcgcccgcagcacgcccatatgaagccggccagcaacaacagaagcacggcgcccagcaccatccacaccccgggattcgacacgcggatgtagtcgtcgagctgctcgggcgactttgcccgatccaggctttcctggcgaaagggcgaagccgccttgtcttttccgtcgcgtgcgctcatcgtgaacctcccgtttcggtcaaaccgtcgaagccgggcagaacgatgggaagctcgactccttcgcagccggccgcaacttcatccagttcgtcaagcgcaagctcgccttcgcccagcgccccccaggcgctctgcgccgctgcgtcgttcacccacaggccttcctgctctataaggctcttgaagtcgtcaaacgacatgccccccgccgcatggcgggcggcatccatcgcagcctcgtcacggtcggaacgagggctcttcgcatcgggttcgaccatcgtcgctccttgctcgcgcggtcaaaagaaacggttcccctttttcgggcatcgctgcgcatcgtgaacggatgaagcgcgggcgacgctctttttcgtcaaccgacaacgatggggtacgaacacgcgactgacaacgccccacgaacgaacgaccactttcaacgaacgaacgaccaaggacggttgctcgttcgagagaagcgcttaaaaccgcgcattttcatcggatcaataccgaccatctcctcaacgcccagatcacgcgcccgtgccgcccatcgccgcttacgggtttcgcaagcggcgacgggcggcggttcttcaagaacccccgcccaagctaatgcagccgcagtcgcgtccgcgcctagccgacctcccccataaagcggcagatggaagtgatctcgcagacctcgccggtatccctccgaattcccgttcccgtggtcgggcattcgcacaccgccccgcggtcgttaaccaagcccaaaccggtgtactggcagcagcaggcttcgcctccggcgacggcgcccagctcgtcttcatcgagttccgccgatgagggggcgaagtcctcggccgacaagtcgaagccggctttccgtgcgattgcagccgcctgttctgcattctcttcggcagacaggccttcaagcgctttcagctcgtctttgatcgactcgtcctcgctcgccttcttcagaaagtctttcaattgctcgttcatgcgcaatcctctccgtttcttcggtttgctggttttacagcgttaccacgcaatagtaattcggccaatcgaactgaccgtacttgcaggtggcgcaacacttcgtctccgatgcctggaagtcgcacacgtcagacggggacacgacatgataggccccgccgacggtcgcatccagctgttgctcggtgagctcgccttccgcggttctcaccgccatgaaagctgcctctttttcgggactcaactcaaggccgagctcggcgctgacctcgcgaagctcctcaatcgtctggatgcgcgcggcgcgctccatcatctcttgctcggtagccgccatagcagctcccccttcctgttccgtccgtccttcttggacgatgcctgccgataagtgtaggaatcgccggccttcgcacgcaaggcgtcgcgaacgaacgacctattcaaccgcacgaaaagcctgttgcgcagtgcgcagcggtaggcaaagggaacgctcgtttcgtttgaaggggcgttcgtttcgacctcgtttggcatcgacgagccgtctgcggctttcttctatactgcggggaaggcgctcgtcgccttcatccttttctgcatttctgaaaggttgccagtgaagaaggccgtgttgcatacttcgttctcgcgccgttcggcgcatgtctccaggagaacataccgtgattagcgagagcagcaggcatgttcggggcgaggctcccgtggacggtcctgcttctcatcccctgatggacgagacgatttcgctgacgcgcgagttcgtccatcggtactggaacggcgggacaagctggtgcgccgcccgcctttccgatgatttcgcatggatgggggcacaggacgaccagcccgactcatcaagcgattcgtttcgccggcagatggagcagatcgcaatcgaacgaccccgcgtggttcttatgtgcgagcagtacctgcccgttgccgcccaggagaccctgtgcatcgtggcagggagctacctggttttcggcgacccggcatccggccgacttgccgcacaggaacagcgcttcacgttcgtgtggaagcgcgacgaaaacgacgactccctgaaaatctgctattgccatgtatcgcatccgctgcctcctgcaccagatagcgagccgctttccgtgagcgtgagcaagcaggcatacctgtacctcaaagccgtcctgatgcgccaacgccaagacgaggccgttaccgtgcgcgacgtagacggcacttcatggcgcatcaagcccgatgagatcgtgtgcgtggaggcgcgaaagcagcgcaccgtgcttcattgcgagaagacggacgtaacggtgcacggctgcatgggaaacgtgctggagcaacttggattggacatgatgtacgtgcatcgtagcttcgctatcagtccgcgccatgtcgcgagcctggagaaacgcgatctggtgatggacaacgggcttgtcatcgagattcccaccaaacgcctatcccaggtgaagaaagagctattcggctagcaacaagggttttcgttgcgcgcgagcggtctttcgttcgcaaggagttgcggacggacgccgtcgcttcgtatgctaggcgtcgcaagctgctttcaagcaggcggttcagaaagagaaagaaggcccgccatggcaactggcaaagaaaccagcacaacggcagaagaagctgcggaaaagctcgccgatcaggaattggatgcaaccggaggagggccagggatccctcttgaccgcataataaaccccaatcgctaccatttcggatgcggattatgggttcccaaccccggacacgagtatgacgaaaggcactattgcattcattgccgcttcttcttggacaccggcccgcactctttcgattgcgtaagaacatcgtccccttgggattgggacggctaggggaggggatcttccgttcgcggaattcagcatctaagcttggaaaagacgactgaaaatcgttcagaaccctccatctccgccaagcactgcgatgtggcggcagggctcacatgcaacgcgctgctgaatacggcggggaaatgcgaagggctgagccgacagagaaaaccgctcgcttcgaccctgcccttcgccaagaacgctttcacctgcttgttcgcgcgccttcctttcgccatcttccagcaagaccacacggggaaggcctagccaacgtcgcccatcgagtggcagactctatcaacgttgacgaacccgcttccgtcggtccaggctcctgtcccctctcttgggcaatcgcacagcacagggcgatcatccatcaggcccgtaccggtttgcctacagcaacaggcgtaacttcctcctgccacgacgttgagctcgtcgtcgtcaagctccgtttcgacaggagcgaagtcctcgaccgacacatcgaagccggcttcccgggcgatggctgccgcgcgctcggcacgctcctcttcgggcaggccggcgagggcgccgagttcctctttgagcggcccgtcctcgctcgccttcttcaaaaagcctttcaattgctcgttcatgcgcgctcctctctattgaaggtttccgttggactgcaaaggcatgacttcggcaggcttcggcccgccttcgtttttatctaaaaagcagtagagatttgggtacgaaaaacggctatacgcgcaggaggcgcagcaaagcgtgttatcttgttggtaattgcacttgaagagtggggacacgattacggagccgccggacacggcagcaagctcgctctcgtcgagctccgtttcggcggggtcgagatcctcgaccgccacctcgaaaccggcctcgcacgcgatggcggccattctcgccgcgacttcgtcttccggcagaccagcgagggcctccagcttgacccgcaggccctcgtcctcgctgaccttcgccatgaattccttcatgtcctgcttcattcgttctcctttctctcggcgatcctcgcctgggctttttctaccgcctcgcggatgcggggcgcgtagccgcctttcaggatgaggcactgggcgcgatcgggcgacagtatgtcgtcaggggcggtgaacagcgcgctcgcgcggcacccgccagcgcatgcgccgcggtgctcgcactgggcgcactcggggttgtgctcccacagcgcgctcacgcgcgtatcgatgagcgagaggtactccgagtcggacagaccctgcctcaagccgatctcggtggccagcgggtacctttcctgcatcggcatggacgacagcgccatgcacggcagcatccgcgcctccggggacaggtagagcgtctggcgcgcgtggccgcacgtcacctgcgacgcgcacgcggcggggtcgcgctcctccggatgcttccctatgttggggatggtccaatccccgctgcccggacgccccatgaagaagccgcccagatgcaggcccagaggcgcgccgtcctcgtagaagcaggggatgtagtccaggtagacctcgaaggtctcctccaaggtgagcgacctgtcctcgcccaggcgctcccacgtgtcggtgtccgccacgggattgaccttcaagctctcgcaatggtgcgccgccagcgtgctgacgctctcccgcagcaggtgcttgttgccctggtgcaggcacatctcggctccggtgggaaaaccccgctcgtggcagaggtcgaacgccgccagcaccgcgtcgcccgcgccggggacgccgcgcatccagtcgtgccagccctgcgtgccgtcgtagctcatgttgaactcggggcgaatcccgcgctcctccagctggtcgagcagcttctcgtccaccagcttgccgttcgtgtagatctgcgcgatccgtatgcggtaggacaaaagcgcgtccaccagctccatgaaatcgcggcgcaccagcggctcgccgccggtcagcgacacctccaggatgccgcagtcggcgatctgccgcgccaggtccatcatggtgtcgtgatcgatctcgcccagcttcgcgtcgggcgcggacatgtagcagtggcggcaccggtagttgcacttgccggtgatcgaccagtgcgcggttcggacgaagcggttctgatagcggcggtactcctggtcgggcgtgaggcgctcgcccggttcacaccgacgcacggcaccctgctcctccagcttctccacgaaggcgcgcacctcgtcgctgatgatgggcagcgataggtctatctgcccatcgcacagcgaaagcgcctcgaacgtgcgcgcgtcgacgaagcgcacgccgttgtgcggccgctcgaccacggcatagggcagtttctcccagccccgcagaaccagatcttctctcaaaagtcgcttcatgtcgctcttttcttcctttacatgcgcacgccgcctcggcgaccctctccctccccgcttacgatgaggcgtttttcggcttgaactggcaggcaaaaaacggatagagcatctgcttgttgtggcacgtggcgcatatgcgattatcgaaatcccggccatcccattggtcgcaggtgtcgaacaggtttatatacggcgatccggggccgaaaaaactcgatccgccgaccgaggcgtccagctccccctccgacaattcccgcaactctgcctttgcagccatgaaagcttgctcgtcttcgggagacatctccacgccgaactcagcgcatgcctcgcgcaactcctcaatcgtctggatacgcgcggtgcgctccatcatctcctgctcggttgccgccatgatgattacccctttctcgtccgaccgcgcgtcgcgaccggtgtctgcgaatcagtatgggaaccgcttctgccgtccgcaagccgccgcgaacgaacgaccgattacagcgaacgaacgctcgtgcatggagccgaacgaagcagggcagatgggcgtgagggggcgttcatttcgctcaaagaaaaacgtgccgatgcctcgagcgccaaacgcgcgtatcgctcaatgccgcggcgcggacggcgaaatcatcgaaggatcgcgtggcgctgcaatggtggcaagctttgcaactaccgcgacaatgaacaccgatcaaggcatttcatcgtttagcccggattttgcccagatttgtgtcgaaaatggatccgaacgcaaaaaaggtcggaagcgttttcagcttccgacctgcaagttactggtcgcgggggcaggatttgaacctacggcctccgggttatgagcccggcgagctaccagactgctccaccccgcatcgttatgttgcgcctacctctcctgcccgaagtgccttcaaacaggaaaagcggcaagaaagaatattacccgtctgtcttaacgaacgcaaatcatttctcagtgattcacaaggtctacacgtttttaactcgatcgaaagcgaactcctaacccttgacggcgcggcgagcctcgcagcgtacatgaatacaagccacgccctatcgcaccccatactcggcgtcctcttaatcaacgcgagcctcggactgctcgacatcctccttgcaatagccgccataacgcatgtagtacttggcatcttcgaacgcgaacatgcccggctcctgcttgcgaacccacttcttgagaggcgtctccgtaagcggcacgcacacgcagcacatgacagcgaacaacaccagacaccacagccaatcggttgccgtgacacctgcgatatgcgcgatcaggtacgctgcggccggcaagaacatcatgagcgacgtggcgagccccgtatggtagatggtcttcttgcccttgtcacgataccagaggtaggtggcgacgccgcccgccgtatgggcgaacagctccatgacgcacagcaggatgacgcacagcgcaaccgcgttcgacagaggaaggaagaagcagagcgctgcgtaaacgagcgggatccactgcagccccacgttggtgaccatatccgtgagccggctcatgggataacgcgtcggatcgtagaggctctcgtctttcgggcggaagacgctcgtgttgtaaaaccaatggaggccgccggggaacttccactcctcgagcacgtggaaagccatgatgaaagctacgaaaacgcccgctttgctgcccagaggcatgacatcccagaagacggcggcaagcaccgccaccaccgtcgccgtgacgcacaggaagacgatccactggttatcgcaccatttgtccagtttcttaacgaaattgcttgccatttgtctactcgctttcctacttcgctttcttcgctttgccgaagagacccttcggaacgctgccgggatctgccgctgcggcagccttgcgctcttcccaaaccttcgcaacgtactcgcgcttgtaaccccaaagctctcgctcttcgaacggatccttagaatcgcggtcatgcatgaagaggatcggcaagccgaacgagatgcccagcagcacgagcgaaccgggaatgccccaccaaagctgattagcggcttccggcatgaacgtcagcacgtaccatatgaacacgatggcgacgggcagctgcaagaacaccgccgcgaaaagaccggggttgtacttggacttcaagcgcatgttgagcacgatgccatgcgccggaatctgccagagaccctggaatatctgagccgcggcaagccaaatgagctgcgggaagaagatcggaacgatatagcatagatagcacaggacgacgttgctgacgaagcactggcgctggttcaagatatagcgatccggacgctcgatctcgttgaagacgatcatgttcgagatgagcggaaaaccgcccggccaggcatactcttcgaactgatgcaccaacatgcccatccagctgaagatgagcaaaacctgcacgtagtcaagggcggcgctgccccaaagccccatagcgaacgcgaggataacgaaagcgacccctccgatgtagtaccaatacctctgccagaacttcatgcgaaccgcctccttcaactgctgagaactgagttttggcgtattgacatctcgctatggtttgtacaatagtaaacacaacggtttgtagtcaacagtctgttgatagacaaatgtcgcatgctcaacgcactatgcagtatttgatttgaaatgaacattcgaagcatttttgtcgagggagcgcttgatggagaactagaggatacgcctgagcaagacgctgttgaaaaacgcactcgtgcacctgctccagaagaagcccttgaacaagatttcagtactcgagatatgcgagaccgcccagataaaccgcactactttttacaagtactacggaagccaaaccgacctgctcaacgagatcgagagcgattttcttgcgcagctcgacgaaagccttgcactcatccccgaacaagaaggcgccgtagcgtctgtgctcgccaacctctacgagcagcgcacgaccttctgcacgctcgtgcgggccatcccgagccacgaattcgcaacgcacctcttctccctgccgggcatcaacgggctcttcaaaaacctcgccatcgccagcagctgcacgaaatcgcagacgcagtatacgcgcgagttcatctttcagggcaccttcgccgtcctctgtagctggctgagcagcgaaaaccccgaacccgtttctgaaatcgccgagatgctggagcttctcaaggacaagctcttataaccggcgcggcataccggttaaacggaaacgagcgcactccatgtcggacgacagcgggcccgcgcgattgcgcgggcccgcatggcagaaccgggtttcgacgaggacgttagtcttcctcgggcaccatctcgctgacggaggcgttcgtgatcagaatcagcgacgccacagaagcggcggcctgaagcgccgtgaccgtaaccttcgccgggtcggcgatgccacggccgatcatgtcgccgtactcgccagtcatacaatccagaccctggcccagcggcagctccttgaccttctcaacggccacgtcgccgcgatagcccgcattctccgccagagcgcgcagcggcacctccagcgccttgcgcagaatgtcgatacccagctgctcctcggcgttctcgcatacgaggccgtccagcgcggacgcggcctgcagcagcgccacgccgccaccggccaccaggccctgctctgcggccgagcgggtagccagcaaagcgtcctggatacggctgcggatctcgttcatctcggactccgtggcggcgcccacttccatgaccgcgatgccgctggacagcttggccagacgctcgcgcagaacgtcgcggtcgtagtcgatcttctccgtttcgatctgcgcgcgcagctgatcgcaacgctgctcgatagcctcgggcttgcccttgccgcccaagatggtggtacggtccttggtgatctgcacgctggcggcgcggccgagcatgctcttgcgcgcatcggccagcgtcaggccgcgatcaggcgtgataacttcgccgccggtgaggatggccagatcctcgagctcagccttgcgtcgatcgcccagagccggcgccttcaccgcaacgctggtcagcgtgccgcgacggcggttcatcagcaacgtgttcagcgcctcgccacgcacgtcttcagcggcgatcagcaacggatgaccggactgcatgacctcttccagcacgggcacgatgtctgcgaagttgtcgcccagacgctggtcggtcaacaggatgtagggctcggtgagctcgccttccaggcgcgccgggtcgtcggccatgtacggggagatgaagccgttatcgaacatcatgcccttgaggatcttcacctcgatgccgaagttctgagacttctcgaccgagatgacgccgtcacggccgatggcatccatagcctccgcgatcttctcgccgatctggcggtcgcctgcggaaaccgtcgcgatctcggcgatctgctcacgcgtggtaacctcgacggcgttcttgagaacctcgtcggccaccacgtcggcagcgcgctggatgccgcggcgcagcgccagcggatcggaaccggagatgacgcagcgtactccctcgctcacgatagcgtcggaaaggatggtcgccgtcgtggtgccgtcgcccgcgtcgttgttcgcggcgatggcggcctcgcgcacgatcttcatgcccatgttctcgatgggatcttcaagatcgacattggcggccaccgtggcgccgtcgttggaaacgttgggcttctcgtgctccttctgcatggcgacgtagcgccccttcgggccgatcgtcaccctcacggcgtcggccagcttgttgacgccggcagccatcttcgtacgggtttcgttgtcgaacgcaatgtctttggacatagtctggttcccttctcatcggtgtgcggcgcttcgccatcaccgcgcgcacgataggcgcctctgccgctcggctgaaaaaccactgacccgagcatgcggaagctcataaaaatcactgtcgaaaaagttagcactcttttgcttcgagtgctagtcataacaagctttttcctcgtgacgaatggaaagcagcgcttttttgaagggcttcgaacctcttgccaatcggaaggctcagcaccgaagcctcgaaagcggcacccagaaacatgcttctgcctaatgcgccgcgaacgccgatgctctacaatcaggagttgcgcgatgctggccgagcgttcaactcgaagccgtttcgcaccgcgccgccgaaacagcacgacgcgaaggagcgcctccatggcagtgatcgatgcccatgctcacatatatcccaacaagatcgcctcgcgagcggtcgacgccgtgggcgacttctacctcatcgacatgttcggcgaaggcacggtggagcacctgctgtccgcgcagcagcatgcgcccatcacgcacttcatcgtgcattcggtggccacgacgccgggcagcgtggagtccatcaacaacttcatcgccgagcagtgccggcagcatcccgagttcatcgggttcatggctatgcaccaggactatcccgagcccgagaaggaaatcgaacgcgccatcggcctgggactcaagggcatgaagctgcatcccgacacgcagcacgtgaacatggacgacccgcgactcatgaacgtgtacgagatgatagaggggcgcctgcccatcgtcatccacacgggcgactaccgttacgactactcgcatccgcgccgcctgatgaacgtgctgaaaacgttccccgacctcgtggtggacgcggcgcacttcggttgctggtcgcgctatgaagtgggctacgacatcctgcataacgccgacaacctgttcgtggacgcgtcgagctcccagttcttcctggggcagcgccgcacggtggagctggcgcgcatgtggggcaccgaccgcatcatgttcggctcggactaccccatgtggagccctgcggcggaatacgaccagttcgtcaccgccggcttctcggaggacgagctggagaacatgctgtggcacaacgccgagcgtttcgccggcgtgaaggtgggatagcgcacgcaacaagaagccccgccattgctgacggggcctgaagtcgtttagctttcgtcgctttccggagcgtgctcgagcaccacccgaatcttgtcgatgcggtggcggtccatgtcgactacggtgaacgtggccctgtcgtcgccgtcctcgatggtcacggaatcgccctcgtcggggatacggtcgaacacggtgagcagcaggccgcccgccgtctcgcattcctcggactcgagaggctcgaaaccgatgagctcgcccacctcgtcgatgggaagcgagccgtcgatgaggtagctgccatcgtccaactgcacgatctcgtccgagccgccatgcgcgtactcgtcgtcgatgcggccgacgatctgctccatgatgtcgctcatcgtaacgatgccggccgtgccgccatgctcgtcgatgaccacggcgattttcgtgcgcttctcctgcagcgtttgcagcaacttcgcgatgggcacgccttcgggtacggcctggatcatgcgcacgcgcaggtcgtcgaccgtcgcgtccttaggcatcgtgtagaggtccttcacgtgcacgaagccgacgatgcggtccttgctgccgcggcacaccgggtag

SEQ ID NO: 8935 - DNA, 3390 bp, Unknown
  gut microbiota DNA sequence
aacgcgcaggtcgtcgaccgtcgcgtccttgggcatcgtgtagaggtccttcacgtgcacgaagccgacgatgcggtccttgctgccgcggcacaccgggtagcgcgtgtacttgtactgcagcacggtctggaggctctcctccagcggatcgtcgaggtcgatgcacaccacatcggtgcgcggcgtcatgatggcctcggcgtctttgtcgcccaggtcgaagatgttgtccacgtattcgttctgctcggggtcgatgagtccgctttcggtgctctcgtcgatgagcagcttgatctcctcgtcggtgtacacctcgtgttcgttggccacgtcgtggcccagcatcttcatgacgccgttcgtaatgctgttgaacagccacatgacggggtacgtgatgcggtagaaccacacgagcggcgtggccgtgaacagggcgtagcgctcggtggagaagatggccagcgacttcgggatgagctcgcccaccacgatgtgcaacgcggtgatgatgacgaaaccgatgacgatggagatgccgtgcgtggccgcctcgggcacgttgagtgccttgaacagcggttcgaacagggctgacaccgcaggctcgcccaaccagccgagggcgagcgaggcaagggtgatgcccagctggcaggctgacaggtaggcgttgacgttgtcggcgacgagcttggtgtacttggcgcccttgcgaccctcgtccacgaggatttcgacttgcgacttgcgtacgcgcacgagcgagaactcggcggcgacgaagaacgcattcatgagcaggaaaaacagaacgagcagcaaactgagtgctatgggcataattgcggatggtcctcctttatatgactattcgccatgtaatcgtacggcatccgtccatctggtcatacacccgttaccggaaacccgcaggtttccacaagtggggttgaagccatccgcctatggaggagcgacccaggaatccagaagcctcgcaaagacgcatcatcgccccaaaaacacgctccagcgactgaggcgtgtttttggggcgatgatgcgatcggaaactcaggaacatccgcggccgcacgcgcccaggcaaccgcggggcgtcacgccgtcgccaggtcgccgtcctcgtcgacgctcggcgccgcctcggcggtcgaacgttcggacatcgccgtcgcgccctcgattccggcgtccttcggcagcacgaggttcgccaccacggccaccaggaacaccacggccacgcagttctgcgcgaacacgctttggatcagctcggggaagttcgcgaacagggccgacacctgcgtgaagcctatgcccacggccagcgacagcgccgcgatgaggatgttgcgctgcgagaagcccgcccgcgcgatcatctggaagccgctgacgatgatgttgccgaacatcatgatggtgcagccgcccagcaccgcctcaggcagcgacgcgaagatcacgctgatcaccggcaggaacgccgccaggatcatgatgaccgcgcccgtggcgatggctttgcggttcaccaccttcgtcatggccacgaggcccacgttctgcgagaacgacgtgataggcaggcagccgaagcacgccgacagcgagctgacgaaaccgtcgcaggcgatggagcccgaaagctccttctccttcacctcgcggttgaggcccaccatggtcagcgcggaggtgtcgccgatagtctcggtggccgacacgaggaagatcagcgtcaccgacacgatggcgcccaggttgaactcgggcgtgaacggcatgagctgcggcagtgcgaacagctccatgctctggaagccgctgaagtcgaccgcccccgcaaccacggcgcatgcatacccgatgaccaggccgaacagcaccgaaagctgcttggtcttgcctttcgccagcacctggaacaccaggcacgaaaccagcgagatggtgcccagcagcaggttctgcggcgatccgaagtcggcagcgccggagccgccgccgaacgaagaggcacccacgcccaaaagcgagaagccgatggacgtgaccacgacggccgccacgatgggcgatatgatgcgccgccaatacttcgcgaacagacccagcacgccttcgatgatgccgcccacgatgatggcgccgatggcgacgttgtacccgtacgtggccgcgatgcccacgagcacggtgacgaacgtgaagctgatgcccataacgatgggcaggcccgaccccacgcgccacagcgggaacagctggatgagcgtgccgatgcccgcgatgagcatggcgctttgcaccagcatgcccagctgatcgtccgcgaggccggccgccgcgcccacgatgaggatgggcgcgaggttcgccacgaacatcgcgaggatgtgctggatgccgtagggaatggcgcggacgacggggatgtcgccgtcgagcttgaacaggttctcgtgtacgaatgctttcatcggaacgcgatctcccccgtctcggggtccatgcgctccacgatggcgagcgattccaggcggtagccgcgttcgcgcaggtcgtcgccgccaggctggaagcccttctcgatggcgatgccgatgccctccaccgtggcgcccgcctcgccgacgagctcgatgaggccgttcagcgcgcatccgttcgccaggaagtcgtcgatgatcagcacatggtcgtcggcgttcaggaacttcttcgacacgatgacgtcgtacacgcgaccgtgcgtgaacgactcgatgcgtgtcgtgaacatctcgccgtccaggttgatgctctgagccttctttgcgaacaccaccggcacgccgaaatggcgcgccaccacgcaggcgatgccgatgccggacgcctcgatcgtgaggatcttcgtgatgggagcgtcggcgaacagccgcttgaactcctcgcccatcgcgtcgaacagatcgatgtccagctggtggttgaggaagctgtccactttgaggacgccctccgacttcaccaccccgtcgcgcctgatgcgttcctccaaaagctccacgtgccgcctccgtcgtcgttccgtcttcatgcgtcgcgtcatctcgcagacgcaacgaacctttgcaggacagtgtaaaggacgcatgccgccaggggaacggggaattcgctagatcgacgggttgcccgcatggaaaccacgtgggaaacgatggcaaggaatatggaatccgcgttggaacggcgctggaaccgcgcaaggtcgggaaggctttccgtggtgatgcgcgccatggaaacgtagaacgggcccgctatacttgtaggtacggattcgatccggcggcttggtgcctctcc

SEQ ID NO: 8936 - DNA, 464 bp, Unknown
  gut microbiota DNA sequence
tgatgacaaggaatgtggaatccgcgtgggaacggcgctggaaacgcgcaagatcgagcagactttccatggtgttgcacgccatggaaacgtagaacgggcccgctatacttgtaggtacggattcgatccggcggcttggtgcctctccctctcattactctagaaggatggaggtgaagaccatgaccgctttggatttgcttgcgttggccgaattgctgttgaagctgatgtctcgtatcatcgagtttgccctggtgatagaagacgcgctccagtcccacaagggaaaggagcgctccaagtaaacccaaaccgccgaagcgatccgagagccgtggggagcaccaactccctgcggctcgcctcatattatacgcatcgaacggcagctcgcaagggtttccaagcgatgcagctcgcgtccctacagcaccacttggccggtgaacagcagcacg

SEQ ID NO: 8937 - DNA, 1423 bp, Unknown
  gut microbiota DNA sequence
tggagcaccaactccctgcggctcgcctcatattatacgcatcgaacgacagctcgcaagggtttccaagcgatgcagctcgcgtccctacagcaccacttggccggtgaacagcagcacgagcgacgtgacggcggcgatgaggatgatggccaccaccaccttgtccaccgtgctcttgaggtacggctcgttgcgctccttcttgcccttgatgtacatgaggatgcccggcgcgtacagaagcgacatgagggtgagccccgtcgcgcccgacgcccacgccaggaagaagctgtacaccacgccgaacacgccgaaaatgcgccacagcaccaggctgccgcccaccttgcccttgaaagcgtcgggctcggtgaacgtgagcttcgcgaagtacgccgccgacagcaggtacggcagcaggatcatgccggccgacagcgcgtagaagaactggtacgtgctgtccgagaacagcatgaccacgaggaacgcctcgatgatgacgttcgtcaccacgagcgtgacgatgggggcgcccttcttgttcgtcttggcgaaggccttgatgaacacgccctgctcagccgcctcgtaaggcgactcgctggacagcacggtgtagcccaacatggcgcccaccagcgacagcaccacgccgccgttgatgaggatggcgccccactgccccaccgcgtgctccatgacgcccgcaagcgccgggttctccagctgagccagctcggacagcggcatgacgcccatgctgagcacgctgaccatgaggtagatgctgagcacgcagatgaacgcgatgatggtggccttgcccacgtcgcgttccttcttggcgcgaccggagatcgcgaccgcgccctcgatgcccacgaacacccagatggtgatcatcatggtgttgctcacctggtcgaagaacggcaggcccggatcggcgccctgcgacatgttcgccagaaagatgccgaggtcgaatttctgcagaaagatgatggccgtgatggctacgaagataggcacgaacttcgagatggtgataacggcgttcacgccggtagcctctttgatgccgcgcgatacgaggaacacgtagaaccagatgagcaggctggcgccgatgaccgacggcaggttcgtgccgccgccgaagatggggaagaagtacgaaagcgcgccgaacagaagcgccgagaagctgaccgtgcacagaagcgcgctgatccagtagccccaagcgctgttgaagcccaaaaagtcgccgaaccccgcattcgcatagctgtagataccgcccttcaactgcggcttgatgcgcgagagcgcgaagaaagtcatgacgaggcacagcaccccgattcccgagatgctccatgcagtgaggatagccgcgccgctggcgccg

SEQ ID NO: 8938 - DNA, 10182 bp, Unknown
  gut microbiota DNA sequence
gccgcccttcaactgcggcttgatgcgcgagagcgcgaagaacgtcatgacgaggcacagcaccccgattcccgagatgctccatgcagtgaggatagccgcgccgctggcgccgcctgcagcctggtcgcccgccaacgtgaacacgccgccgccgacgatgagcgtgatgaccgtggtgacgaggcgaaagatgcccagtcctccgtggggttggggaatgcccgaagtggcggacgcgtggtgcgatgcggattcgctcatgtaatcaccgtttccttgatggacaactggtagcatgatactccacaacattgcattccgtcacaccgttatgcaacattttgcatgcagagcggttgtcgtcccgagcggagcgcatggcacggagatggcaaggggcgggacgtcacgcaatgacgaggcgctccacaaggacgttttccaacgccgagcggttgaggtcgcaacccaggccgctggcatggccttcgcggttgagcgtcaccatgccgcgctcggccgtgtagggcggatcggtaatgtcgcaggagaagtagcgagccgtggctccgatgtcgccgggcgcacccaccgcgctcagcgtctcgaacgcggcatgcaggcgcctggacacgcccgtgtcgtacatgccgcccatccacacctcgatgccccgcttgcgcgccatttgcacgaaatcgagcgcaggctgcacgccgccgcattttcccagcttgagggcgtagcaccgcagctcgggctgcgccaacgcacgggacaggtcttcggggcgcacgatggactcgtcgaggcagatgggggtgcgcagcgtgcgctgcagacgcgcgaggcggctgaacaggtcggtcggccccacggggggcaggcgccgcggatccagcggctcctcgatccaggcgacgttcaggccgtccaagccgcgcagctcctcggcttcacgctccgagaagctctggttggcgtcgagcgtgatcatcatgtcgggcaacgcggcgcgcacggcctgcgcgcatgcgagcgcggttcccggtttcaccttcagcttcacgcgcttgtagcctgcctcggcgcagcggcgcgcggccgcagccgtctcgaccgcggagcccagcccgatcgccgcgccggccggcacggatgccgaagcgcccgcggtcgcggcgtccgcagccccgccgatcagctgccatagcggcttgccgacgatcttgccgtacaggtcccacagcgcaggctcgagcgcgccgcatgccaacggaaacgccttcgcctcgggaacggcggcgaaggcggcgctcgcctcgctgggatgcaggaacgcctcgcgcagcacgatcggagccagaacgtcgtggaggatgcgcgcgtcctggtcgagcgtttccggcagataccaatccgtcggaaacgccacgcactcgcccagccccgtgcgaccggcatgatccgtcacttcgacgatgatcgactcgcgatgcgtcagagtggccttggctgttttgaacggcgttttgaacggcagccggatgcggtgcagcgtgacgcgcgccacctcgatgcgctggtcgtagcgccgctcgagcgcgacgcggtcgattttcccgatgcccgtgcgcgggaactcgtcgagcacgcacacgtgcttcggcaggtacagcttcgacaggcgcggcgccaagctggtgcgaacgtacgacgccagctgacggttcgtcagggatgcgagctgatccgcctgcgtctgcgcttgcgtccgctgcgcgtagcggctcgccctcggacgcggcgcgggcgctttctcgcgctcgacgaacgcaacaggccgtcttccccagcgggcatcgggcgcgccgaacacgtgggcgtcggataccccggccacgcgcagcagcttctccttgatctcggccgggtacacgttctcgccgcccgacacgaacatgtcctcggtgcgctccttcacgaacagcttgccgccgtacagcgccgccgtgtcccccgtcaggaagaagccgtccaccgtgtacgcggcgcgcgcgttcaggtagccgccgaacaggcccgggcccttcacggccaggcggccgaacccgtcgtcgccgggatccacgatatgcgcctcgtagccgggcagcaggcgcaagccgccggtgaacgaagccgtcacctgggcgtgggcgatttggctggacgtctcggtcatgccgtagcttgcgtacacgcgcgcgcccgcacggcacgcgcgatcgagcgtctgcgggttgagcgcgccgccgcccagcaggatgcaggagtagcgcgcgagcgtttccggcttgtccgcggccaccatgtcctgcagcatcttatcgaccaccgacacgtgcgtcgcgcccttcttcgccgcgtcggacagcagacggacggcgtcgaagcggcggtacagcacgaacgggctgccgttcagcacgctgcgcacgacgacctggaaaccgccgatatggtagagcggcagcaccgcctgccacatgccctcgccgcgacgattgagcgtccggttggacgcttcggatgcgaaacagatgtttccccacgtcagcgatacggccttcgcacgccccgtggtgcccgacgtgaacatgaccacggcgcgggcgtcgaagtcgaacacgtgcgcggcgtgttcggcgaagtggatgacactctcggcagcatcctgctgcgccacttcgctgcgacggcgcagcgacgcgcggcccgagctggcgcggccgagcgccttcgtagtgcggggctcggcggacgccgcgttcacgcgggcggcgaagctagggcgcacgccgcgccccgtcgcacggacggcggacggtgcggccatctcgcccgtcaacatggccttcgcgccttccaacaggcgcgacacgttggtcgcatcgacgcgcaacgaagccagcgacacgccgggcttgcggtcgatgtccagcaaccgactgtacttctcggcatcggtcaggcggttgttgagcgcgaccaacgcgaagccgccatacgcggcagccagcatgaccagcacgtacgccggatcgttcggcagatccacggcgacgcaatcgcccggacgcacgccgcggtccagcaagagccgcgcgagcgcagcggacagcatgcgcgtctcgcgatacgagtacgccgtctcgttgcccgcttcgtcaacgtacgtgaagcacgtgcgctgcgggaactgtcgcaccgtgctctcgaacgcaccgatcatcgctgccggattcctgcctttcggttgccgcctgccagacgtgcgatcttacggaaacttggggaactgggtgaagtcgggagcgcgcttctccttgaacgcgtcgcgaccctccttcgcctcgtcggtggtgtagtacagaagcgtggcgtcgccggcgagctgctggatacccgcaagcccgtccgtcgccgcgttgaacgacgccttcatgaagcgcagcgccgtggggctgaactccagcatctcctgcgcccagctcacgcactccgcttccagatcctcgaagggaaccactttgttgaccaggcccatctcaagcgcctcggcagccgtgtactggcggcagagataccagatctcgcgcgccttcttctggcccacgatgttcgccagatagcccgcgccgtacccggcgtcgaagctgcccaccttcgggcccgtctggccgaacttggcagtctcggcggcgatggagaggtcgcacaagatgtgcagcacgtgcccgccgccgatggcatagccgttcaccatggcaatgacgggcttgggcaccacgcggataaggcgctgcaagtccagcacgttgaggcgcgggatgttgtcctcgcccacgtagccgccgttgccgcggatcttctggtctccgccggagcagaacgcctcgtcctcatggcggccgccgtggttgacgccggtcaggatgatgacgccgacggacgcgtcgtcgcgcgcctcgctgaacgcgtcgtacagctcggtgacggtgagcggggtgaacgcgttgcgtcgctcgggccgattgatgctgatcttggcgataccgcctgctgtttcgtagatgatctcgcggtacgccttgcccgcctgccacgcaatgtcgcccatggccgtcctttcgtcgcgcgccgtgagaagcggctgcgccgtgtgtagaaggggatctccgactagatgttccctatagtagcgcgtatcgcgcgttttcgcacctcaaagcaaaatttctccggaaagatcaggtacacttcgccaatggttgaagcgagcgctaccccgtgttctgcaggccggcggaaaccccggtcacggtggccaggatgagccccagatactcggtcttgacctcgtccgaaagctcttcctgtcggtttcggatcacgcgcaacgcgcacacttgggcaagcgagagcgcgtccacgtaagggttgcgcacgcggatggcgcaaccaagcacgcggcggtgctgcagcggccactcgtctcccacgatggccagcgcccacgaacgcgtcagctgcatctcgtcgaacaccgcctgagccaggtcgtcgcggtcgcccagcgccaagtacatcttcgcaatacgcgcgtcggttttggcgatggacatctccacgttgtcgacgaacgtggcgaacagaggccattcgcgatacgcgcgctgcagaagctccaggtcacccacccgttcgcacgccgcgcccaggccgtaccacgcagccaggttgatgcgcgcctgcgaccacgagaacacccacgggatggtgcgcaggtcgtcaagcgattgggctcccaagccgcgcttggcaggacggctgccgatgggcagcaggcccacttcggccaaaggcgtgacggtggagaaccacggcgcgaagccgtcggtatgcagcagatccagatagcgctcgtaggcggcttcgttcaaacgcgcggccacatcggagaagcgtacggatgcctcggtgttgacgcgctcgaccgacggcgccgagttcatgagcgtggccgccgcgacgctttcgatatggcgcagcgcaagcgagcggttgccgtaacgtgcgaagatgacctcgccctgctcggtcaccttgaatcggcagttcaccgaccccttcggctgcgcgagcaccgcgcggttcgccggcccgcccccgcggcccaccgcgccgccgcgaccgtgcatgagcacgacgtcgatgccgcgctcctcggcccagcgggcgatgcgctcctgcgcggaatgcagggcgagcgtggcggtgacggggccggcgtccttcgaagagtccgagtagcccagcatgacctccatgcgtcgacccgtctgcgccaggcggcgctgcacggccggcagctgcagcatcccgtccagcacggtgacgcagttctccaagtcctccagctgctcgaacaagggaatcacgtccagctcgggcacgtcctgcgcgtgcgagaatgcgagctctgccagctcgtagacgtcggccatgtgccgagcgctcttggtgaacgacacgatgtagcgtcgggccatcttctgcccgtagcgcttctggatggcgccgatggcgcggaacgtgtccagcacctcgcgcgtcatggggtcgagcttgcccagcacgccatgggagcggatatcggctagcgcgcgttcgtgcacgagcgagtgctggcggaactccatttccaccatatggaacccgaacgtcgcaacctgccatatcagcgtttgcacgggcccgtacgcggcgcgtgcggcaccggcgcgcgcgagcgagtcctgcaccgtgcgcaggtcggccagcagctcttcgggcgacaggtacatgatgtcggcgttgcgcgccacggtgccctcgaggcgtgcggccatcaccagcatgacggcgcggtgcggctcgaagcccaggtcgtcggccacccgtcccgtcagcgtctcactcatctccacgagatggctccacaggttcataagctcttccgagggcgcggtgtaccgcgactccagcgtgaggttgcgcccgatgttgcggcattcttgggccagcttggccaccatatgcgcgaagtacttcgccgccacgcggcgcgacaccttcgcagtgacgttcgggttgccgtcgcggtccgacccgatccagctgcccggacggaagaacgccgggcacacgggcggcacgctgccggcgtcctcgcccagcacccagtcgtcgaaacgccggtacacctgcggcactgtatcgaacagcgtgttgtcgaagatgtcgatgacggtgtcggcctcttccaggggcgtgggcttcttgagctcggtgggcgaggtgcgcacgagcgcgtcgatctcctgcagcatgtggcgctcgttctccaggagagccgatccgcccaggtagggatgctcatccagcaacgcggcgatacggcggatcttgccctctaccgctttgcggcgcgcctcagtggggtgcgcggtgaacacggggtggaattccaagcgacccagcagctcggccgtgcgttcggggcccacctcgtccagcaggtggccgtacgccaccaccagctcgttcgatgtgtccacggccgactccatcgacacgttgcgctccaactcgcgcagcgtttccacacggtagttctcctcggacaggttcgccagatggaagaacgacgtgaacgcgcgcaccaccacttgcgcttggtcgaccggcaacgcgtcgatgagctcgacggcctcgcggaacgcccgcgcgccctcggtgtcggccgtggggatgccctgggcatcggtgggctcgtctgcggcgacggtgcccgggttgccctcgttcgccctgatcatgctgttgaacagacggtcgaagagagcgcagacggccggatcgtactccttgagcacctttcgctccatgcggaggaacaacacgaggttgtcgcgcaggctctcggggatctcgatctccgtgtaggattcgatagcctcggcggtgtccgacgcgcccagatgacggtcgagggaaagggctgttccgccttcgagatcggccatgatgcctcctgctcctggaaaatgagacaaagggacgggccaatgtctcatttcgcctcgttcgtttcttgccgcgtcattatactcgttcgggaacgaccagagacaggctgtaacgcaacctcgacaagaggcgaggagcgaaaccgtttcgcagccagcgcaactcgcgaatcggcccgaaactcttcttgcgaatagtggaccgttttgtataataagggcgagccgcagggagcgtgtactccccacggctctcggatcgcttcggcggtttgggtttacttgtggcgctcctttcccctacgggttaggagcgcgctccttatcaccagaaacagctcgatgacgcgggtagcgaactccaagagcaaaatcaccaacgaagcaatccccaaaacggtcatggtcatcacctccaatcatctagaatattgagagggagaggcaccaagccgccggatcgaatccgtgcttctcagtatagcgagcccgttctacgtttccatggcgcgcatcaccatggaaaaccttcccgatcttgcgcggttccaacgccgttcccacgcgcattccacgtttcttgcctccttttccaatacggattccgcgcgctttgccatcgtttctcacgcgaatcggaagcgggcgctcggcgctccggcttgcatcggcggcagcccaacgcgccgtccatccggctccttgcgtcatttcctcagaaacgacgctacttccttggcaaaggtggcgggggcttccaggtgggcgttatggcccgcgccgggaatgatgcggaccgtcgcacccgcttcggcagcttgagctgcgagggcgcggtacttctcgtcgcgctcgcccgccaggtagagcagcggcgtgtcgccggcgcgcaggacgtcgaacgtttcgagcgtttccgcacgcgagggcatgacgtgctggccggcttgctcgaacgtgcgcgcaagagcctcggcgtcgttcgccatgcgcccggcgcgcaggcgctcgcgcacgtccggcggcaggtcgcgctggctggcgaacaggggcagctgctcccagaaatccatgaaggcttccaggccgtcggcgcgcaggcgcgccgcgcaagccgcgtcgcgctcggtggcggcatcgcgctcggcctgcgtggcagggccgaagccggcggcttccaggacgaccgcggcgaacgcgcgcgggtcgcgacgcagcgcggccagcgtcacgcggccgcccatcgagtagccgagaacagcggggcgggcgccctcgcgatcggcgaccatgcgggcgaaggacagcagcgcctcgccctgcgcgtccagcgcgtaagcgcatgcgtcggccgggcgctcgctttcgccgtgtcccaccaggtcgagtgcgtatatcgggcggccggttgcggccagctttcgcgccacggcatcccacgacgccgagctctgcgcgaacccgtgcagcaagatgagcggggcggcggacgggcgggcggttgcaggcgggcaacagacattgagcgcatggtcggcgcaggacgagaaggtcgtggacgagaagccggcgcctggtgccggacaactcgcagacgccccgttcgccggcgtctgacacaacagatacaagaaggagattcccccgaacgagaaccggcgcgtctcggcagcgagcatcatcgggctcccacgaaacaagccatgccgacacggctcgcttgagcgtagggccgcggaatcaagcccttcggcgcggtcggccttccaaaatctggcacaaatttacgggtacggcacgcttcgtcccccagaatcgcccaaatgccgaatgcgcttcgacataatcccaggtcgcgaattctcgcagctgcaagcttctgccgtacccgtaaatttgtgccagatttcaccgggcggccggcggaaagcccgttcgagcaagcaccgccgaccgctccattcccgaattcgccacgtatccggatcatccgcctcacctcccgacttcgccgctcgcggcttacgaccagtacggggcgtagcgttcggggaggccttcgaggggcacgcgcacctcgacgagcgagatgcccggcacgccaagcgcttcgtcgtaggccgcgtcgaactcggccacggtttccaccaggcggtgcggtacgccgaacgcctgggcggcggcgccgaactccacgtcctggggcgtgaggaacagccgctcgaagtacgcgtcttccgagcgttggggcagcatgtcgaagatgccgccgccgttgttgttcagcagcacgatgacgatgctgcgatccaggccgcccgacgcgcgctgcacgcgcagctcgcgctgcaacgccagcgcgttcaggtcgtgcagcagcgtcaagtcgcccgtgagcagggtcgtttgctcgaaatgctgcgcggcgcccagcgccgtggacacggttccgtcgatgccgttcagcccgcggttgcacagcaccgtcagccgcctgccgcccttcgcatagaacgtgtcgagggcgcgcacgctcatggagttcgccgcgaacaggcacgacccctccggggcgcgctcggccacgcggcgcacgaacgcgccttcgaacccggcttccaccgcatccaccgcatcgacgcgcgcgccggctgcggcgttcgcctccaaccacgccgccgcgaaagcactctgccggtcgtcagcggcatcttcgccgccgaggctctgctttgccgccagcatcgtttgcgagaaatcgagcggcgtacagcgcaggtgcacgtcggtggcgcagttgaaatcgcgcgtctcgagcggatccaccacgatgttgatcgcgcccgcgttcgccaaaaacgcggtggcgcgcttcgacaccggataacggccgaagcggatgaccgcctcgggaaccagcgcatcggctggagcgcctagcacggtgtcgtaccggtcgatgaccagcgggtcggcggcggtgcgcaagcccgaaagcggatcggccagcagcgggtactcgaacgactcggcccaggccaacagcgcacccatctcgtccgtcgtc

SEQ ID NO: 8939 - DNA, 3190 bp, Unknown
  gut microbiota DNA sequence
tgcatcgaatggagcgcccagcacggtgtcgtaccggtcgatgaccagcggatcggcggcggtgcgcaagcccgacagcggatcggccagcagcgggtactcgaacgactcggcccaggccaacagcgcacccatctcgtccgtcgtcgcgcacgacccctcgcccgccgccaccagcacccgacgaccgcgcagcagttcgagcacgcgagcggaatccatcggatcgaggtaagtcgacggatggatgaggcgcagatcggacggcgcattcaacgcgcttcggccggtttcgaacagcccttcgacccgcaggtcgggcttgagcggttcgtcgaacgggaagttgaagtgcacgggcccgcccaggcacgcgcctgcgatgcgcggcgcgccctcgccgtccgtcgcgcgcccggccgcctccccgcctgcggcgatgcgcgcctcgcgcgcagcttggcgcgcgaacgcgatggcggccgcatcggcagcgggctcgggcatgttgcggaacgcgcgcacgtgcgagccgtacgcgttcaactggtcgcacgtttgcggcgcgcccaagccttgcagtcgcgccggacggtcgcccgtcagcacgatgagcggcacgcgtgacgactcggcctccaacacggccgggtagtagttcgccaccgcggtgccggatgtgcagatgacggccgccggttgcccactcgccttcgccagccccaatgcgaagaacgcggcgccgcgctcgtccacgtccacgaacaaccgaagacgatcggggaagcggcgcgacagctcgtaggccgtcatggccagcggcgtcgagcgcgacccggggctgaccaccacgtcgtgcacgccccatcgttccagctcgtcgaagaacgcgcccaggaacagggcgctggctgtaggatcggccctcatcgcgcacccccgtccgcaacctcttccccgtcgaacgccgacaggaccgtcttcagcttcatgccgatttcgtcgtactcgtcgtcggccacgctgccctcgacgatgccgcagccggcgtacacccagcccacctcgccgtcgaacacgccggtgcgcagcgccacggaaaactcgccgttgcccgcgccgtccacgtagccgcaggcgcccgcgaagaacccgcggttgtacgcttcgatgctcctgatcagcatctgcgcctcgcccaccggcgtgcccgccacggcgggcgtgggatgcagatcgtccttcatcgttcccaggtcgacgccttccagcatgcgcgcgcgggcgggcgtgcacaggtgctgtacgtgggtgagcggcaggatgcccggctgggcgggcacgtcgacgtcgtagcatgtgcggttgaacacctctcgaatgaaccgcaccacgtggtcgtgctcggcgcggttcttcgcgtcggccatcagctcgtcggccaaccgcgcgcgctcttcctcggtggcgccggcgggacacgtgcctgccaggcacatgctctccacctcgttgccgcgcttgcgtaccagcagctcgggcgtgcagccgcagaagaacacgtcggcgtagcggtacagcagcacggtgccgcgcgccgagccgtcgatgaggttcaccaacaggtccttcgacgagaacggctccagcgcctcgaggcgctggcggcgcgacagcaccaccttgctgatgcgcccccgcccgatggcgtcgagcgccgcttccacgttcgcgcgccacgcgtcacgcgagtcgggctccagcttgaacgggatggtgcggcggttgcggcgcggcgcagcggcggcttggcgggcgaaccgcgcgatgcggccaggatagaccgggctcaacgagttcacctgcaaatacgcgccgcgatcgtcctcgacgaggatcacttcgggcagcatgaacttcaagcggggaaatgcctcgaacagctcgtcggtcggcgacgggttctcggcgtcgaaacggttgaacgagaagaagacgggctgctggccgacggggccttcgagctcgcattcgatgccgtcgagcgcaggcagcgcaatgcagcgccccatgcccatgaagcggacggggcggtctttgcgatagtagacgaactggtcggtgaaacccttctgcagcgcgcaatacgcatcgacgatgtcggcctcgatcggttgcgtgtatgaaaagattctcgtcatcgtggcctctcccgccttcgtcgccttgctcccggcgcgccgaatcgtcaacgatttccgcgcccgcatcgcattctagcacgacgtcttctacactattcctgtccgacggcggacgcacgcatcctcgcccgcaagcacgcaagaaaggcacactatgaaaaagttcttcgaggagttcaaggagttcatcaatcagggcaacgtcatggacctggccgtagcggtggtcatcggcacggcattcacggccatcgtgaactcggtggtgagcgacctcatcatgccgttgatctcgctggtcacgggcggtatcgatttctcggacatgaagatacccctgggcacggggcccgatgcagccgcgttcacctacggcaatttcatcaacgcggtcatccagttcctcatcatcgcgctggtggtgttcctcatcgtgaaggccctcagccgggcgcgcatgctgacgcgccggggcaagcatatcgaagagcaggatgccccgaaatgccccttctgcctcgaggaagtgaacgagggcgccacccgctgcccgcactgcaccgccgagctgcccgcccccgccacgacgaccccgaaagcgggaggcaaagcgtagggcgtctcaacggacaggctcctcatcttcctcgtcggtcacggcgcgcaggatgaagaatcccgcgataccggcgatcagcgatgccgccaggatagccgctttcgccatggcgatcatgttcgggtcgacgaacgcgaggttcgtcacgaagatggccatggtgaagcccacgccgcccagaaccgacacgcctccgatatggccccagttcacgccctgcggcagatcggacagcttcagcttcacggtgagccacgtggccaggaagatgcccagcggcttgccgaacagcagaccgcagaacacgccgatggtcaccgggttcgtgacgatggacagcaggtccatgcccgtcagcaccacgctg

SEQ ID NO: 8940 - DNA, 451 bp, Unknown
  gut microbiota DNA sequence
gtcggacagcttcagcttcaccgtgagccacgtggctaaaaagatgcccagcggcttgccgaacagcaggccgcagaacacgccgatggtcaccgggttcgtgacgatggacagcaggtccatgcccgtcagcaccacgctggcgttcgagaatgcgaacagcggcaggatgaagaagtacacgggaatgtgcaggcgatggtcgaggcgcgtgataggcgggatggacaggcgcgacacgcggccgatctcggccacctcggacaggtactccttctgcacgatgtcgggctcgccggggtcgtagcgatcatcggcgcgacgggcgcgggcggcgaaccagctcggagcgcggtcgagcttcacctgcgagcgcgccgggatggcaagcgccagcagcacgccggcgatggtggcgtgcacgcccgacatgaggaagcacacccacatc

SEQ ID NO: 8941 - DNA, 4813 bp, Unknown
  gut microbiota DNA sequence
gtcggcgcggcgcgcgcgggcggcaaaccagccgggagcacgatcgagcttcacctgcgagcgcgcggggatggcaagcgccagcagcacgccggcgatggtggcgtgcacgcccgacatgaggaagcacacccacatccccaggcccacgacgatgtacggcagcaggtcgtagatgtgcagccggttgaacacgatgagcacggcgaacaggcccaagcccccggccagccacgtcacgtcgaggttcgcggtgtagaatacggcgatcaccatgatggcgatgatgtcgtcggcgatggtgagcgtcgagaggaacgagcgcagtcccgccgggatgcggcttcccaacagcgcgagaatgcccaggcagaacgcgatatcgttcgccatgggaacgccccagccctgctcgaacccgctgccgacgttcaccgccgtgtacacgagcgcaggcacgatggcgccgcccgccgcgcccaagatgggcagcagcgccttgcgcgggttcttcagctcgcccgccgtcatctcgaacttgatctcaaggcctaccagcaggaagaagatagccatgaggaagtcgttgatgaagtgctccagcgagaggcgcggtgcaaaatcgcccagcgagatgccgatgtcgaacgtgtgccagaactcagcgaaatacggcagcaccggcgtgttctcgatgacgagcgccgccacggccgcggccagcatgagcatggtcgcgcgcgtggacgagtgggtgaattcgagcagcttgcgcttgcgccgatggtggcggcgcacttccggctcgaggatgcgctcggtgggcgcacaggtgggatcgccgctcagacaggcgggtggcgcctcgtcgtgcggggtacggtcggggcgggcaggcagccggcagccttcacgctgcgacgcccggtcaagctgcgcaggtgcttgacggcgttcgcgaacctcggaaacctcgcgtccttcacgcgatgagcgactttctgattcggatgtgattttctcagatggcatgaatacagtatacgaaacgggctgcggcctcgcggtcacagcccggtaacgcgcggaagattttacaatgcagcgttaacagccgttcgcgcacgcgaatgcgcggtcgtcacgacaaacgccgtgcttgacgcggtcggattcctcggaggttttcgcatcgttccagcgatccatcgttcccacgagataccccgtgatgcgacggatgcgatcgaacggcaccggcgccagctcgtagcggatgtccacgtcctcgccgtccaccagcagcgcgaggccggtaacggcgctgttcggatgcttcagcgcgccgcgctcgaggtaggcgcggatctccgtttcggtgacgtgctggtcgccttcgttggcatagcccaccagcacgtccacgccgtcgacggtcagccgctcgttgaccaccatgtcgcccatcgcgttcgccacgcccataaccgcttccatgccccgctccttaccgcgtttgttgctcggtcttatatgttattgcaatagtatcatttatggaaggcgcgcgccagaggagggagggagcgatcttgcaacatggtcggccggtcggggagcggctgcgcatggcgttcgcttcggcgggtgcattatcggcccaaagacacggttttcgcgggaattccgtgtctttgggccgataatgcgttccgccgtccgcaagatgggcagatgcgcgattggactgctctatgcttccccgtcggactgcgagggcttgcgctcgtgcgtttcgttggaatgcgaaacggacggggtgtccgcgtccgcgcctgccccggtttcagccgcgcccgccgactgcgccaagcgggcttgcatcgccgcgacgaggtgggatgcggcttcggccttacgctcggagtcgcgattgtagcgagctacgttaatgagacagacgaccatggcggcatgcacgagcagggcgacgctcgccgcgagtaatgcgaaaagcaagagggggagcgtcccgtagacgttccagacgttcgccatcagcccccataggttcagggtatcggccaaagcaatagctccgggactggcgaagaagagggatgcgcacagcaggacgagcccgccgacggcgctgcgcttcccttccttccgtgcggcgaccctttggtcgtccgtgtagaagtcctcgatgtacgggtgccgccgccggaacgacccatgcacggcgaacgcgcggatcagcaaggcgaagcccaccgtggcgcacgcgaagtacgcgatgtacgggcgcgcgccgggattggctccgttcatgttcgagaaggcgatggccacgccgaatcccgcgacgaacatcgcgaggcccgccggcaccgtccacgctcagcggcgcatgtgctcgtcgtagccgcaggcgtcgacgggcggcgcgtcctcgggcagcgatcgcgtcgggtcgggcgcgcggccggttaggtcgccccgcaccagatcgtccagcgtgcattcgaacagatcgcacagcttgagcagcttatccatttcgggatagcttttctcggcctcccacttcgccaccgactgccggctgacgccgacgagcatcgcaagctcggactgggtcatgttgcgcgtgtcgcgcaggtgctgaagattgtccctgaagctcatggtcgatctcctctcgcagggtgcgtccggctgttccttcgacttgcatcatgcaccgaaacggcggttacctcaaccaacctcgggatgctttttcgcggcatccgctgccaaccggcggttgtcaccgcaggtcaacgtctgaagagcagatcgtctgatgacaaaaacgtacggatgtttcacgtgaaacacaggaagcccctcgaatgcactctgcgacatggaaaggacccgatccgggttggcgcatgaaaactgggcgctttcgcacaaaaaggcacggtatgcgacgtcttgctggaaacgacttttcgaacggtttcgtttgttttggaaaacgcctgatcgagattgtagtgcttggaggaacgagggaagcttcttcgacagcatggtctgaaaagcgctttttgatccttcgaacgtcgcacgtcgcggattttagtgcattggagaggacatcgcatgcaaggagcatgctagaaagggaaacacgagttccgtacaaatgtttcacgtgaaacatttcggctgggggccggagcgaaattggtcgtgaggcgatggacgcggggggcgttgcggcttcggcgggtgcattatcggcccaaagacacggttttcgcgggaattccgtgcctttgggccgataatgtgctcctccgtccgcaagacgagcagatgcgcgatgttgcgacgcggggcaaccggcgcgggacgccacacggggcggcgttgccgattgcgcacaaggcggcttcgtgcgaagcaggatcgacgtggctggttgagcgcaaggcgccttcatgcaaagcggggccgccctttcggacggccccgccgaggtgcgcgattgcgcggctacgcggatcgcgtcaaccttacagcttgaaatcctcgtcgccgttgaagacgtcgagggcgtcctccacggagtagtcggccagcgtgatggcgctgatggccttcgtcaggcggacggcctcgtccagcgagcgctggtggatgttgcggccggtggcgttgcccacggcgccgcccgtgtggatctggtcgtacagctgcgtgaggaacgtctcggcgtccaccgtcgagccgccggcgcacacgaggcccgtgcggccggacgccatcgtggcgaccttgagcgcctcggccggcgaagagccgtcctcgggcttcggcgggttcaccttcacgaagtcggcgccgaggcacagggccacgcccgccgcgcccgcgatgagcgccggatccttctcggccttgacggccttgccgcgggggtagatccacagcacgaccagcaggccgttggcgtgggcctgggcgatgagctcgccggcctcggccatcatggtggactcgtactcgctgcccaggtagatggtgtagccgatgcccacgatgttcacgcccgcctcgcgcatggccagcacggcgtccagatcgtagagctgcggcgaataggggtcgtcctggctgccgcccacgatgttggtcttggagttcatcttcacgaggtagttgatctcgggatagtcggcggcgtactgcgcgatgagcccgcgctggcccgccaacacgccgcacacgccctggcggccgatctcgaagaggtgctgcggctcggcatcggcgatgtcgatgccctcgccgtagaagtccttgttgaggtgctcgatcttctgatcgcacgcgaacagcatgagacggcccgttccgcgcgtcgccttcatgaagttctcgatgtactcgtcacgggattccggcatgacgtcggccggcaccctcacctggtcacgagtgattttgggcatggtttcctccttataggatccaactcaacggatgaggctcagagccttatcgatacggtcattctagcgaaaaagcgaggcgggacgcgccgtttcaccgaaaaaccccgcgaacgagccaccgattcgcgcgaagcgcgggcgggcggtaggcggaggaggcgcaacggcgaacaagcggcacccgacggacagtgcgcgaagcgagaacccggatgtttcacgtgaaacatccggtcgcgcgaagcgcgaacagggcgggagcgaagcgacccgcccatgcgcccgaagggcgcata

SEQ ID NO: 8942 - DNA, 13118 bp, Unknown
  gut microbiota DNA sequence
gccagcgagggcggccgtggcggccgccctctacggggacttgcttcgcgacacagcgtcggcaagttccggcggccgggaggccgccggaaccaaactagaaccactcgcgcttgttcagcacgtagatctgctcgaattcagtctgggacttcgtgaggtacaggatgccctcgatgatggcgatgacccagatcacccatgatgccagcgagaacgtcagcacgccgccgatgatggtgacagccagcatgatgaaaccggcggtgttgtagcccaggtagaacttgtggatgccgaacgcgcccaggaagatggccagcaaaccggcggccacgtgatccttcgtcgtgaccataggctggctgtacggctgctggtagtacggttgctgatagccgtagtacggctgctgcggaggcacggctccggggccggcatgcggcggtgtctgcggcgcgccgtatccgggaggagcgtaatagcctgacgcaggctggccgggagcaggaggcgcacccgcaggctgcgtgtaagaagcggtggaagcagaggcggcagccggagcctggggctggggctgagccggggtagcctgcggtgcagccgtaggcggaatcgcctgagccgtcgagtacggaacccactcgggctcgggttcggcagccttggcgggctcggcaggagccgcagaaggagccgccgcagaagcctcggaagcatcctccgtcgacgcatccgtcgatgcgtcgctcggcgcctcttccttatcctcggacccggcatcgcacgagacgaccgccacatcctcgaccacgacggcttccacttcgcccgtcgcttcgtcgacgaccacggctgcaaccgtctccttttcaacgtcgcatgcatcgtcggacgtcgtcgcggcaagcttcgccttcgcggcttccagtttctcctgagcggctttgagctccgcttcagcagcggcaacctcgtccgctgcgctattcaaaggttcgttggtggccatgatggacccacctctcattctacaaattgcgtcgatgtcctgtaccgccatagtagtgcgcgccgtcgcatccaaggaggtttcgtcacaataccgtcaacgacgttcagtatttcttaagatttgcgcatgggccgaagaaaagcctgatcgcgttagctgtctttatgcgaatgcttctcgagcattttcatgatgcgctcgcgaaaaacgatgcccaacacggcgatgacggccgccaccgcgaagatgatcgcgctttccataaggcgtccgtcagccagcccgtcggcggcgtaggtggacaccacgatgcccggaatgcgccccacgttggagagcagcaaaaatgtgcgcattcgcatgtccgtgagcggcacgaggtacgtgaacacgtctttcggcagacccgggatcaaaaacaggatgaacacgatgatgttcagcttgccggttttctcgaacttgcggaacttttcgaggtactgcacgggcaccatgctctgcacgaacggcgcccccagcttgcgcaccagcgcgaagatgaacgcgctggaaatgacgcaccctgccagaatgaccagcgcgccgatccaggggccgtacagcaggcccgccgcgatctgcaccacctcgccgggaatgaacgccacgacgatctgcagaaactgaagtcccagcagtatgaggaaccccacgggacccgcgccgcgcacgtcgttgatgatgcggtcgaggccgcccggctcgaacaactcgtggaagtacggccatagcatcaccacgatcagcaccatgatggcgaagaacgcgatgagcccgacgaacttgaaaatgtcggccttctccatcttatggccgcgcacctctacctcttgctcggctttttcgtgcagcttgtccttcagcttgtcagtcatcgtggcgagccttgtcgtactcctctttgaaggccgcgaacatgttcttcttgggcgcgggcttcttggcggtcgtcttcttcttgggcgcggtcgacgcgggcttcgcaggcgcggaaacgccctcgtcttccgcctcgtccgtcacggccagagcctggtcgtcggaaccgggcttgacaccgcgcgccttgtcgtactcctccttgaacccggagaacatccccttcgtggcggcgatctgcttgcccgtggcgtacgcgcccttgttcaccacttcgccggttttcttggcggcctcgctgaccaccggcttcgccctgtccaccgtggtgtgcaccttgtcgacggcgacggccgtgaccgcgccggccttctcggccacgccgccctcggcaaccaggtccttcgcggcgtcgtcaaccagcatcgcacccagcaccacttcgtcggtttcgcgcccctcggagcccacctgcgccagcgcggcacccattccgcggcggaaccccttgacgaggtcggccggaatagtgcgcttgcccaacagtgcgttggcggtggcgcccgaatcggtgtcgaacgtgtccaccataccggtgatgcggttgaaggtgacgttgcccaccatgcccagcgaagtaccgtcttcggtcatgaccggcagccccacccacagcacgcaatcgtcccagttgacgcccagcgccttgcatgcggcgcggtccgtggcctcgggcacgttgcggatggcgatgcggccgtccacgatgtcgtaaccctcgatggatacgaacttgtccttgcggcggaacatccacagcagatcggggcgcttcacgatgaagccgacgcagcgcttctctttcgggtggaacacgaaacggcgcaccttgccgatgcgcttcgtaccgttcttgccgcccacgacgcggacgcccgtgagctcatgcgtagtgatgagtttgcttgccatggccttcttctccactcgacaacctgcgcatttgccgcggatggaaccgcaaccccccagcgccgttgccctgtcggacagtcaggaagcggcgagaggggcggggcttgcgcccacgtcgaccaactcgccgcttcatgatagatgcgtatgctacttgtcgtcgccggagatcttgtcggcagcgtcctcggccttgtccttcacggcatcggccgcgctctgcgccttgtcctcggccttgtcgacggcctcgtgcgccgtgtcggccgcgacaggaatggtgtcgctcaccgcgtcgtgcgcctgctcggcgttcttggccacctgcgaggcgatgcgctggcgcgccgcttcgatcttgtcgcgaagctcgtcgttcttctgcgagaacgccggcttgatgttgtcggcggcttcctgcacgcgctgcgtggcctggccgtacagctcttgacccttggcggccacgtcctgcacgacttcctgacccttggacgcggcatcctgatacgcgtgctgcatgttggcgccggcctgagagcccagctcctgcgcctcgccccatgccgcgctcatcttatcggtgaccatagcgcgcgtttcctgaccagaccggggggcgtacagcagcgcgacaaccgcaccggccaacccaccagccaaaaaagctccaaatttgttgcccatgacggcctccttcgggatgtttgcctgttcgttcattataggggcatccgcgcagccccatgcgcgaaaacatgagcgctctatgattcagttgctgtttcgttgccgaccgaacagacgcgaagacgggccgccggcctacgacccgtgaatcgcatactgcgctctcgccgcaagcggttaccgcgcatattggctgaccagttcgttgaggacgccggacagcgacaaaccggaggcttcgcaggcgagggagaacggcgaagattcggccagggagggcgacacgtccacctccaggacgcgcgcctgggctccgtcccagacaagatcaacgcgggcgaggtcgcgcacctgataggcacggcacacttccaaggcggcgcgctcgatttcggcacggatggcctgggcatcggcctcgtcgttcgacaacgaggcggggcgcacaggtgcgaacagctcgaccgcgcccggcgtgcgacaggcgaccgtatcgcagaagccctccttcgccacgatctccaccggcggcagcgcgtaggcatcccagccggagcccagcaccggcacggttacctcaacgccgtcgatccactgctcgatgatgacggcgtcgtcgaacgacagcgcatcggacacggcttcgcccagctggtcgacggaatcaacgcggcgcacgcccgaagccgaaacgccgtgcgcaggcttcaccgccacgggatacccgccgatcacgcggtcttccaccaggtcaaacgccgtcgcagcgcccatgctctcgaacgcctcgcgcgcgatgcagacgccctgcggccaggaagccgtcggctcatcgccggtgatggcgcggtaggccgccatctcggagccgagggaggatttgtcccaagcgcgccggcacacgctggacggcgatccgacgaagggcacgcccacgaattcgagcaggctctggacggttccgtcctcgccgagcttgccgtgcagggcgttgaagcacacgtcgggacgctcgacgcgcagggcggaaacgaggtcggacgaagcatccaacagcaccgtcctatggcccgcctcttcaagagctgcgcacacgttcttggcgctggccagggataactcgcgctcggtcgagctgccgcccgtcaacactgctaccttcatgatgatgctccttctgccgtccacacaagagcggctagcgtaccatcgcatcgccgaggaaggcaatcgcatcgcgaaaagcgcgcaaagcgaccagatcgtcgaggaagctcacctcgatgcgcgcgcggcccgccgcctcgtccgtccactcggtggtgcccacgaacacggcatcgagagcggcgccggcatcggcgtaagcggcggccgaaccggcttccgcgccgtcgcccctgcgcacggccgcccgcgtttgaaaatcgatgaccaggtgctccaacagatgcggcagcgacgtgtggtccatgacggcggcgaaagtgtcgccctcgtcgttcacgcaggcatggcgcggcacgtgcggatgggccgcgcgaacgcgcgccgcaagctctggcgtcgtgcggcgcgggacgccgggcgccagaaccacgtcgcacaccacgcggtcggcgcgcaccgtgagccgctcgatgacaagcggggctgtgccctgcgcgctcacgcgggcaggtcgctcacatcgaacacgccgcgcgtgccggatgcggcagcatcgtcgttcttgtcgacggcgtcggaggcgctgccgccttcgtctgcggcttcacttgcagaggcgtcttccggcccagaagcggaatcggattccggcttctgccgatcgcccgggtcgggctcgggcgcagcctccggctcgggttccgccgcaggctcgggctcaggctcaggcgccaccggctcgcccctctgcggcgtagcctccgcatcgtgcgacaggcggtcgagcaccgtgtatccagctcccgacggaggttcctcctgcggctggccctgaatcgcgcgcacgagctggtcgaactgccaggcgatgtcgtccgccagcgtagagagccatgtgtacccgcttccatcggaaatcaccagctgagagcggtcgagcgagaaacgatagcggccggagccctccatgttcccgaacgtgtacgagatggtcttcgcgtccgtgtccagcttgtacgaccagctcacatcttcggtcagcttgatagtttcgccgtcgatgaccacgacggccgtggtgccgtgagtttgccattcgccctggaactcggctgcatcgtcgtagcgcagccaacggtcccacgagaacccgcccacgatcagcaggacgaccagcagcaccgagccggccacaacaagcggccagcgctttttgcgcggcttcgctcccgcacgctcgcgccgacgcttcccgcgctcggcctcggtcgacgcttcggccccatcgtctttcgcagcgtcatcgacgattgccgccgcgtcctccttcaacctggcggccgccttcgccctgacctttgcagcgcgcgacgtctgctcgaggggcgtctgcccctcattctcctcaacgtgaggcgtcccggccgctcgcggcttcggtttcgcaggcggcacgtcggtgcgcttccgcggcgcgacgcggccggacgcccctggcttcgaggcgtccgtcgcgggtgcggcagcggtattcggtttgctggttcgtttacgcttcgttgccacgcttgaaggttccctggttcttttcgatagcttcgcctgccgttattccggcgcgatgacctcgacgccgcccatgtagggcaccagcacgtcgggcacgcgcacggtgccgtcgggctgctggtagttctcgatgacggcggccatggtgcgacccaccgccaggccggagccgttcagcgtgtggacgtagcgcgagcccttgaagttctcggggtcgcggtacttgatgttcgcacgacgcgcctggaagtccgtgcagttcgagcacgaggagatctccttgtagccgttgtacgacggcagccacacctcgaggtcatacgtcttggcggcggagaacccgatgtcgcccgtgcacaggctgatcacgcggtacggcaggcccagcagctgcaggatgttctcggcgtcggccaccatggcctccaggtcgtcgaagctctcctcgggcttggcgtacttcaccatctccaccttgtcgaactggtgcacgcggatgagcccgcgcgtgtcgcggccggcgctgcccgcctcctcgcggaagcacggcgtgaacgcgcagtacttcagcggcagctggccggcgtccagaacctcgccggcgtggatgttcgtcagctgcacctcggccgtggggatgaggtacaggccctcggtggtgtggaacaggtcttcctcgaacttcggcagctggccggtgccggtgagcgtctcggcgttggccatggccgggcaccaccattccttgtagccgcgcgacgcgtgcgtgtcggccatgaagttgatgagggcgcgctccagacgggcgcccaggccgcccagcaggatgaagcggctggcggctagcttcaccgcccgctcgaagtcgatgatgcccagctcggggcccagatcccagtgcggcttcatctcgaagccctcggcggcgaagtcgcgcggcgcgccccagcggcgcacttcggggttgtcgtcctcgtcgtcgcccaccggcgtggaatcggccggcatgttcggcgtgcgcagcagcacctcgcgcagggcctcgtcggccgcttcgcgatctttgccgatgacggccagctcgtcgttgatggcgcgcacgcgctgcttggcggcttcggcctcgtccttctggccggcggccatcatctggccgatcgacttcgacgtggcgttgcgctcggcctgcagcgcctcctccttcgcgatggcggcgcggcgagtctcgtcgagctcggagaagcgcgccgcgtcccacgaagcatggcggttcttcatcgcctcggcgacggcttcttggttgtcgcggacgaacttgatgtcgagcatagtcgcgctccttcacgatgggaaacaatagtgcctttagtatacctcacgggcggcgcacctcgtcgttccttcacgcacccggcatgttccgtcgggcggccagccgacgcccttatccttcatagcgctttcgcacgtacttgatgagggtggccagcacgcggcgcatgtcgatgggcttcgacagatgcgcgttcatgccgctggccaacgaggcgctcacgtcttcggcgaaggcgttggccgacatcgcgatgatgggcacggcatccgcatcttcgcgatcgagctcgcggatgcaccgcgtggcctcgtagccgttcatgttgggcatctgcacatccatgagaaccgcgtcgaagtagcctatcttcgacgcctcgaacatgacgcacgcctcggctccgtcccccgctcgctccactaccagccccgcttccgccagcagttcgcaggctatctcggcgttgaggtcgttgtcttcggccagcagaacgcgcagcccctcgaactcggtgcggtcgagcgcacgcggcgcgcccggcataggggcttcgtaagccgaaacgggacggctcgccagccgatcgcgcgcgccgagggatcgcagcgccgccgcgctcgcagcatcgagttcgaggggctgcgcatcgtccgcctcggcgccctcgccctcctcgaacacgatgcgctccgcctctaatgcgatacgcaggttgaacgtcaccgtgaacgtagtgccctgccctttcgtcgactcgacggcgatatcgcccgccatcatggtgacgatgttcttcacgatgggcatgccgaggcccgtgccctgctcgcgcgagcgtccctccatgctgaacggctcgaaaatatgctccttgaactcctctgacatgcctatgccgttgtcggataccgtgaacttcacctggcgataccccatggcggcacccttcgccaccgtggtctcgaaccgaacgcagccgccgcagggcgtgtacttcacggcattcgtcaacaagttcagcaacagttgcttgatgcgccgcgcatcgcccacgaacacggcatcggcgcatggcggagttgtcacgacgaattcctgggcgcgctgttcgcactgcacgcgaacggcggatgccacgtgcgacagcacggcgctgagacggaaaggctcgctggccagggtcatcttgccgttctcgattttcgagatgtccagcacgtcgttgatcagcccgagcagatggtcagatgcgtctcctatctttttcagcgtctcggcaactttctcgcgatcgtccggattgctccgcgcaagctgcagcgttcccagaatcacgttcataggcgtgcggatctcgtggctcatgcgcgagaggaactcggactttgcagcattcgccgcctcggcaacgtccatcgcatccttcatggacaattggatctccttgtcggccgtcacgtcgcgcatgaccacgagcagctgcggcttatcttcgaacgtcagccgcttgaccgagtaagaagcccagcattctttgccggtctgcttgctgcggaacgagaactccccttgctcgaagcccttcgtctcgtccttcctaatgcgatcgaacagagccacgccctcgggagaaagccctatggtggccgccaaccgctcgttttgcagaaaggcgtcaaggcgatagccgatgatgcgttcggccttcgccacaatgggagtgaccttgccgtcggtgggcgaatagaggttcaccgccatatcgatgctgtcggacagcgcctcgtacaactggccgagcatggcgacgttctgttcgcgcaggcggcggcggtacgcgccgaacaccaacagcgccaccaccacaaggcaggcgaagatgatggcgaacaccgcttcgaacgtggtggtgaccacggcagcttcggcacgcacgttctcgacgggcaccacgttgcacacgtaccaatacccgttgtcgaccggcgcgacgcacacataactggatttgccgtctaccgtggccgtgagcagccccgtctgcttgttcgccacaacgtcgcgcagcgtggaaaggtcgctccgcgagcgcgactgcatgaactgcaaggcagcttcggttgagaccgcggcatcggtgttcgaggccggctcgctgtactgagacgcccggtcaaggaagtcgtacagcgacgtgccgatgaacaccggcgtcttggtttcgcccgtgggaggcaccagcacctcgccggtggaaccctcgaacaacatgaagtagccgcggccgtcgaacatatccagctgacgggacatagagaacaagcttaacggcacctgcacgtacagggctccgacttgctgcccatcgatataaagcggcgtttgggcgagacgcacgcgggcgcccgcctcgttggcgaacgtggcagagtacgaactgcgaccctcggacaaagccgtttcgggctgagccagctcgtcgacggaaaatgcggagccatccgcgcgaacgcctcgaccgtccatcccggcaaacgtcgcattcgcaaagccgtggtgctcctggaagctgctgagagccggcgcaaccaacgcaggatcggtagtctgcacggtaaacgcgccgatggcgttctgcgacatgtacatgcggtcggttacgttgctggcggattgctcggtgaacgtgaccacctgctgctcggcgctctgattgagcttcttgtcgataaaagacgttaatccgagcacagcagaaacaatcgccgccacaatggcgacgattgcgattgatgccgttatgcgtcgtttgcgtttgcgcttgtctttgcccatggcgtgttggtgcttgcccttcttcagcgcgcgtaaagaataaaggaatatccaagcctacccgtaccggatcggctcgacatagtatactctaacgctgaactgcaaacactctgtggcaatggtgatgtcacgagttagagtaacgaggtaaccatggatttcggtgcgttgtacgattttctcttcaacacctacgccggcatcggatgcctggtgggaatcggtttggtcgtaagtttgatcgcgtgcgtcatcatggagcgccgcacgcgcaaaacgttcgtcaatcacgagcctgacgaggacgattggtcctttttcgatgacgacgaagacgacaagtaacgtcttcgcgttcgtgccgaacggcgaccagacgatgaggatcgccttttgaaaagctccttgcacgtacgcgcgatcactgctttcgagtctcgccgcgcgcagcttttcagctgcgcgctcctgttttcaagccgtcaattctcccgcacactcaaaccatataattgaacctcatcgcctcttgacaacccggaaaggaagtacttccatgaacgaagccgaaacgcatctctaccagcgcgaaggagcgtacatcccccgcgtcgccgccgtgcatgatctgtgcggctacggcaagtgctcgctgggagttgccattcccgtgctgtccgccgccggctgcgacgtatgccccgtgccgacgggcttgttctcgtcgcacaccgccttccccggctggtacatgcacgacaccaccgagatcctagccgactacctgaacgcatggaagggcatcggcgtggagatagatgccgtgtactccggtttcttgggcgcacccgagcaggtggatcgcattcgcgatctgtacgctatgtatccgaacgctttgcgcgtggtagatcccgtgatggccgaccacggcaaggtctaccccacgtatacgcccgagctgtgctccgccatggccgagctggcttgcggcgccgacatcctcacaccgaacctcaccgaagccgccatcatcctgggcgagcccatcggcgaagattggggcggcaccgacatctccgacgaagaagcgcaccgcctggtagatgccctcgtggcgaagggagcgaagcacgtggtgctcaagggcatccagcgcgagggcgagtcctgcatccgcaacttcgtgggcggcaaggactgcgagacgttcgaagcgcataacgaatacctgccctacatgttgcacggcacgggcgacttgtacgcgtcatgcctgatggccgccgtgatggccggtcgctcgctgcaggaggccgtcgcgttcgcaggcgacttcgtgcacgacgccatgctggtgagcgccgaacagcccgacttcaaagaccgcggcgtcagcttcgagccgctgctgggcaaggtgtgcgagctgctgtaggagacgcacgcaacctgtcaacgcgttgccgaaacggccggcctttgcggcgaaaccgcacgtttcgggcacgacgcatcctccaagatgtcctccgatggggtcgggcgagaaggcgaccgcccgaccaccttctcttcttctacagcttgaaccccagcgattccagcacgtacttgggaaccatgaagcggacggtcttctgggggtccaccatctggcacacttgcacgtcggccaccagcgacagcagcatgaccagctcggcctcgtcgacgccggtgcggtcgtgcagcagatccaccatctcgtgcacggcgcgatcggccgctgcgtcgagagactcggcggacgcgatgatgccgaggtgcgtgccgttctcgataagcggatcaaccaggtgcaggtcgggcagcgcagtgagcgtgaccgtagcgtagccggccacctcggcgcccgacacgctaatctcgccatcgcccatcgccgcgtgcatgtcgccgcagccgaacagcgcgccctccaccgccacggggaagtacagcgtcgcgcccgtggtgatggcggtgttgtccatgttgccgccgtggctgccgggcgttccgcagttcaccggatcgcccgccggggccacgccgatgacgccgatcatggggttaagcgggatggacagctggtcgttccacactagcttgtcgccgtcgatagcgcacaggtgcgtgctccacgcgtcgaagcggtcgccgcacacgccctcgtccttgcccgtgcacgacgcggtttgcgggtcgagctcgatgttctcgatggtcaccttcagcgcgccgccgggcaccgcgccctccacgaacacggggccggttgccgggttgatgcgatcccagtcgatctcgtccagctcgtcctcgggcgtctgcacctggttgccgaagcagtcctgcgtgcggatgcgcaccgtctcgcccgatgccaccgtcagcgccggctccaaatcgcgcgcgaacgcgaacagcacgcgctcgtcgttaagttcctgcatgaggccaccctttctacaagattgtgctgaggttaatagtactacggagggggccggctcggcagcatctcttgtgtcggattcttgctcgaaaaatacgacgagcaatcaagcgggggggggg

SEQ ID NO: 8943 - DNA, 2240 bp, Unknown
  gut microbiota DNA sequence
cgaggacgcacatgagcagcatcgccacgatgggaacgagcgtgaacacgaggttgttgaaggacggcatccaggttgcttgccccgacgcgacccaagcggccaggacgatgcccgccagcagcagagcgctcgccacgagcgtgcccagcacggcgaacgcacgcgtcgggcgcaggcggaaggccgacagcgcacccgtagccgcaatccagctgatcacgatgcaccacagcgccggctgcatcaacagactgccgatgctggcctgcacgtcgagccccgcagagaactgccagttcgtcagcgcgtcccaaccaagcaggctgtgcgacccgcatgcggccaacatcacgctgaccaccagcgagaacgccagcgctccgaacgcgcgcgcaggcggcaggcagaacccggccacgagcggcgtcagctggttgcagccgaacgccccggcaagcggcggcacgagcgtcgcgttcgcatcggcgtcgcccaaacgcccggtgaagtaccaccaggccgccgtcgccgccagcagaacgcatcctgcggcgggagcgtttccggcgatgagcgccgccgataacgcgaagtatgccaacagcgcgccgagatgcggcttcaacgctcccgccaacgtcacgagcgcgaacagcccccagaacagcgggttggcgaatccgctggtctgcggcagattcgcgaacgccacgaacgcgaccgccccgctgcccagcgcgcccgccgcatgcgccgccaccgtgcgctgcagcggcgtgatgcgctcgcggagcggcacatacggaacaggtggcgcggtctcggtttcctcttcctcctcatcgtcggcgtgaccgacgatgacggagagctcgcgcacgccgcgcttcggatcgcccaggaacggctccagctcctccgcgaaatcggcgaccgtcgcgtagcgctcttcccggtcggggtcgagcgcgaagaagatcacgtcgtcgacggcggggtccagctcgtcccagcacagcgacggcagcaccagctccgcatcttcgataacagcttcagcgcgctcgagatcgggtgccagaaacgggttctcgcccgccagcatctcgtacgtcagcgacgccaacgcccattcgtcgcagcgcacgtcgaggttctcctggcgcatctgctccaggggcatgtacccgatggttcctccgccggccgcgccgtagccggacgcgtcggccagcgtggccaggccgaaatcggtgactttcacctggccttgatggttgatcagcacgttgtcgggcttgatgtcgaggtgcagcacctggttggcgtgcgccacctccaacgcgtgagacaccgacgcgaacacggcagccaccacatccaatgtgagacggtcggcgtgacgatgcagcagctcggtgagcgtgacgccttcgacgtactccatgatgaggtaggcggtggactcctgcacctcgaaatcgtacaccgcgacgatgctcgcatccgacagcattgccgcggtgcgcgcctcgtccaagccgggaacgtgcgcgagagaatgtaccagcggcccgtcgcctaccaggtcaaacaccgaagtcgcatccccttcggcttcgtcggcatcgttgaaaacgggatcgtcttcccagggaagcggctcgtgctgcggcgcgcgctgcgcgacggcgttcgcccctggaagcgccgcgcgcgcggcgtccacctcatccagctcgatgcatttgatggccaccttgcgttggatgcgcgtgtcccacgccacccgcacggtgccgaagccgccggctttcgcttcgccgatgggtcgataccggttcaatatgagctgtcgatcgcgtgccatgcgcctattatagggcaggcggccgcagatgcccacgcgagctgccgcaacgcatgccttgcgcaaaaaccttaacccctatgtgcagcaaaatcgagtttttggcagtgatcgctcgcattcgccggctccaaaagcacgcggaagagccctggcaagccgtcagcgaaagaaaccgcaggtcgcgttttgcccatgtcgcttgagaatcaagcaagactgccaaaagctcgattttgctgcacatagcgctgaagaattatgcgacagcgagggcgacaagcagcgagcagcgagcagcgagcagcgagcacatcatagcgcaagcaactgcgcctcgctccgccccaacagccgcgagactcag

SEQ ID NO: 8944 - DNA, 13844 bp, Unknown
  gut microbiota DNA sequence
catcatagcgcaagcaactgcgcctcgctccgccccaacagccgcgagactcagaacgcagcctcgagaggctcgctcacgcgcacgcgctcctggccgcgttcaagctcggtgatcttgagcagcaggggctcctgcgtgccgtcgagcatgcgcaggcgcagggtgaccgcatcgtcgtacacggtatcgagcactttcgcaccgcagtccgacgcaatgcgcacgagctggtcgtacttgccgtacgccgctcgcacttcgatgtccacgcaccgcgacaccaccaccagctccgccgcctcgatgcccgcctgcgtggcctgcgtgtacgcgcgcacgaggccgcccgtgcccagcagcaccccaccgaaatagcgcgtgaccaccgtgatcacgtcggtcagccccgcgtgctggatcacctcgagcgtgggaagccccgccgtcttctgaggctcgccgtcgtcggaatagcgcacgcgcccttgcacgcccgcgccgccctcgcgcagcacgtaggcgtacacgttgtggcgcgccatgcggttggccgcgcggatctcctcgaggaacgccagcgcttcatcctcggtttcgacatgcgccaaactagcgatgaagcggctcttcttctcctcgatctcggcggtcgcccgccccgctatggtggtgtaggaagtcatggggaaagtgtagcagacgcatagcagggcagcaaaaaacccgccgaagcgggtttctcaattcagatggtgcgggcgagaggacttgaacctccatggggttgcccccatacggacctgaaccgtacgcgtctgccaattccgccacgcccgcacaacaaaggcttcttatcgaagcgagtgaacatgatacctgagttcatggatcgtgacaaggagaaattacacgttctttgaatttttccgaaagctacgaaaagccgcgtgcgccgcgggaagcaggagcacggtcgagacggcaagcagaacgaagtcgatcgggttgccggtaacgtaggtttgctgcaggtttcccgccagcagctgcgggcccgcgtacaggaagttgaacgcggcgtgcacggcgacgagcgtccacaagttgcgcgttccgaagtacatcgctgccatgaacaggccgaacaaagcggcttgcacgggtttgcacgccgcctgcgcaaccgcgacgagatcggcggcatcgacggccgaggcaacttcgcccagcgacacgtgcagcgcgccgaacagcacggccgacacgagagccgctcgcagcatgccgcgtcggcctcctcccaacgccggagcgaacgcatcgagcgccagcacccggaagacgccctcctcgaacacggcggtcagcaggcaaagcgcgaccaccagcatcacgtgcaacggggaggcgtccaaagcggctccttgcggttgcacgaccagcgatgcgagtcccgcagccaaacccacggccagcacgtacaaggcccacgcgagcaaaccgcgcccaccgcaaaggcgcggcgcgcgcaaagcccgcggccgcgacgccgccacagccgcaagcgcgaccgcagccagcgccgcgccctgcgcgagcgacccggcgagggtgtcgccgggaaccagcgagaagcagcacgccgtagccaccaacgccgccacgaacacggcggcgcgatggttgcgcgcgcaaccgccgtcctcaagccccatcgtggaattcgcgcgcgtcacgcagcctcatcgccctttgccatcgaatacatcgtatgcaggcagtatactggaacgccatgagcaccacgtcgagcatatcagcagcttccccgaagcggggcgtttcctcgttcacgctcaaagtcgtggccatcgtcggcatgacgttcaatcacgcctgctacattttctatccctacctgcccgccgaggcgctgctcctgctgttcgggttcggtgggctcaccttccccatcatggcgtttctgctggtggaaggctatcatcatacctcgaacatcaagcggtacgccggtcggttgctggcgttcgcgctcgtctcgcaggtgccgtacggcctgtttctggcgcacaacctcaacgtgctgttcaccctgctcatcggcctgggaattctgtacttgtacgacactatggaaagccgcggcggattctggcttgctgccgcagcactggtaacggccagcgcgctgtgcgactgggggatcatcgggccgctcatgatcctcatgatgcgcgcgatccccgaccggcgccaacgcatcgtgttgcccctgctcgtgcccatcctgggcaacggcctgccggcgctctccgactacatggcagcgttcgatccagcgctgctgccgttcgcgctgtatccgctgctgggttgcacggccaccatcccgctgctgctcgcctacaacggctcgcgcggccgcccgatgaagtggctgttctacgcatactaccccgcgcatattctggtgctggggttggcgaaggggttgctgctgggcgattgggggctggggctgtagaggctgacgccgcacgggatccttcgactccggcgctgcgcgtctccgctcaggatgacagaggacggctacttccagtcgcttcccaacaccacgaggaaatcgctctcgaacagatacgatccgtcgtttttcatggcttttccaacgccaagagcatccgcgatctcctgcgcgcgcgatgccttcgcctcatcgtcgtaaatcaccagcgtcttagggtagtcgaagctgtcggcattgcccgactccaccgaatagcccagttcctcgatgcgctcggacgcctcggtgcctgcgccggtgatgccgttgccgttgcgcaccgccacgctgcccgtgcgcttcgcttttttctgcgtgccgtcctcgttcgtgctggaatgcgtctggccgctgccggtggttgccagcacggtgttcgacatctcgtcgacgatgtcctcgtcggtgggcggaaggccctggttaacgcgagtcatcattttcttccattcgtcgacgttgttgatttcgtaccagacgtcgttgatgtacttggacgtagtcggctccatggccgaatagatgtcggtggccgggtcgaggccctgcatcgtctgcgcgaggccgatgatgtcggaaatctcgagatccgtagtcacgtattgggaaagcgcctggacggtggatgccatcgtggccacgtcggccgacaggattttcttcgcgatggcggacaggacgagacgctggttcgctgcacggtaggagtcgccgtcgccgtactcgtcgtaggcatggcgcgaacgacacaggatgagcgcctgatcgccgctcagcgtctgcagcccggcatccagatggccgccggcatcctcgtcgtcgatctccatcggaacatccacttcgacgccgcccagcgcatcgacaatgtctttgaagccgtcgaagttgatctcggcataatgggaaatgggcacacccgccaacttcgatacggttttcaccgtgagagcggctccgccgatggcatgtgcagcgttcagcttgttctgcccgtattcccccatgtctaccagggtatcgcggtggatggagacgagcgtcgccttcttgtccaccgggtcgatgcgcgcgaggatgatgctgtcgctgcggaactgatcgccggcgaattccgccgacgcttcgcggtcgttcgacccgtcggttcccatgagcaggatatagaacggctcgttcgccaaatcggtttccacgagcgcattgcgcagctcggcgctgacgccgtcgtgaaggtttcccgagagtacgttgtagtacgcgaacgcagcccccgccccgcccagcaccagcacgcccacaacggcaagcgcgataaccagcgtgcggcgacgagagcgtgcgcgcgtgcgctcgtaatcggctcgcgacacgcggcgcggcgtgggagcggattcgccttgaacgctggggcgacgacccggttcagtctgacgggagcggccgtacgaggagcgggaaaaacgctcggtgctcgcagggcgccgttgagggctgcgtttgttgtccattgcgccattttcgcggcagcgctctacccgcgcaaccgcctccatcggtttactaggaaaagcccacagggcagcgcagcggaagcggtgtcatcccgagcgagcaccaggttgacgccgcaccggcgagcttcccgctacctgtgcactcccagcttcttgaccatggcgtcgttcgcatcttgctcgacggcgtcgtcgagcggcgccaactcgatggccggctggcccgttcgcgatgcgaaacgttggagagcgcgtgcgagcaaatcgtccgcaacctcggggttcttcgccagcagcgggccatgcagatacgtgcccaccacgttcttgtagcgcacgccgtcctgcttgtcggcatcgttgttgccgtgccccgtggaagacgccacagcgccgaagggctcgacgcccgcgccgaggtgcgtgcgtcccgcatggttctcgtaacccacgacagggcgcttcgccagcggcgaggtcagcacgatgttgtcgatgagccggtcgccggagccgcccgccgcacgctcggtggtcatgtcgacgatgcccaggccctgcaccacctcgtcgcccagcagccactcgtggccgagaatctggtagccgccgcagatggccagcaagacgccgccgtcctccacgtaggcatgcagctgctcgcgcatgttcatgagctcggccgacgccaggcgctgctcgcggtcggggccgcctcccagcatgacgaggtcgacgccggagaggtcgatggcctggccgtggttgacgcgcttgacctccacggggatgccgcgccagcgcaggcgctgttcgaggatgcgcacgttgccaccgtccccgtacaggttgagcaggtcggggaagaggtgcgcgatggtgagggaggcggcgggcgcaggagtctccccctctcctggcgcggagacggaacggtcgcccccacagccatcgcccgcgccatgggggcgggggaagccctcatccgtgccatgcgggttggcggaatcctcggccgcggcgcccgccgcgccgtggctggtcagcaccgcatgcaccgggggcaatgcggtgtagttcgcgatcaggtacgcgttttcttcggccgacaggctggctatgcgcgccagcaggtcctcggcatccgcaaccacctgcgattcgatgccggcatacttcaagcgcacctgcatgtcgttcgcgcgcaagccgcccgcgaacacggtgagcttggccggatcgtccgccagctcctcgaagtcgatatcccacagccacgacacgtcgcggccatcgccctccttgtcgttcacgaagaaggctaccaccttgtcacccgcgtcctgcgccacgatcttgaggttctgattgaagccggtggggttcttcgcgaggttcagcagcacgcgccgaccggcgatgtcaaacgtttgcaggcgcccgttctgcgggtcgaaggcgtcgatggccttctgcaacgcgggaagcgggcaaccggcgaggccggccgcggcagcggttgccagcaagttgtacaccatgtacgcgccggtgtacggcgcggcgatcgaacccgcggctgccccctcgccgtcccgacgcacgtcgaacgacaacccgttcaggcccagcttcacgcccgttgccgcgaagtccagggcggaacgcgcgaacccgcaggtgggacacgagaacgatcccagttgcccgtactggcgatagtcgtattccaacatggacgagcagcgctggcacatctgcgcgtcggccaccgaattctgcggcagccccaggtcctcgtccacgccgaacgcgatggaggggttcgccgcgcgctcggcgatgcggacgcacagcgggtcgtcggcgttgtacaccagcaccgtgtccggcgacttctccagcgcgcccacgatgctgtcctggatgcggtcgatctcgcccacgcggtccagctggtcgcggaacaggttgagcagcaccacgtaggtggcctgcagctgcggcaggatcttcgccagccacagctcgtcgcactcgaacacgccccaatccgacgggccggcgtgcagcagcgacgtcgccacgcccgagtccaggttcgcgccggtccggttgcacaccacgcgctggcccgccagctcaagcgcgtcggccagcaggttcgtcaccgtggtctttccgttcgttccaaccacgcacaccgagccctgctccagcttcggcgcgaggtcggcaatgagacgcggatccacgtacagcgcgattttgcccgggaagttcgcggcgggacggcggaacacgtttttgagaccccacgttgaaacggcgctgacggcgcgcgcgccggcgaactgcaaacccataggtcattcctttcgatcacgttgcgttcagtatagtggttccaccgcaccccgcacgccgcccccgcccgcactgacacccgccctccatacaaatttcaggacgagcagcgccagcgcaaagctcactcgtcacccctcgtcaacctaacagccgcttcaaccaaaagaagaaccgcgccccgatttatcctcaactaagcttgatgccgctatactgatgagataaggtgattgtgcagccgtcggccgaagcacgcggccgcatgcacccggcgacccaggaaggttatgcccgaacgcaattacgacgacgcttttttccagcattcgaatgacgagcgagcttcccgtcgttccgatgagtcgacttctccaggttcacgaccacaccagtacaacaccaggcaaaccgcacgttccactgccgcccgctcccgcctgaacgcaacacagcagcaaccgcgcaatgcggcatcctaccagaaaccaggacgttaccatcgaccgccgggccccgaacaaccgaggcggcgcgctgttggaatcattgccagcctgctcgtagtggccgctttcgccgttggagggtacttcgtcgtgcagagcctgcctgcctccataaccctcaatggagccaacctggaagtaggcggtcacaagacgttggaagacgcgctgcgcgccagcggcatcaagccgaaacccggcgatttcgttgccgtggacggctcggtgatcgaagcaggaaagggcgagccgtttcacgccaccgtcaacggcgaagtcgctaccgacatggatacgaagctgaacaacggcgacgtggtcgaactgggcgacggcagcgccatcgaagagccgagcgaaaccgccgaggaaagcatcccctactcgatcgaagaggaagggcgcggacctatccacgtgctcgaggggcaaggcgccgacggattgaagcgcacgaaaaccggctcggtctccggcctgacgacggaagaagtcgtgcaggagccttccaacgtggtgcgccgaaacgtttcgccgcaggtaggcgaggacaaagtggtggcactcacgttcgacgacggcccctggcccgaatccaccgccgcagtgctcgacgtgctggccgaccaaggggcgaaggccacattcttcaccgtgggcaatcgcatcgacggagaaggcgtcgacctcgtaaagcgcgcagcagccgaaggccatcagatatgctcgcactcgttcgaccacgcggcgggcgacggtcaaagcgtgaacctcggctacatgacgcctgaggatcaggtcgccgaagtgcagaagggctacgaagccatcgaagccgccaccggcgccgaagccagccatgtattccgcacgccgggaggcaactacggcgaaggcgtcatgcgcaatgtcgggccgctgatcagcgcggaaatcggctggaacatcgactcgcaagactggcgcaagcccggagccgccgccatcgccaaccaggtgaaaaacgcctggccgggcgccatcgtgctcatgcacgacggaggcggcgaccgatcgcaaacggtcgaggcgctcaaagacgcgctcccctatctcaagtcgcagggctaccgcttcgtcaccatggacgagctgctcggctatccgctctcctaaacctcgcttctgccgctcgccggacgaaggcctcctttgatcttcttcgggatcgttcgccgcgagacgtcgtgcctttggcgacaaacatcatcgaaaccacctgtttcctcaacatagacattgctatagtaaagtacgtgggccgcgcatgggtgcgaccgtttcagaaagaggggtcggcggtgcttcatggacgttagccaaatcgttgccgttgctgtgttcgtcgtggtcatgatcaccatcatgaccgagaagctgcaccggtcgctcgcggccatcacgggcgcgatgatcgtgttggccctgcatgtcatgccgttcgacgcggccatggagcacatcgacttcaataccctgggcgtgctgctgggcatgatgctgttcgtgtcggtagtgaagctgtcgggtgtgttcgagttccttgccatcaagtgcgcacgacttgcaaaaggcgacccttggaagatcatgctactgttcgtgctgctcacggccgtactttcagcattcctggacaacgtgaccaccgtgctgctcatcgggcccatgacgctgaccgtatgcaaactgctcgacgtcaaccccatcccgttcttcatgaccgagatactcgcgtcgaacatcggaggcaccgcaacgctcatcggcgatccgcccaacatcatgatcggctcggcagccggatactcgttcttcgacttcatcctgtacgatgcgcccgccgtggcgattatcctcgtcgcgatcctcggcgtgttctacgcgctatacggccgcaagatgaacgtggacgacgagcacaaggcccgcatcatggagctggacgagcacgcgcagatcaagaaccggcggctgctgaagcaaagcgtggtgatgaccgccctggtggtggtcgggttcatggcgcatggcgcgttggggctggaatcgtgcattatcgcgctaggcgccgcgggcatcatcatgctgatctcgggcgaaagcatcgaggaagcgctgtcgaacgtggagtggaccacgctgtcgttcttcgccggcctgttcgtcatcgtgggcgcgctggccgagaccggcgtcatcggcatgctggcgaacgggttgatcgacgcaaccggcggcaacgtgttcatcaccatgctggtgctgctcatcggctcggccgtgatctccagcttcctggacaacatcccgttcgtggccacgatgatccccatcctgctggccatggaatccaccggcatggacgtcacgccgctgtggtgggccgtgtcgctgggcgcctgcctgggcggcaacggcacgctcatcggcgccagcgccaacgtggtgctgtccgacatcagcaagaagcacgggtacgagatcacgttcgcgaagttcttcaagactggcttccccatcatgctgctcaccattttgatagccggcgtatacctggtggtgcgcttccctccagcgtaagcgcacgggcgcgaggcgcaaccgacacgagcgaaaaactcgcctcaaccccttgcaggagcgcgggggttcggatatactgcttactcgcgcttcgcttagaagccgtatgccaacgtggctcagctggtagagcaacgcactcgtaatgcgtaggtcagcggttcgaatccgctcgttggctccagaaaaagaatgcaggtcaggcgatgagagttgcctgacctgcttttgtttccggagtttttctttcagcgccctggaaggagatgagctcatgtccaaagcgaacggcagcgaggcgctcgtcgctgaacagctctccaaagatcgcgccgtcatcgagctatgcagacgatcgctcgtcaaccatttcgtagtgcgggacatggatgccgccttagcttatatggccgacgatgttgaatggctgggtccgttcagctgtcaaaccgcctcggacaagaagaccatggaagacatcctgcgacccgagtacagcatacggctcgcattggcagacgagcgttggcgcgcccgtaaacgcgccaacacctggatcgtctcggcacgctatacgctgctcgtcgtgtcggccggcggagagcgcagcatgccgttcaagcaacatgctacctacgtatgggcccctacgccggacggacctcgcatcgtgcatctgcacgtgtcgaacgccaccgatgcgaacccgctcttgccttcgctcgatcctggccagaacgccatcgaattcctgtacgagcacttcgatgcccagggatccggcgccggcaagctcagcttccgagacacggacggagacgttcacgttctgcatcccaacgaactgtacgctatagaatccgacggtccacgctgcgtcatcaggcatgcgcacggaaagttcgcggtgcgaggcgccttggcaagcctggaaaaggaactgcctgcaaaggacttccttcgcttgcaccgcagttgtctggtgcatcgcgggcgcatcgccagcatcgaggatcatcaggcgctgctcgacgacggctcctcctaccccatcgcggagcgacgcagccgggagatcaagcaatcgttcgaactgaccttgtagcacacctcgtcgcgcgacgccgacctctcccgcgcaacatgccagagcaatctgccgaccgctgcgttcgttgcgtttgaacgggcattcgttctcaggggatcgctctttgccggcggttcgatctataatccagtggtatatggggatttcggaataggaatgttccgcaatgcgatcggaagggcggcgattcgatcatgatagacgacgaaaagctcgccgcctgtttttccgacaaaggtatggagcttgacgatgacgacctcgaccaggcatcgggcggtattagctgccccgaccagatcgtcttcttctgcaccagatgccatgaagcgaaaacggtcacgaaaaccagcagcgcgctgatatgccccgattgcggtacgccgttcggagcctcaacttctccgaatcccgatccaacgtagggagaaccaagggacggtaccggcaatggcaagagcgacgggcgttgagaagccgtatgacaagctcttccaccgatgggactcttcgaaagaggtcgttcgtttcgtttgaaggggcgttcgttccgcgcatctgaaaatcgtcctgctacccggttacaatctcgcatgcttcattatttcgaccctgccaatgaaagaggaaccgcatgtcgacgatacgcacgtttgcacgatcccatccgctgctcgtaaccgccgtcgggctcgccatcggactggccgtgatctggttcgtgccatccgacgggtctttggcgaacatgatgttcattcgcctgggattgaccatcgtcatgttcgccatcatggccgtcgcggcaggatgcaacatcatcgtgcccaacgccaaaagcatcggcctctcgttcaagaagtctatctacccgttggtcgtagcgctggtcatgggcgtgttcgttctgctcggcaccgcaatgaaaaacgaggggatggtgtccgactggcccttgcagctggcgctggtcatcatgctctgcctgcttgtgggcacgttcgaagagggcttgttccgcggcatcgttttcagcgggctgctggctcgtttcggcgagacgcgtcgaggtctgatcggagccgtgatagtctcatcgctgatcttcggcttcgtccatgtgacgccgtccatcatgaacggccaagtggtcaccggtttggacatggcccaagcggcgctcaaaaccctgcaagccggcatcctgggcgcgtttctggccgccctgttcctgaaaacgcgtaacatctggggcatcgcgctggttcatggcctcaacgaccttttcgtgatgctgggcgacgcgcttttttccggcaccacgtccaccacgtacgtcaacaacgacgcgatgatggccagcgcatcagtcgtcatgtacggggtgttcttcctgctgtacatccccatcatcgtctcgacggtgcgcatgctcaagcaagtcgaagtcccctgcaaaggcccctttgccgataggtggtcttgagcgactttgaatccgcgcgaagccccaacggcttcgcgcgctatctttactcgcgaaaacgaccgcctttccacctaaggttcacgctctttctcgcgttgctgcgctaactcggatcaccgtccttcttcgtcctccttacgcttccgctaacggaataagcgccgagcgttaccggtggtactatcgccggacgacccgaccgaaggcaaccggaggagcgcgccatgaaaccttactacgaaggctggtacatgaaacagcagcaaggcgaagacgtgctggccgtgataccggggcgcgcgcaggactccgcattcatccaggtggtctccaaccgcggctcgcgcttcttgccgtaccccctggaggcgttcgaccgcaccgacggcagcatgcgaatcggcgacagcttgttcacgccgtacggaatgcagctgcgcatcgacgaaccggatttcgagttggtaggaagcgttcgctacgatcatctgctgccgctgcgctcggacatcatggggccgttcgcctacgtgcccatggaaacgaagcataccgtgttcagcatgcggcaccaggtgaccggatcgatccgcctcaacggtgacgcgctagatattcgcaacggcatcggctatatggaaggcgaccgcggccacacgtttccccgcagctatttctggatgcagtgcctcgacgttcgacaagacgcctccgtcatgctggccatcgccgaaataccgctgggtccgatccgcttcaccggctgtatcggcatagtcgcgctcggcgagacggaataccgcttcgccacgtaccggggcgtgcgcatcgtggagcatacgcccacgatggcggaagtgcggcagggcgatatgagcctgcgggtggaggtgcttgacgatcgcgggcacaagctgcaagcacccgcccagggtctgatggatcgcacgattcacgaaagcccttccgtacccgcgcgtatccgcttcgtcaagggcggcgaacctcttttggacgagatggagtcccaaacaagctacgaattcgtttcccccgcttcggcgtagggaccggacgccccctttgcgtgcctcgcggagccgatccccgccgcgttcgcccgcacgacgctggtatactggacgtatcgagcaaccttcgcgagagaggatgcaccatgctgtacgacaatattatgatcccctacgacggatcggcttcgtccaaagcagcccttgcggaagcggtgcggttcgcgaaggacgaccccggactgacccttcgcatcgtccagatcattgacaccgatcagcttgccatcgacaagctggaagccgaagggcgcgacgaacagaccgtcgcctcgtcggcgatgctccagaaaacctacgaggaggtcaccgaggaagccagcaaggcgctgcatcgcgaaatagacccgctgctgagcggcctcatgaacaaagtgtacatcgagcttttgcaggaaacgcagccgggcgggcaaatcgtgacgtacgccatcgacaacttgtgcgacctcatcgtcatgggctcgcggggtctgggcgcgttgcgcggcattttgggcagcgtcagcagctacgtgctgcgcaacgccgacgttccggtg

SEQ ID NO: 8945 - DNA, 516 bp, Unknown
  gut microbiota DNA sequence
cgataccgaccagcttgccatcgacaagctggaagccgaaggacgcgacgaacagaccgtcgcttcatcggcgatgctccagaaaacctacgaagaggttaccgaagaggccagcaaggcgctgcatcgcgaaatcgaccctctgctgagcgggctcatgaacaaggtgtacatcgaactgctgcaggaaacgcaaaccggcggacagatcgtgacgtacgccatcgacaacttgtgcgacctcatcgtcatgggctcgcgaggtctgggcgcgttgcgcggcattttgggcagcgtcagcagctacgtgctgcgcaacgccgacgttccggtgctcatcgtcaaggaaggcacgaacgagtaggacgagctgtcatcccgagcgagcggcgcccaggggctgttgatggtttcttgacattctcgtgctatgctcctccgtatatgcgcggcaagacgaatgcggaggagcgagaagaacgtgagcgaacagaaagcggccatcgagcggaacgg

SEQ ID NO: 8946 - DNA, 362 bp, Unknown
  gut microbiota DNA sequence
tcgggggctgttgatggtttcttgacattctcgtgctatgctccttcgcatgcgcggcaagacgaatgcggaggagcgagaagaacgtgagcgaacagaaagcggccatcgagcggaacggcgaggccacgctgctggtggtcgacgacgagccggaaatcgtcgcgcttttggacgagtacttcacgggtttaggctaccgcgtgctcaccgccgaagacggggcaaccgcgctcaaacgcgccgagcagagccccgacctcatcgtgctggacgtgggcatgccgctcatggacggctacgccgtgtgccgccgcctacgcgagcatctcacctgccctatcctgtttctcaccgcacgc

SEQ ID NO: 8947 - DNA, 721 bp, Unknown
  gut microbiota DNA sequence
acagagccccgacctcatcgtgctggacgtgggcatgccgcttatggacggctacgccgtgtgccgccgcctacgcgagcatctcacctgccctatcctgtttctcaccgcacgcgtcgaggacgtcgacgcgctggagggctttgaagccggtgccgacgactacgtgctgaaaccgttctcgttagccgtgctgggagcgcgcgtgaaggcgcatcttgcccgcgacaaccgccagcacgtgcgcgccgaagtacgcttcgacggcgacatcgccatcgactaccgctcgcgcaccgtgacagcggccggacggccggtggagctgacgcggcgcgagttcgacatcgtcgcattcctgtcgaagcatcccggccaagtgttcgatcgcgaccgcatccacgagcgcgtgggcggttgggaaaacgagagtgattcgcaggtggtgaccgagcacatccggcgcatccgcaagaagctggccgcagcgggcgccgaacccgacccggtggaaacggtatggggcatggggtaccgatggcacgcgtaaggggcgccgagcgtttcgacgccttgcgggcgcgttggcaccacgcgtcgctcaaaacctcgttcatggtgtacatgctgggattcctgctgctggcgttggtgatgtccacggtgacggccgggatgttcagcgggttgcagcaccgggtgatcgcagacgcgtacgaaa

SEQ ID NO: 8948 - DNA, 512 bp, Unknown
  gut microbiota DNA sequence
gcgcgtaaggggcgccgaacgcctcgacgccttgcgggcgcgttggcaccacgcgtcgctcaaaacgtcgttcatggtgtacatgctggggttcttgctgctggcgctggtgatgtccacggtgacggccgggatgttcagcgggttgcagcaccgggtgatcgcagacgcgtacgaaatctcggggctctacctctacgatgcgcacaaccggacgctcgttcccgcgcgcgccgtggatatcgacgagaacggcagcagcgtgttcgttcaaaccgtgcgcggcgagatgaccgagatgccgctgacagacttgtcgtcgctcgtggagatcactgacgcgagcgattaccagtactcgccggggacggcgtatctgtatggttccgccaacgacgacgcactcagcgtcgaaacgcccgaagcgcccgaccaaaccgagctcacgcccgccgagctgcccgcctatgacgcgaaagcgcgcgatcggttcgatgcctggctggctgcca

SEQ ID NO: 8949 - DNA, 4958 bp, Unknown
  gut microbiota DNA sequence
cgacgcgagcgattaccagtattcgccggggacggcgtatctgtacggttccgccaacgacgacgcactcagcgtcgaaacgcccgaagcgcccgaccaagccaagctcacgcccgccgagctgcccgcctatgacgcgaaagcgcgcgatcggttcgatgcctggctggctgccaaccctgacagcccctacacgtcgttcttcgacggagacagccaggacggcaacaccgtcggactgctcacttccgcagtgggttactacgtgaacacgcccccatcggaggaggcgcaggcgctgtcctcggcactcgagctgctaacgttcctcatgttcccgctgtggttcggcctatgcatcttcgcagcggcgcggcgcttcttcggcaagcgcctccaacctggattcgatgtgctcgaccgagcagcgtccaacatcgccgagcagaacctcgagttctccgtgtcgtacgatcgagacgacgagctgggccatctagcttcgtcgttcgaagccatgcgcgcctcgttggccgaatcgcagcgcgcgctgtggcgcacggccgaggagcgcaagcgcctgaacgccgcgttcgcgcacgacctgcgcacgccgctcaccatcctcaagggcaagatcgagctgctggacgcgcacgtgcagtccggcaacgtgcccgccgatcgcctgacggcctccgtcgcctcgctggccgcgcaggtggaacgccttgagcgctacgtcgccgctatgagcgggctgcaaaagctggaagaccgcgccgtcgttgcgcgcccgaccaggttcgacagcgtggcgggcatggtggaggacgccggaacggggcttgctgcgcacgccgaccggaccttcgcgctgtcggtgagcgcacgttgcgaccgcgagcggccagagctatgcgtggatcaggccatcgtgggcgaggtggccgagaacctgctgaacaacgccatgcgctatgcgtcgtcccaagtggacgctcgcctcgacgtgcgtgacggcgcgctggttctcatggtggaagacgacgggccgggcttttcgaacgccgcgctcgaacgcggttgcgcgcccttcttcagcgaggtgccctcggcagagcatttcggcctggggctgaacatcgcgtcgctcatgtgcgagaagcacggcggcggcgtaacgctggagaaccgcgaggggggaggcgcgcgcgtggtcgcgcgattctccctggatttctgcgccgagtagacagtcggtagatatttgctccgtaccatcggaagcgtaccgaacgcacccgagaaacggagcatcccatggaagacaccgccccgctgcgaacttcgaccgtcaccctgcccccgcttcctcgcacgcatggcaacgctcccgataacgcgacgatcgcgacggaccggcgttccctgctgaagaagcgcgctgccgtgatcgtcgggctgctggccctgacggcggggctcgcagggttctgcgtcctctacgggccggagctgcttgccttcgttgccgacgctccgcgcttccgcgcctgggtggacgaaaccggctggatcagccgcatcgtgttcgtgctggccaacatggcgcaggtcgtgttcgcgttcctgcccggcgaaccgcttgagctgggagcgggctacgcgttcggcttctgggaaggcacgctgtggtgcctcgtggccagcgccttgggaaccgcggcggtcatggcgctcgtccgcgcattcggaatccgcatcgtcggcttgttcttctcgcccgacaagatcacgtcgatgcgctggctgcgcgactcccgacgtttcgaaatgctgctgttcctgtgctttctcattcccgggacgccgaaagacctgctcacctatgtggccggactgggatctagctccatcggacgcatcgtggccatcaccacggtaggtcgcatcccctccatcgtctcgtccacgctggcggcgggcgcgttcggcgacggcaattacctgggggcggcgctcgtgatcgcactgacggcggtgctggccgcggcgggcgtgatagcgtaccggcagctggcgaagcgcagcgacgcggccgaggatgcggcctctagcgctgacgcaatgggagcctaggcgcgcgccgagcgccactccgtcacgggatcgtgctccggcggtgacctgggcgcatcccgcttccctccgcacgcgcgtaagatgagccatcgtagcgcggaaaccggatcgaagggaggcgtcgtgagcatcgggtacgcatcgaagacgctggcagcgcccggcgcgcgcatgcaatcggtggtgcagcggctggcgacgcccgaccgcctggcgcaggcgatcgacggcaacctgcgcgcgctggacgccgccctcgactaccaggcgaaaaacggcatccacctgttccgcatcagctcggacgtgatccccttcgggtcgagccccgtgaacgcgctcgattggatgcgcgacttcgagccgcatctggccgcgctcgggcgcaaggcgcggcgccatggcatccggctgagcatgcaccccggccagtacaccgtgttgaactcgcccgatgccgacgtggtggagcgggcgaagctcgacctggcataccacgcggcgttcctcgacgcgctcgggatggatgcgagcggaaagatcgtgctgcacgtgggcggcgcgtacggcgacaagcctcgcgcgctcgagcggttcgccaacgcgtacgcgacgctgcccctcgcggtgcgccgacggctcgtcatcgagaacgacgaccggctgttcaccgcccaggacgtgttggcgctcagccgtgcaaccggagcgcccatggtgttcgacacgctgcatcacgagctgaaccgcgagcccgacgcgccggactggcgagcgctgttggacgaggcggccgccacctggaagcccgaggacggcgcgcagaagatgcactacgcgcagcaagcccctggtcgcaggccgggcagccacaccgacaccatcgagcttgcgccctttctcgcgttctaccgatcgctcgcagagcatcggaccgacagctccttcggcatgcccgacatcatgctggaagtgaaggacaagaacctctccgccatcaaatgcatcctctgcaccagcgagcacggccgcttcagccggctcgaacgcgaatgggcgcgctacaagtacgccgtgctcgaacacgaccaggcagcctacctcgccctgcgggcgctgctcaaggacaagcgcacgtggccgaccgttccgttctacgagatagtcgaacgcgcgctggccgcacctgtggaaccgggatcgttccgcaacgccgcgcagcacgtatggggctacgtggcgccgcacgccaccgcgcgcgagcacgcggcgttcgagcgccttctggagcacgacgatcgccccgccgcgaagcgcaagctgcacgccctcgccgagaagtacgaccagccttacctgttggagtcctactacttcgtgctgtagccttctttcgacttgcgcttgcgaggatgttttacgcgaagcatcggacgacgccccttcgtcgtgccctgacggcgatgcgaggccccgccctttcctcagccgcagcgaacaagggcgcttgagcgcttcgctcgcttgggcaaacaccgccgagtaggttcgtttataacgtgtagttattgagaataattatcaataataatggtatcgttacatttcaatcctgattatcggagtatcatatcgggcagagagaagacctgaaccaccgccgatcacggcggcgcgacgaacatgaaagagagggatcgtatgcccagtttccccaatccgtttgcaggcaacgtcgaccgcaagatgacgaacaccgagctcatgcaggcgctccgtatcgacatcgcgggcgagcttgaagccatcttcctgtacgacgcccactatcaggcaaccgacgacccggccgccaaggccgtgctggccgacatccgcgacgaggagaaggcccacatgggcgagctcatcacgatgatgcgccacctcgaccccacggagacggagttcttcctggaaggcgaaggcgaagtgcaggagaagctggccgagctgggcatcaagaccgacggcgaaatcgccccggcgcccgcggagcccgctcccgcccccaccgtcggcgacctttcctaacgcaaccgacttccagcgcgcagccgccgaatgtttcacgtgaaacattcgtacgtgctgccgccttctcaagaaaggagtccctcatggactatctcgctcgcgaatcggccgacctttcggacggcctgtggaaccgcatcgacgaaaccgttatcggcaccgcccgcgcccagctgacctgccgtcgattcctcaaggtgttcggcccgctgggcgccggcgtgaccaccgtagccgtcgacggcgtgaacaaggaagaggtgcttgaggacggcatcggccgcatcgtcggccgcacgcagctcgagctgccgctgttctacgaggacttcaccctgctcagccgcgacatggagtatgccgcgcagaccggctacccgctggatctgtccgtggccatcgccgccgccaagaaggcgtcgcgccgcgaggacgacctcatcctcaacggcagcaaggcgctgggcaccgacggcttgctcacggtgaaagggtcgtcgaaaatcaagaagagcgactggtcgcagggcgaaaacagcttcgccgatatcaccgccggcgtcgcccagctagccaagaccggctacttgggccgctacgcgctcgtggtgtcgcccgacctgttcctcgacttgcagcgcctgcagccgaacaccggtctgctggagatcgaccgcatcaagaagctcatcggcgacaacgtgtacatgaccagcgtcatgggtcccggcaaggcc

SEQ ID NO: 8950 - DNA, 14153 bp, Unknown
  gut microbiota DNA sequence
aaccagctgacctgccgccgattcctcaaggtgttcggcccgctgggcgccggtgtgaccaccgtggccgtcgacggcgtgaacaaggaagaggtgcttgaggacggcatcggccgcatcgtcggccgcacgcagcttgaactgccgttgttctacgaggacttcaccctgctcagccgcgacatggagtacgccgcccagaccggctacccgctggatctgtccgtggccatcgccgccgccaagaaggcgtcgcgccgcgaggacgacctcatcctcaacggcagcaaggcgctgggcaccgacggcctgctcacggtgaagggatcgtcaaaaatcaagaagagcgactggtcgcagggcgagaacagctttgccgacatcaccgccggcgtcgcccagctggccaagaccggctacctgggccgctacgccctcgtggtgtcgcccgacctgttcctcgacctgcagcgcttgcagccgaacaccggcctgcttgagatcgaccgcatcaagaagctcatcggcgacaacgtgtacatgaccagcgtcatgggtcccggcaaggccgtgctcgtgtgcgccgagcccgagtacctggatcttgccatcggcctggatctgtcggttggctacctggagctcgcggacttcaaccacacgttccgtatcatggaaacagccgccctccgcgtgaaggaccccgccgccatcgtggtattcgcgtaacgccgagcgcgtccataaagcatttgagagcggcctgcatttgatgcgggtcgctcgtttttgttgtcacgttaactcattccgctgttttacctataatagagttaaatttgtagtataattttaactctattagagtaaatcgatcgaatcgagttaaagaaggctacacatggcgtatcgtgatctaagaaaaatcttccacggttatcccaagacgtacgctaccgaatacgagtccaggttcaattccgaccagtcgcataaagtcggtttcgacgtatccgggagccctgcgtttttcgtcatgactccagagatctaccaggcggcaatcgatgctgcaaaaatcgacaaagagatctaccagctcattctctctttgcctgggaaagcgatacaaagctatcgggagtcgaaccttatcgatgaaatcgttatcaccaacgaaatcgaaggcgtacgatctacaaggcgcgaaatcggagacgtcctcgaacgactggaagaaaacgacaaacgtggacgcttccacggtcttgttcaaaaataccaaatgctgagccgcgaggaagacatcgcaatctgcacctgcgcagatgtcagaagcatatacgacgacttggtcttggacgaggttgcacgcgacaatccggatcacgttcccgacggaaccctcttcagaaaaggccctgtatcagtatgcgacgccaccggtatccccattcacaagggaatggagccagaatcgaagatcactctttgccttgagaaagcgctcgatattctgaatgatacggatatcgaacctatcgctcgcgtatcgctgttccactttcttttcggctacatccaccccttttacgacggaaacggcagaacaaacagatttatcagcagttatgttttgtcgaaagagtacgagccattgattggattccggctttcttatgccgtaaagcaggacattgagaaatactatagagggtacaccgtctgcgaacaccccttgaacaagggtgatctgaccccgttcgtgatagcattttcggaagtaatcgtttccgccatggaaagcatgcgcaattccctgagggagctccgaaacatgctcgaagagggcgagaggatggcggagatcgtgttcgcaaaagacgagaaggccatcgaaatcgccagcgttcttgtgacagctgcgctgttcgccttcaacgggatcaccatggcggaactcacctacacgttcgacgcatcaaggcagactatgtacaagaagctcgctcccttcaaagaacgcggtgtgctcgtcgcgcaaaaagaaggacgtaaaacgtactatcggatggacttggatgccctcaggcgcctcgccgatcagcagtagcagagtagagttgcagctcgctacagcttctcctcgttcttttgcctgtggcggatgacgaggttgcgccacaccacgtaggcaccgaggacgaacgcgcccacgtagcccaacacgcccagcaggggcacgcccagaaactgcgggtgcatgttcgtggtagcaagcaggctcgatccgatgaacagcccggcggagatgagcgccatagccaccgtcccgctgacggagtagagcgcggcgatggcgtcgatcgggatgccgaggtcggcgccgacgcgaacctggccgcgatcgatcatgtcgagcgtgtgcgatgcctgggtgggcaagcgcaccgcggcctgcgcggacgtcgccgcggtcgagacgaactcgcgcgccttggtttcgaacgcctcccaggtgcgctcgcggcgcttcacgtgggcggcgatgatgtcgatgacgctggtgtcgggcgcgatgtccaccagcacgccctcgatggtgaccatgccgcgcgccagcagggtgaacgaaggcggcagcgccaggttctgcgtctgcagcacgccgaacacgtccatcagcgccgagcccacgttgatgtcggccaggttcaccgtggtgtacgagaccagcaggttgcccagctggctgagcagccgcccgtggttgaccggcccctccgagcgcacggcgcccagcagcgcttccatcagcgcatacggatcgttctcggccacagcgcggaacatgcgcccgatcagcgcgcgctcgagcgccgacagctggcccaccatccccaaatcgatccacacgatgtcgtcgccgcgcacgaggatgttgcccggatgcgggtcggcatggaagaacccgttgtccacgatctgcgtcacgaagctctcggccaggcgctggcccagcttcgccggatcaaggcccatagcgcgcagggcgggaacgtcgttgatcatggggccctcgacgaagtccatgaccagcacgtcgtcggaactgaggtgcggatacgggcgcgggctttccactcccggctgatcgtcgagaaactggcggaaccgcacgagattgtgctgctcgacgcagaagtcaagctcctggcgcgtcgtgcgctccagctcggtgaccaggtcgtccagcgacagcttgatgccgtcggttgcacgggtgagccctacgagcgcaaccgcctggcggatgagcgcgagatcctgcgtcatctgctccaccacgtgcggtcgacgcaccttgatggccacgtacgaccccgccttcggagcgtcggcaggcaacgggaccgccgcggcgccggtgcccgctcccgcatcgccaaccgcatgcggcgcgatgcgcgcccggtgcacttgggcgatggacgccgatccgagcggcttctcctcgatgcacgagaacgtttcccgccacggatgccccagcgattcctcgatggtggcgagcaccgtggagaacggcatgggcggcacgtcggcgcgcagccgcttgaacgcgtcggcgtacgcgggcgggatgacgtcgctgcggttcgccgcgatctggcccatcttcacgaacgtcggccccaagtcctcaagcaagctggtcgccttttccggcgtgaggcccgacagcacgcgatgctgccgcaggatgcgctcgatctcgcgcaggcgcctccccgaccccgaccctttgtcgcgtcgcgcctccacggccacctgcgccacttccttgagcgtggccacgccgcacctcctcgtctcgcctgttcaacctacattcgacagcccagcgtaccatggcaccatgcggcgagtgcaccggttgcccagcggttatcggacggatgccgagccggaggaagacgggcggaaacgcacgccgccccggcctgcgcagaccggggcggttgaagggggcgcgacgcggagggaggggagagaacgcgtgcgccccgtcggattggatgatcggtcgagcggccggcatgcgggcgatcccgcatgccgggccgacgccattgccgcttacgcgtcgatcgtctcgacggcgtactgcccggccagacggccgccgcagtaggcgcacataagcgagtagccttcgtagtcgcagtacggggcgctcatcagcgtgccgttgtcggcgccggccacgtacaggccggggatggccacgccctcgccgtcgattgcttgcagacggtcgttcgtgcggatgccgccgatggtcacccatgcgctgggctcatactggaatgcgtagaacgggccggtggtcacgggctgcaggaagcaagccggcttgtagaactgctcgtcgttgccgtcggcgcagtagccgttgtactcgtccagcgtctcgaccagctcgggcgcgtcgatggcctgggccagcgcctcgatggtgtcggccttgaaagcccagccggcgctcacggcatcatcgatgctgccctgcacgttctccagcggcttgtccttgagcgtcatcatgccggtgcgccagttcacctcgtcggcgccgcacagcgtccacgcgtccttgccggaattcaaaccgtccacgtacgcctggtcgaccaccgcgtagtacttgccgccgaccagcgagatggccccgcccagcgccagcggcagattcgcgaacttgccctcgttcgagaagcggcggccctggttgttcaccagcagcgtgccgtagatgccgatggtgaacgcggcgctcttgcggtcgtacaggccgtcggctttctggttggagccggtgaactcgttgcccgcgatgccccactgcgtggacagctgaccgcccgcagcctgcaccatgtcgatgccctcgcccacggacagcacgttgcccagcgggttcacgaaggtgccgaacttctcgcgcatcatgtcgacgttgcccaggaaaccgcccgtggccacgatgacggccttcgccttcacgtcggtcacgccgtcgccctcgcactgcacacccgtgcatgcgccgtcttccatgatgaggcgcttgcccgccgtgttgaacaggaactcgccccccttgctttccacgaactcttggaggggcttcatgcgatcctcgcccttggcctgcgtcttcgagtccttcgggtcgctctggaagttggcgcgcacggacgcatgccctgcgccgtagttgtcgggacgcaggccggtaggcacgccgaagtcgtcggtgaactggtcgaccgtctcgccggagatggcgacggctgccttgacggccgcagcgttcgtggaccagtgcgcgtactccataatatggttgaaggcttcctccaccgtgaactcgacgccggcttcctgctgcagcttcgagcccaccatgaacgggccgcccgccagcgagccgttggccacgcccacgttaccgcccttctcgatgacgacgacgctcttgccggcgcgcacggcttcgaccgcggcccacatgcccgcgccgcccgcgcccacgatggcgatgtcgcattccttcgtctgatcggcggtctgcatcgcggaagctgcgtcgtcggtcgcgcccttcgcgtcggcgttcgcgctgcttgacgcttgcggggcgcatccggcaagcgcggccgcgccgcccagcgccgcaacgccgcccagcgtgaggaagctgcgacgagaaagcccgttctttaaagtagccatgtgaggtccctcctaaaggattccctgtgcgctcgaccgttccgatcgagcggcgcgccctcccgaggcgctgaggaaagcatgcctcgcatcaggcggtttgtcgcgggtgaagtcgcgcgccgaggggtgaatccgcgttcacccctgcgctcacccctggtacaatgacacgacgaacaggaggttcccatgaaatcaagcgacgtggtgcgcgcgctggcgcccgcagatcaggccggcgaggacgagcctctgtcggcgctcatgtacccgctgcgcttcttggggatgggcctgctcatcgcctggctgtgctgcacgcacgtcgcctccatcttcccgggcgacgtgttcgaccccgcgctgcgctcggcattcgacacgggcatgcgcatcggcgacatcggcacattcctcgcgttcgttctattcgcgccgcgcatcgggcggctgagcaggcacaaggcgttctcgtgggcagcggtcgcccttacgacggctggcacggcggcggtgggcctcgcgctcattcccggcggggtcggcgaggcggtcatcatacctgccagcatcgtcaccgccataggcggcgctgtgctgttctgcctgtgggccgaagcgtacagccagatgggagccacgcgcacgctcatgtacggcgcgctgtcctgcatcgcggcagccgcggcgtcgttcctcatctccacgatggaggcgccgttcggcgttatcgccaccgcactgctgcccctcgcatcgctggcatgcgcgcacctgagctttcgcctgttgccaaccgagcgcgccgtggcgaaaggggtgcactaccccattccgtggaagctcatcgtgatcatggccattgcaggcttgctgtccagcttctcaggcgcgttcctctcggccacggaatacgtcggcgccatccatcgcgtcgcggccaccggcatcgtgggcgtcgtgattctcgtgatggccgtttcgaagcgcgaccgcttcgacgcgcgtttcctggcgaaggtgggactgccggttgccgtcgtcgcattcgccgtcatccccttcgtcgcccccatgcagggctacatcgtgtcggtgctcatgcggttcgcttacgtatggttcacgttcttcgtgctgctcatgctggcgaacatctgctaccgcttcgagattcccagcctgcggctgttcgccatcgcgcgcgcgtcaagcgaggctgcgctgctggcaggcatcctggtgcgacgcgccctgtggcagaccgacctgctggcggatccgacgacgctcgcggggttcgccttggccggcatcgtcttggtgctggtgtgcgtggtcatctggatgagcgagaagtccgtgaacggcgactggggcgcgtcgggcctgtcgctggccgaccggctgcacgtgccgggaccgcgcgagcgcttcatgagccgctgcgacgacctggccgcgcagtacgacctgaccgcccgtgaaaccgagatcatggggctgatagcccagcggaagagccgcgccgagatcgagcaggagctgttcctgtcgcagaacacggtgaagacgcacgtgcggcacctgtacgccaagctgggcgtgcactcgaaaaccgacgtcatcgcgctgttcgaagagtgagggcgccgctctgcgagcccatcttcgcccgaaaaacacgccacagagggctaatgcgtgtttttcgggcgaagatgtttcccggcgaggtcgcagttgcaagccgcgcccatgctatgatgctgcactatggcacgcatcgtgaaacatagcgagcatcctctttggatgtacaaggccttcctcctggtggcggctgccatctggggattgggcaccgtggtcatcaagtcgaccgtcgacgagttcccgcccgcatggctcgtcggcgtgcgcttcaccgtggcgggcatcattttgggcatcgtcatgttgccgcggttcagaaaagcgctggacctcgaccacctgaaaaagggcgccatcctgggcgcgttcctgttcctctcgtactgggcgaactccacgggactcaccgacaccaccgcctcgaacagcgcgttcctcacatcgctgtactgcgtgatcatcccgtttctcggatgggcgctgcgcgggccgcgcccgactcgcttcaacatcgccgccgccctcgtgtgcgtggccggcgtgggctgcgtctcgttcgcggggctctcggggttctcgctgcgcttcggcgacctgatcacgctgctgtcggcgttctttctcagcctgcatgtgctgtacacggcgaagtacgcgcgcggtcgcgacatgacgctgctcacggtcgtgcagttcctggtggccggcgttctgggcttcggcgccgggcttgcgttcgagcccatgcccgcgttcgccagcttggggctggacacgtgggtgagcctggggtacttggccgtgttcgcctcgtgcatcgcgctgctgctgcagaacttcgccgtcgcgcacgtcgaccccgcgcccgcatcgctgttcctggcaaccgagtcggtgttcggcgtgacgttctcggtgctgttcttgggcgagatcctcaccggcccgctgttcgccgggttcgccctcatcttcgccggcatcgtgatcagcgaatacctccccttgcgcgcagagaagaaacgccgagcgcgcgcgatgaaaccgcaggaagcggaaaccttcccgttcgaagacgaccccgagcgggaagcatagcctttccacctctccgccgccgatcaccttgccaagccccatcccgatgtttcacgtgaagcatcgggcgcttcgagatgccgctatctggcggcgcaggaaacgcgctagattgagcagcaaagcacgcaagaaccgcgctggatccaagggcaacccgcatggaattcgcgtgagaactgggtcagattagcgctagattgagaaagattcgcgctagacgtgcgccatctgcgcgtaagacgaggtcgttatactagggacacggccttgttgggcggagaggatagcaccctctttacatccatttccgattctagataacggaagggggtgtcctctatggatggattggtgttcgaccttaccggagttatcttgcaggttctctgcttgctcgctgctctctgcaacttgggagtggaggcggctgcgcttgttctgcaagttcagtcgaaagataaaccccggtcgccccaaggggacgaaccgggacccaaataaatccgaaccgccgaagcaagtccgagggccgtggggagtaaccagctccctgcggctcgcctgcattatacgcgacacgccccgtagcttcaaccgattaccgtgatgagataactcaccctatcgtggcgagatggtttcctttagaatggggcgacgcgctcgacaaggacgacgcacattcgcctcatcacccaggacgccttatgaaacacgccgcacccgccgaccagacgcccgctcctgcaagctcgcctgaaaccaccgcccgacggcgtttctcggcgcccaagatcatcggtatcgtcgcgggctccattgtgggcctgctgctgatcgcctacgtggccggcagcctttacttcaccgaccgcttcatgccgaacaccgtgctgggggaccacgacgtgtcgctgaaaacgtcgtccgaagtgcaagccatcctcgacgacgccttgagcgattacaccgtggcagtttcggggcagggcttctcgatgaagctctccgcgaaagatgcgggcgtctcattcgacgggcaagccatcgtcgccgacgcactgggcaacacgaacccctggctgtggccgctcgaaatcacgcgcgagcacgacgaaaccgacagcttggctgcctccagcgggagcagcctcgcgaacgcggtgcgcaccgccgtcgacgagttcaacgccacggccaccccgccgacggacgcggtcgtcgcattcgacgagcagaagaacgcgttcgccgtgcagcccgaggcgaccggcaccgccctcgacgccgatgcagtggccaaagccatcggctccgccatcgcctcgatgcagcccacggccaagctgaccgccgacgcgctgcagcagcccgccgtgcccgccaccgacccgaaactccaagccgctgccgaagctgcgaaccagctagtcaaagccgatatgcagctgatgatgggcggcgacgtggccgcggaggtcaacccggccctcgtctccacctggatcagcttcgacgagagtcttacgccctccctcgacgaggaggcgctcgtcgcctgggcgaaacagctcgaagtcgcatgcgacaccgtgggaaccgagcgcacctacacgcgccccgacggcaaggtgatcaccgtggcgggcggcccgtacggctggctgaccgacggcgaagcgctgctcgaactcgtgaaggaaggcgtggcgaacggaaccgtcggcgcagtggacatcccctgcaaaaccaccggcaccgcgtacaacggcgcaggcgcgcaggactggtcggcgcgctactgcgacatcgacctctccgagcagcacgtgcgcttctacgatgaaaccggcacgctgatctgggaagccccctgcgtcagcggcacgccgaacggcgcgcacaacacccccacgggcgtgttctggctcaaccagaaagcaagcccgtcggtgctgaaaggcacgaacctcgacggctcgaagtacgaatccgctgtgcgctactggatgccgttcgtcggcaacgtcatcggcctgcacgacgccgactggcaagccgcgttcggcggcacattgtaccagcagggccgcggcagccacggctgcgtgaacctccccgtcggatcggccgccgacctcttcggcatcatccagtccggcgacgtcgtggtctgccactggtaagggcgaacgcggaatgtcgaaaacgaagccggttctgcaagtttttcgactctgtggcacgcgtgacaatgagcgaccaggggtttctcatcagcgcttcggcgcgcttcgtcatcccgttttgccgcaaaagcaaaatgcctggtgagggcttcggtctttcgtgggaacttgccacaaagtcgaaaaacttgcagaaccggctcggaaaccgactggccggcttcgacacagatgcttgatggcggatcgccgcccgccgctcgacgcgcgttcaccgtcgctcgatgggcggatcgccgccactagctattccgcagctcgcccatcagcccgatcgctccgcaacgaaacagccccgcctaccggagaagggggggttccggtaggcggggcttgggcacagcgctcccgagcgaagagggagagggagcgcttacctctcgaaaatgtctgatccttgcatgcgaaggcgcatggtgtccaccatctgttgggcggtgcccaactcgaccggtcgcggcgtcatggcatagcgatgcaccgcgccttcaagcaagtacgcagggcgaacctcgtcgagcagctcgatggcgttctcgggacatacgtcgcgacagctgccgcacttcacgcattcgccgggatagtggtagacgcccagcgttccatcgtcgttgtcgaatttgcggatggcgcccgtcgggcagaacgtcgcgcacatgcggcacgacgagcacgcacgaccgtcgatcaccacgcaaccccacaggcgcgtcgcaacgctgggcagtacgggctggcccagctgcgccagattgtccaacagcgcctcgcgccgatcgggaacgaaatggggcaacgtgccgtccttcgtaacgcgcggaagcgcagcgggagccgcagccgcaggaacagccgacgaaaccgccatgtgctcgttgccgcggcgctcagcgaagtacgccgccacggcagccgctgccccatcagggccaacgccctcgacacaggcgccggcaggcacgccttcgaccacctgcacccgagcatcgcttccccaggcttcgaacagggcgttggacgttgcggccaccaggcgcgccgtggcaacgccgtgctcctgctcgcaacgcgagcagtcgccgcatgcaagccggatccggcgtacgccttcaaccgcaagcccgctggtcagcgactcgtccacacgtcccaagcacaccacgttcgccacatggccttcgtcgagcaacccgcccgccgcacgccgcagctgctcgcacgccaccaccacttcgtcgccaacccacgcgcccaggcacgcttgcgcaagctgcgcatcgctggggttgcgcgcttccagcgcgctcgtggggcacacagtcgcgcacgtgccgcatccgatgcacttcgccgcgtccacccgcagctcgccgtccaccagcgcgatacagcccgacgtgcatgcgtcggcgcacttcaagcacgcgacgttgcggttgcgcactttcgcgcaccgctcccggtgcaccacgatggcctcgctggacaccccgtccagcacgcctacgatacttcggttcgaccgcgatcgctcgctcgcgcgcccgtccatcactcggccgtcttctcgtcgatgtcggccagcacgaccgtgcttgcctgaggccccgcacccttcttcaccaaaaacggcatgctgaccgccttcgccggacacgcgtccacacaggctcggcatcgcgtgcagtcggccagagtgcgctcgccgaaatcgggatgccgcaggttgatatcggcctcgcacgcgatggcgcacttgctgcacgctgcgccgttcaccgtctccaggcacttcgactcgtcgatgaccggccgccacgtcttgctgaagcgcgacacgaggttcatcagccccgccatcgggcagaaccgcgtgcaccacttgcgcaagaacaccagctccaccactagcaacagcgggatgagcaccaccgaccacgtcatatcgcccgccgcgaacaggcgccacaccaccagcacggtggcgaacgtcagcccgatggggcacaccaggcagaacacgggaaagccgaagacggccgtggacagcagcgcgccgcccaacacgtagtggcgcgaatccagcttcgcacgcacccccttgcacgacgagcagctcccgcaatcgtgagagtacgcgccgtcggccgctgtcggagatccttcgactcgcttcgctcgctcaggggatgccgccgcctcgcccagctcgctcttcgcgatgcccagcatctccgagcgcttcgcctgctcaagcgccgtgcgcttcttgggcgagcggaagaacccgcgcacgcggtcgagcagcggcacggggcagacccacccgcagaacgcgcggcccaccgccagcacgagcaccgccatgatgacgatggacaccaccgcgcgcggcaccacggtcttggtggcgatcatggtggccagcgcccccagcgggcacaacgccgagaacgtctcccagccgaagcccgaaagcgtacccatgctcacgcccgcgatcagcccgacggacagcacgacgaagatcgcggccgccacgatggtgcgcagcttgttcgagttcattgccgcctcctattccgccgactcgatcggcttgacgacgatggcgcgctcctgcgcgcccgacacgatggaccccgccttcagcgatacgcacacactctcgcatgcgccgcacccgttgcacttgtcagccagcacggacacgtgcgggttggcgccctcgcccgtcagctctatggcctcgtaggggcacgcgtcgtagcagtaacggcaccccgtgtcgcggaatgcaaggcactgcgcctcgtcgatcacggccaaacccaaaagcgtgttctccgccgtagcgtctgcgggcagcgccagcgcctcggtggggcacaccttcacgcacaacggctccccgccgttctcgtcggcgcagtagtcgcagaaatcggcgtcgaacttcagcgcgggcgagcgcatgcccagcagcccgtcctcgatatgcgcaggcacgatgacgccgcgcgggcacgcctcgtagcatttctcgcaccgaatgcacgccgacacgaggcgcgcctcgtcctgccctcccggcgggcgcaccaacgggttgtgccccgcatagcgcagcgctcccaatcccagcagcgccgccgtgcttcccgcgccgatgagcagcgcgcgccgcgacacgtccaacggccccttcgccctcttcgacgaaatctcgtcctcttcgctcatgtctcctcctttgcccactggtccttatcagtcagcgaggtttgctgtggtgccgcatatcggcgcgtcgcacggccgagcgtgcttcgcacgagaggg

SEQ ID NO: 8951 - DNA, 1514 bp, Unknown
  gut microbiota DNA sequence
gtgccattcgagaagccccgtccatcacatctgtttaagagcaccggccgcgctgagcggcgcaaccggttcggacgctcggaccaagatcgaccagaatctcggcccgagcgcgcccttccgtctcctagtacaaagcgaagatgctgatagccaccacgtacaggatcacgcgccagcacaatccgcccacggcgacgcacgccagggcgacgcccgcgtacgcggccagcttcttgccggtttccaccttcttcgcaagccacgtcagcaccagcggagcaaccaggccgacggccaccgtgcccagccagaacatcacggcattggcaccggcgaagatgctgcccacgatggacgcgcggtccaccatggccacgtcgggcagcgtcggatcgaagtagtactggatgtcggccgagtacagcccggccgagccgttgatgatgaacgcgtaggtgaacacggcgatcagctgcagcgcgccgccggccaaggccaccttcacgcccaggtccttcgcgctgtcatcgttcgtcaaaccggcgatgaccagcgccgtcaagccgcccatgaacacggtgttcgccaagtagtacaccggcagcagcggggtgttccacgacggcagtgatgccatgaggtagctcatgcccgtgatcaccggcagcgccaggcccacgacgatggccagcacaccgcaccatttcggcgccatgccgtcttcggcgcggcgcatcatcaggaagtacagcaccagcaccaccgcgaacacgatgcagccgatgaactccagcgtgatacccgaggtgatgtggccgaagccgttgaagatgcgctcccaatgctgcaggtgcatgaacaccgacagcccgccgaccaccaacgccgccagcgcggtgaccagcgatgcaagctgcatcttcttgcccttgcccatgacgttcagcaggccttgcgcgcccagcgcgccgcctgcgacgcataggaagaaggtgaagagaataaggggccattcaggatgcatagtctactccctccactttcggccctcgcgcatgaggtacatgagcttcggctcgttgcccgcatccgcaagatggtggatatcgttttcggcgtacggctcgacgtagtccttcagcttcacgcgcgtctgggtcatctcctcgtactggcagccggggctgtcgggatgtgccggcccctcgaagttgtcgacgccctgatcgaggtcgccgaagaagcgggcgcgggcgccgcactgggccacgcactggggaagctcgccctgcgagatacgctgctcgcacagcgtgcatttctccacgacgcgctcttcctgattgaggtagcgcacgccgtacgggcacgccatcgcgcagaactggcagccgatgcacttcgacttgtcgatttgcaccgtgccgtcgtcgcggatgtgggacgcttccgtggggcacaccttcacgcattcggggttctcgcagtgctggcactggacgggaaggaag

SEQ ID NO: 8952 - DNA, 250 bp, Unknown
  gut microbiota DNA sequence
ctgcaccgtgccgtcctcgcgaacatgggacgcttccgtggggcacaccttcacgcattcggggttctcgcagtgctggcactggacgggaaggaagtacatctcgacgtccgggaacgtgcccgagccgccctcgatgggatgcgggccgacgcgcagcgtcttgatccagaacgatcccacgtcgacgccgttgatggccttgcacgcaaccgtgcacgcaaggcagccggtgcaacggttcaagtcg

SEQ ID NO: 8953 - DNA, 1195 bp, Unknown
  gut microbiota DNA sequence
tggtccgacgcgcagcgtcttgatccagaacgaccccacgtcgacgccgttgatggccttgcacgcaaccgtgcacgcaaggcagccggtgcaacggttcaagtcggtaatgatcgcgtagtttgccatgtggtgaacctccttcctttacttcgatttcgaataagcgcccagcgcgtcgccgcccacgctgcccacggcaagcttgccgccggagagcaggtcggggctttggacgctcggctggcagccgaccgccgccatgttcgcgaacgtgagctccaccttggaatcctccaggcgcggatcgttcgccaaccattccttgaggcgcggatcgtttgcgttcgtgatgaccggattgccttgcgggtcgcacggaaccgggttgccatgcggcgagttctcgggcgtcgcggggtacacgagcaccggcacgccgcgcagctgggacgcgccgcaaatccaacactgcgcgtacttgtccatcgtgcagttgatgttcaccagctcgaagccgtgcgaagcggtgtcgatctcgggataccaccaggcgtggttcgcgttgaccgtgccctccttgatgccgtagtacaagtccacgacctcgcggatggcgccccacgggctgcggatccaaatccactgcccctgctccaaccccaggcgcgctgcgtcgttggggttcatctccaaacgagggctgggccacagctcgcggcaccacggcagctggcgatgctcggagtggaagtacaccggctggcgggagcccgtcgtcatgatgaaggcgctgtcaggatgcgccgtcagcgcctccttgtactcctccaccagatgatcgccctggtagttgtcgttgatgtaggcgtccgacgtcttgatctggtcgaccagcgaggcgtcgaagtactcgggattcgatacgcgcgagttcttcggctccacccagtgcgggaacttgtcgatgtcggggatgttcggatccaccgtgttcgtgctggcgaaggtggccgcgccgtcggggatgtacgtttcggcgatggtggaccacacctccaccttggcggtgggggtcatgaagccgcacttctcgtcgatggccgcgtacaggttgtagccaccctgctggcgacggtagcccatctcccaacggcggtacgtgccccaacgctcggggtgccacttgcggcag

SEQ ID NO: 8954 - DNA, 535 bp, Unknown
  gut microbiota DNA sequence
gttcgatacgcgcgagttcttcggctccacccagtgggggaacttgtcgatgtcggggatgttcggatcgaccgtgttcgtgctggcgaaggtggctgcgccgtcggggatgtacgtttcggcgatggtggaccacacctccaccttggcagtgggggtcatgaagccgcacttctcgtcgatggccgcgtacaggttgtagccgccctgctggcgacggtagcccatctcccaacggcggtacgtgccccaacgctcggggtgccacttgcggcagtcgaaccagccttcttcctggaacttcgccgcgtactgcgggaagtcggggccgtcggggtactcctcggtcttccaccagtcggtggcgtccttgagcacgcggtactcctgctcctcgtagccgacgttgccgcccatctgcacgaagtcgtggtagtccaggttgttccattcgtcgtattcagggtcgcggttgttccacaccacgcccatggccttgtacaggcagatgacggcaaccgggtcgtagatgcaa

SEQ ID NO: 8955 - DNA, 1680 bp, Unknown
  gut microbiota DNA sequence
aactcctcggtcttccaccagtcggtggcgtccttgagcacgcggtactcctgctcctcgtaaccgacgctaccgcccatctgcacgaagtcgcggtagtccaggttgttccattcgtcgtattcggggtcgcggttgttccacaccacgcccatggccttgtacaggcagatgacggcaaccgggtcgtagatgcaatcgcccatcggctccacgcagcgctgcccggcgccgaagatgccgcccgcgccctgcgacacgcggcccgtgttcacttcaagccagtgcagcacggggatcacgatgtcggcgcagccgttgttcgggcaggaccacaggttgaagtccagccagaagtccagacgggtgagcgcctcccaagcctccagcaggttggactcgttcatgaagtcgcccgacatgcacacgccgccgtggatctggtacggcgtgtcgatgccgttgatggagtcccagatggcagcggagtcggcccatcggttccagtagcgcagcagcgggaagcgctcggcggaaatctgcttctcgttgctgtcgaacgacgtcttgagcgccggccacgagcggctgggcttgtaggcgccgcccttacgctcggcgatccagcgcgcctcttcggcggtgggaaccttgttgccgtagcgctcggccaagggcgatttctcgtcgatgaggtactgcacgaagttctggatcagcgggatctggtcttccacggacaggtcgcgcggggtgttgcccagctccatggtgcccacgtccaagccccagtccttcggctcatggtcggtcaccagcatgttggcgcggccgcagcagccgtccacctgggccttcgacgaaccgcggttgccggcgggctcgtcggagttgccggtgatgcaggcgatcagctgcagcgcgcgggtgttctgcaccgcgtggcccgtctggtcgggagcaagctggtagtggatgccgccgttgccgtgcagcgggttcaggcgcgtcgtgtagatgcgcacgccctcctcgatcttgtcgaccggcacctcggtgacctcggacacgtactccagcgtgtactgctccaggctgtcggagaacgcctcccacaccgtgtcggcgctgatggtggagccgtccttcagcttcacctccacgccgccggggaacagcgccgggttcttgggcagcccggccgggttcgagcgcttgccgccctcgttgccctcgtcccagtaggcgtcgtactgcacgtcggccggattggcgaacttggaggggtcgggcagccaggcgtccgcgatgatgggcttgtacggatgctcgatccaggtgcccgtcgtcgggatcttgtgcttctcgccctcccactggcaggcctcggcatcccagtacgtaggcttgttgttgttctcgtcccagcagatgaagcgctggtagcgaccctcgtagtcccagtactggccgatccactcggggtcgcagtcggcctcggtcaggatgcggctctccatgtcgatgccgccgttcatttccatgaaccagcccttcgccgtgcggccgtccttctcggggttccacaagaacggggcgttcgtccagcggcgcacgaacgcgtcgtcgtacgcctcgttgtcgaggatccacttgagccaacccagcgacaggcacagg

SEQ ID NO: 8956 - DNA, 1964 bp, Unknown
  gut microbiota DNA sequence
acccttcgccgtgcggccgtccttctcggggttccacaagaacggggcgttcgtccaacggcgcacgaacgcgtcgtcgtacgcctcgttgtcgaggatccacttgagccaacccagcgacaggcacaggtcggtgcccacgcgcagcggcagccacacgtcggcttccttgcccagcggcgtcatgcggggatccaccaggatgtgcttgtaggcgcgctgcgagcagtccaccaccgtacggttcgtggagtcgtagttcgagtactccgacgcggtgccccactgcacgtacaccagagggccctgctccacctccatccacggcgagccgatctcgtcggtgaggatgccgccgaagtggcgcgggcccttgcagatctcgtaggccaggtgcgcgttcggcgtggggaagatggacttcagcgtgccgtacggcggctgcgcccacacacgcgaggtgccgcccatggcgaagttggcttccccgccgtacttctccacgatctcgttgaacttggcacccgcctcgtcgaacgcctcggcaagcgtgatgcgcacccaaccggggtcgtcctcgcctttggggttcgtgcgcttcatgcagtagcgcagacgatcgggatggtacagagccagcatggacgactgcgacttcgcgcagcagtgaccgcggctgtgagcgttggactcgtcgccctcgactttgatgaccttgttgtcctgaacggtcacccacacgccgcactccaccttgccgcacgcgcggcagcaggagcggatgcgcttgatctcgcccgctgaggcgtcttcaccttcggccaacgccgtcgaaggcgttgctgcgaagcccaccgtggttgccgcggcagccatggcagaggccttcaagaagcttcgacgactcagtgataggttcgccatgtgcccctcctctcttccttttctcgcttcgttcatctctgccggaacccggcgcgaccatacgccggaaccggtttccccattctaggaacggagcaaaagcccaaatcataaggggtggatggatgaaacgcgccgatatcatccccaaaggattattttgcttttcgcgcccaacctatacttgatggcagcgaagaggttgccgttcgcgcccgtcatccgggcgtgcggcaacgggaagaaacctgtgaacgaaggagactgccatggcacaaccgcgtccgtcattgacgctgatcctcgacctcgacgagcgcctcgacagcgaggacgtgcgcctggaaatcgaccgctgctactcgtacgtagggtcgacactggtgcgcacccatcccgcctgcgacggcgagccgcagaacatcatgcgcttcctcgtgaagctgggcacgcgccgctacctgcgcgccgaggacgagggcgccgacgagctgtggaacgacgttatggagcgctggttctacaacgagctgtacaaggtgagtaacaacatgctgatctacaaccgccgccagcgcgaagtgggcaacccccagctggtgttcgactggatcgacgtggagctgcagaacggccagctgcatgcgctgctgcattgcgacaacgtcagcggcatccgacccgagaccagcgagcttctgacgcagctgcgcgcagcgtacaacgaaggcgcgctgggcgaggacgtcgtgcgcgcctacctgcccgcgcccgcttcatacgaggaacagaaggccgccgggctggcggcgaaggccgagcgcgacgcgcagaaggcggcggggctggctgcggcagaagaggaggcccgggctgcggccgcggcggccgaagccgcggcagaggaggcgtttctggagctgccgcgtttggccgacgacgccgcctccgaagaagaggccgagccagctcttgagccgttcgccctggacgagcccgacttcgaggtcgactaccgcttgtggctgatcgaatacgcc

SEQ ID NO: 8957 - DNA, 4616 bp, Unknown
  gut microbiota DNA sequence
aacgacgccgccgaagaggaggacgagcccgctcttgagccgttcgccctggacgagcccgacttcgaggtcgactaccgcttgtggctgatcgaatacgccgacggcagcacgcgcacgttcgactcgcacgccggaaccctcgcgtaaccgaaaaggagccttaccatgatcgaagccatcgcctccttcgacgggcgcatcgccaaggtgcaaggacctgcgcgaagcggcaagaccgaagcgctcgttcggcgttgcgcctgcctcgtgcgcggcggcgccgccccggaaaccatcctcgtggaaacgtcgagcgccgcagcggctcaggcgttccgccgtcggcttcgccgcgcgctcggccccgacctccagcacgccgccgacgacgtgcatgtgcgcaccgcgctcgaaacgtgcgtcgccgtgctggacgcgcccgccgcgcgcgccgccaccggccgcgtgccgcgcctgttgaacgatgcggagtacaacttcttcctggaggatatgaagacgctcggccagcccatccgccgtttgcgcaaaatgctcgatttcttctatcgccagatgagcgacctcgagccgcgcgactcctggctcgcaggcggcgaagaggaagccgtgctgtcccacctcgagcgcgtgctggcctcacgcggcgccatgctggcgcaggaagcgcccagcctgtgcgccgcgtacctgcgcagcgacgcgggcgagggcgtgcgcggcagctacgcctacgtgctgtgcgacgacttccagaacatgagccgcgccgagcagacgtgcctgtgcctgctggccgaccgccagctcatcgcgtgcggcaaccccaaccagcagcaggccgcgcgcgcgtcgttcccctgcgccgagggcttcgtgcagttcgacgctcgccgccgcgacgtagccgtgttcacgctgtccggagcgcacggcaaccccgccatcgccgcgttcgccgacgggctttgcgaccagggcgacatggatcccgccttcaaagcgggcatcgcgagcgacgcgcagacgtcggacggcatcatggccgtcaagtggtcgacgccggaagacgagctggacggcatcacgaagtacctgcgcattctgctcgacggcgaagaggacctgcacgagaaccgcacgtgcgtgctcgtgcccaacaagcgctgggcgctcatggcgcagcaggtgctcaagcagcgcggtttcgccgtggcgctggccggagcgttctcccgtttgggcggcgacccgcgcgacagcgcccgcgcccgcgcgctcgtggcgtacacgaagctcaacctgctggccgatccgcgcgacatgacggcttggcgcagctggtgcggcttcgacaactacctcacgaacagcgatgcatggggcggcttgcaggctttcgccgaaaagcgcgagctcacgctctacgacgcgctcgccctggccgaccagctggaagacgaaccgttcctgcgcgcgcacgccctggtcgagcgctggcgcgcgggccaggagcttatcgccgcgaacgccgggcgcaagggcttcggcctgctgcacgccatcggagccgacgatctgcccgagttcgaggagacggcgcgcgccctcgtgggcgacgaggatgcggcagcgatgttcgccctgcagcgcaccaacgtcaccgatcccgcgctgcccgacgatccgcacgtgctgcacgtggcctcctacggcgccctgtgcggcatcgaatacgacaacatcttcgccatcgccgccgtggacggcttcatgccgcggcgcgatgcgttcgaggtgatcagcaccgaggaagaccgcgagcgcatcatgaacgaagagcgccgattgttctgcaacagcgtgtcgaaggccagcaaacgcctggtcgtctcctatttcagcaaagcgccgctcgagcttgccgagcgtgccaagatgcaggtggtgcgcgtgaaggccgagggcaacggccgcgtggcctcggtgcgtcccaccgcgtttttggccgaagcgggaaacgccgcccccgtcaccaccggcggtcaagccctcctcgcccagcacgggctgaactagccgccaacgcgccgccgcccagcggcggcgcgaagctgccttcgtaccggcgctccagaccaagaagagccttccgacgcgcggctacgcaggctttccctgccgcatatcctgcagcagctctttccgcagccggtagcgcttcatcatccagctcgcgtcgttcggcggaaggcgctttcccgtcagcttcgccaccgcacgcgccgattcgtcgaacttccgagcatcgaagaactggtcgggcgtaatcgagaccaccgttactccctgggaaatcagcgcgctgcgacgagccgaatcccgcgtctcggccgcgttgccgctgtgatgctcgccgctgtcgtactcgacggcaacgtgccgctttcgccaatacaggtcgcattcgaagcgttcgcgctgaaccaaccccttcgtccgaacctcgatgcacgcgttgagctcgggaaggtccaagccgtatccgccgatcatccgcgacaagcacaaggccatgaccaggttcgtctccataggagatgccgacgagtccgcaatgaagcgcagcgctcgcagcgccttgttcgacccgatgcagccgcgcgacttctcgacgaagcgcctgagcgagcgcacgtcggtcaaaggcgtgcgtttccgaaaacctcgcttgtcgccatcgtacgcatatcgcgagcacaagagacagccataccgaacaagctcgaccagcgacagctccgtcgccatctccacgaaggaccgctcgggcgagctgatgtacagcccgtcgcgcaaccggacgaaagatccagccggaaaaccggcactccacacgtggcacacggggctgcccgtccgcacgcgatcgtttgcctgagcgaccacgacgtgcagcggcaccccaaacgcatccagctctccatccgtatcccccatacgaacgccgcagatcggatgggcgcgcgacggcgtgggaaccggcaacgcatcgctcacgcgccagtactcgtaggcagaccaatatccgatgtatacgctcatggttgcagcataccgggcgagcggacgaatggctagccgtcttttgggtccccgaatcccaaaacgggaaaaagagccctccgtgcaagtttttcgacttcgtggcaaatacggcagaagcccacctggggtttttcgttcacagttccgacaagcacccccgcttcattctccatggaacgaaaacgcctgatgaacgggttcccgttttcgaaagccttgccacgaagtcgaaaaatttgcacggaggggcccgaaaggaacccgggcccgcagatcgtctgcaggcccggcgggagggaggcaatatcgagaggtttcggcaacctactatgcggcgacttccacactgtccagcagctcggcgaggatggacgcatcctcctcggcgaagcccatggcaagctgggccaacccctggtagaacaacgtgcgcgagaacagccgcatgtcgttggtcaatagcggaagccagttcagcaggtggtcgtgcaggaaggtccgctgagtgcgcaactgccccacggcctcgtcctcgtcgcctgccgccagcgcctcggccgcgcgcaggctcatgcgttgcatgaactcgaactccagcgccacgtggtcctcgccctcgttccatgcgccacgcttcaaaccgttctcgcgcagcgtctgcagcacttcggcgcgcgcctcctgcatcatcaggcgacgttcggaggtgtacacgctctcgtacggataggcggccgagtacgcgttcaccccgtgaccgatgaacgtgcgcacgaagtcgatggcgagctcggtgacgctgtcgtcccatgcggttttcagatagtcgtacagcagatggtacccttcgtccaccttcgcgttgcccgtagcggtggggaagcgcatggcttgcagctcccgcaaggagtccgcgtccacttcctcgcggaacaagtttgccagcaggccgtacgttcgagcgcgcatgttcatgagcgcaaccaggtcgacggtttcctcagacatggttctcctccttcttcgcagcggcggctgcttccaccgcaggcagcatcgcacgtcccagatcggtcagacgccacgcgtgctcgctccattccagcgcatcggtgcgctccagcatgtcgatgaaatggccgccgaaacgccgcgggctcttcacctcgtcgaacgtgtccaccaggtcttctatctcgggtttcgtgcacggacgctcgtcgacggcgcacatgaccgcgcggtacacctccacgtaacggctgtcgcgatcgagcacgatgtcgcggaacgcagagccctgcgtcagcctctcgtacagcgcgcttccttcttcggttgtgcgccacacagggtcgacgcgttctttgatctcgagaaacgcaacgccctcctccatgtcctcgtgcggctcggcggcttcgggcatctccaacgtcaaggcgccggcacgttcgagcatgcggcacagcgtcatgggcgcg

SEQ ID NO: 8958 - DNA, 18466 bp, Unknown
  gut microbiota DNA sequence
gcgctcgtcgacggcgcgcatgaccgcgcggtacaccttcacgtaacggctgtcgcgatcgagcacgatgtcgcggaacgcagagccctgcgtcagcctctcgtacagcgcgcttccttcttcggtagtgcgccacacagggtcgacgcgttctttgatctcgagaaacgcaacgcccgcctccacgtcctcgtgcggttcggcggcttcgggcatctccaacgtcaaggcgccggcacgttcgagcatgcggcacagcgtcatgggcgcgtacaccgagcggttgctggcctgcgccgcttccacgtgctcggccacgcggctcgccgcgcacccgccgcggcacaaccccatgatgctcagcagcacgggccggcgaccggggttgtgatccagcagctccagcacggcagattccacgccaccttggcgcttgggggtgtacacggcttcgcgctgcatgctctggggcatgttgcgcatggtgggatagtcgacggtatcaagcgggttgtcgtcgtccatgtcctcctggtcgatctccagatcgtcggccatcagaggatcgaactcgtcgtccaagcccagcacgtcgtcgaacgatacggtaggcatcattcctccttcttctctcttcgctgcgttcgagtataggggctgcgcgcgacggctcatcatcctacaaggcgtaattacgcagggattcgcgcgcatcatacgccggggccgcgaaatcaccttgacgcgcgcttcgccggctccctataatcggggcgcgttgcgagaagcggggcttcttaggaaaggaagctccaatggccaacgtagcttggggcaagaagattcttgccgttgcggttctgagctgcctgtgcgcctcgatcgcggttcctgcctatgcgttctactacgtccacggcgaagagaacgttgctgcaaccagcaagggcgtcatcgaggtcacgtgcacggtggacgaaaccgctcagggcggaggcgtgaagacctcgctcatcatcgttcccgaaggcagcaccgccgctgcttgcctggacgagagcgtggtttccagcaacagtcagaacggccttgcggccattcacgactacagcgtctccagcttggcggacgagctgtccggcaagcagtacacgtgcacggtgcacaaggccgacagccagaagccgggcacgcacaccgcgttcgacggaagcggcaccgagggcgagagcacgccgctcgagcgcttcgacagcgtggtgttcacggtggcgtaatccgccgcgcgggggttcggacgaccagccgggcccccgcacacctcccgttccggctcggcaagcgccccgttattcttcacaagccggcccgatgcagcaccgcgacgcctcagcacgccctcgaaagcagacgggcgcccttccgaacatcatcctcagaggattatttttctattaccccagatcaaacgtttgcgcatcgagcgcaaaaccctgatcgactcgctcacctcgctagaaaaaacaacctctgcacggtatgatgatgcccagggaatcaaggagggggcttcatggggattcgcgttcctcgcatcaccgtcaacgccgacttcggcgacgacaccgcgttcggcgacctgagcttgctctcggtgggctacggactgcaccaggcttgggtgtacgccgtcatgttcggaacgcccaccatcttcggcacgcaaacctacgtcaccggcatgtacggcagccacgcgtcgctgccgttcctcgtctccatcgtcgtgttcgggctgtgcctgttgttcgccggcatcaccgaccagcggctgttgaggacgtacatctcgaagaagacgcttgcggcgggcgcggcgctcatgtcggccggaacgttgctgctgcttgcgacgcccgtgatcagcggcccggcgctggaagcggtgtcgggcgtcatgacgggcatcggctccgccatcctgattctgttctggggcgtcgcgttcgcgcgctgcgacagcgcttccatcgtgctgaactcgtccatcgccatctccatcgccatcggggtgtacgccatcggcctgcattacgggccgttccccatcgccggcatcctcgcgggcatcatcccgctgctggagctcgccatcctctggaacaaaacgccggcgccgtattccgagcgcaacgaggttcccatcttcaaaccgcttccggtgaaccatgccaagttcttcctgcgcttcggcattcccgtgttcgtgttcggcgtggcgttgggcacgctgcggcaaacgtccatccagtacatcgtgcccgcctcgaacgtaggcgaccagatcgccatgctgctggccgccggattcgcctccgtagtcatcctcgtgaccatcgtggcccttggcggcggcgacaaatggagccggtacttccgcccgctcgtccccttcatcgccgtcacgctgttcttcctgccgctttccgaaatgagcgacaacacgttcgccaccatgttcttggtgatgggctacctgtgcttcgaggcgctgatgtggatattcttcggcgagctggcgcaacgcttccgcttgtcgcccatctacgtgttcggcctgggacgcggcatgttggcgctggcggggctggcgggttcgctgtttcccatcgtggcggcgaactgggtgcatctgcttccgttcggcgaacagggcgtcatcgtcatcgtgctgctgattatggtggtggcatacgcgctgctgccgcgcgagcgcgagatcgaggccatcgtcgcaccgtgtccgctggtgaaagccgtgtcgttggaattgagcgaccgcgtgcggccgctagggcaagcgggatcggccggcgagggagccgccgcggccgcgcaatctggaaacaacgcgacggcagcgaccaacgcgcctgcacctgacgccgagatcgcgcccgaacccgaaccgaccgcgcggcgcgccccttcgctgctggaactcagcagcgcacgccgagcagacgagggcgaagagcgaaagggaggcggccgcttccgcgcgaagtgcgagacggttgccaacacctacctgctttcccggcgcgagacggagatcatgttctttctggcgaaggggcacaacgccgcgtacatccaggaaaagctctacatctcggaaggcaccgcgaaaacccacatccgccacgtctacaagaagacgaacgtccacagccagcaggagctcatgcgcctcgtcgagcttgcggatcccgccgaatagcgagcttgcccctcgccgattgcagcgcgcggcctccgcgaccgctcgcaaatcccgcgttccgtgcacaaacctggtcgtcgatccgcaggcgcgttcgcacgatctcgacacgctcgcgcggttgcacggcgttccccttcgccgtcgtgcagttcgcgacgcaaggtttgcctcaccccagctcccgctgaaacgccaggcgccttcgcgctcgcacaaccgcacgacatcccttgcagctacgccgtcaacgcgagcaagaaacggttttcgagggcgcttctgcaaatttttcgaccttgtggcaacgcctcttattcatgagatgttctgaccaggcttttctccgcatctcaaaagcgcacgcactaccgtgacaaatcggcgaacacctcgaccagggaaaacgattgccgcgcgtgccacgaagtcgaaaaacttacaaatacgggtcgtatttccgctttgggtacgcaaccgaccgtcgacgcgcgactacgagggagaaacgcaagctcgcaccacggcgcaacgagcgcgcaaattcgtcagcaacctcgcgtagccctgcttcccaatcgtccacgccttcgcgcaaaccccgcctctcagccacccgcactccggcgtaacccctgcttcccaatcgtccgcaccctcgcagatcccgcttccctatcgtccacgccctcgcgcaagccccgcttcacaataatgacgattgcgtaaaggatggggcgcgggcagggggtttatggcaagatggaacattgcatagtcatatgcagggacacatgaagtaacctggttgcgtttgggcacgcgatcgcgcggaacacgccagcgcggcgttgcctcccgtgcgcgaacccggcatccgccgaggttcgagccacgcaccattaaaggagatgcaatgggctttctttcgagattcgaaggcaggatggaagacacgttcgagggcgctgccgacaagatgttcgacgctcccatctcgccggtccagatagcgaaaaaggccgagaagcagatgcgccgcgagaagatggttggcgccggcaagcagtacgcccccacgctgtacaccgtgctagtgaacccggacgacgaccgccgcctgatgggttactaccccacgttggcgggcgagacggaaacgtacctgactgcgaaggcctccgaacagggcctcgtgatggacggccagccgctcgtgcgcttcatcgtggacgaggacctgaagcacggcaagttcgacatcatcgccgaagcggtggccgctcccatcatcgcacagctgcgcgccgaggagatgcatcgttacggcctggccgccgctcccgcgcccggcgggtacggcgcccccgcgcagccctaccccgcgcagcgccctcaggcgccggctccgcagcagtacggcggatacaaccaggactacgccgccccggctcccgcgcccgccccgtacggcggctacgaccagtacgatccccaaagccagtacgagcccgcgcccatgaacgtggacgcgtacggccagccccagcagctcccctacgtgccggaagacgagatcgaccgatccatcgactacggcgagtacaccttcgacagccgcgacttcgacgagcagcgcgacagcatccagcctctcgaccgtcccgaagccgtggatccgttcgccatcggcgcagccgcagccggtgcgggagtcgccgccggcgccgttgccggagcgggtatgggcgccgcgacgtcgcagccctaccccgccccgcagccgcaaccgcaggcccagccgcgcatggccgccgaaaccgtcgtgttcgccggcgggcagcaagcggcgacccccatgcccgcgcaggccgcggtgcgcgcccgcctcatcgacaccacgaacaaccgcgcgtacgacctggcgtcggcgcgcctgctcatcggccgcgagtcgaagaacgacatcgccgtgcacgacgtgaacgcatcgcgcacgcacgccgagctgcgcttcgagccgcaaggcgtatggaccatcaccgacctcggctccacgaacggcaccctggtgaacggccgcgaggttgccacccagccgctctccgaaggcgaccgcatcactatcggcatgacgaacttcatgttcacccaagcctgagcggaaacggaaggataacccgtgatcgacgtcgtacttcttatcgtacgcctcctgttcgtcgcgctactgtacctgttcctgttcgcaattatgaaaacgggcatcgggctggtgcgcggccagcgcaagaaggaacgcacctggaacctctcggtggagaaggggccgaaggagctgcgcggcgtatccatcgtcgttcgcgggcccgtcatcgtgggccgcagccccggagccgacatcgtggtgggtgccggatacgtgtccggccgccatgcgcgtttccagcttatggggcagaacctgttcgttgaggacctgggatccacgaacggcacgggcgtgaacggccagcccatcaccgagcctaccgctcttcggaacaacgacgtcgtgaacgtgggcgacgtggccattcgcgtgaggttcgcctaatggccgccgatcgttcgtacaaatccactccgcgcacccgcaagggggcgctcacctcgttcggcagccgcaccgacatcggctgccttcgcgatcacaacgaggacagcctcgtggtcacgccgcccctgtttgccgtcgccgacggcatgggcggccacgccgcaggcgaagtggcgtccgagatagccgtgcgcgtgctgtccgaacttgcccccgaacatcctgacgtggaagcgctcggccgcgccatcgaggaggcgaaccgcgccgtcatccaagcagcgcgcgaagggcgcggccgccaaggcatgggaaccaccatgaccgcggccatgctggaaggcgagcgactggtcatcgcccaggtaggcgactcgcgcgcgtacctgctgcaccagggcaagctccagcaactcacgcgcgaccacagcctgatggccgacatgatcgaggccgggcagctcacgcccgaagaggcgcgcacgcatccgcagcgttcggtgatcacgcgcgcgctgggcagcgacgcgcacctccaccccgacatctacgagatcaacgtcgaaaccggcgaccgcctgctcatctgctccgacggcctgtcgggcatgatcttcgacgaccagatcgagaataccctgcgccgcgtgcaagacccgcagcgctgcgcgtcgcagctggtgaacgaggctatcgcggcgggcggccacgacaacgtcaccgtcatcgtggccgacgtgaccggctacgccgaagtgcgccgtaagaagcttgcgcgcaagaccaagctgtccattgcgctggtgctggtgctgttcgcggccatcgtcgccggagccgcctggggcacgcaaacctacctgaacaccgccgcttatctggcaaacgacaacggcaaggtggccgtttatcggggggttcccggctcggtgctggggctgtcgttctcgcatctggagcgcaccaccgacgtgacggtggccgatttgcagccgggcgtggccaaccggctgaacgagggcatccgcgtggacgacatggaagcggccgatgctctcgtgaaggagtacgaggacgagatcgccgcacgctccaagaaccaggcggaaggcggcaacgccgaaagcggccgaaacgcggacgcgaaggatgcgtcggacgctaagaacggcggtgccgcgtgacgcgccgcaacgtagaactcgtcctgctgctggtggcggcgcccgtggtggcgctgctgttcgccatgatcgccatcaaccaggggcaatcgctcgacatgaccaccctcggcgtaccggcggccatcttcgtggccttcgtcatcgcgcacctcgccgtgcgcaagttcgccgccaacgccgacccggccctgctgcccctctcgttcgcgctgtccggaatcggcatcgcgttcgtcaccagcctggcgcccaacctggccgtcggccaggtgatgtggctgttcgtgggcgtagcgtgcatggtgctggtgctggtgttcgtacgcaacctcgacaaggtggcgaactacaagtacacgctcatgatcgtgggcttcctgctgctgctgtcgccgctggttccgggcctcggccaggagatttacggcagccgcatctggctgcatatcggcagctactccttccaaccgggcgagatcgccaaaatcgtcatcgtgctgttcctggcgggctacctcgcgcagaaccgcgagatgctgtcggtgttcacctggcgcgtgggcccgttcaggcttcccgacatccgaacgttgctgccgctgctgctgatgtggggcatcgcgctggtcatcgtcgtgttcgagaaggatctgggcagcgcgctcgtgttcttcttcgtgttcctggtcatgctgtacgtggctacgggaaagaagttctacctggtcatcggtttgggtctcatcgccatcggcggcatcggcgcgttcatggccttcggccacgtgcaggtgcgcgtgaacacctggctcgaccccttcgccgatgcgcagaacacgggctaccagctgacgcaggccatctactccatcgccgacggcgacttgttcggcgtcggcatcgggcgcggcctggccgaacagatccccgtcgttgagagcgacttcatcttcgcggccatcgcagaagagatcggccttctgggcgcggccggcgtgctgctgctgttcctgtgcttcgccgtgcgcggcttcgtgacggcggcgcgcgcgaagagcgacgtcagctcgtttgtggccgtgggtctcacgtccatgatcgtgctgcaggcgttcatcatcgtaggcggcgtgaccaggctcatcccgctgacgggtcttaccctgcccttcatcagccagggcggctcgtcgcttttggccagcttcatcatcgtaggcttcctgctgcgctgcggcgacgagggcacgggcgtgggtcaggagatggccagcgccaccacctcgctgcacgccaacagcgtactgggccgcgtgtcgctgggcaagcgcctgaaccacagcatgctcttgtgctccgccctgttcgcgctgctggtagcgaacctcacgctcatcatggtggtgcaggccgactattaccagaacatgccgggaaacaaccatacgcttgcgaaagaagcgcgctcggagcgcggcaccatcgccacgtacgacggcgtggtgttagcgcgcagcgtgaaggaggaagacggcacctacgagcgagagtacccggcgggcgacttggccagccacgtggtaggctactcgtcgcctcagttcggcaactccggcatcgagaaggcgtacaacgacacgctgaaaggcgaagagaacttcgcatcgtggaccgacgtgctgaactcgttcgccggcatcggcaccgcgggaaacgacgtgacgctcaccctcaactcgaagatccagcaagccgcgcaggatgcgcttgccggacgcaagggcgcgtgcgtggtgatggatcccgacacaggcgccatcctggccatggcctcggctcccacatacaacgcggccgacttcgcggcggtcatcgagcaggcgaacgcgaaccctgacgacagcaccctcgtcgatcgcgcggcaggatcgctgtacgcaccgggctccacgttcaagatcgtcacgctggccaccgcgctcgaggacgacgtggccgacgaggacacggtgttctcctcgcccggcaccatggagatcggcaacgcaaccgtctctaacttcaacaaagcgaactacggcagcctcaccttggcccaagcaaccgagctttcgtcgaacacggtgttcggccagctaggcgtagagatgggcgctgacaagctggtcgccggagccgagagcttcggcttcaacaaggagatcgacttcccgctgtacacgcccgaatcactcatgccctcggccgaggacctgcaaaagagtccctgggagctggcatgggcagccgccggcgagccggtgggagacaccacgcgccccggccgcgagagcccggccggcccccaggccaccgtgctcgagatggccatggtgggcacagccatcgccaacgacggcgtcatcatgcagccctacctcgtcgacagcgtgaacaacgccaacggcgaacgcagcttctcggcctctccgacgaaactgatgcaagccgtcagcaagaccacggccggacgcgtgcgcgacgtgctgctgggcgtcgtgcagaacggcaccggcaccgcggccgccatccccggcatcgacgtagccggcaaaaccggcaccgccgagaaggagaacggcaacgacagctggttcgtgggcatggcgccggccgaggatccgcgcgtcgtggtggccatcgtcatcgaggacggcgaagagggagtgggaaccgctaaagcgcagaatgtattgaaaacagctttggaagttcagggacttttgtagataaggtatgctgatggcccgtatactgtctggaagaagtatacagcccagcatgtaacctaaaggagctaaaacgtgaccggaaacatgataggcagggtattcaacaaccgctaccagataaccgagcgcatcggcatcggcggtatggcagaggtgtaccgggcgcaggacaacgtgcttggccgtctggtcgccgtgaaggtcatgctgccccaatacgccgccgacccgaacttcacgcagcgcttcaagcaggaagccgccgctgcagccaacctccagagcccctacatcgtgaacgtgtacgattggggtcaggacgagggcacctattacatcgtcatggagttcgtgcgcgggtccgaccttaaaaccgccatcatcgagcgcggcgccatcaaccagcgcaaagtcgccgagatcggctcgcaggtatgccaggcgctttccgtggcgcacggactggacatcatccaccgcgacatcaagccgcagaacatcatggtgcagcccgacggcaacgtgaaggtcatggacttcggcatcgcgcgcgcgaagaattccgtcatgacccaaacctcctcggtgctgggcacggctcactacatctcccccgagcaggcgcagggcaaggacctcaccgccaccagcgacatctactcgctgggcatcgtgctgtacgagtcggccacgggacgcttgccgttcgacggacccgatgccgtgagcgtggccatgaagcaggtcaacgacctgcccgtgccgccgcgcgagatcaaccccgatatcgatcccgcgctcgaggccatcatcatgaaggccatcgcgaagaacccggccgaccgcttcgccaccgcgaaggacatgcgcctcgcgctgaacgactacctggccggacggcccgtcaacctgggcgaaggcttcaccagcgccgagaccgtggtcatgggcggcgtggtgccccccgtcggcgtggccgacggcacggccgtcatgcccgcgatgggcggcgtcagccccgcatcccccaccgcggcgcagcgctcctacaacgcgaacaacaccagcgggaagaagaacaacaagaagaccatcgccatcgtcatcggcatcatcgcggctcttgccgtggtaggcggcatcgcgttcgccctcatgtcgggcagcgggaacgacaaagacaaggtcgccgttcccagcgtggtaggccagacggtggatcaggccacagccgccatcgaaggagccggtttcgagctggggaaggtggaggagtcgttcgacgacaaggtcgaatccggcaaggtgatcagccaggatccgaagggcgacagcaagcaggccaagggcactaagatcaacctcaccgtgtcgaagggcgtgcaagagatcaccgtgcccgatctgacgggcatgactgccgatcaagcgcagaaagcgctcacggccagcgggctgaagtacgcaaagggagccgccgagtactccgacaccgtcgagaaagaccacgtggcgcgccaggacatcgcagcaggcgagaacgtagccaaggacaccgtggtcacgtactacctgtcgctaggctccgaaggcatcgaggttcccaacgtggtgggcatgtcgcgcggaaacgccgtgaccacgctgaataacgcaggcctgatcgtggataccgacaactacacctacgaggccagcgaccagccggaaggcacggtgctcgcccaaacacccgcagcaggctcgaagctgcaaaaggacggcttggtggcgctaacgctgagcaaggggcccgagaagaagacgttctccgtcgcggtcaacgcgaatggaggcggcaagatctcggccagcgcttcgtcggtaaccgagggcgacagcgtcaccatcaccatcacgcccgatagcggctacgaagtagcatcggccagcggcttggacgacgtgccgaagtcaggcggcaccttcaccatctcgaatgtgaaggcgaacgtcaacgtgaacgtgaccttccaggcagttacgccatcccccacgccggatcccaagccaaccgacgacaccaacaagaactaggaatctccgcgatgcgtcttcgggcgcatcgctttttttatgcgtcctgcaaggcgtcctgcaagctcggggcaagccggacgattaatgctacaatatcaaacgcgcctccgtagctcaggggacagagcaccgctctcctaaagcgggtgccgcgcgttcgaatcgcgccgggggcaccatctgatcgcaaaacggcgcctctcgggcgccgtttcttcttgcaagccggaagcgcgttccgccctcctcctactggtactcgcgcagagccccttccttcaatacgaggatcacgcaggttcccttgccgagctcgctttccacttccatatgcgtaccgggaccgaagtagccgcagattcgatcgtgcacgttcttcaccgcgatgccgaggccgagcgacgattcgggatgaagaatgttgcagcgcgcctcttcggtcatacccacgccgttgtcgcacacgcgcacaatcacgtcgttgcccgtgacctcgcccgtcacctcgatagtcaacttcccctcgctcggcatggcgtggcgtacagcgttctccacgagcggttgcagcaaaaaaggcggcaccagcatgtcttccacacgaggatcgatccgcatctccatctccacgcggtcggcaccgaaacgcgccacttcgaacgtgaagtaccgcttcgtttgctccatctcacgcgcgaacacgatcagatcggcggagtcttcaagcgttcggcgatagaacacggcgaattcgcgcagcagcttgcgcgccgtttcggggtcggtgcgaatgagtgaggcgatggtgttgatggtattgaacaagaagtgcggattgatctggctttggagcatcttcagctccatgcgcgtggccaactgcgtctgctcttccagcgccgatgccgccatctgcgtggacagcagtttgccgaacccttcggcgatggacttctgcgtctcgctgatgtgcttcgctcggcgatagtagaacttgagcgtgccctcgacgttgcggcctacggcaagcggcacgatgatggccgccttgatattcgacgactcgctggggaagccgatatcttcgggcgtgaacaggatgcgcaacttgccgtcggcgagcgtggcatgggtcgcgtgggtgcggatgatgctgcccggcaggttctgagcttcctcgaagcctgcgtatcccaaaatctgctttttgtcggtgatagccacggcgatagccgcggtggacggcagcagcaacccgcaaatcttctgcgcggccttgtaatccatgccgtcgttcatgcaggtcagcgtttggctagccagcttcaacatggagtcagactgacgagcgcgcaccgaatcgggatccatgatgagacggatgaccaccactatggacagcgtgaacaccacgcctgcgcataccatgattgccacattgcgatacggcaccgcgatggaccacagcaacacaagacccgaaagcgccgtcaccgtgaacatgaacatctcgagcgtgaagaagcgcggcagcgccgatttcgactccctggtctcttcctgcatggtacctccccgcgttgctcaaccctgcccaagcagcgcgcttgagcccatcagcccagtataccgaattcgttgagaacaagtatgacggcggccacaatcaggaagaagccgaagacgaagcgcaatgcgagctcgggaaccacccgcacaagacgcgcgccgatgaccgcgccgggaatagagcccacggcgatggcaatgcccgccgcgtaattgatgtttcccagcaacgcctgctcgacgacgccgggaatggcgaggatcatcacggcgatcagcgacgtgccggacgcctggcgcatctcgatgccgataagagacagcatgaggggcaccatgatgaacccgccgcccacgccgacgtagccggatgccacgcccgcgcccaggccgatccctgcgccgatgagcagctgtttgcgcgtgagtttgcgcggcacagggtcgacggcagcgccagcctgtgcgctcaccttcgtcggatcgtcaatcgcgtcgtcgttcgccgcagcgtcgcctacacgctcgatggcggcttcgtccggctcgatcgtgctgctcgacgctgcatgctgttgcgtgcggttctgcgagcgcatcttgaaggccttgcccagcattttcaccgccgaccagccgatgatgagcgccgcagccaccataatcatccaggcgggcgaaatctgcgcaagccacacgcccaaaggcgaggtgagcgctccgccgaggcctgccgccacgccaagcgacacgatgcacgttttatggcgtatatgggatgccgcgcccgatatggacgtgggaataatggcgaacagcgacgtggccgtggaaacgacggggctcatgccgaacgccaaacggaagatgggaaccatgaccgtgccgcctccgatgcccagcaatccggacaaaattccgatagccacgccggcaatagccggcagcacgaacatagcgagcacatccatagtttgacgcccgatcctttcccgatctctcaacacgcgagccgctcaactgcacgccatcgtacagcttagactgcgccccgtggaggctccgtcatgcaaacgttgccgagcgtgcttatttattccgcgacgttcaggcgaatctcgctcgtcacacccggatcgatgccggccgccgcgatggccgcctgcgccgaagcaagtcgatcggctccgttgccggcgctggcctggcgctgcgcggccgactgcataagcgccgtacgcaggatctgatcgttctccatgcgcgccatcagctccggccacacgaactggaactcgaagtacttcgagcagttgcgctgggcatacgtcgtcgcttcgccggtggccgccttcgccgctttccggtacgccttcttgtcggggcgcgccaagctcctcagaaaggcggtcaaacgaatgcgcttcgtgatgcctggctcaaggaacgggcccggatacggctccagcgaagacggcttcacctgcaaaaggtcgatctgcgtgcggctgtactccatcttccggtattcgtagagccatcggaagatatcctgacggaagcgcgtgccctcgctctcggtttcgggaggaaggtggcgcaggctccactgattgtcgaaccagatgtccgaaccgtacatacgcaggtcaagcatgtaatcgagatcttcgccgcgcgcgatccaaggatcgaacgacagacgcttgaacgcctctttatgcaaagcaaggcagccgccgcacgtatggttcgatcgggaaagacgagggccgcgcatggccttcgagatccatttgttgaaggcctttccctgctgccagaaatggttgtaccacttgtcctggctcttcgacaggtaggagccttcggaattgaagtagaagccggtcttggccaggatgggaatgcccttcttcgtgagcttgcccaggccgtacatggccttctgcaggaagtcggcgtcatccaccacttcgtcgtcgtcgaggaacaccaccgagtcgaagcccagcacgtcggccatcaccagacccaggttgcgcaccgcaccgtagccggacaggccgatctccttctgcagcttgcccaaacccagctgctccatgcgctgctggataagtgccagctcgggagcgccgatgaccacggtgttcagcgagggaaagcgcgagacaacgctttgaaccttctcggccgcctggttctcgatcgacggctcgctgaccacgagcacgatgatctggccggcgccgcgcaccttctgcaacgacgcaagcaaacgcgggagctcgccgggttgcgagatgggagtcgcgtgatcgtaggtcgtgagcacgctgccgccttctttgcggcgacgcgcggacacgaaagtggggatcacaataacggggttcatgcacgtccttcactcgggtacaactgcgagggctcggcccaaccccatattgtagcgatatacgccccgcagccttgtcaattcatcgaatcagtgaaggcgagctatttggtcatatattaaaagaaagcaggcgcggctcacgcgttccgcgcctgctttcccgctagcgggctactgccttcttcaccacgtcgaagcgcttgagcgcggagagcagcggaagccccaacacgtagatgaccagggcttcgccgagaccggtggccaccacgccgaacaggtacatgggcaggtacagcccgtcgagcgcgatagacgtgaacgggatggtgtagtagcccaggccttgcagcagaaggggtagatacgcaggcacgatgagcgcgttcgcgatcacggggcccagcagcgccagcttcggacgctcgcgcattttccaacaccacagcgcgccaaggaacgtggccaggctgccgaacaccacgtccagcatgcccagcgcccccgttccgttgatggcgagcgccataaggttcgcgatgatgcacccgacagtgaggccgggcacggccgccggcgtaagcactgccagcacgcacaccgcctcggagatgcggaactgcaccggcccccaagccagtccttgcagcgccaaaagcgtgatgagggtggcagccgcgtacacggccgcgatcatgcccgcttgggcgacgtacgtcgtcttcttgttcatggatatgctcctgttctccgcgcggcgcggtgccgcgggctttgggcagctagtaatccgcgagtgcagggcccaacgatgcaaacgcggagccgtcgacggatgcgagcgtgagtttcgcaaccggcaaaggccgaaaggaagtatagcagaggcgcggccgagggcgcacggtaaaagcacgaggggcgccgcatgtcgcaagcatcgaacacggggacgaaccgccctgcttgctatgcacgccatgaagcgctttttgcacaaaaacccgcgacgttcgataacaagaaggcccgaaagcgcgcccaagggtgcagctttcaggccttcgattatgcacgatgctctgacctggcgcttcacattatcgcgcagaagcctatcgcaagcgaacggtcagcgaaatcacacatcggcactttttgtgcgtagaagcgcgcggagcgtgcatcacgctggattctgcacggcatcgcctacgcgcccggactcctccttgcggcggtcgatcgcggcgcggcggatgcgaaggacggcgtagcccacgaacaccaccgagtacacgacgacggccatctgcgcaggagcgccgccgcgcagggcggagggcaccagcatgagcagcagatgcacgtacacgaggccccagaagggatacgccagcagctgcacgcgcttccacgtctccttcttcatgcgcttcttcaccacgttgaacgacgtcacccccagcacgaccagcagcgcgaacagcgccaacgcaagcgcaagcgccacggcgacattggtttgcggcagccccgtcgagaggttggccgcgtacgaggagaggtagatggccatgtgacccagcgacagcagccacgccatgatagacagctcggcgcggatgggacgcaggtacgtcgccacgcgcgagtcgcgcgcgaacaccccgatgtacatcacgacggcgaacagcgcggtagccagcgtgcacttgtgcaacagcaggaacagcgcgtcgtacagcatcagaggcagtcccgcgaacgagccgaccacgaacagcacgtcaagcgtggcagccagggcgtagaacgccaacggacgcgacttgatgggccgcttgcatgcgaacgcgaatgccacagcgcccgcaagaaccaagatgagcgtcatgagtgcacctccatcaccgtcaacgccagcgccgcgaacgcgcaatagggcttctcggccgcaagctcctgcgtgcgccgcatgaacgcagggagccacgcctgcgcgtgctcgcgctcaaacgtctgaatgcgctcggtccaagcagcgacagcttcggcatcgtcgcagttcagagcatcggcgagcttcgcgtacagatacgacagtaattcgaactcctcgaacacgctatcgcacggctctttgcgcgcattcttcgccaccacacccgcctcgcgcatcaagcgctccacatccagcgtcaccggcgtgcggaacagcgcaggaacgcctttcataccccgctccacgtgcagaaacgcgctttcgtacgggaaaatgggagtatggccgccgggtgccaggtacaggcgcgagtacacgatgcgcatatcggccaacagatcggccgccgacgcatcgcgccaagcagcaagcgcttcagccgtcgaatccgccgctgccgggtcggcgcccgcatcgagcaggcatgcccgggcatcgtcggcgaacgatccgtcgaccagcccttgcgccaggcgctcatcgggatacgcgaacgcgcacgacaacaactcgaacgcatcggccttccccaccgcccgcttcactacttcttctcgccccataag

SEQ ID NO: 8959 - DNA, 377 bp, Unknown
  gut microbiota DNA sequence
agcgcgggcacgcacgcctccaccacggcgcgccacgccgccacctcctcgggccccgcctcggccgccacggcggcgggcgaggcggcaacctgcgcgagcttcgcgtcgatccacgggcgcttctcgcggacgaacctctcgatgtcgcgatcgcgcacgtacgccggcgccgacacctctacgaacccgccgccgcgatgcacgcgcaggttgaggttcttgatgcgcttgcgtgtgagccgcacgaccaggccgtccaccacgagttcgacgggctcgacgggcgcaacgggacgcgaggccgaagcccgcccccgcgccgcacgctgccgcgggctcacgcgaccacctcccgatcgcgccggcgcggcccg

SEQ ID NO: 8960 - DNA, 530 bp, Unknown
  gut microbiota DNA sequence
tgcatgtggctcaagcccgtgcgcgccgagctgtccatcgtcgcctggctcctgtcgctcggccacgtggccgtgtacggggccacgtacctgccgcgcatcgcgtcgggcggggcgacgaacggcaacgtggccgcctcgttcgcggtggcggtcgtgctgctggcgctgctggccgtgctgggcgtcacgtcgttcaacctggtgaagaggcgcatgcgcaccgaaacttggaagaaggtgcagaagctcgcctatccgttcttcctgctcacgtacgtgcacctactgctgatgctggccccttcggcgctgcatggcggcgttgcggcgacgacaagcgttgcggtatactcgaccgtgttcgcggcatacgtcgttttacggctcgtccgcgcggcgaaggaacgccgtatccgcgaagccgtctgacgctcgaggggaagcgcgcggttcgggctgtcgtccgtttcgggagggggagtcgacggcttcatgaagggatttttcgaaaagctcgtcaaggcgtg

SEQ ID NO: 8961 - DNA, 4782 bp, Unknown
  gut microbiota DNA sequence
gactgggacgcgaaggacgcgctcatcggcagcggcaccatcaactgcatctggaacggcttcaccatggaggggcgtgaagacaagttcacgttctccgagccgtacatgtacaacgagcaggtggtggtcgtgaagaaggacagcgatgccaagaagctcgaggatctggccggcaagacggtgctgacgcaggtcgactccgcggcgctccatgtcctggaggacgagaagggccagaagcccctcgccgacacgttcaaggagctccagaccatcggcgactacaacaacgcgttcatgcagcttgagtccggcatggtggacgccgttgcgtgcgacctgtccatcgccagctaccagatggccgccaagcccgacgcctacgtgaagctgggcgtgctggcccccgagaactacgcggtgggcttcaagaagggcgacaccgagctggcccagcaggtgaccgacgcgctcaaggcgctcaacgaggacggcaccgtcaagcagctgtgcgacaagtacgccgaccagggcatcacgtacgacaactgggtgctgtaaggttccgctggcctgacggccggcggacctgctcgacgctgcgggccgttcgcgcaccgaatcttcgcgcgatcccggaagctcgcgtaccgcagtacgcttcgcctccgcgatcccccgaatcttcggcacgggaacggtcctcgctgacgttactggacctgttatgtttgagaaaggccgaacatggaattcgcgaccatgatggagcttctgctctcgggcttggcgttcacgttgcagatattcgtcaccacgctcatcggctcactgccgttgggcgtgctggtggcgttcgggcgcatgagccggttcaagccggtcgcgctcgttacgcgcttctacatctcggtgatgcgcggcacgcccctcatgctgcagctcatggcgctcatgttcggcccgtactacctgttcggcctgcagatgggcaacgattggaagtactgggcgtgctccatcggcttcatcatcaactatgcggcctacttcggcgagatctaccgcggcggcatccagtctatcccgcgcgggcagtacgaggcggccgaggtgctgggctactcgcggttccagacgttcatgaagatcgtgctgccccaggtggtcaagcgcatcctgcccgccatgagcaacgagatcatcacgctggtgaaggacacctcgctcgcgttcgtgctgggcatcatggagatgttcagccaggcgaaggccatcgccgcctcgcaggtgagcatgcttccctacgtcatcgcgggcgtgatctactgggtgttcaactttatcgtggaaatcatcctcacccgcgtcgagaagcggctgaactactaccatgattgataggttccgctgttctggcgaacagcggaacggctcgacgctgcagaaagcctcgctgactttggcaaacctggaaggagcacatgtcatgaccaacgaacaacccgtcgtgctgctcgagcatgcgcagaaaagcttcggcggcacgccggtgctcaaggacatctcgctcaaggtgcagccaggcgaggtggtggccgtcatcgggccgtcgggcggcggcaagtcgacgctgctgcgctgcatgacgctgctggagacgctcgacgcggggcgcttggcctacggcgaccttgtggttgccgaaagcgacggcgcgggcgcggcggcctatgcgccaaaggccgtgctcaaggaagcgaagacccgctttggcctggtgttccagaacttcaacctgttcccgcactactcggtgctgaagaacatcaccgacgcgcccctgcatgtgcagaagcgtccgaaggacgaggtgctggcggcggcgcgcggcctgctggcgaagatgggcttggaaggcaaggaggacatggtgccctgcgagctgtcgggcggccagcagcaacgcgtggccatcgcccgcgcgctcgcgctcgaccccgacgtgctgttcttcgacgagcccacgagcgcgctcgacccagagttgacgaaagacgtgctgaaggtcatccgcgacctggcggccgagaacatgacgatggtcatcgtgacgcacgagatgaatttcgcacgcgacgtggccgaccacatcgtgttcatggacggcggcgtgatcgtggaggaaggcccggccgagcagctgatcaacaacccccagcaccagcgcacccaggcgttcctagcgaagttcgagggggagtaggggtagctccgctcaggatgacatcgcccagcctgcttccgaactgggatcgcggtatccggtcgtcggcttcttcgattcgggatgcggcgctatactggaagctgcaacctatccggaaagcgaggcgacgatggctatcgacaaggtgaaggcgtttctgcgcgagcggggcatggaggaacgcgtgctggagttcgagacgtcgagcgccaccgtcgagcttgccgcgcaggccgtgggctgcgagccggcgcgcatcgcgaagacgctgtcgttccacgtgggcgaccgcgtcgcgctcgtggtggctgcgggagatgcgcgcatcgacaatcccaagtacaaggcgcagttcggttgcaaggcgaagatgctcgccgccgacgaggccgagccgctgatcggccacggcgtgggcggcgtgtgcccgttcgcgctcaacgagggcgtggacgtgttcctcgacgaatctctgcggcgcttcgacaccgtgtatccggcggcgggcaacgccgcgagcgccgtgcgcctgacgcccgacgagctggaacgctgcgccgcgccctgcacctgggtcgacgtctgcaaggtcgtctgatggaggcgggggagcgccgttccggcgagatgacgttctacgtcgtgcgtcacgggcagacgctgttcaacgtcatgggcaaggtgcagggctggtgcgacacgccgctcacggacgagggcgtgcgcgccgcgcagtcgctgggccgcgggctggccgaagtagacttctctgcggcgtactcgagcgacagcggtcgtgccgtgcacacgctcgacgagttgctgcgcgcacgggggagcggggtgccgttcggcccctacgacgatatgcgtctgcgcgagtggtgctacggcgacctcgagggcgagccgggcgagctgctgcacgccacgctcgacgtggggttcggcgcgccgctgtcgttcgaggagcacaatcggcggctgcccgaggtggccgacgtgctggcggatgcggattgctccggccgcgccgagcgcttcgatgccatcgaacggcgcctgcgcgggttcttccgcgaggccggggatgccgagcttcgacgcgacggcggcaacgtgctggtagtgacgcattcgttcgtcgtgcgcacgctcgtgtacctcatcgacccggagcgcgtgaacgatccggtgaagataccgaacgccagcgtcacgcgcatctcctacgatgggtcggatttccgcctgggcgagataggctccaccgcctggcagcggccgtgaacgcggaagcggccggagcaagcccgccccgaccgcttctgaaaggaactaccagcgatcccagctgatgcggcagacaggcgcagtgccgcccatgccgctgcgttcgcgctggccgtgctgatggtgatcgtgcctgcgagcctgatcgtcctcgcgtccgcgaggacggccgtcctcatgaccgtccccgtgctcgtgcgcatggccgcatccgcaggcgtgcgtcccgggctgaccctgcttccggctgtgcggatgctcctcgtgcgagccctcttcggttccctcgtggtcgagcgggtgcttgcgcgcgcccatcagccactcgccggctagcagctgcatgcccatgggcatgagccgcaccgagatcgaacccactttgttgtaccagcccgtcacggcgcagcgctcgccgcgcatcagcgcgcggtacacgcggatggccgtctcgtcggtgtccatggagaagtacttccacgcgggtgcgtcctcgatgccggcgttcttcgggaagttcgtgcgcgtggcgccggggcagacggtggtcaccgacacgccggtatgcttgagctcgcgcgccagcgcggttgagaacgacagcacgaacaccttcgccgcgccgtacagcgcgttgtaggggcacggcgttttcgccatcatcgagctcatgttgaggatgcggccgtggccgcgctccagcatgggatgcaggaacacgctggtcagctcggcgaggctggtgacgctgacctggatcatcgagcggatgtcggcgatgggcaggtcggagaactggccggcggggctgtagcccgcgtcgttgacgaggatctcgatctccttgcccgcctcctggacgcgcttgaagatggtgcgcgctgcgtcggggtcggagaggtcgcaggcgatgggaagcacgtcgatgtcgagcctgcgcagctcgtcggcctgcttttccagagcctccttgtcgcgtgcgacggtgaccagatcgaagtcgtcgctggcgaacagcaggcagagagcctctccgatgccgctcgtcgcgccggtgaccaatgcggtttgtgccatgatggcgctcctttcgtgccggacgcgctgcgcccgagtggtttttccgtcatgataggagcgggtggcgagtgccgttcgggcggctgcgcggccgttggaaaggtgcgacttgcacgcaatcgggctgaaatggcgag

SEQ ID NO: 8962 - DNA, 494 bp, Unknown
  gut microbiota DNA sequence
cgcctcctcgagggcgccctcctcccgcttcaggtcgggcgcggcgtcgtcgaggttgcgcatgccgcgcgcgaccagggcgaaggccgtgatggccatccagcagcctacgagcacgacggcggccaccgaggtgcccagtgcgctgacgcctaccgaggtggcgaacacggcaacgggcgccgccgccagcagaagcgagttctgcgtgcccagcgcgctgccgcgcgacgcctcgggaatgcgatcgagcatgaagaagcccagcagcgccgaggcgggcccggcgctcacgcccagcacaagcgcgcccagcagcatgagcgggtaggcgggcagcgcgcccagaatagccacgcccaacagcatgccgaacatcgacagcacgtaccatgtccgacgcgacagacgcggagcgaacacggcataggcgagcgagcttgccagcaggcccagcgacatggtcgacagcacgtagcccagcagctcgggac

SEQ ID NO: 8963 - DNA, 2520 bp, Unknown
  gut microbiota DNA sequence
gcggcataggcgagcgagcttgccagcaggcccagcgacatggtcgacagcacgtagcccagcagctcgggacggccgctgtccgtgaagaacacgggcaggacgaggccctggaacgatcccatgaccatgacgatgccgaacgtgagcagggtggagaccgtcagcacgccgtcggtgcggaacagcacgcggatgccggtgcgcagcgcgccaacggccgatggcacgacgccccgctgcgcggtcgcgtcgccttcgttcgcaggggcacccgatcgcaccgcgcccacgcggcgcgggatggtggcggtggcaagcgctgccgagaacgagagggcggccgtgaaccacagcgacggcacgccgccgaccaggccgatggacagcgccgccaacgcgggccctacgatggtgaccagcgaatcgagcgactgcgacaaccccatgaaccgttggaggtccacgtcgtcgtgtttggtgacggctggcagcagcgcgtcgcgcgcggtcatgccggggatgtcgcccacggctcccagcaggcccagtgcgacgaaccaccagaagttcagcccccataccatgtccaccacggggatgagcgcgacgctggcggcggatacgaggtcggaggcgatggatatggtgcggcggttgaagcggtcgagcgccgcaccgcccacaatgccgatggccatctgggggacggcgcagatgagcgccagcgtgccggcggccagcgcatcgccggtggtagccagcaagatgagcggaagcgcgacggctgcgatggagtttcccagcagggaaagcgcgttcgatacgaggaatctgacggatgtgcggccgaacatgaggggtcctttcttgcgggatcctttgactgcgcgcctgtggcgcttcgctcaggatgacaatcgttgctagaaaggagtaaaaactacgacgctgcgtcggggtcaagggctgtgttgcgctttttcataacccgctgcttgagcgcctcttcgaggcgatcctgcgcgtatgcctgagcctcgttgaggtgccggcggatgacctcgtcggtgagcgcttcggcttgcgcgtcgtattccccatcccaatcggcccagtctacttggtcgaagtagtcgatgagggggtcgaagcaggggatggcttcctcgacgatgcggtcgatgtcctcgcgaggggtgcgagggtccagcgcgtcgaaccacgcctggctctcggcgagctggccgagcgtgccgttttcgtccagagcggccataacctgttccacattggcggcgtcttcttccgagaacaagtgcccgacgatgagcagcgcctcgcgatccccggcgttcgcgggcagggcgacgcgctcgtcatcgagaaggattttggcggttcgggcgaggtgagccggaagatcggggtcgagttcctgctgcttgagcagggcgatggtgcgccgctgctcttgcaggcgatctatctggcacgcgagctcccgatccagctcgtcaagcgcggtgccgccccgcaggtcgtcggcgttctgcaagcccgcgtctatctcgtcgagcacgtctccgatgcgcgcaagcgggaatcccagcgatgcgaggcgcttgatgcgcagcaggcgcgcgagatcccctgcactgtagtcgcggtagccgttctcgccgcgcggcggctcgggcaagagcccgatggcgtggtaatgccgcagcgtgcgcaccgacacccccgccagcttcgctatctcgctcgacttcaccaggaactctccttcgctcccgcctaccgcgcccggcggaccatcaggcgctcttcgatggggaaggcgtcgatgctgcggcgctccaccgtctcgaagccgaagtggccgtacagctgctcgagccgttcggtgtagcaatcgaggtagcaggccagcccgtgctcgtcggcgtattccagaaacggcgtgaacagacggcggaatgctccgctgccacgcttctcgggatccacaccggccgagatgaagtagatgaaatcctcgtcggccgccgcacgctcgagcggccagctcgtggaggagatggggtccatcgcctcgatgcgcggtcccagcacgtcgatctcttcgtcggtgagcacctcggccagaagcgcgcccgattcctcctcgagctcggtccagtcgacgtcgcccagctcgctgcgcaggtagacgttcgcggcccccgctcggtcgggcagcgcgtacacgcactggtacggtgcggtgacctcgtagtccgaccggatgacggcgcgcgtgatctccagcttgcgatcgcgtccgatgcccagctcgtcgagcgcttcgagccaggtgacgtaccacatctcctcgaggaagcacgtgccaaccatgcgggcgagcgcgtcgagctcctcggttcggtcgggttgaacggtgatgagtccgggcaggttcatagggcatccttttgcgattcggtttcggttcgtcttcgattctcgcacgacccg

SEQ ID NO: 8964 - DNA, 691 bp, Unknown
  gut microbiota DNA sequence
caccatgcgggcgagcgcatcgagctcctcggttcggtcgggttgaacggtgacgagtccgggcaggttcatagggcatccttttgcgattcggtttcggttcgtcttcgattctcgcacgacccgcaagccttgtcgagcgcttcggcgattcgggttacaactgagggcaaggcgcggccgtactgcaatccggtcgcgccggtttgtcttcgccgcatcgcgctggcgctgccgcgacgacgggctgcccgttcagttcgctttcgaaggaggcttttcgatgaccgtcaaggattttctcgataccaacgatttcacgaaggaccagctgctcgacatgatcgagctgtcgcgcgtgctcaagcgctgcgtgaaggccgggtactaccccgagttgctgaagcataagacgctgggcatgatcttccagcaggtgtccacccgcacgcgcctgtcgttcgagggcgccatggccgacctcggcggcacgggccagttctacgcgcccggcaccatccagctgggcggtcacgagaccatcgaggactcggcccgcgtcatgagccgcctgctggacgttctcgaagcgcgcgtcgaccgccacgaggacctcgtcgagctggcgaagtacgcgacgatccccgtgatcaacggcatgtccgactacaaccatcccacccaggagatg

SEQ ID NO: 8965 - DNA, 902 bp, Unknown
  gut microbiota DNA sequence
gcacgagaccatcgaggactcggcccgcgttatgagccgcctgctggacatcctcgaagcgcgcgtcgaccgtcacgaggacctggtagagctggcgaagtacgcgacgatccccgtgatcaacggcatgtccgactacaaccatcccacccaggagatgggcgacctcctcaccatgatcgagcatctgcccgagggcaagcgcatcgagaactgcaagatggtgttcgtgggcgacgccacccaggtgtgcgtgtcggagatgttcatcacctcgaagatgggcatgaccttcgtgcagtacggccccgagggccatcagattcgcgaggacctgctggagatcggccgtaagaactgcgaggtgtcgggcggcagcgtcagcgtcaccgacaaccgcgaggaggccatgaaggacgccgacttcgtgtacaccgacgtgtggtacggcctgtacgacaaggagctgtcgaaggacgagcgcatggccatcttctacccgacgtaccaggtcaccgaggagcttatggccatggctgctccggacgccaagttcatgcattgcctgcccgcctcgcgcggcgaggaagtgaccgacgcggtgatcgacggcccgcagtccatctgctgggacgaagccgagaaccgcaagcactccattcgcggtttgctggcgtacttctgcaagcaggccgaaaccgaccagcccgaagccggagaagcccacgaccagctgaactacctgctggaaggcttgggaaaggctccgatcgaataaggctcgcctgactgaaaggggcctggcatggcaaacaagaaattccggttgatcgatgcgatcctgtcggtcatcaccgtcgtgttcgtggccgaggcggcggctcctgcggccgccatcggca

SEQ ID NO: 8966 - DNA, 704 bp, Unknown
  gut microbiota DNA sequence
cccggacgccaagttcatgcactgcctgcccgcctcgcgcggcgaggaagtgaccgacgcggtgatcgacggctcgcagtccatctgctgggacgaggccgagaaccgcaagcactccatccgcggcttgctggcgtacttctgcaagcaggccgaaaccgaccagaccgaagccggagaagcccacgaccagctgaactacctgctggaaggcctcggcaagcaagcgatcaagtaagggtccgactgatttgaaagaggctccttatggcaaagaataagaaattccggttggtcgatgcgatcctgtcggtcatcaccgtcgtgttcgtggccgaggcggcggctcctgcggccgccatcggcaactcgcagttcttctggtggatcttcctcatcatcgcgtttttgctgccgtacggattggtggtttccgagctgggcaccacctacgacgacgagggcggcctgtacgactgggtgcgccgcgcgttcggcgacaagtggggcagccgcgtgagctggtactactggatcaacttcccgctgtggatggcctcgctcgccttcctgttccctgagaccatctcgatgatcaccggcatggagatcgggctggtgccctcgctcatcatcgagctggcgttcatctggatcgtcgtgttcctcagcttctcgaaggtgtcggactcggcgtggatcct

SEQ ID NO: 8967 - DNA, 415 bp, Unknown
  gut microbiota DNA sequence
gtcgctcgctttcctgttccccgagaccatctcgatgatcaccggcatggaaatagggctggtgccctcgctggccatcgagctggcgttcatctggatcgtcgtgttcctcagcttctcgaaggtgtcggactcggcgtggatcctcaacatggccgccgtgctcaaggtgggcatcgcgctggtggtgggcggcctcggcatttggtacgccgtgaacttcggcttcgcgaacgacatggcgcccgagacgttcctgccggcgctcgactcgaacagcctgacgtatctgtccatcatcctgttcaacttcatgggcttcgaggtcatcaccacgtacgtgggctcgatggagaacccgaacaagcagattccccgcgccatcatcgcgggcggcatcgccatcgcggcgctg

SEQ ID NO: 8968 - DNA, 1494 bp, Unknown
  gut microbiota DNA sequence
cttgtccatcatcctgttcaactttatgggcttcgaggtcatcaccacgtacgtaggctcgatggagaacccgaacaagcagattccccgcgccatcatcgcgggcggcatcgccatcgcggcgctgtacctgttcagctcgttcggcatcggcgccgccatcccggccatggacatctcgctggactccggcatcatggacgccgtgggcatcatggcgggcgtgggcagcgtgctgttcatcgtggtgggcgtcgtgttcctcatcacgctgttcggcaacatggtcagctggtcgttcggcgtgaacttcgtggccgagcacgcggcgcgcaagaagaacatgccgaaggtgttcgcgcacgagagcgaaaagaaccagatgcccaccggcgccgccatcgtcaacggcgtggtggccagcgtgctggtgctgctgtcgcccgttatggagctggcgggcttcgacggcttcttctggatcttcttctccatgaacatcgtgttcctgctgatcagctacattcccatgtttcccgcgtttttgaagctgcgcactatagatcccgcggcgaaccgcgtgttcaaggtgccgggcggccgcggcgtggcgttggtggtggcgtgggtgccggtgatcctgctggtgctggccatcatcgccactatcgttccgctgaacggctcgcccgaggagatgagcaagatccccatgctcatcggcgtgatcgcgttcgtcatcctgggcgagctcgtgcgcatctggtcggcgcgcgggcgcaaggacgactacggcggcatgggctcgagcggcgacccgttcgagttcgatgtggcgcacggctacgaggaaatgcctgaatccgagaagatcgccgtggaagaggatctgatcatcggccgcgagccgcgcgatctggtgtaaccaatcccgaaaggacgtacttatggataccatttacgagaacgaatcgaccccgaagaaagacggctaccgcatgcccggcgagttcgagccgcaggagtgcatctggatgctgtggccgcatcgccccgacaactggcgcgacggcgcgaagcctgcgcagaaggcgtacgccgacgtggcgcgcggcatcgcccagtacgagccggtcatcgtgggcgtgaaccccgaggactacgccgccgcgcactacgtgctaacgggcgaggagaacatcctggtcgtggagatgaccagcgacgactcgtggatccgcgactgcggccccacgttcgtggtgaacgacgacggcgacgtgcgcgcggtgcactggcacttcaacgcatggggcgggctggtggacggcctgtacttcccgtgggaccaggacgcgctcgtgggcctgaaggtggccgacctcgccggcgtggaccgctaccgcccggactcgttcgtgctggagggcggctccatccacgtggacggcgaaggcaccgtgatgaccacggagatgtgcctcttgtccgagg

SEQ ID NO: 8969 - DNA, 814 bp, Unknown
  gut microbiota DNA sequence
agggctggtggacggcctgtacttcccgtgggaccaggacgcgctcgtgggtctgaaggtggccgacctcgccggcgttgatcgctaccgcccggactcgttcgtgttggagggcggctccatccacgtggacggcgaaggcaccgtgatgaccacggagatgtgcctcttgtccgaggggcgcaaccccgagctctcgaaggagcaaatcgagaactacctgtgcgagtacctgggcgtcgacaaggtgatctggatcaaggacggcatagaccccgaggagacgaacgggcacatcgacgacgtggcctgcttcgtgcgcccgggcgaggtggcctgcatctggaccgacgacgaggacaacccgttctacgaagccgcgcacgccgcctacgagacgctgtcgaacgccaccgacgccaaggggcgggcgctcaaggtgcacaagctgaccatgccgaaggagccggtctacatgacgcaggaggaagtggacgccatcgacgtggtggagggcaccatcccgcgcaccaccgaggacgtgtgcatcgcctcgtacatgaacttcctcatcggcaacgatttcgtgctggtgccccagtacgacgacgaatacgacgagatggcgttgcagcaggtgcagcagatgttccccgaacgcgaagtcgtgggcgtgcccacgcgcgaagtggtgtacggcggcggcaacatccactgcatcacccagcagcagccggctggcgtgtaaagtccgaagccccaatcagaaaggatttcccatgtcctatcagaaaggacccggccagaccgtggt

SEQ ID NO: 8970 - DNA, 998 bp, Unknown
  gut microbiota DNA sequence
cgaccccgaggagacgaacgggcacatcgacgacgtggcctgtttcgtgcgcccgggcgaggtggcctgcatctggaccgacgatgaggacaacccgttctacgaggccgcgcacgccgcctacgaaacgctgtcgaacgccaccgatgccaagggccgccagctcagggtgcacaagctgaccatgccgaaggagcctacctacatgacgcaggaggaagtggacgccatcgacgtggtggagggcactatcccgcgcaccaccgaggacgtgtgcatcgcctcgtacatgaacttcctgatcggcaacgatttcgtgctggtgccccagtacgacgacgaatacgacgagaaggccttgcagcaggtgcaggagatgttccccgaacgcgaagtcgtgggcgtgcccacgcgcgaggtggtgtacggcggcggcaacatccactgcatcacccagcagcagccagttggagtgtaaagtccgaagccccaatcagaaaggatttcccatgtcctatcagaaaggacccggccagaccgtggtcatcgccctcggcggcaacgccttgggcaacacgccgcaagagcagctcgagctggtgaagaacaccgcctcgcacatcgtcgacatggtgggcgagggcgtgaacgtcgtcgtgtcccatggcaacgggccgcaggtcggcatgatccaaaacgcgttcgactacgcgaacgcccatgacggcaagacgccggccatgccgctgcccgagtgcggcgccatgagccagggatacatcggctaccagctgtcccaggccatcctgaacgagctcaagcgtcgcgacatcatgcgctcgtcggtggctctcatcacccagacggtggtcgacgcgaacgaccccgcgttccaggatcccacgaagcccgtgggcgcgtttctgactgaagacgaggccgtgcgtcttgcgaacgagacgggcgccacgttcaaggaggacgccggccgcggctgg

SEQ ID NO: 8971 - DNA, 2156 bp, Unknown
  gut microbiota DNA sequence
gctcattacccagacggtggtcgacgcgaacgaccccgcgttccaggatcccacgaagcccgtgggcgcgtttcttactgaagacgaggccgtgcgtcttgcgaacgagacgggcgccacgttcaaggaggacgccggccgcggctggcgccaggtggtcgcatcgcccgcgccggtgcgcatcgtggagttcgatgccatcaaggacctcgtggacgacggctacctcgtggtttccacgggaggcggcggcgtgcccgtcattgaggaggacggcgggtatcgcggtgtgccggccgtcatcgacaaggaccgttccagcgccaagctggcggccgacttcaaggccgacatgctggtcatcctcaccgcggtgccgaaggtggccatcaacttcaacacgccggaccagcaggacctcgacgtgctgaccgtggccgaggccgcgcagtatatcgaggaaggccagttcgcttccggctccatgctgccgaaggtggaggcctgcatcgcgtacctgcaagcctaccccgagggcaaggccatcatcaccagcctcgagaacgccgccgaagccatcgagggcgagtccggcaccctgatcgtggcgtaagcgccgaaagcgtgcggcccgtcgacgcgcgggccacgcgcttctccatcgtgaaggcgcgagtcgaaattctggcacaaaataacgggtaggggagcgattcggcgctgtttcgcatgtacgataggggtgaaaaacaagaaacctcaggtcgaaatcgtccacaatccgaaccaaattcccctacccgtaaatttgtgccaaaaacaggcaccccacgttcaagccgcaacccaacaaaccgatgctaatcgtgacaagcgggagcggctcaacatgggcgtaagctctcgtcaggaggtgctcgacattgtgtacgatgcgggcgccgaaggcgagacgacgcccgcatcgtgagaggttcttactccgcttcgagcagcggttcggattcgggtgcgggttttgtttgcgctgcccccgcccgcctcagcttcccgcattcccgcgcggccagcgccacggccagggcggcggccatgagatcggcggggggctgcgaccaccagacgccggtcaggccctcgacggccgccagcaccacgatcatggggatggcgaacagcaggtagcggcacactcccagcagaatggagatgcgctcctgtcccacggcctggaagtacgccgaggccacctgcgccaggaacccgaacggcgcgcacgccagcagcggcaggaagtgcgaggcggtcagctcgatcagctggggatcgtcgccgatgaagaaagccgaaatgggctcagcgaacgcgatgaccagcccgcacacgacggccagcacggcaagcgttccgcccaggctgaccttcaccagctcgctcaggcggtcgaagcggcgcgcgccgcagttgaagctggcgatgggctgcaggccgtaggttgcgctgaggcacaggatgtccaggaggtagacgacgtagccgttgatcacggcgaacgcggcgaggtcggcatcgccgcccagcgatcccagatagttgttgatcgcgatggtgtacacgaggctggctgcctgcaccaggaacagcggcaagccctgccagaggatcgcgcggcatatcgcaggatccagcttcatgcctccgaacgtcaacttgaaggtggactgcttgttgagctggaagtacagaatggcgaggaaccacagccccgtgctcatgccgtagtacgcgcccgcggcggcgaagcccaggtcgagcacgtacacgcacagatacagccatagcagcgacgtggcggaggcgatgacggcaagcgccgaggccagcgaaggcttctcgtcggtgcgcaacagcgagcacagcagctgtcccagcgtgcagaacgggtagaagcacatgagcaggcggatgaacgccgtcacgtcgtcgtggatgtcgggcgtggcgcccagcatcgtggctatctgcggcgcgaacagggcgatggccgcggaaagcgccaccagcaggtaggcggccagccagaacccctggttgaacaccttctgcgcgcccgccgtgtcgccgctgcccaggcgctggccggctgcggcggcggt

SEQ ID NO: 8972 - DNA, 1411 bp, Unknown
  gut microbiota DNA sequence
acgcttcttcgcaactacgtcgagttcgacgggaagggcaacctgctcatcgtgttcggcttccagaaggcgacgtatcccgtctcgaagatccgccggttgcgcgagacgtccaacccgttggcttccctggcggcgtcgttcgaccgcatcgagctgcgcatcggctacgaggagctgatgatcgccgtcaaggacaaggaagaattcttcgccgagatcgagcggcggtgcccccaggtcgagatcgtgcgaagggcctccgtttccaagtccaggtgagctccgggcgacccggcgaccgccgcataaaaaaccggttgcgcgagtcgtagcgcaaccggtttcgattttcctggtgggcccagcagggctcgaacctgcaaccaagggattatgagtcccctgctccaccattgagctataggcccgtaaagcgtcccgctattctatcccaaaacgggcaccgatgccaaggggatatccgcaagccgatgcaaatcctcttcgagaaattttcgaaaaaggggcttgcgcgtattcgaaactaccggtagaatactcaaacgttgcgaacgacgcaaccgaaacggtcgcttggctcagcgggagagcatcgccttcacacggcgggggtcacaggttcaaatcctgtagcgaccaccatgaattcaaaagccttcctttcggaaggctttttcatatcctcacgctttcagcgtgaacttccaagcgcaattgcaggagtcgtccgtcatatcggggaaacagctcaggcattcgcaggagatgcggtcgtcgatgctctcggcgaacaccccgtactccaccacgcccacgctgcggcagggatggaaccccatgcctttgcgcttgcgcgcgttctgcacgcggcagtcgacgatgcggtaggtcagctcgtcgccttccacgaggatctcgtcgacgttcgcggccgactggcagcgcagcgcgagcgcgcgggccagaccctcgatgccggggcgctcgtccagcccgaggaacttcttgatgcgtcgcgcctccgacacgctgaagcgccgccacgcctcgatgtcatggcgcacggccgtgtccatgccctcttctcgttcgagggactgaaaccaggtgccgtcgagggcgatgaggttcttcgcgtatatctccagaagctcgacgagctcgtctttcccaaggttgcgcaaggtgtcgttcatgtgggtgctccatcttctcgctttggctggcgcgtatatcgcgtacgtaggaattatactgcgcgcgagcggctccggttttcctcccgcgttcctcaaatgggcggatctatgggtcccgcccttcaggtcgagcgcagggcgggcgttcgggcgggctgccggagcttcggcgattgctgtaccgaacg

SEQ ID NO: 8973 - DNA, 1472 bp, Unknown
  gut microbiota DNA sequence
attcctcaaatgggcggatctatgggtctcgcccttcaggtcgagcgcagggcgggcgttcgggcgggctgccggagcttcggcgattgctgtaccgaacggcgaaaaccgttatactgaatcgttgcaaccatccaacgaagagcttcgatcaacggagaaccgacactatgagcatcgatagttttgaagcgagccgcaagcgctccgacgagatccgcgccgatcttcccatccaccccgagaagtacactatgctcacgggcgaccgtcccacgggccgtttgcacatgggccactacttcggcaccatccgcgaacgcgtcgcgctgcaggacatgggcataaccacgcgcatcatcatcgccgactaccaggtgatcaccgatcgcgacaccaccgagcacatccaggacaacgtgtacaacatggtggtggactacctggcctgcggcatcgatcccgagaagaccatcatcttcacgcattcggccgttccggcgctgaaccagctcatgctgcctttcctatcgcttgtcaccgaggccgagcttcttcgcaacccgaccgtgaaatcagagatggacgcgtcgggccatgcgctcacggggcttctgctcacgtatccggtgcaccaggcgtgcgacatcctgttctgcaagggcaacatcgtgccggtgggcaaggaccagctgccgcacatcgagcagacccgccaggttgcgcgccgtttcaacgagcgctacggccacgtgttccccgagcccgaaggcgtgctgaacgacgcggtggagatccccggcctcgacgggcgcaagatgtcgaagagctacggaaacgccatcagcctgtcgctgaccgcggaggaaaccgccaagctcatcaagaagtcgaagaccgacgccgaccgcatgatcacctacgacaaggagaaccgccccggcgtgtcggcgctcctcaccaccgccgcgctgtgcacgggccgcaccgaggtcgacatcgccgaagagatcggcgacggcgggtcgggcacgctcaagaagtacgtcaccgagagcgtaaacgagttcctggcgcccatccgcgagcgtcgcgtgcagctggccggcgatatggactacatcaaggacgtgctgcacgagggcaaccgccgtgccaacgagatcgcgaacgctacgctcgatgaggtaagagaagccatgaacatggtttattagactttttggcttatgacctggccttatcattggaaatcttgcaagtgcccaatttttgaaaattcggtattgcgaaatgatgaggttccggtataatcttcacttgcgcgatcaagggcgcacattcctcggtagctcaacggcagagcatccggctgttaaccggagggttgtaggttcgaatcctacccggggagccagaatttaacggcaggccagacgaacagtctggtctgtttttttattccgtcgcat

SEQ ID NO: 8974 - DNA, 6257 bp, Unknown
  gut microbiota DNA sequence
tgctcctcggattctccgttgcagggcttatactgaggtaggcgacaacacgtcgcttatgatcgcaacgctgacaacacggttgcatgcgtcgcagtatgagcccttcggggtggaaagctaggtttgtatgtctcaaggtacggttaagtggttcagctctgaaaaaggttacggcttcatctcccaggagaacggcgaagacctgttcgtccatttcagcgagattcagggcgacggctacaagagcctcgacgaaaacgccaaggtggaattcgtgatcgcgtccggttccaacggcaagagccaggccacgcaggtgtgcgtgctctaaagctttgaacgcatgaacgagcaaaagcggcccttaggggccgctttttttgcatgcaaggccgggctctgcggatcacgcttcgccgcgcagcttcttctcgcagtcatggatggtcttgtcgtagttgtcgatcttgaagttcaggcgatcgaggccggcctgcatctcggcgatgcgccgctccacgagcgcgcgttgctcctcgagcagcgttttgcgcgcttcgagagtcgaatcgccctggtcgtacagcgccatgtactcgatgagcgcctcgatggacacgctggcggcccgcatgcacttcgcgaactgcacgcgcgcgcaatcttgctcgctgtagtcgcggatgccgcttgccgtgcgggtgacgttcggcagcaggccgatgcgctcgtaatagcgcagcgtgtcggcggacaagccgtattccttgctcacttcggcgatcttcatgggaagctccttacctcgtaggtgcattgatgaaccacatggaacccactccaagtcaagcgatggcgggcgaatctgcccggattcccgtagcatggcccttcctttcgcatgcgatggcggatggcagcagcgtgcgatccaggcggctttccgccgtcgcgccgacatcggcgcgcgccggcttatggcagcgtggagcccggcggcctgaggacgtgccggttgccatctagcggcaaaggccgatttggaaacaatgcgcgttgcatgaacggtcggtttgcattttcctcttgacttggagccggctcgaaggaataggatcggttcgtcagacagtcgagacgagaggaaaggcacaatggcgaaacgcattctggtggtggcggcgagcccgcgcaaggacggcaactctgatcttctgtgcgagcggttcatcgaaggggcgctcgaggcgggcaacatcgtggaggaggtgttcctgcgcgagcaggtcatcggcttctgccgcgcgtgcgattactgccgcgaccgcgacggggcgtgcgcgctgcgcgacgacgccgcatccgtgctggacaagatggccgaggccgacgtcgtcgtgctggccacgcccgtgtacttctacacgatggacgcccagatgaaggtgctcatcgatcgcactgtggcgcgctatgcgacgcttgcgaacaaggagttctacttcattgcgacgatggccgacggcgacaaggcgctcatggagcgcacgttcgagggcctgcgcggattcaccgactgcctgccaggcgccgtcgagcgcggcgtcgtgtgcggggcgggcgcgtgggcgaagggcgacatcgaggggagtcccgccatggacgaggcgtacgagatgggcctgcgcgcgtaagcgcatgccgcgaacgaaaggaaacccaatggacatgaaggagagcctgggccctgcagcggtgttcccgctgggcgaggagaacgaggcgtacgcgcagtacttcgtcggcaaaagctatctggcgccgctgaccggggcggacgcgggcgtgggggtgagcaacgtgacgttcgagccgggatgccgcaaccattggcacgtgcaccatgcgggaggccagatactgctggtcacgggcgggcgcggctactaccaggaatggggtcggcctgcgcgagagctcgagccgggcgacgtggtgagcatcccgcccgagacgaagcattggcacggggcggcgccggacagctggttttcgcacgtggccatcgccgtgccggccgaaggcgcgtcgaacgagtggctggagcccgtctcggacgaggactacgccgcgctggcgtaggaggggatcgcggcttgctgctccggccgcgtcggcccggcccgtccgtttcgcgcaacggtgcggagggggaggaggctagccgatataggagctttctgcgattgaagaacccgtttcaccgcaagcggcttcttccggtatcatagacaagttgcgcctgcgggcgcagcaccgcaccgaactgcaagcagaaagcgcgcacgcaccatgatcatgcagcttgaacatatctcgaagtcgttcggagggcgccagctcttccgcgacgtgacgttccgcctggaagaatacgagcgcctggcgctcgtgggcccgaacggcgccggcaagaccactatgctcaacatcatctcgggcgccgaggatcccgacgagggccgggtgctgttcgcgaagggcgcgcgcgtgggctacctcgagcaggaggccatcgagatggccgaccagcccatcttcgaggaggtcatgtcctcgcaggtggaggtgctggaagccgagcgccgcctgcacaagctggaggccgagctgggcgaggcccccacgccgcagcagcttgctgccgccgggcgcgcccgcgacgcctacgaggtgctgggcggctacaccatcgaggcgaaggtgcgcagcgtcatgttcggcctgggcttcaaggaggacgacctcgcgcgctgcaccaccgagttctcgggcggctggcagatgcgtatcgcgctggcgaagctgctcatccgcaaccccgaggtgctgctgctcgacgagcccaccaaccacctcgacctggagagcgtgaagtggctcgagggctttttgcgcggctacgcgggcacggtcatcgtggtcagccacgaccgcgcgttcatggacaacatggtggaccgcgtggccgaggtggacaacggccaggtgaacctctacaagggcaactactcggcctacctcaaaacgcgcgaggagcgcctggagcgcctgcgcgccgaggcggcgaagcaggccgaggagatcgcccatatggaggcgttcatcgagaagttccgctacaaggccacgaaatccaagcaggtgcaggatcgcgtgaagaagctcgagaagatcaagcgcatcgagcttcccgaggagaagaaaaccgtcaagttcaacttcaagcagccgccgcgcacgggcgacgaggtggtgcgcgcccgcggtctcgtgaagcgctacggcgacaaggccgtgtacgacggcttcgacttcaccatgtaccgcggcgacaagatcgcgctcgtgggccccaacggcgcgggcaagtcgacgctgctcaagatgatcgcgggcgccatcgagcccgatgcgggcaccatcgagtacggcgtgcacgtgtcgaagacctactacgcgcagcaccagctggaggagctgcaccccggcaacaccgtgttcgaagagctcgaccgcgtggcgccgggttggagcgtctcgcaggtgcgcacgctgctgggcgcgtttttgttcacgggcgacgcggtggacaagaaggtgagcgtgctgtccggtggcgagaagagccgcctcgcgctggcgaagatgctggtggccccgcggccgcttctgtgcctcgacgagccgacgaaccatctcgacatcgccagcgccgacatcctggagcaggcgctcaaggtgttcgagggcacgatactcttcatcacgcacgaccgtcacctcatccgcggggtggcgaaccgcatcgtggagatcgagcccgggcgcgccacgaactacgacggcgactacgactactacctgttcaagagcggacagctggacggcgacggccctagcggcccgtcgcttgtggacgagatgctggacgaaggccccaaagcgaaggcggcggggaagggcaaggacgccaagggtgcgaaagggaaggcggttgctaagactccggctgcggcgagcgggtcccaagccgagctcacggcgccgcgcgcgagttcgcccaagaccaaggagcagaagcgccgcgaggccgaggcgcgcaaccgcgcctacgccgcgctcaagaaccatcgcaagcgaatcgccgagctggacaagcagatggagcgcgacaacgcgcgcatggccgagctgctggagctcatggccgaccccgccttctacatcaacgaggacgcctcgtctgacgccgtggctgagcacgccaagctcaagcagcgcctggccgccgccgaggaggagtggttcctgctcaccgaggagctggaggaagagatggcgaggcaggcggagcagctgtgacacggcctttgaacatcgtgctggtggagccggagatcccgcagaacaccggcaatatcgcgcgtacgtgcgcctgcacgggagcgcggctgcacctcgtagagcccatgggatttcgcctgacgcagaagaacctcgcgcgtgcgggctgcgactactgggacgaggtggatatcgtgcgctggccgtgcgccgaggcgttcttcgaggctcatgcggccgacgagctgcacctgttcaccgggcaggcctgtcgcgggttcggcgacgtggcgtacggggagggatccttcctcgtgttcggccgcgagagccggggcctgcccctcggcctcatcgaggcgcacgcgaaccgctgcgtgcgcatacccatgcgcgagggcctgcgcagcctcaacctgtccaacgccgtggcggtggccgcctacgaggccctgcgtcagcaaggttggccggggctggggtaggagctgcaggttgacccagccgtccaagcgggcattttcgcgctttagcaagataaagcgcgcggaggacgtggaacgcgtgtatacttgaccgcattgtctgcgtcacgtatcaaggaggtcgttcccatggctcgagtgtacaacttctccgccggtcccgccgttctgcccgaggaggtgctgcgcgaagccgctgacgagatgctcgactaccgcggttgcggcatgtccgtcatggagatgagccatcgctccaagcccttcgccgccatcatggaggccgccgagcaggacatccgcgacctcatggacattcccgacaactaccgcgtgctgttcctacagggcggcgcgtccacgcagttcgcgatgatccccatgaacctcatgaagaacaaggtggccgactacatcgtcagcggctcgtggtcgaagaaggcgttcaaggaagcgaagatcttcggcgatgcccgctgcgtcgcctcctccgaggacgagaacttcagctacgtgcccgacgtgcgcgccctccagctgtccgacgacgccgactacgtctacatctgccagaacgagaccatctacggcaccgtgtaccacgagctgcccaacacgaacggaaaaccgctggtggccgacgtgtcgtcgtgcttcctgtccgagcccatggacgtgtcgaagtacggcctcatctacggcggcgttcagaagaacgtgggcccggccggcgtgactatcgtcatcatccgcgacgacctcgtgtccgagcctttgcccggcacgcccaccatgctgcgctacgacacgcatgtcgacgcgaagagcctgtacaacaccccgcccgcgtacggcatctacatgtgcggcaaggtgttccagtggctgaaggcccagggcggcctcgaggccatgaaagagcgcaacgttgagaaggcgcagcttctgtatgacttccttgaccagagcgcgctgttcaagggcaccgcgcgcaaagaggaccgctccatcatgaacgtgccgttcgtcaccggaagcgacgagctggacgcgaagttcgtcgccgaagcgaagaaggtcggcatcgagagcatcaagggccaccgcagcgtgggcggcatgcgcgccagcatctacaacgccatgccccgcgaaggcgtcgaggccctcgtgaggttcatgggagagttcgagcgcgagaacgcgtaggcgacgggaaacgcctgcgatcgacgaagcgcccggccgacggccgggcgcttctcattggggcgatggtggaccggggctcctagtacgcgctccagccgccgtcgatggtgagggtctcgccgttgatgaagccggcctggtcggaggcca

SEQ ID NO: 8975 - DNA, 844 bp, Unknown
  gut microbiota DNA sequence
gctgcacgagcgcgtggtgggccaggacgaggccgtgtcctcggtggccggcgccatccgccgcaaccgcgccgggttgtccgacccgaaccgtcccatcggctcgtttttgttcctgggccccacgggcgtgggcaagaccgagctggcgaaggcgctggccgagtacctgttcgacagcgagaaggccatggtgcgcatcgacatgtccgagtacatggagaagttctcggtgcagcgcctgatcggcgcgcctccggggtacgtgggttatgacgagggcggccagctgaccgaggccgtgcgccgcaagccttattcggtgatcctgctcgacgagatcgagaaggcgcacccggacgtgttcaacatcctgttgcaggtgctggacgacggccgcctgaccgacggccagggccgcgtggtgtcgttcaagaacgccatcatcatcatgacgtcgaacgtgggatcgcagttcatccgcgagttcgccgagcacggcgacgagaaggctatgaagcaggccatcgacggcgccctgcgcgcgacgttccgccccgagttcatcaaccgcatcgatgacgtggtggtgttcaacgcgctgaacatgacgaacatcgagcctatcgtcgatttgcagctggaagaagtgcgcgaccgtctggccgaccgccgcatcacgctcgacgtgacgccggcggcgatggagcacctgtccatcgacggctacgatcccatcttcggagcgcgtccgttgaagcgcctcatccaaaaggagatcgtcgaccgcatcgcccagaaggtggtggaaggcaagctgcgcgatcgcagccatgtgctgatc

SEQ ID NO: 8976 - DNA, 247 bp, Unknown
  gut microbiota DNA sequence
gcccagcctcgccgccgcctcgatgccggccgcgttatgcgtgttcatctgcgtcgatatatgcagtcgcgcttcggggagcgcgcgggagatctcggatgcgatgccgatgtcttgcacgatgaaggcatccgccccagcgcgatacgcctggcgcaccgtttcgagcgcacgggccacctcggaaggcagcacggcggtgttgaacgtcacgtacacgcgaaccccacgcagatgcgcgtaggcg

SEQ ID NO: 8977 - DNA, 860 bp, Unknown
  gut microbiota DNA sequence
tgtcccttttcgcgccacttagatatccacgcccaggaactgcttcaccaggatgccgatgacgaacgacagtgccgccacgcccaggctgatgccggccatctggccgaaccgtttcttgaacggcagatcctgcgccaccgagagatagtagttgaacaccacgagtatcagcagcacgatgaccaccatggtacccatggcccacaggtagtgcgactcgtcgaacagcaggtacggcaggatcagcagcgccaccgtcacgaggtacgcgacacccgtgtacgaagccgacttcagcgcgtcggggcgcccttcgctcttcgacgacaggtactcgctcgacgccatcgacagcgtggccgcgatgccggtgatcaggccagaaagcgcgatgagacgcgtgttctgcatggccagcgtcagacccgccagcgtaccggtcatctccaccatggcgtcgttcatgcccagcaccatgctgcccacgtacgacaagcgctcctcgtccagcatcgccagcagtgcctgctcgtgcgattcctcgtcggcgcggatgctcagcgcctcgggcgcttctttcgccagctcttcgtaggagatctgggctttctcctcgccccgctccatcagtttgacggcgaacgtgaagccgaacacgcgtgcgatgagagagaatcgcagcaccttgccgcgttcgggcttcatctcctcgccggtgtagcgctgccagatgccggcgtgcttcgcctcctcgtcggcgatgcacagcaacgcggcgcggttgttctcgtccttggtgccggccgcgatgcgccggtacacttcggattcggtcacctcgttctgctggaagatgc

SEQ ID NO: 8978 - DNA, 311 bp, Unknown
  gut microbiota DNA sequence
attttccggttgcgctgcatctttctcgctccgtgtccgatcccgtgcatccgatggagccgccggtggcgaaaaaggcttgaattcggaagtttcggagcgtgccgcaggtgtatcgaaaaacgctctttctcgtaatgcctggtcatcgaagtgcccttcatggatgcagacatgccgtgccctcctaaggggcgcgatggtttccgaattcggtatctttttgccatttcgagcccggggcgttgcacgcttcacccagagcagccacccgaaggcggccgccatcagcacgaggcctgcggcgtcga

SEQ ID NO: 8979 - DNA, 411 bp, Unknown
  gut microbiota DNA sequence
caggtgagcgcggtcagcggcgacggtctggtcgagggtttggaggacccatcgcggcgcttctacctcggcatgcagtggcatcctgagtacctcgacgacaacgttccgctgttcgaagccctggttgccgccgcgaagtagcacgcccgctcggcctcttgatagggcgagcgaaaaagtgggcgcaaagggacagccatgacaatttcttcgaagctttcgaacgtcttgcactgaggcatcgacaatacgatcgctatatgcccaggtcggaaaatcttgggaccattactgcatgagtttgccatggataacattgtcatgggtaccggttcgcgcccacgtcggcgcaccgcccatccatgcttggcacgcatcgcccgccctttgtgaaggtcgcttgggttt

SEQ ID NO: 8980 - DNA, 2944 bp, Unknown
  gut microbiota DNA sequence
gtgcccgaggcgccgttcgacgtgcgggttgaccgggcggagtaccgctatcccggcacgtcgcgtgacgtgctgcgcggcctgagcctgacggtgccgcagggccagcgcgtggccgtgctgggccgcagcggcgcgggcaagagcacgctggcgtccctcgtgcgcggcgacatacgacccgatgcgggcggcgtgacgctgggcggctcgcccacggccgacctcggcgacgaggcggcgaagtggatcggggtcatccagcagcgcacctacctgttcaacatgacgctgcgcgacaacctgcgcatcgggcgcgaggacgcgaccgacgacgaggtatgggacgcgctgggcagggtggggctgcggtcgatggccgagcggctgccgaacggcctggacacgctggtggacgaggccggcctgcgcttctcgggcggcgagcgccaccgcgtcgcgctcgcgcgcgtgctgctgcaggacgtgcccgtggtcatcctggacgagcccacggtaggcctcgatcctatcaccgagcgcgcgctgctggacgacctgttcgaggcgctggcgggcaagacggtgatcatgatcacccaccatctggccggcgtggacgccatggaccgcgtcgtgttcgtggaggacggccgcatcgcgctcgacggcgcgccggacgagctcgcgtgcacgagcgagcgctaccgacgtctgctggccttcgaccgcgggcaggcggcgggccgctagccgcgggcgcgcagaagggcggttgcgtcctcgggcgcgagcgcgcacacggtggatctcctgagcaggcctttgtcgcgcgttacgatgtagtcggccttcgcgcgttcggcgcatgccatgatcaggttgtcctctatgtccccgttgaacgcgctcagcttgctggcgacccagaagtcggataggtcgagcccgacgagcgtcgaaacctcgttcatgttagcgaggttcgcccaggctaggcggttcgcggccagcgcgaaggcttcgtcgaccgcttcgcccttctcgcgcgccgctttcttgagggtgctgcaggtgaagaaatggacgtccttcgccgtggtcgccgcatggcagagcgttgcgcctcgctccacggcttcgtcgaggaattcgcacgatgcgcgatggtttgggcgaaatcccaggtaattgtcgagccagacgttcgtatcgacgaggaagaccggggcggctccgttcatggccgcactccttcctcgccgtggcgctcgagtatgaactcttccatgagctggtcgtagggatcgaaggcgacggaagagggcatttcgcttccgaagcccatatccgcgaacgctcgcgccgcttcctcgcgtccgcggcgaagcgcttcgagttgcgacgggctctctatcctcgcgttcgcgcgcgctggcaagggacggtcctccagcaggttcacgatggccgaggggttttcgccgcaccctgctgctttgcgccacagcgcgcgaaccgcctgcgacggagagtatccggcgcgtttcaaaacgtcgtctccggcaagtttgagcgaacgctcgatacgggtgttgaactggatcgtctcggcagcggcacccatcgttcctcctttcaagcagcctatgagctatacgtaagtatagcataatcgctagcaaaatggatgagcagagatgcgggcggttcttcgacggcgcttggcagggcgctcgcattctcgggctatcgcgcgcccgtttgcggggcgggaagggacggcatctggggattctccgttcttcgcgtcgccgggctccggcttccggtatcctgaacgttcgcgacaaattccggattacgagagcagcggagaggcttcatgaagatcaaccatgcgatcctgcacgttttcgacttcgtctcgtgcgtcaacgtgtacgcccaggaggagctcgatctttcgagcaagaacgccaagcgctacgtgacgagccacgcgaagaaggcgctcggcaacatcgacagcaagcgcggcgagttcgccgagaacagcatgttcgccgaggagctgcgctgctacttccgcggtcagcgcgagttcgtcgacctgtccgtccaggtggccgagttcatcgccggcgagctggggcgcatggagaagaccgagtcggccgaccttctggtgatggacttcgaggacgatcccgacaacacggtgcgggagatgaccgacgacgaggccgaggcggcgtatcgcggcgagggcaagcgctacttcgcgttcatgctgctggaggccaagcaggcctacatgcacgaggtgggctacggcgagagcggcgcgcagcgcgtggacatcgcgcgccatcacgccatcctgccgaacccgtcgcagaaggtggcgtcgttcgcggtgatcgagtcgaagacgctgtcggtgtcgttttgcgacaaggagcgcgccatcgcgggcgagaaccgctggctcatccccgacggcctgctgcaatgctcgatggaggcgtccagcaaagaggtgttcgacgccgtgacgcgcatcgtcgaggaggttgccgaggagtacggcgccaacgcggctgtggcggtgtcgaaggcgaaagcctacgttgccgagaacgccgacgagtccgacgagcttgccccgtgggacctgggcgaggaggtgttcgaggacgagccgctgcagaagcgcttcgagcaggcgcttgccgacgaggcgctgcccgagcgcgtggtcgtggagaagaacgtggccaagcgcgtggcgaagagccacaagatccgcaccgacacgggcatcgacatcacgtttccggccgagtacggcgagaaccccgacttcatcgagttcgtcagcggcccgaacggcctcatcaacatcgagctcaagaacatcggccacatcgagaaccgctag

SEQ ID NO: 8981 - DNA, 193 bp, Unknown
  gut microbiota DNA sequence
gcgcgtgcgcgagatccagaagatctcgcaggagcccgtgtcgctggaaacgcctatcggcgaggaggaggactcccagctgggcgacttcatcgaggacgacgccgccgtggtgccgcctgacgccgcctcgttcagcatgctgcaagagcagctgtcgaaggtgctcgacggcctggccgaacgcgagcgc

SEQ ID NO: 8982 - DNA, 5913 bp, Unknown
  gut microbiota DNA sequence
ggtcggcgtagcgcgccaactgcgtgtgggcgcgctgctgcaccttcgtcgtggcgcccgtgggcggttcgaggaagcggatggacagcgtgtcggcggccgagcggatggccagaaccgcgcagaagatgaccgccacgttctcgcacatgttgcgctcgctgaggtggtacgtgaacgacaggtcggtgatctgcggcgcaaggtagtacatcatgagcgaatcctcggcgaacacgagggcgatcagcacggcgaacgcgatgaagggcttgcgcatgcgcagcaggtgctgccgcagcgtctcgtcggctcctcgccggtacgtccagaagccgtagccgagcgccgaagcgacgcacaggtcgcgcacgccgtagaagatccactggctcagcctcgagtcctgcaccgccaccacgaccgccgcctgcacgagcacgcatgccccgcacggcacggcgatgcgcagccaggtgcggcgctcgacgtattccagcaccacccaccacacgctcatgatgaacagcgtggagaacgccagcttgatccacggatgcaggaaggggaaggtcacgatctcggccagcgtgtcgggcttcaagtaggagtactcgtccaggaagatgagcgatgtctccaagcagaacgcgatgaagaacgccatgatgcccaggtacgtggtgcgatgcgacacgaaataggccgacagcgacatgctggccgagaacaggcacatcagtatgaacagcatggtgtagcagaaccagatctcgttcacgatgcctcctcgtccctctgtccctttgtctcactctttccagaagtcgcgggtgagatcctggcggcttgcgtggtcggtcttcttcaagatgttgtgcacgtgcgccttcacggttcccagcgccagctgcagctcgctcgcgatgttctgattgtccttgccctgcagcacgagggcgaggatctcccgctcgcgtgcggtcatgccgtggcgttcgcagtacgcgggcagcaggtcgtcgatctgccgtcgcacctcggggttctcggatgcgggcggctccttgaaccgcagccgcaacgtggctccggcttcgcgcaggctgaagaacgcgaacgccagcatgaggaagttctcggagaagttgcgctcggatatgtagaggggcagcatagagaccgacgtggggtcccacactagcatcatgaacgtgtcttccaggatgatgcacatggtcagcaccaacgtgatcaggaacaaaggctcgtgacggcgcagtctcgtcttctcgatctcgcttttggtggtgcggtagcgcatgagcacgtagccgaggcaccacagcaggaacacctggcgcatgctgtagaacagccattgcttgtactgcccttcgggcagggcgacgatcacgacggtgctgagcacgacgaagcccacggctggagcgatgcgcatcgacatccgtttctcgccgaggaaatccaaggcgatcagccacagggcttccaagatgccgagggcgaagaatatcctcagggccggctggtcgatggcgtagaacacttcgagggggaactcggtgttctgtccgaggtattcgttctggaaaatgagcgccagatcgaggaagtagaacaggaagaacgccaccatgtacagatggcttcgtttacggcagacgaagtacgcggaaagggagatcgttcccgccgcgatacagacgagcatgacgaggatcgtgtagaagtagaaggcgatctccaaggtttagtccccctcgctttcccgtttgcgggtcggccgttcttcatgcggccattctacctcgtgggtttagcgagtcgtatcggggttgtagagcttttgtaaactgagactatagtgcctgttcagaggatgggttacgggggattatttcggttatagatttcttttcgtgaaaataatcttcattattccttcacaacgcggggtgccggtcgcatagtgggcgccaagagatgcggctgccgacggcatgtcgcggaccaccgattccataggaggaaccatggcagtgaaggactacatcgacaccaacgacttcaccaaggaagagctgctcgacatgatcgagctggcgcagtccatgaaggctatgatcaaggagggcggccgctacccgctgatcctcaagaaccagacgctcggcatgatcttccagcaggtgtccacccgcacccgcatctccttcgagacggccatgaccgacctgggcggccatgcgcagttcttcggcccgggcaccatccagctcggcggccacgagaccctcgaggacaccgcccgcgtcatgggctcgctcgtcgacatcctcatggcccgcgtgaaccgccatcccgacgtggtgaacctggcgaagcactccgccgcgccggtcatcaacggcatgtccgacttcaaccatcccacgcaggagctgggcgacctcttgaccatgatcgagaacctgcccgagggcaagaagatcgaggactgcaagctcgccttcatcggcgacgccacgcaggtgtgcgtctccctcatgttcatcgcctcgaagatgggcatggacttcgtgcacttcggccccaagggcaagcaggtgaccgacggcggcctcgtggtcgactccgacgtggacatcatggccatcgccgaggagaactgcaaggtgtccggcggcaccgtcaccgtgtccgacgacatcgagtgcatcaagggcgccgacttcgtctacaccgacgtgtggtacggcctgtacgacgaggaagagggcggcgagagctacatggacgtcttctatcccaagtaccaggtgaccatggagatgatggacttcgccggcccggactccaagttcatgcactgcctgccggccacccgcggcgaggaagtgaccgacgaggtcatggaccatcccgagcgcagcctgtgctgggtcgaggccgagaaccgcaagcactccatccgtgccatcctggcctacctctgcccgaagacgaaggaggatgccgacgccgccgacgccgccgaggctcgcatgaacgcggtgctcaacaagatcgcctagttggggattgcgcatcctggagggggacggccttctccaggatgcctgcactgatcgaacgctccaccgggccgggcccgcgacgttagctgacgcggcccggtggggctgaacccctgaaaggggacaaccaatgggtaataaagtcaagaagttctcattcatcagcgttattctgtccgtgatctgcgtggtgttcgtggccgaggccgccgcccccgctgccgccatcggcaaccagcagttcttctggtggatcttcctcatcatcacgtttctacttccctacggcatggtcgtcgccgagctgggaaccacctacgattccgacggcggcctgtacgactggatccgcgaggcgttcggcgaccgctggggcagccgcgtggcgtggtactactggatcaacttcccgctgtggatcgcctctctggccacgctgttccccgacatcctggggatggtgttcggcgtggagttcgagctggctcccgtgctgctcatcgagctggcgttcgtgtggatcgtcgtgttcatgagcttctcgaaggtgtcggactccgcttggatcctcaacggaggcgccgtcctcaaggtgctcatcgcggtgtccgtgggcggcctcggcatctggtacgccgtgaacaacggcttcgccagcgacatgtcgccggccacgttcatgcccgacctcaccaacaccaacgcgctgacgtacttgtccatcatcctgttcaacttcatgggcttcgaggtcatctgcaccttcgccggcgccatgaagaacccctcgaaggacatccccaaggccatcgtgctgggcggcctggccatcggcgccatctacctgttctgctcgttcggcatcggcgcggccatcccggccgaccagatcgacccggacttcggcatgatctacgccgtgatgaccatggtgggcgaggcgtctcccatcttcatgctcatctgcatcatcttcctggtcaccctgttcgcgaacatggcctcctggtcgttcggcgtgaacttcgtggccgactacgccgccaagcacggcaacatgccaaaggtgttctcgcatgagaacgcgaagaccgagatgcccaccggcgcggctatcgtgaacggcgtggtggcttcgctggccctcatgctgcagctgatcccgattccggccatctccgagggcatcttctggatgctgttctcgatgaacgtcgtgttcctgctgatcagctacattccgatgttcccggcgtttttgaagatgcgcaaggtggacccgaaccgcaagcgcgtgttcacgttccccttcaagggcaagctcatgtacgtgatgctggccattcccgccatcgagctggtgctggccattatcgccaccatcgtgccgctgaacggctcggaggaagagctttcgaagatccccatgctcatcggcgtcatcgtgttcgtggtgctgggcgaagtggtgcgcatctggtcgaagcgcggccgcacggaagagtacaagggcctgacgcccgccttggccgccgagcgcttggctgaggaagccgccgaagaggccgccgacgaggccgaggcccccgaggcgaagggcgacgcggaacccgaagcggtgccggtcgcgtaagcaagaaccaagctggcgccgcgcaggtcgtcatcccggctgtcatcctgagcggagtcgcgacgcgaagctagtcctttagggaaggatccggcgcggcgccagcagagtaacaaacaacgcttgaagcaagtactgcaaaccaaaacagaaaggtgtgcattatgaagacgattcacgagagcgtttccaccccgaaggccgacggctaccgcatgcccggcgagttcgagccgcagacccgcatctggatggcgtggccgcaccgcaccgacacgtgggcctggggcgcgaagccggctcagaagcagtacgccgacgtggcgcgcgctatcgccgagttcgagcccgtcaccatgtgcgtgaaccaggtggactacgccaacgccaaggccgtgttcgaggacgacgagaacgtcaccgtcgtcgagatgaccaccgacgacgcgtgggtgcgcgacaccggcgccacctgggtggtcaacgacgagggcgacaagcgcgccgtgcattggcacttcaacgcctacggcggcttcgagaacggcctgtacttcccgtgggacaaagacgagcagatcgccctcaagatggccgagatgagcggctgccgtcgctatcgccccgaaagcttcatcctcgagggcggctccatccacgtggacggcgagggcacggtcatcaccaccgacatgtgcctgctcgatcccggccgcaacgcgtccgtgaccgactacgagccctggtccgaggagctgcgcgcgtactgcgacgagcagctgaagaagtacctgggcgtggagaaggtcatctgggtcaaggacggcatcgaccccgaggagacgaacggccacatcgacgacgtcgcccagatcgtcgctcccggcaaggtgctgtgcatctggtccgacgacccggactacccgttctacaacgagtgtcatgccgcttacgagacgctgtccaacgccgtggacgccaagggccgcaagctcgaggtgaccaagctctgcatgcccgtgaagccgctgtacatggaccaggcgtcctgcgactccatcgacaccgaggagtacgccgagccgcgcgtggccgacgagccgctgatcgcgtcgtacatgaacttcctcatcgtcaacggcggcgtcatcgtgccgcagtacggcgacgagaacgacg

SEQ ID NO: 8983 - DNA, 217 bp, Unknown
  gut microbiota DNA sequence
ccgtcccgagagcttcatcctcgagggcggctccatccacgtggacggcgagggtacggtcatcaccaccgacatgtgcctgctcgatcccggccgcaacgcgtccgtcaccgattacgagccctggtccgaagagctgcgcgcatactgcgacgagcagctgaagaagtacctgggcgtggagaaggtcatctgggtcaaggacggcatcgacccc

SEQ ID NO: 8984 - DNA, 262 bp, Unknown
  gut microbiota DNA sequence
ccatcccattggtcgcaggtgtcgaacaggtttatatacggcgatccggggccgaaaaaactcgatccgccggagcgtcgaatcacaacccaagaagcgctgctattctcacaggagctaagggacgaggagaaaaccggcaaaattgttgccgtctggctcgcgctcaccaccggcatcagacgcagcgcagaaccgcttcgtccgaaccgcgcactggtcgatcaccggcaagtgcaactaccggtgccgccactgctac

SEQ ID NO: 8985 - DNA, 286 bp, Unknown
  gut microbiota DNA sequence
gggcatgttgcggatgccgtacgccatggtgatggcgtcgtacgactcgtcggcataggggatatgctgtgcgtccaccacctcgaagtcaaccggtacgccctcggccttaccgtcctcatagtgcatgcgggccacgtccagcatctcatccacgagatcggtgcactggatatggcgcggatgcttcgcgcgcgccacggtgaacgtcacgtcgccggtgccgcctgcgatgtccagcacgtcggcgttctcgtcgatgggcgcctggcgcatcatgcccgcc

SEQ ID NO: 8986 - DNA, 312 bp, Unknown
  gut microbiota DNA sequence
tcgccgtgggcatcctgctcgtcatggtgggcatgctcacgtcgttctccatgagcatcctgctgccgctgtgctacgagggggcgctggggtacacggcgttcttcgcgggcctgctgctgctaggccccgtgctggtcaacgcggcgttcacgtttttgggcggccgggtgttcgacaggcacggcgcgtggccgctcataccggcgggcctcctgctcgtgctcgtcgggcaggcgacggcgttcttctcggccgagagcatgatcgccatcctgatcgtcctgtcgtcggcggccgtgtacgcgggcg

SEQ ID NO: 8987 - DNA, 304 bp, Unknown
  gut microbiota DNA sequence
gggctacgacgtgctgcaggtggcgaacgagggcaagatggtgtgcgttgtggcggccgaggaggccgacgcggcgctcgcggccatgcgcgcgaaccgctacggcgccggtgcggccatcatcggcgaagtgtcggccgtccgtcccgagcgcggctccaaggtgttcctgcgcacggcgttcggcggcacgcgcatcctcgacatgctggtgggcgagcaattgccgcgtatttgctagaagctctccatgcagcaccctcatgcgtatggaagagagcgctgacatgcgcaaaggccttcg

SEQ ID NO: 8988 - DNA, 6762 bp, Unknown
  gut microbiota DNA sequence
gactacttcccgaaccgcgtcgccgacccgaccctggttcgcccggagatgtggaacgactagtcgcgtagcttgacctacttgtcacagacaggcatcgtcacttcgtaaaaagaaaggggattcggtttgcaaggcattccggatccccttttccttttcataatccaattatcacgcacaaacagatcggtcatgtaggatcaaaggtaagactccaatcgtttcgcattcgatcttgcatgacaagaaaacccctctgacagggggttaggtggggcatactcttttttgctactggtttaaggaggaccaatggcagacaacgctaacaaggaaatcaagaccgcgacagccgatgacggctcgaccggctacgagatgaagatcggtcttggcaccattgccatgctgatctcggcgacgggcatgggcttggtgcccctgttcagccgctgggcaactcgtacggacatgttcgacggggcgctgggtctgaacgctggcgactccatcggtgctttgatggccgtgggccgcatgagcatgggcgtgctgttcttcgtcgtcatcatgttcgctacgggcaaggtagagacgttcaagaaactcaagctgacgccggccatcgcgttgggcggcttgatgatcggcatgtcgctggcgtgctacgtgacgtctacgctgttgaccaccatctcgaacgctgttctgttcatctacatcggtcctgtcgtttgcgtagtgctcgcgcgcatcttccgcaaggaacccatgtctgctttacagtgggtatgcctggttgcggtgttcatcggcatgttgttcggcaacaacctgatgggtttcaacgagtctggcttcttcgtagacttcaacctggttccgtctacgcctgagttcccgcagaagggtctcggcgacgccttcggcctggcttccggcttcttctacggcgcttcgatgttcttcaacggctaccgtaaggacgccgacaccacggctcgtggtgtgtggaacttcatcttcgccgtcctgggcgctggtgttatcaccgtcgtcctgaactcgctcggtgcaaaccccggcatggagaactgggctctcaacatccacttcaccgcattcaactggatcggtgccctgcttttgtgggtcatctgcggtcctgtggctctgggcttcttgctggtggctggccgcaacctgccggctgctgactacggcaccattgcgtactgggaagttcccgtggccatcttcgtgggtctggtcgtgttcggcgaggccctgacggttaacacgattctcggtggcattctcatcatcggcggcggcgctatcccctctatcaagggcatgctttccgctcgcaagatgagaaaagaagaggagatttgcgagaatcttgccgctcgcttggaagaggaagaagtcaaggagcacctgcagtaggtttggcggcgtgcgcctggttctcgggcgcacgcctttccgctgagaagcggtaatccataaccggaaaggaaggggtgtgattcatgaagatcacgagcaacctgacccatgttgccactgaaatcgagttcgaagcgccgttgaacgaggaggagctgctcgccgtgttcgagaagagcggcgtccagggcttcccggccgagctcgacatcgccgagcgcacggaggaccacgtccagatgatgtcgcttgacggcctgctgggcttcgccaaggcgtccgggctgtccgcggtgacctacgacgtgacgtacttcccgcacgccgacgacgcggaggtggcctaccagctcaggcagctggcgcgcgacctggagatcagcgccgaggtcatccgcgacgtgtgcgcggccgagatccaggagtacctggccctcgacgcgaagcgcgacgccggcctgccggtccacagcatcgtggaggcctacacgggcggcaccgcgttcgcctggtacggcatgagcgactacccgcgcctcaagcgcttcatcctgcgcaagctggcgcagggcggtcagaaggccaagcacagcttcatcatgcgcgccagcaaggcccaggtggatatgctcgacgagtactgatcgtcttttgcggttgaaccttcgggttgccctacggcctgtcagcgagaacgcagcacgtccaaaattatgcgtttcacgaggcattttaggtggagcccgtttgctgcaaaacgggctccacgccttttcggggcagggctctcgacggttcaaacgcatataaaaggttacaggtttacctcgtattgccgtttttgcggtatgataacctcaggttaaggcgttttccgactatcgaaaggggcttcttttggagcaccagatacgccgacagcttgcgtgtacttctaacgaagctgctaatttcttaggggattaccatgggatctaacgaccaacgttccactatcagaaaagtagccgtttcatcgttccttgggaacttcatcgaatggttcgactacgcaacctattcgtacttcgcagtggtcatcgccaacgtgttcttccctggcgacgacccggcgcttgcgctcatgcagacgttcgcggtgttcgcgctttcgttcctgctgcgccccatcggcgccatcttctggggcagcatgggcgacaagaagggccgcaagtgggccctgtccacgtccatcttcctgatgaccggcgctaccttctgcatcggcttgctgccgggctacctggccatcggcctcgccgcccccatcttgctgctgctgctccgcatgatccagggtttctcggcttccggcgagtatgccggcgctgctacgttcctggctgagtacgctccctcggacaagcgcggcgtgtactgctcgctcgtgcctgcttcgacggccgtgggcctgttggtgggctctacgttcgccacggtcatgtacacgatcctgcctgacgcagccgtgaacgagtggggctggcgcatcccgttcctgttggcaggaccgctgggtctcgtcgctcactacattcgtaccaagctggaggattcgccgacgtatcaggagatgcaggctgctatctccaagaccgacgactcgaatcatcctatccgcgacctgttctgtcatcacacgaaggagctcatcatctccttcggtgccgccatgctgaacgcggtgggcttctacgtggttctcacgtacttgccggtctacctggagacggtggtcatgatgccggcgaacgaatcgtcgctgatcaccactatctgcctggtcgcgtacgtggcgttcatcttcggcatggggcatctgtccgataagttcgggcgcaagaagatgctcatcatcgcctgtgtgtcgttcatcgtgctgacggtgccggcgttcatgctgttgaacactgcgcaattcttcacggtgctggccgtcgagctggtgctgtgcctggcgcttaccatcaacgacggtacgctgtccagctatctgaccgagacgttcccgacggcggtgcgctacaccggcttcgccctgtcgttcaacttggcgaacgccctgttcggcggttccgcctcgttcatctcgactgctctgatcgccgctaccggctccggtctcgcgcctgcctggtacatggtcggcgtgtcttgtgtcgcgctggtggcgatgatactatcgcacgaacatacgggtaaggatctgtccgaagtgtaaggccctgcggtctgcacgacgatagtgctgatacaaacgggcgccgtccagacctgctggtccggacggcgttcgctcatgagacggcgtgctcgcgccgcccgtacaatggaggacgaatggctgaaacatcgcagacgccgaagtctttgaaagctcagatcacgcgcacgtcgctcgtgctggccgcggcggcgttgttgcgcgagcaggggccgaaagccgtgacgtatcgcaaggtggcgaagtgggccggtgcggcctcgtcatcggtcggatattacttcgactcggtgacgcagttgctgcacgaggccggtcgctacaatattcagctgtgggccgagcgtgcagagaaagcggcatcggctgccgaaggccttgagcctgaagagtgtcgtcgtcatgtaatcgacctactcattcgcgcctgcttgcccgatgaatcggtggtgccttcggctcactacgggcagctgattgccgcggccgaatcggacgtggtcaccgaggcttaccagaagggccgcgtttcgctcgatgccgccatcgagcgcatccttgcacgcgcaaagatcgatatgccgccacgtatggtgggcaccgtggtagacggcgcggcagtggccgccatttccgaggggtacgacgtgcgcaagttcgcgtccgatatcctgcgcgatgccgtcgaagtctacatcaaggcatctgaagcttaacgcttgtagcgcgcctcagtaatccagcaactcacgtttcggcgacgggagggtgaacgccctcccgtcgccgttcttctttccagcctgaatggtagaacggatgcaagaaacgcatcgattgcgatgtcgcgccgctgtgttcgcgagcggcgcgacatcgcgtcctaggtgaggaaaggggttgaggcagcatgagcgatactcgtcgcgcaccggaggcgtcttcggctgacgcgggcccggtgggctcggtgagccggccgtcgttcaaacgcacgttgacgttcttcggattcttcgccatcacggcttccatggtgatgacggtatacgagtacccgtcgtttgcgtcgtcgggattccagctggtgttcttcctgatcatcggcggcatcctgtggttcttgcccgtggcgctgtgcgctgcggaaatggccacggtgaaaggatgggaatcgggcggcattttcgcctgggtgggcaatacgctgggcagacggtggggtttcgccgcgctgttcttccagtggttccagatcacggttgggttcgtcaccatggcgttcttcatcctggcggcgctggcctacgtgttcaggtgggacgcgctgtacaacaacccgctggtgatgttcttcggcgtggcggccatcgtgtggctgctcacgctcacgcagctgggcggcacgaagtacacggcgcgcatctcgaaggtgggcttcgtgggcggcatcatcgtgcccgtgctagtgctgctggtgggcttggtgatctacttcgccacgggcggcgtctcgcagatcaagatggacgcggccacgttcgtgcccgacttcggcaaggtggacacgctggtcatcttcgcgtcgttcatcctagcgtacatgggcgtggaggcttccgcttcgcatgtgaacgagctgaagaacccgaaccgcaactacccgcttgccatgatcgtgctggcaatcctcaccatcgcgctggacgcgctgggcggcttggccgtggccacgacgcttccggcgtcggttctggacggcaacctgtcgttcggcgtgatcgaggcgttccgcgccatcttcgtgcagcacatcggcccgtctatgagctggatcgtgttcgtggtggcgctgttgctggcgctgggcgtgcttgccgagatctcggcgtggatcgtgggcccgtcgcgcgcgctgcttgatacggcgcacgacggcatcctgcccccgtcgttcaagaaggttaacaagcacggcgtgtcggtgaagacggtggtcatccaagccgtcatcgtcacggtgtgggacgcggtgctgtgcggatccatcgcgctgtccggcggatccagctcgtcggtgggctacctgacggccatcggtctgaccgtggtcatctacctggtgggatacgtgctgttcttcctcgggtacttctatctgatcttcaagaagaagaacctgcagcgctcgttccagctgcccggcggcacgccgttcaaggccatcgtggcgggcgtcggcctcatcatgaccgtggcgacgttgatcatctcgttcttcccgtcgtcgaacctggacgcgcagtcgaacgcggtgtaccaggcgacgctgggcgtggcgttcgcgatatcggtggctatccccttcatcatatacgcgttgcgtcatcgttgggagccgaagcctgtcgtgccggtaggggcgacggttgccgcgccttcgggcgctgccatgcccgcgcgtcccgcggctcccgaacagggcgctcatgtccgcaccgatgcgggcacctcgggccccatcaacaagcgcacgaaggcgcgcgacgcgatgggcggcccgcgtgacgcttcgggcacgccgcgatcggccggagcaagcggcgcggttgctggcggcggtctgagcgagcgcgtggcacagggcatttccagcgtggtggtcggcgtgaccagccgcccgccgggacccattcctgtggacgcgaaggatccgcacggtgcccccgacccgctgtgcacgcctaccgtggacgaaggccgtgcgcacgagatgtcccagcctccggcctgcggcgtgcccacgccgcagaaccccatgccggttccgtgcgacgtctcggacgaggattccgcctcgcggcatgcggcttccagctccggtgccgaacggtctgcggccgatgccgccgacgtgcgcgacgatctgatcgaccgaacggcggaaggcgaccccagcttgcgcgccagcgtgacggagggcgtggtcgggcagggcgttccccaggccgaccccgatacgcccgatccgcagcgcg

SEQ ID NO: 8989 - DNA, 145 bp, Unknown
  gut microbiota DNA sequence
cctgcggccgatgccgccgacgtgcgcgacgatctgatcgaccgcacggcggaaggcgaccccagcttgcgctccagcgtgacggagggcgtggtcgggcagggcgttccccaggccgaccccgatacgcccgatccgcagcgcg

SEQ ID NO: 8990 - DNA, 4867 bp, Unknown
  gut microbiota DNA sequence
ggcatcgacaccgacaagccggcccgctagcgcgcagcgaacaaccaggtatcaaacttcgaaacaggaggttttcatgaaggaacagacatctaccagcaagatcctcgacagcatggacgagggcaccaagtactcgacgcccatcttcggctccgaggcgtccgacgtggccatgccgcgtctcaagatgaacgcccagccggtcgagccgcgtatcacgtacgagatgatcaaggagtatctgtccatcgagggcaacgccacgcagaacctcaccacgttctgccagacgtacatggagcccatggccacgaagatcatggccgagacgatggagaagaacgccatcgacaaggacgagtaccccatgacggccgacctcgagaaccgctgcgtcgccatgatcggtgacctgtggcacgcgaaccctgacgaggagcccatgggcacgtccaccgtcggctcgtccgaggcgtgcatgctgggcggtttgggcatgctgttccgctggaagaagctggcgaaggacgcgggcatcgacatctacaccgagcagcgtccgaacctggtgatttccgcgggctaccaggtatgctgggagaagttctgccgctattgggacatcgagatgcgccttgtgccgcttgagaaggatcacctgtcgctgaacatggacacggtcatggactacgtggacgaccacaccatcggcatcacggccatcctcggcatcacgtacaccggcaagttcgacgacgtgcagaagctcgacgagctggtggaggcgtacaaccaggagcatccgaagctgcccatccgcattcacgtagacggcgcgtcgggcggcatgttcgccccgttcgtggagcccgacctggtgtgggacttccagctgaagaacgtgtggtccatcaactgctccggccacaagtacggtctcgtgtaccccggcatcggctgggtggtgtggcgcagcaaggaggcgctgcccgaggacctgatcttctgggtgagctacctgggcggcgaggaagccaccatggccatcaatttctcgcgctccgcgtcgcagatcgtgggtcagtactacgtgctgatgcgcaacggcttcgagggcttcaaggagatccaggagcgcacgctcgacgtggcgcgctacctggccgccgagctcaaggagatgggcatcttcgagatctacgaggacgcgtcgcacattcccatcgtgtgctggggcttgaaggacgacgccgacgtggagtggtcgctgtacgacctgtccgaccgtctgcgcatgagcggctggctggtgccggcgtacccgatgcccgccgacatgcaggacaccaccgtccagcgcgtcgtggcgcgcgccgacttctccatgcagctgtgcatcaagctggtggaggacatgaagaaggagatggacacgctgaacaaggcgaagttcgtcaccggcaacacccagggcgtcatccagaccggtttcaaccatggcggccgctccgccgtcgacaagggcgaaaaggtgcagacgaaggcgaagagcaaccagtaacggctggtggtagaaaagcaggtaaggggcctgaacttcgggccccttacctgtatagtgcaggcgcctgtaaatatgattgataaagtcatggacaaaagtgggcacttttccgtaggttttgccgggaaatcggataggccgcacatcgtgttttagaaaacgcctggtgaaagagttgtcgcttcatatattctcatagaaacataaagaaaagtggcgctttttgtccattattaaaatagtcatatataaaagccatcgacaaagcatgtcgatggcttgtgcaaatcgtttgcgcgctcgctatccgaagatgccgaacttgtagacaaagtatccggcgagggcaccgacgatggcggaaactagtgtgaggatcacgcccctgagcacgggatgccgacgggcacgctggctgcgcggattgctgcgatcgacgggctcgcccttcgagtatgcgagaatctcgtgataggttaccagatcgtgctctttcttgatgcgctccacgcgagcgagtagcaccattccgaagccccatatcaacaggccgataatgccggacggcacggcgtcccagccccaccagctgatgcctgcgatggcggccgcgactcccagaataacgatgccgaaacctgcccaggtcaaggccatcatcttcttgtagtcgttcgagattgcttccttcatggcttccacgtctcctttgatcagttcgtcgactgtaacgtcgaagaggacgctgagcaaaagcaggctttccacgtcagggtaggttttgtcgttctcccaactcgagacggtctggcgcgaaacgtagatcttcgcggcgaggtcgtcttgcgagagccctcgttccgtccgatgacgtttgatctgactgccgagctccatgcgtttcccttcgttgatcataggttgccatgacgcggcaaagtgtaccatcaaatggccttgacgcagggcgttccatctccggcatactctgtcaaaagttctttacatgctatttgaacaggggcgatgcatcatggcatcctggatgccgtttggcgacgcggtacttacggatgacagcgaacgcgatcttcgagcagcgcccgtcgtatgctcggacgcagtgacggtgtcgatgaggagcgcgctgtgaagaagattctgattgtcctgaccaacactgctgcgtacggggagaggaatgtcgccacggggctatggttgggggaggctgcggagttcatggacgaggcgattcagcgcgggtatgcggtggatttcgtcagccccaagggcggctacgtgccgctcgacccgcgcagcatgaagcctgcgtacgtcgatcgcgctgcgttcgcgctgtaccgcacgcgtgacttccaggagagagcccttgcgcattcgatgcatcccgacgacgtggatcctggcgaatacgtcgccctgtattacacgggcggtcatggcgtgatgtgggattttcccagcagcgagggtcttgaacggctctgcttggaggtgtacggcaacggtggctacctcgccacggtgtgccatggcatcgccgggctgctgtacgtgaaggaaggttccagatacctgatcgagggaaagagcatcacgggttttaccgcgatggaggagcgcctcagcggtaaaagcgctgttatcccattctggaacgagcaggtggcgaaagcgcatggagccgtgtttcgcaagaaacgcccgttcgccgagcacgccattcaggacggaaggatcatcaccggccagaatcccgaatcgccccgcgccgttgcccgcctgctgctgaaaaacttagaacgccccctgtgctgaacccggttctcgttcgccatttgggaccggattcagcacagggggcgcctggggaaaggaggcggttgcgcggagcgaatcgcgcgcaaccgctgttggcgatggaaaagcttagtcctcgcgctcgatgggcatgctcatgcagcgcgggccgccacggccgcgggacagctcggcggacgggacgatgatgaggtcgaggcccttgtcgcgcagcaccttgttcgtgacgtcgttgcgctcgtacaccacgatcttgcccggggcgatgcacagcgtgttcgagccgtcgttccactgctcgcgctcggccgcgatgcggtcgccgccgccacaggggatgagctcgacgggatgaccgacgtaggtctccaggatgctctccagcgtgccgttcacttccttgaccttgattccctcgcccgcagcggtgatctcgaagacggtcagcgggcccatgatgccgggatggatggtgaacttgtccgtgtcgatctgcgtgaacacggtgtcgaggtgcatgaaggcgcgggagttcgggatgttgaacgccaggatggtctcgatggggctcgtcggatcgttgaagatgttcttcgcgatggcatcgatggcatcgggctcggtgcgctgggaaatgccgatggccagcaccttgtcgttgatgttgaggatgtcgccgccctcgatgtggaacgtgttgtagcggctgtagtactcgggaacatccgcgaagtccggatggtttccgaagatgtactcggcgtagatcgtctcgcggttgcgcgtgacggagtacatgcggttgatggacacgccgttgccgatggacgcgaacggatcgcgggtgaagtacaggttcggcatgggggcgatgaccatcttggaggactcgctgacgagatcgaccagggagttcgacttgtcggtgtgaagctcggtgaggttgatgccctccatcgtcttcatgaccaggtcgaggttatcggggtagttctcctgcatatagtcgaagatgatcttctggtagcggtcggtgcggataccggcctcttcgatccactgcttgaggaacttctcgcgcagttcgggtttctgatcgaggacctcggccatgagcttctcgaggtacacgacctccacgccgttgtcgcgcagaatctgcgcgaaagcgtcgtgctcctcctgagcgaccttcagaaacgggatgtcgtcgaacagcagctcttcgagcgtgttcggcgtcaggttcagaagctctcgaccagggcggtggagaagaacttttttcaagggcttgatctcgctcttgacgttcaaaccagccatagcaaccctccttttcctttatgcattttccagattttaggcttgcggaagcgcccgttgcgcaccgggcgtccgttcacctcgccaaaatctcatggttcggatcaaattgcaaccacaaaaacgaaa

SEQ ID NO: 8991 - DNA, 13930 bp, Unknown
  gut microbiota DNA sequence
gccgatcatcgcgaacgggtcgcgggtgaagtacaggttcggcatgggcttgatgaccatcttggaagactcggaaaccaggtccaccagcgagttggacttgtcggtgtgcagctcggtgaggttgatgccctccatcgtcttcagcacgaagtccttggcgtcgggatagttctcctgcatgtagtcgaagatgatcttctggtagcggtccgtgcggatgccggcctcttcgatccactgcttgaggaactgctcgcgcagctcggggttggcctcgagaacctcagccatgaggtcttccaggtaaaacacttcgacgccgttgtcgcgcagagcctgcgcgaacgcgtcatgctcctcctgggcgaccttcaagaacgggatgtcgtcgaacagcagctcttcgagcgtgttcggcgtcaggttcagaagctcttttcccgggcggtgcagcaggactttcttcaagggcttgatctcgctcttgacgttcactcctgacatgtgcaaccctccttcttcctttacgtcggttccgcagggaaccgatcttcgccaagtcgccgtgcggtcctttatgccgttcggcgcgttggcaccaccatgctccaacccgatagtgaagaaaagatgtaaacgaggtttaccggcaaacaaagaaggtttaccgtcgggaagcgggtcgataaacctctactaaactgctgatcgcaggcttgatcgcaaaatgcagcgttcgcaggccgaaagcagagggcttcacgcccgattcccagagcggttgtttcgtgtatcatgggaggaaggtttaggcagtcgcttcgcgtttgagagaggtgccgctccgtgggtttcgtgctcttccattacacgcttttcgtgctgttaggatccattctgacatcggccacgtgtttgtctgcttaccttgtttcaaggaagcgaacgatgctgtacgcctcctttggtttcctgttctatttcttcgatgtggcatgggtgtttcaacgagatttcttcaccggtgccgatgccggagttgggcctgcgtatgcgctgatcatgtcgctgctgatggtgttggccggttgcgggttcctcacgtcgttttggttgctggtgtgcgattacgtgggcgagacgcgcaaggcgctcaaagtgattccggcggtcgtgttcgttgcggccagcgtcgcggtgcttctgatcgtgcccgaaggcggcttgcgcagtttcgcgttctacagtccgagagcgttgtacctgttctggatgctggctttcgccggggcatggtacttgaggtcgaaggacgctgccgagcgtgcccgccttcgacgtcatttgggtctgtacggggcgctgtggtttttggggctgtccgtggtggtggaggacgcgttggtgttcctgctgcccgatcctatcttcatcgggccgcgcgcgtacgctcccgagcgcaacttcgccgagaacgcgctgatgctgtgctgcgcgttcttcgcgtgccgcgacgcgttccgggttttgtcgctgcgcttcgaccgaccgcccatgcgcggcggagggcgacaggaagagctcatagacgacaacctcatgatgtacggcaagcgccaccagctgtccgagcgcgaatgcgaggtgctgcgctacgtgctgctgggcaacgacaaccagaacatcgcgtcgtctatgcatctggcactgagcaccgtgaaagtgcacgtgcacaacatccttcagaaaaccggtcaagcgaaccgccaagcattggttcaggacttctggaagatgtcatagcagtatggacgtgtgactgtgtcaaggggacgggtcatttgacacactgcagacacagaagcgccctcccgggaaggggagggcgcttcttctcgaggcgtctggaaggggggagggaaacgcctcgcgtaggggttgcctacactgccgcggcggcgttcttgccggccaggcggccgaaggtgagcgcgctgcccagactgatgccggccaccacgacggggtaatccaccagcaggcggcggcccatcgtgttgcccgccacgtacaggccggggatgggatcgttcgtgccgtccttggtgacgcgcagctcgtggtcgcactccagaccgccgaacatgaccagcatgcccgcgttgccgaacttgcacgcgtagtacggcgggttctccaccgggaacatgcgcttggacatcttgccgaagtcctcgtcgatgcccttgtggcacagctcattgtagcgctcgatctcggccttcatcgtttccaggggcagaccggtcttctcggccagctcctccagggagttcgcgatgacgtcggtgcgctcgtccaccatggcctgcgtcgtgtagcccaagccgaagcccgagagcacggtctcgtactcggcggcctggtcatccggcacgaagtaggtggtgtagccgtggccgtcgggcatgtggatgatctgctcgggccacttgctgtcgaagatctgccacgccttcacgccggccttcgccagctcggggtccttcgcgacgggctggcgcgtgtgctcggcggcgatgttctggccgggcacgtcctcgttcatgaagcgcttgccctccatgttcagctgcaggaagctgtcgacgccaagcgatccgcccatgtggtgggtcatcggcgcgtgggggcccagctccatccagccgccggcccagatgcccatgagctggccgcggccgtcatcgacgccgcccatgaactcctcggtccacggcgcgtagtagtggcgcatctcggggttcgcgccgtagtcgccgcagcacagcaccacggccttggcgttcaccttcaggtagccgtcgggcgtcttcgcgtacgcgcccacaaccttgtcgttctccacgatcagctgctcgccctcggcattgtagatcagctcggcgccgccggccacggctgcgttgaacgctgcttcgcacgcccactgcatgttcgggttcgtggtaatggtgccgtggaagtaggggtagacttcttccttgtagttgtaggtttccagcggcgggaagcacttcgggcggatgaagttcggcttgtccgtcttgcggttggccgcggtggattccagcacttcgtagtcggcgccctcgatgaaccagtcgaaatcctcgcccgagtggtcgtaccagtagttcatcatccaggtgtcgcagcgaccgcccgtctccttgacgaactcgttgaagatgtcctctttcggagcccactcgatgcccaggtccttctggatttgggatcccacgacgccgaagtcgccggccatggagatgaccgagtagctgtcttccggctgcttttccagcacgatgaccttcttgccggcttcggcggcttccttcgccgcggcggtgccggcgatgcccatgccgatgaccagcacgtcgcagtccttctcctccttgacgtcggtgggaaccggcgggggcgtgaggaagtcgggggtgtatttggtgggggagacgctcgacgcgctgccgccgttcgggctgccgtcgccctcggcggatgcggtgccggcgctctgctgcggagcgcagccggccaagccggcggctccagcggcaacggctgcggtggctcccaagcccaggaatgcgcgacgactcagtctggtttctttcatgtccctctctcctttcgatgagaagcgggttggttttccgctgcccgcttcatcgcgaggatttccggtatggaatcctcccctgcgctgccaaccatacgcgcccgcgagcctgcccgccacacctgcgggcgggtggttttttgcgtttaggccggtgagaagcccacctgatacgggtagggtatcggataggatgcctgatggaacggtgtatgagtacgcgtttgccgtggcgggggctgtgctggggctcgaaccatgagccggggacgaatccttttcgatgggatatactggcgaggaagcagacggagggtaggggccgatgagctgtttgaaggatctgttcacgggcatgagagcgcgcgacgtcgtgttcatgagcgggtatgcgctgtatttgacgttcggctacatgtcgttcgagtcgccgacggtgctcacctcgttgggagagtcgggcgccatcgtgcagtcgctgttcctggtggcggtgatcgcggcgcgcatggtggtgtacgcggcgatgatcgcgttggcgcgccggtcggggcgcgggttctcgacggcggtcgtcctcgtgtgcgcgggcgttgccgcgacagggttcatcgtcacgcgcatggcttttcggttcgcagagttcgtgccgctgaacgagctggtcccgtggctggtggcgggcggtttgtgcttcggtgcgggcgacgcgctgatcaacctgttgtgggcgcgtttctcgggtacgttcgatttgcggcgcgtgtacctgttcgtgctcttgagcagcgggctcagcctgatcgtgtacttcgttgtcacgctgctgccggcggcgctcatgctgccggcgggcgcgctgctgttcttcgcttccgtggcgttctgccgccagtgcctcgccgcgcgcgagcccatcgacgaggagttctccgcgccggtgttcaagggcgcgttgtcggtgctgtggcgtccggtgcttggcacgtcaatcctggcgttcatgagcggtctcatgctgcagctttcgatgtctgaggccatcccgctggggacgttccagttcacggcgcttatcacgcaggctgccgtgatcgctgccctgttgttgcccgccttgctggtgaagagccagcctggtttggggtcggtgtaccgtatggcgcttccgctgtcggcggcgggctttttgctgctgccgctcatctggaacggcgcaggtggcttggcgaacgcgtgcgcccagttgggaacgctggtggccgggatcatcctgtggtgcatggtggcgcatacggtgcacgacacgaaactgccggcagcgttgctgttctcgtgcacgcttgtgtgcacgaacgccgcgcagatggccggcgccctcgttggcatgttgaatgcgcatacgctagggcagggcgacatcgcgctgacggcggtggcgctggttgccatctatctgctggcgatggtgtcgctgtttctgttcaaagacaagaccctgtgcggcttcgacgccgtggccgaggaaggggcgcccaccgccgagcagcagggcgacgcgctggaggcgcgctgcgcgcatgtggcggaggcgcacgggcttacgccgcgcgagtcggagatcctcgtgcatctggggcaagggcgcaccgcgcgcgcgatttccgagaagctggtagtatcggagaacacggtgaagtaccacatcaagtccatctaccagaagcttgacgtgcactcgcgcgacgaggtgatcgacctcatcgaacgctcgggtgaggagggaatgtgagacaggatcgagtcgaggggagtataatgacggcatttacgaggggaagcgagcgggggattggggcaagaagaggaaacgcgatctgaatgcggcccttggcgggccgttcttgccgtgttttcgctcgcgacctttcttctgctgctggttttcggcgctcttccttccgttttcgatcctgcacgggcgtacgccgacgaagcgccttccgattctgctcgcgtcattcgcgtcgcgtacgtgcagcaggagccgatgtcgccggcagacgagtcgggggcgtttgtggggtacacctacgagtatttcgaacgtttggcgcagtatacgggatggtcgtacgagttcgttccggtggaaggctcgggtccggctgcctataagaccctgcgagacttgttgggtgcgggtgatgccgatgttgccgtcggcttgatggcgacgcaagagggtcgagagtcgctcgccttcacgcgcgacagctttgctgccttgaacgtggtgctcagaaccgctgccgaagtgtccgatgaccctcttgacgaggcgacttccgatcacccgctgcgtgtggcggtgatcgaaggctctcctctcgcgagcgacctcgaagcgttctgcgcgcagaacgaaatcccttacgaaacggtgggattcgccgatgccggcgaggcgcgcgacgccgtgctgaacggtcgggtcgatgtggagcttgcagccgatatgtcggatactacggggttgcgcactgtcgttcatatgacaactcatcctttgtatttcgccgtagcgctcgataatcgtgcattggccggcgagctcgacgacgcgctcgaccgcatcgaccaggtggatcctcttttcagggcgcgtttgcgcgataggcatttctccgttgcgtctcccgtgttcttgctaacggatgtcgagaagtcgttcgtcgaaggcgctgctccggtgcgggtgggcgtgctgagcgatcaaccgccgtaccaatatcaagaagacggccaggtcaagggcattgcggtggatatacttgagaccgtggcgcagaagacgggactgagattcgaatacgttgccgccgagacggtggaggctctcgacgctttgcaggcggcgggctctatcgacatggtcgcgggcatcgatcgcgactattccacggccaacgagcgaaacctcgcgctgacgcagccgtatgtgagcgcttcgtacgtgctcgtggcgaacaagagcgttgccgatggcgccatttcgggcaagcggctggcgatttcctcctctagcagctacgatggcggttttttgggcgatgcgatacagtttccctcaattgcctcttgtttgcgcgcggtgttcaagggcgaggcggattacacgtacgtggacgagtacatgacgcagtatttcctgaacacgccggaatttcgcgacgtgcgcattgcgccccagacgtacgagccgcgccgcgtgagcctgggggtggtgcgttcggacgacacgacgctgctgggcatcgtggatcgcgcggtagggtcgctcaccgaggtcgagcgccaggcggtcatcaacggcaacgtattgcgcgagcggccggttgatctgggcgagctcgtgcatgcgaatccggccatcgcgctcgcggtggcgtcggcaacgtgcttgatcgtggttctgttcgtgctgataattctcgggttgcgcgcgcgaagcaacgcgaagaccgcgttcgacctcaagaagcgcctgcggttgtacgcgctgtgcgacgacagcttcttcgagttcgattgccgcacgaaaaggctgatcatctcgatgcctgggaaaggccaacaagggctcagcgagccgttcgccttcgagtgcgacgccccggcggtgtttgacgaggagcgcaagcgttcgttcgccgaactcctcggcggcaaagagcatcgcgtcgaagaagtgcggatgcccgatacggacggcatcgagcattggttgcgcgtgacggtggatccggtggaggacgcgtcggggcgcgtggcgcatacggtgggcaaaatcgaggtcatcgacgaagaacggcgggagaaagaccagctcgtggcgcgcgccgaacgcgatagcctcacgggcttgctgaattccgagaccactcgtctgcgcatcgggcagcagctggatgcgcttgcgggaggcgagcggggcgccttgctggtcgtggacgtcgattgcttcaaagacgtgaacgatacgcacggtcatctcgtgggcgatctcgtgctggccgatatcgcccgcatcctgcgagagaacttccgcatcggcgacgtggtggggcgtttgggcggcgacgagttcatggtgtacctcgaccgcgtcggctcgacggacgtcgtgctggggaagtgcgaccggctgcggcgagcggtagagcgccatgagtatccgggaacggactgccgcgtcacgatcagcgtcggcgttgtgctggcgcatgcaggtgatacgttcgacgatctctacggccgcgccgacgaagccctgtacgccgccaagcgcgacggccgcaaccggtgcggccttgccgacggtgctttgcggtcgccgaaagcggcgcccgctccgtaacctcggcatatacgcgcggcctttattctgctaaagtacatccatctgttcgacgcatctgcgtgtcggcaatggaagcaagcgcgttcgcaacgaggacgaaacgcgcaatggggatcatgggaggacgagaggaaatcgtccgtccgagagagattcgaaaggagagggtatgagcagctctatcgttcagaaattcaagaacgtcgggcccggcgcactggtcgccgcaggcttcatcgggccaggcaccgtcaccacctgcacggtttcaggcgcgagctacggctacaccatgctgtgggcgctgctgttcgccacggtggccaccatcatcttccaggagatggcgtcgcgcgtcggcatcgtttcgggcaagggtctgggtgaaaacatccgcgatcgtattcccaacaaggcgcttatgtggattgcgatcgtgattgttctcatcgccatcttcgtgggcaacatcgcgtacgagacgggcaacatcacgggcggcatcctgggcatccaggccgtgcttcccgacgtgccgatgatccctatcgtcatcgttctgggtattctggcgttcgtcgccatgtggattggctcgtacaaggtggtcgaggttatcctcacggccatcgtcgtgttcatgggcgtggtgttcttcgtcacggccatcgcctccagccctgattggggcgccatcgccacgggcctgttcgtgccgacgctgcccgaagaggggtcgaagggcatcctcacggcggtgggcctcatcggcaccaccatcgtgccgtacaacctgttcctgcacgcctccggcgcctccgagcgtttcaaggatcccgagcaggtgtccgacgcccgcttcgacacggtgctgagcatcggtctgggcggcatcatctccatggccatcctcatctgcgccgccgccaacatctacggcaccgacaccgtggtgacgaatggcaaggacatggcgctggcgctgcagccgcttcttggctcgtgggccacgtggatgatcggcctcggtctgctgtgcgccggcttctccagcgccattaccgcttcgttctcggccgcttatgccgtgaacggcgtgctgggctggaagaagacgacgaaggatctgcgcttcaagctcatctggatcatcgtgctggtgtgcggctgcgtgatggctgtggcgctgggcaagagccccaccgaactgatccttgtggctcaggcggcgaacgccatcctgctgcccatcatggcgttcttcgtgctgtactgcgcgaacggcaaagatctgggcaagtggcgaaaccacatcttcgcgaactgcgcaggcgtggtgatcatcgtgatcacgctgttcatgtgctggcgcaacatgtccagcttcctcgcgtcgctgcagacgctggtcggcgcctaaccgcggttggtcctgcttctatcgagtgcgttcgcgtgcccgccggtttcggcgggcacgcgtgttttcgagggatgtggggtgggggcgagcgcgaagagcgctgtcggagcgcgcgggcgaggtgcggagcagcgcatgctgctgggcgctgagccgtttcgttcccgcaaggtcgatgagccgaaaatcggttccgcggggtaaaaataaaccggtttggtaatcctcttttaccgctttcttcgtgcgctaactttccgaactgggcaaacgtgcgaagacgatatcggccgggcgtcgaaacggcggttcgggttcttccaggattaccaaaccgatcgattattgccgcaggaggtcggattttgctacacgggtcgttttcgctgacggaccggcgcggcaaagcgtcgcggagcttcgccggccggccgacgcggcaaagcgtcgcggagcttcgccgtcgtcttccgaagtttcaaatgtatcattttctgtgacatttttcacggaagcggtttcagaaggtactatggcctcgagacaacaagcacgtgagaaggagacggatatgactactgaaaacagagagcgcgcgcaggcttaccgcaaccgtttgttccccgggttcgattcgccgcttgcgtgcaccgatcccgagttcgtcgagcgcatggacaacttcgccttcggcgaggtgcccgccagcgatgatctggacgaccgcacgcggatgatggccatcctggccgcgctcatcggcgcgcaggccatcgacctgttcaaggccatggcgaagggcgccttcaacgtgggcgtcacgtcggtggaaatgaaggagctggtgtaccagtccactccgtacgtgggcatgggccgcatgctgccgtttctgtatgcggtgaacgagctgctggagcaccgcctggtgtcgctgccgcttgaaagccaggccaccacgacggaggacacgcgcttggaggcgggcgcgcagaagcaggtcgacctgttcggcgaggatatggccgacttctaccagtcgggtcccgaggaaacgcgccatatcaaccgctggttggccgagaactgcttcggcgattactacacgcgcacggggttgagcgacgcacagcgcgaaatgatcacgttctgcctgctcatcgctcagggcggatgcgagcctcaggtggtcagccatgtgcgggcgaacctgcgtgtgggcaacgaccgcgcgttcctcatcaaggtggtgtcgcagtgcgtgccctacatcggctacccgcgctgcctgaacgccctgcgctgcatcgacgaggctgccgagcaggtggcggaatccaacggcgagtaagtgctcatccggagccgttctctgggcgaggcggcccttcatcgattcggctccgcacgtctttttcgtgcggggccgaatcgcgagcgtgcccctttattccgctcctaccgctttgatgacgatgtcgtcttgctcgagttcctggcggatgcggctgacgaaggccagcgcgctgggggaatctccgtgcacgcacagcgtgtcggggtggaggtccaccagcttgcccgtgacggacagcacggcgccttcgcggatggcgttcttgacgcgctcgatggcgtgttcttcgtcgcgtatgagcgcggcggggtcgttgcggctgaccaggcggccctcgtcggtgtagttgcggtcggcgaagaactcctcggccgtgaccagccccagcttgcggccttcgtccacaagcgcgctgttggccaggcccaccagcactagcttggggtccacgtcgcggacggcctgcgccagcgcagctgccaactcggaatcgatggcggcgtggttgtacagctggccgtgcggcttcacgtgcgcgagctgcacgccctgcgccgagcagaacgcctgcagcgcgccgatctggtacagcatgtacgagtacgcctcgtcgggcgacaggtgcatgtcgcggcgcccgaagccctgcagatcgggatagcccggatgcgcgccgatggcgatgccggcgtccttcgccatgcccaccgtcttgcgcatgaccaccggatcgcccgcatgctgcccgcacgcgatgttcgcgctggacacaagcgggatgatctggtcgtcgagccccagcgtgtagcgcccgaagctctcgcccaggtcgctgttcaagtcgatgcggtacataggcagccttctttcgtgcgtggttttcagcctattgtaaagcaacgccgtacgcgcggggaatacttcacttgttttcggtttgctcccagctgagcagcacgttttccacttgctgcaccaattgttctttgtcggggatgtgggaaacgtatcgtgaagcgaatatggcattctgcaatccgccgagtgcatattcggcggtaacgacatctttgtcggtacacaagatgatgccgatgggaggattatcgaattcgtcgttcatctcgcgagcgtaataattcaggtacatgttgatttgcccgaccgcctcaggcatcaacttggaagttttcagctcgatcaggacatatgcacgaagaagcttgttgtagaagaccatgtccacgtaatagtgcgtgttgttgagcgtgatgcgctgttgtgtgccgacgaacatgaagccttgccctagttcgaggaggaacttctccatatgtgctatgagtgcgcgttccagttcgctctccggtaaaggggcgtcgtcagggattcctaggaattcgaatacgtacggatccttgataatctcggcgggttgcaaggcgcgagctctgttggttgcgagagcgggattgccttgcacgcttgaagagctgttcgctagaagcagacgctcgtacagcgacgttgagatctgccgcttgagttcgcgcaccgaccatccgccggcaatcgcttcgcgttcgtagaagctcctcttatcgggatctgaaatgatcaaaagctcgcaatagtgggaccagctcaatttgccagacagtgtctggcaaattggataatccaagtagagtaggcgcatgttttgcaaattagaccgcgagaatcccttaccgtactcttccgtcagttctcgagatagtcgcttgagcgtcgctgcgccgtactccgcacgattggggtttgtctgctcgtgctccacgatgacgcggccgatgttccagtaggtaaccagcatttcatggttcacgtgcgctaccgcgtgtcggcgcccctgctccaatacaagtttgatgtcattgaaaacggactcgtaggatgcgatttcttcgtaaggcatggcaagtctcctcttcgattcccggggatgagaagatcttgctggatcttgcaggcgtggtacgggcagcgggggcacgctgtcatctatgggccgtccatctgaggatcggcgcctgcactggttctccgttcgtgcagtataacaaaacgggaacctcattcgaagtccccgttttgttcgagcatggttcaagtgcgttgttcgaacgagcctattctttcaggttgatgttcttggtgtcggtgatcagcatgcagccgggggcgtgggtgatggcgaagggcggcttgctgttcatgacgatggactggggcgtgacgccgcaggcccaaaacacgggcacttcgccgtcgcggatttccacggggtcgccgaactcgggatgcatgatgtctcgcacgccgatggcatccgggtttccgatatggatgggcgcgccgtgcaccttcgggatggcgccggagatctgcaccgccttcaccacctggtcgtaggggatggggcgcatcgacatcaccatgttgccgctcatggagcccgccggcgtgcacggcacgcccgtcaggtacatgggcacgttgcagcccatggtgttgtggcggatctcgatgccggcctcgatgagctcggactcgaacgagaacgagcagccgatgacgaacgatacgaggtcgtcgcgccagtagtcctcgacattctccacttcggccaccagcttgccgtgctcgtagatgcggtagcgcgggaagtcggtggcgatgtcgcagtcggttgcgcagatggcagcctcgcgtgcgcccacctcggtcacttccagcagcgggcacggcttggggttgcgctgcgcgaacagcaggaagtcgtaggcttgctccttcggcagcacgatgaggttcgcctgcgcatacccgggacacagcccgctcgtcggcgccgtgaactcccccgagcgaatgagatgccgcgcctcgaccggagaagcggaaagcatctgcgcccagacgtcgtcagccacgccctcgggcttgacgggaacttgagcatccatcataagagaacccctttcctcggtg

SEQ ID NO: 8992 - DNA, 202 bp, Unknown
  gut microbiota DNA sequence
cacgaggtcgtcgcgccagtagtcctcgacgttctccacctcggccaccagcttgccgtgctcgtagatgcggtagcgcgggaagtcggtggcaatgtcgcagtcgttcgcgcagatggtggcctcgcgcgcgcccacctcggtcacttccagcagcgggcacggcttggggttgcgctgcgcgaacagcaggaagtcgtag

SEQ ID NO: 8993 - DNA, 16150 bp, Unknown
  gut microbiota DNA sequence
aaccggagaagcggaaagcatctgcgcccaaacgtcgtcagccacgccctcgggcttgacgggaacttgagcatccatcataagagaacccctttcctcggtgttgttcttattatggcacttcggaagtcgctttcgagcagcgtctttatgaccgccatgttgtttccgagtcacgtgttccgtgccttggcagagatcgcacgctatgcacgattttgcgcgcgaatcgcagaagccgaccagcgatttctccgagatgacggactggttacccgaaaaaatcgtgcatagcgtgcgatctctgccaaggcggggtgtggccgatgcttttccgttgccgaaccgggtggccgatcgcgggttcgaggggttgaggacggcggcgccttttgctggcgccacacgggatccttcgactctgcgcctggcggcgctccgctcaggatgacaacctgcggggctcggcctctgctcaggatagcaaccaggtagcccatcccttcctctctcagaacggcgaacctcgcgccccgcacaaaagggcttttcgagcctacgtccgacgccgccctcgccgcccgcaagcccctcgccggtccatgaagggcgacatcagacgtgcgaaggatccgttcggggcgtgcccaccaagcgagttccgcacgagccaaacagcccagtgggctgtttgtgcgagccaggactgtctgagcgactgggcatgccccgagcggatccgccagaaacccctacacttcgcccttcatgaagcgctcgatgaagctggtgtcggcgtggccggcggcgaacgtctcgttctccatgatggcgtactggaagtccaggttcgtcttcacgcccaccaccaccatctcctccagcgcggtgcgcatcttcgcgatagcctcggtgcggtcgcgtccatgcacgatcaccttggcgatcatggagtcgtaatacggcgtgatctcgtagccgtcgtacgccgccgtgtccacgcgcacgccgttgccgccgggcaggtgcatctgcgagatggtgccgggcgacggcaggaacccgcgttcgggctgctcggcgttcacgcggcactcgatggcgtggccgcggtacgtgatgtcgtcctgcgtgaacgtcaacgggtcgcccgccgccacgcggatcatctcttccacgagatcggtgcccgtgaccatctcggtgacggggtgttccacctggatgcgcgtgttcatctccatgaagtagtagttcagcttatcgtccagcagaaactcgatggtgcccgccgacgtgtagcccacggcctgcgccgcgcgcacggcggcttccagcatctcgtcgcgcacgcgctccgtcatcacgggcgaggggctttcctcgatcatcttctggtggttgcgctgcaccgagcaatcgcgctcgcccagggccaccacggtgccgtacgtatcggcgatgatctgcacctccacgtggcgcgggttcagcacgcagcgctccaggtacatggtgttgtcgccgaacgcgcccacgctctcgcgctgggcgatggagaactgctcggagaagtcgtgctcgtcgtggctgatgcgcatgcccttgccgccaccgcccgacgacgccttgatcatgatgggccagccgatctcgcgtgccatcgccagcgcttcctccggatggtgcacgggctccttcgtgccgggaaccacgggcacgcccgcctccatcatggtcttgcgggcctggctcttgttgcccatgcggtccaggacctcgggcgcggggccgatgaacacgatgtcgttctcgcggcacagcttcgcgaacgtcgagttctccgacaggaagccgtagccgggatggatggcctgcgcgccggtgcccttcgcggcggacaggatggcggcgatgttcaggtacgagtcgcgcgcggcgggcgggccgatgcacacgctctcgtcggccaggtacacgtgcagcgaatgcttgtcggccgtggagtacacggccaccgtcttgatgtccatggcgcggcaggcgcggatgatgcggacggcgatctcgccgcggttggcgatgagtatcttgtcgaacatggcgcgcgccgccctagtgcgtttcgccggcggcggtggccacgcggaacagcggctggtcgtattcgacctgcgtgccgttggctgccagcacctccacgacgatgccgggggcgggcgtggtgatctcgttcatcatcttcatggcctcgacgatggccagcgtctggccggacagcacttcctggcccaccttcacgaagggatcttcgtcggggctgggcgagatgtagaacatgcccaccatggggctgcgcacgaggatggagctttcgtcggcgtcctcgacggcggctgcctcgtggctttcggtcttgccggccaacagcgcgctcacgcgatcggccatgagcggcagcgcggtagacgagagcgggccgtggttgcgctccaattcgattttcgtttcgccgtcatccacgcgcaaggccgtgagctcggccttgtccatgatggcgatgagttcttcgatggctttcgtatccatggcggttctcctacgtttgtgacggggttctgtgacggccggcttcggcgaacccctacctacttcttcttcgtctacgtcgttgcgcgttcggtggtgtcggttgcgtcgggcggttgtttctttggcgggacggttcccagggcgttgcggttgccgacgcgctgggagcgatcggctcggtcgatccacaacatgtcggcctgcgacttgcgtgcctgttcctccaggatgggggtcaggcgccgcgccgtgcgccggggcgatatgccgtcggcgctgggccgcctcactttcaacgccagcatttcgaacaggtgcgcctcttcgcgcagcagcgcttgggcctcctgcacgccgatggactcgaagcggatcttgccgcccggcgggcgttgcaccagcttcgggatgtccacgctggcgatggtgccgattttcgcgtaaccgccggtggtttgccggtcggccagcatgatgatgggccgtccgtgcgacggcacctgcacggcgccgaacgccacgccgtcggagatgatgtcggacccgtgcttcgtctcgatttccggtccgtccaggcggtaccccatgcggtcgcatttcgtggtggtggtgtacgcctgcccgtagaacgtggccaggcctttgtcggtgaacatgtcctgctgaggcccgggcaccacgcgcacggtgatttcgtcgcggtcgaagccgtagaactcgttgtcgccgtcgatgcggtgcgaccctaggttgggcaggaagtccacgctcttcgtggaaaacggcaggtagtcgccgacgatgagcgtgcgacccttccatccgccgaactcgcacttgaggttcgtcgagcgactgcccatcacttcgggcacgcgcacgctgttgcccgcgatggccaagtaaccgtagcagccggtgcgcgacgccttgaagcgcaggatggagccgcgccgcaccatgacggccgcgtacatgggcacgggttcgccgtccagcgtcggcgcgaagtcgccgcccgtgatggcgaagcaggtgttcgtggtgaagcgcaccgtgggtcccgccagcgcgaattccagcacgggtgcgccggggtcgttctccaccaggaggttcgcgatggcgaacgcgcgatgatccatcacgccgttcgtggagaagccgctgccctgatagccgaagcgccccacgtcctggatggtggtgatcacaccgggttttttgacgaccagacccatgctactcgccttccacgaagatgccgtacgaatacgtgcccgcggccagctgcgcttcgatggcggtgtactcgtcgggcgtgatgggcacgaagcgcaggtactcgcccgctgcgtacaggatgggttcctcacgatcgggatcgtagggtttgagcggcgtgcgcccgatgatctgccagccgccgggggaggccagcgggtagatgcccgtctgcgcgccgcctatcccgacgctgcccggctcgatgcgcgtgcgcggcacggccaggcgcggcgtgtgcaggcgctcgtcgaggccgcccaggtaggcgaagccgggaaggaagcccagcatgtcgatgaggtagtcgcgctcggtgtggatggcgatcacttcgtcttcggaaaggcctgccagttgcgccacgttcgccaggtcggggccgaactcgcccccgtagcacacggggatgggcacgatcttgcggatgctgaggtcggcctcgcccacgtcgcgcagcttggagcgcagcttcgtggacagctcgtcgaacgtgatgaccagggggttgtaatacaccataagcgagcagaacgtgggcaccagctcggtgatgccccgaatgggatctgcggtaaggttgtctgcggccatgcggatcttggcgctcgtctccgcggatatcgcatgggcgaattccaagttgagcgccgagtctcctgcgatggtgatggtgaatcccgccatgcaattccgtcctctggcgtgtgcgtcgtcttatgatgtgcgccccgtgctacacttgtaggctggtcacatagataaggattgtagcatatatggaaaaagcgcttttcctggccgcgttctttttcgcatacacggtccaggccatcacgggattcgcagggaacatcttcgccatgccggtgggcacgacgctgctgggcctggaatctacggtgtccatcctcaacgcgatgggctttttcgcctgcggcttgctgacggcgctcaacatcaagagcgtgaattggcgcgagcttggcaagatcctgggcgtgatgatcgtgttcatggtgctgggcatttggctggataccctggtgcccctgcatatcctgttgaagatctacggcgtgatcattgtgatcatcggtatcaagaacctggcggtgccccagcagaagttcatgccggaatgggcgctgtggatcattctcgctctggccggcctgatccaaggcatgttcgtgtcgggcggcgcgctgctggtcatctacgcggtgcagaagctgcgcgatcagcagcagttccgcatcacgctttccgccgtgtggaccgtgctcaaccttatttacgcaggcatcgcgtttcagcaggggcacttcacgggcgacgtcgtccagatcatcgtgttctgcgtgccgttggccgtgctggccacgtttctgggcagcaagctgcagaagaagatcagccaggaaaggttcctcaagctcacgtacgtgctgttgttgtgcgtcggcgtcatcttgctggttacgtcgtagcgttcggcggcgcgcggaggtgctgcttggggtacaatgaccccagatgcaatcgagggaaaggaacgaccatggcgcaggaatacgctcgtatcttcgccgcgctcgacggcgcgtcgacgcaggaagcggtcgcgcagcgcgcggtgacgctcgctgcggacaaccacgcgaagctcatgttcggccacgtgatcgattcggttccctacgaggcttcgggcgtcgatttcgaagcgctgtgcgccgagggcaaaaagcgcatcgaagccgacctggccgacgtgttggctgcggcgcgccagaacccggacattccttccgtggaggtgtctgtgcatgcggggcgcatcgccgacacgctggagcacgagctgatcgagccgttcgagccgaacctcgtggtgtgcggcgagcgcgggctgtcgaacatcaagtacgtgttcgtgggcagcgtgtccacgttcctcatccgcaacctccgctgcgacgtgctggtggtgaagcagtagggaacgaggcagaatgagacaggtgaacggggccgatggctcgctccgttttctgcgagaagaagcgaatcgctcgatcggttggagccggtcgggcgattctcgtttcagcccgccgaggggggggggtagggcttgacgacgggcatcgtgcgctgtcggctacccctcgcggcacaggtcgatgatgtcctgcttggagtggacgtcgagctttcggtacacgcgcttcgtatacgtcttcacggtgttctccgagacgtcgagagcgcgcgcgatggcggccaccgtttccccgagggccagcagctcgagcgtttgacgctcgcggtcggtcaggccgtgttggagggctaagcgctcgcacgggttcgcgcgggtgaccgcgaggggcgctgatgccggttggtcgtctccgacggcgcattgtcgcccgaaagcctcggtttcgggtgcaaaagcgcggttttcgggcgacaatgcgtccgtggagtgcgcgggcgcgacgtcggccaagcgaggctggcgcatgaaggccgccagttccgcacgggtatgcacgtcgaaggctcggtagatcttctgcgtatggtatttcacggcgctcggcgagaggtagagatcctgcgcgatgcgcgcgatggtgcgaccctctagaagctgtttgaagacggtggtttccagatcgctcagcccgtaggcggcggcgacgagatcgggttcgggcgcggcgacgatctggatcggcgcggaggcaagccgggttgcgtcggcgggttccgaggcggcgccgccggacggtcgcgcgtcttgctcgggcggcggtgaaggctgcggatcgctgcggcgcgggatgcgctcgcggccaaggagccaggaagcacccagcatgaccaggtacagcgttcccaacccgatgagggcgaacccggcgttcgtccccggaaggtacacgcgggtcagcgcacccgcttccgttcccgccagcaggcacagcagcgaaaccgtgtcgcttgcagcgtacagcggcatgacgggtatgcgcgcagcctttcccacttcggcgatggtgcaggccagcacgatgccgcacatcatgtagcccgtggtggccagtgtgccggcaatagcgggagggacggcttccgtcagccctggcagcaccagcaggcccagcgcggaaagcggcagcgccacgcggtagctgccttccagcttgaacggctggcgaaacagcagcgcgggcaccgacatgatgaccagcacgcaggcggaaatccccagcacgaggtactgcatgagatcgggatcgatgtcgggttgccccgataggctggtgacgaacccgctgagcagggcgaacaatcctacggcgagcacgcctttgcccacaagcggcgcgacgtcggctatctggctggagaaggtgcgctcgatgggccgtgcgacgcgcagccgggtggcgcaggcgcatgccgccagcagcgatgccagggtgatggggatgtaccattcctgcgggtattgcagcacgatcgcgcacagcgcggtggcggccgcatggctgcccagcaggaacaggtagctggtgcggtaggaaaacatcggcagcgccgacagccacagcaagctgagcaccgcctggccgacgccgatgagcaccgtgcccgccacgaacccgggctgcacgcctgcgctgcatgatcccggcaccagcgcgaatcctatgcacagcgctacggcggcgaaaccggccgccttcgagccaaggggctcgtgcgcgacgttgcggtaccgcagggcgacggctacgaacgctgctgcgtgcgtagcgccgagcaccggcatgtatgtgccgtcgtcgaatgagggcacgctggcgaacgcggtggtcgcatggtagctgaggatattggcaagcaggagaaacgcatatcctgcgtagcatgctgcgcgcgtagccatgttcgatctcccctccatgccccgagccatccgcttcccgtgcggatgccgcgccctgccctacatgatacccgtcgcgaagcgccgcgctgctcattttggccgtttcgggtgacagaaaaccgggtcttggcggctctgggtgatgcccgtttgcctgccgcttcgtatgctggaggcgtggttggcggcctttcggcggtcgtccatttcgtcaaaggaagagggaaggggatcattatgagagagcagaaactcacccgtcgcacgtttctcggcttgggcgcgacagctgcggtggccggggcggccggcctcgcgggatgcgcgccggctgcgaaaagcgatgcgggcgcagacgcaggcgcggccgagggcggcgcggcaggttcgggcggcgcagcgacgggcggcaaccccaccgagttcgtgccgtcgttcatgaacccgccggcgcccgtcgacgagtcgaaggtaaccgaaaccgtcgacgtcgatgtgtgcgtggtgggcctcggcctggcgggcgtgtgcgcgctgcgcgaagccgcggagtcgggcgcgaagacgttcggcttcgataaaggttccgacgtgggctaccgctcgggcgagttcggcacgttcggcagcgagatccacaagcagctgggcatcgagcagcctgagacgcaggaagtggtcaacgagctgatgaaggtcatgggcaaccgccccaatgcgcagctgctgaactattggatcgcgaactccggcccggacttggactggtacatcggcactgccgagcacgagctgctgaccagcgaccacgacgtgcccaccgaccccgagaagccctacgtgttccctgagcgcttcccggtgaacgagaactacaattggcgcgaggagaactacccgtgcttccccggcatggtgcacctgctgcccgatcacggctgggccatgcacggcacgctggaggccgcgcagaaggccggcgccgaggcgcgtttcaacctgaagggcgagcagctcatcaaggaaggcgacaaggtggtgggcgtgtacgcgtccgacgaagacggcaacatcgtgcgcgtcaacgcgaagaagggtgtcgtgctgtcgtgcggcgacatgtccagcgacaccgagatgctgacgtactacgcgccccaggccacaaagtacggctgcttcttcagcaccatggacaagagcggaaagccggtgaacacgggcgacggccacaagatggccatgtgggccggcgcggtcatggaggacggcccctatgccccgatgacgcacagcctgggaacgaactccgtcggcatcgacccgttcctcatggtgaaccaggacggcaagcgcttcgccaacgaggacgtgggagcgcaggagctgcagaacgccatcaagcgtcagaagggcggcgtgtcgtaccagatcttcgacagcaagtggaaagagcagctgtcggcgatgccccagtgcttcggcggcgtgacgcactacatcccgcccgagcaggaagccgagtacgagcacgccatcaaccacttcgctgcgggctacgcctccgacacgtacttccagggcgagatcgagcagggctccatcatcccggccgattccatcgaggagttggcgaaggccgtgaacatcccggctgacgcgctggtggagacggtggagcgctacaacgagctggcgcacgcgggcaaggacgcggacttctccaaggtgtccacgcgcctgttccccatcgagaacccgccgtactacgcggtgccgttcggcgactcgggcatgttggtgctgatcggcggcatcgactgcgacgtcgactgccgcgcgctcgatgccgagaagaacccggtgcccggcctgttcgtggcggggaacaccatgggcggccgcttcctggtggactatcccgtgacggtggccggcgccagccactcgatggccatgtcgttcggtcgcctggccggtcgcaaggcggcagaaggcaagtagcgcgaagccctgcggcgcgcatcgcgcgcgccgcagggtgccgggcggcgttgccgcccggcaccctcgcgcggctgcgctgcgcgaggcctcctgtaccgtaccgcccaaggccgctcgcctccctccccgagcggccttggtcttgcgcggcgctactgcggcaacacgtagcgccgcgctggtccgaaatcgtccggcaatcgtccgacaatcgtccgaaatctaccggcgatctaccgaaaatcgtccaaaatctaccgaaatctaccggtcggtgtgtaagcgggggcggttgggcggggcgtcggggtgccccggctggggtgctctggcggaagtgggcgaaaaacggctcctgtgacaaatttcgcgcggtccggcgggcgcgcggcggtgcgtccgaatacataaccccaggtggcgaaaatctcgcgtgctccttcctgctgaaaaccgctcgcaggattgtcatgggagccgattcgcgcccacggattgggaatgtgcgctgccgggcggggcgcgacccacgcgcccgcgggtcggaggctccgcagcatggaatcacggttgtgaacgatttttcgacgcggaaatctttcgaaagcctgcgaaaggcctggtcggctgtgtcggtccgatgcaagaatcgttcataaccgtgattccgtgctaggggtggcgggtcggcgcgctgtcggacggcggctcccgcgcgcgctcgcggatcgggggacgcggcttcgacggccgccggtttccggatcgtgcgcagtcggctgcgatccggatcgcgatacagaggggcggggttgatgccccgttcccgtttcctgcgagaagagggaaccgcccgatcggttggagccggtcgggcggttctcgttttccagctcgccaagggggaggggaggtcggcgagtgtggacggggttgttcggtttacagctgcgccaggatgcggccgaccagcatgccgtgcgtcagcgccatgccatggctgatgccgggagccggcagggggtagtcgacgaggaagcggccgccttgggcgttgcccacagcgtacaggccctcgatgacctcgtcctcggtgtccatcacgttgaagtccacgtcggtttgcaggccgcccatgttcacgaggatcaccgtgtcggtgagcgggtaggcgtagaacggaccttcctctacggggaacagacggtcggcgcgcttgccgaagtcctcgtcgttgccggcggccgccagctcgttatagcgctcgatggtggcggtgagcgcggcttcgtcgacttccatgagcttggccagctcggcgatggagttcgccgtcacgcccaaggccttctcgccctcgaagtagctcaggaagcccggcgtgttgccgtcttcgttatcctcgtcggagatgtaggcgtttttgccgtacgagccgttgggcacgtcggcgcccgactccacgtaccagttcacgttgccgtggccggtgtccatgtacttgatctggtctttccacttgctgtcgaagatctgccaggccgtcttcttcggcaggcgcgaaagctggttctggaacggctggcctcccacgtcctcgttcatgaagcgctcgccgttgatgtccaccagcaagaacgcatccatgcccagaggtccgcccaggtggtgcgtcatgggagcgtgcggaccgtcctccatcttcgcgccgatccacatgcccatctgctggccgtcgcccgtgttcgtcttctcgcccttggcgtcgacgttcgggaaaatgctcatgaagcggtcggaccacggcacgtagtagctcatcatttcggcgttcgaggcgtagtcgcccgtagccagaagcacggccttgctggcggtgatcttcttgtaatcgccgttctcgtcttcgacgatgacgccttccacgcgtcctgcgttgtccggacgcaccagctggcgggcgaacgtggagtacaggaactgcacgccggccttttcgcaaatgtccaccatgttctggatgtaggggccgttgtcgggcaggcagatctggcagtcgtcgaagatggggtagaaatcgtcggcgatgttggcctcggcgggatgcggccagtgcattttgcggacgctcatggacttgccgtcgtaggtgtcggattccgcctccaccacgtactgaccctcgctggcggccaggaaccaatcgaacgcctcgccggagttgtcggcccacaggttcaggatgcgctggttggggcggtagccgcactctttcatgatctggccgactgcggcgttcttgtcgatgtggatgcccaggtcctcttggattttgccgccgatgcagcccacctggttcgagcggtactgccacgtggtggccttctccacgacgacgatgttcttcgcgccgctttccacggctgcgcgagccgcgctgatgccggagagtccggcgcccacgatgacgatgtcggcttcgacggtctctttgatgtcgctgtcggcaatggggctcggagcggtcaagaagctcggtccgccggcggcggtggagccggatgcggcgctggcgtccgatgcgcctgcgcttgccgcgtcgctgctggcttgcggcgagcagccggccagccctgcggctccggcggccatggcggctgtggcgcccaagcctagaaacgcgcggcgggacagccctcgttcattgcgtgacatggtcatgtcgtcctccctgttcgaagtgttctcgcgtcatccctcatgtgacgctggcatgacgatacgtcgcagcgcgtggtttgccgccgacccaaagggttgattccgaaggaggtgggttgatatcgtcccaaagggttgatgctggcgtgcgttcgcgctccgggtgaaaaagtccggtacaatgacggaagttttcaggggcgtgcgaggggcgagcgatcgtccggagggaggaggatcggtgaaggctgcgttctcgtcgacaagccgcgaattcacttcgcgctacgccggtctaagcttctactgggcctgggtgttcttgtcgttcaattcgctggatatagtgggaggggacggacgggcaatctcgatagtgcacattatgtcgtcggctaccgctatggtgatgtttgcggtatgtgcgttgagctggcgctcggtgatggggtgggcggccaagcgcgttcgaatcgtgctgctggcatgcggcgtgacggcgcttgccggaacctgcctgtacgcactccccttgttctccgctttgcctgcggcgatgggcgcaggcgcgtttgccacgggattcgcttgcacgcctatcgtcttggcttggggtgtaatctatcgtgacctcgacgcccggcgcgccgtgctgttcacgtccatgacgtttctgggcgccgccttgctgtacggggcgatcatgctgcttgggtcgacgatggcgccggttgcggtgtcgctgctgcccttggccgcggcggttgctgcgatggtgagcttgcgcgattggcgggccgaatgcgcgccggatgccgaagcgcgccgccgcgcgcggagcgagatacgcgacctcgtgcgcacggcgctgtcgtggcgcgtgctggtagggctgatcgcggcgttgttctcgtatggcgggctgcgggtgtatttcggctcggttgcgccgagcgtgttctcggatcccgcgctcatggcgggcaccatcgcgttggcggcgttcgtgttcttcgtgtatggcgctctggtgtcacgcacgagcctcaaccttggcgtgctgtaccgtatcgccatgtcggtgtgggcgttggcgttcgtgttgatcgcgctggtgggtcacgacaacgtgacgatggtgttcttcatggcgtcgctcagctcggtgctgttcgaggtgctcacctgggcgcttttggtcgaaatcgcgcgcacgactcattttgcggcgctgctggtgttcgcggtgggccgtttggccgtgcatgtgggaatagtggctggcgaggtggctgcgtttgcattgatcgacgatatggcgttgttcgcggttgtggccgtgttcgtgttggtggcgtcgacgggtttcgcgttcgccgaccgcgataccacgttcgcatttgagagcccgacgccggccgagttggagcgactttccggtggggacgggcgttcgcatgccgacgagtcggtttcgtctggctcgggggctgcgggctctgcggttgagccggcggatgcgagccttgttcctgtcgccgcggacgttggggcgcgcatcgaagcgctggcgaaagcgtatcagctatcgccgcgcgagaaggaggtgttcgctctgtgggtgacggggcacggctcgaagtacatccaggagaagttcgtcatctcgccggcaacggtgaaaacccatgtgcgccatatttacgagaagtgcgatgtccacaaccgcgccgaacttatgcgcaagctggaagaggccggctgagaagcgacgcggcttcgacgcgctgccgggcggcatttcccgcgcgtgcccgcggatcgggcgtgcggcttcggcgcgctgccggtttccggaacgtgcgccggtcggctgcgatcctgcgaaagcgcggcgtccttgcttggcgccaaaacgacgaagccctccaacatctggtcggagggcttcgcggggggcggtcgcggaggcgcgcccttaggcgcgcgttgccagcttgcggttcaccacgcgcttgaacatcacggtgagcagcacgaggcccacgccgatgaggatgtggccgatgccggcgatgcccgagatggcggcgtcgggcatcgcaagcggtgctccggtgacttccacgacgccgcgcaccagcatcatgcacacggtgacgaccaggccaacgttgtacacgatgtagaatggcttgaacagcttgtcgccggtgaagtcgtcctgcaaagcgaacagcgtggcgatcaggaataccgcgaacccgagcaccagcaggtgcgggtgcataagtcccagtgtggtctgcccggtgaactgcgcgaagttcgtgaactcgcggaagaatacgcctgccgccgccccggcgataaggtatacgagtgcggtgttgatcagtttcttcataaggatcctccctggtccgtatggtcaaatatgaacgttgttcattatccgaggtttctttttccgaaggggatatgtcaccaaatcgtcatcaattgccgtttccctgcgggcgatccacgagcgcgagcggttgtgctaccctgttcctcatcgaaatcaacggcggagccgggcgacaagacgaggacgtggtgcatatggtgaacgagagaatgtacggcttgggagccgagccgagcgcgattcgcgagttgttcgcgtacggcatggtgcgcaaggcggaaatcggcgccgagaacgtgttcgacttcagcatcggcaaccctagcgttcccgcgcccgatgccgtgaagcaggcggtgctcgagctcatggacgaggagcccagcgccttgcacggctacacgccggcagcgggcgatccgcgcgtgcgccaggccgtggctgaccatattcgccgtcgctacgacgtgcccgcccagcccgagcaggtgtacctcacggcaggtgccgccgcaggcttggccatctccatctcggccgtcaccgagcctggcgacgaggtcatcatcatcgccccgttctttcccgagtacaaggtgtggatcggcacggcgggatgcacgtgcgtggaggtgccggcacatgtgcccgacttccagctggatatcgacgcgcttgcgcaggctatcgggccgaagacggccgctatcatcctcaactcgccgaacaacccggtgggcgccgtgtactcgcgcgagaacctggaggcgttcgccgcgctgcttgcccgcaaggaagaagagctcggccgcaagctgtacgttatcagcgacgagccgtaccgcgagatcacgtacggcgccgaggttccctacgtgccgtgcgtgtggccgcgcaccatcgtgtgctactcgtactcgaagtcgctgtcgctgccgggcgagcgcatcgggtatctgtacgtgtccgacctgatggacgacgcgcgcgaagtgtccacggcggtggccggcgcgggccgcgcgctgggcttcatctgcgcaccggtgctgttccagcgcgttatcgcgcgctgcatcgatgagccttccgacgtggcggcctacgcggccaaccgcgagctgctgacgacgggcctcggcgagttgggatacgagttc

SEQ ID NO: 8994 - DNA, 503 bp, Unknown
  gut microbiota DNA sequence
ttgggcttcatctgcgcgccagtgctgttccagcgcgttatcgcgcgctgcatcgacgagccgtccgacgtggcggcctacgcggccaaccgcgagctgctgacgacgggcctcggcgagttgggatacgagttcgtggaaccgcagggcgcgttctacctgtgggtgcgcgcgctcgaggacgacgcgcaggcgttcagcgatcgcgcgaaggctcatgagctgctgctggttccatctgacagcttcggcgtcggcggctgggtgcgcgtgagctactgcgtctcgcgcgaggtcatcgagcgcagcatgcccgcgttcaaggctctcaaagaatcgtacgaaggctaagggcttgccgtgaagggccggcgacgcggcttcggccgtcgttgccggttttttgttttgccgaaccggaaaggtcgggaaaaaagtgttgccctcctcgaactaatgatggcgctctcgtcctcgacgcgcgataatatcgctagatcgct

SEQ ID NO: 8995 - DNA, 695 bp, Unknown
  gut microbiota DNA sequence
aaagggccggcgacgcggcttcggccgtcgttgtcggctttttgttttgccgaaccggaaaggtcgggaaaaagtgttgccctcctcgaactaatgatggcgctctcgtcctcgacgcgcgataatatcgctagatcgctttgctgcgataaagcagcatagcggtgcagacggtataggttcgaacaaggggacacacgatggctcagcaagacggttctccggcgaaggcgtccggagagaacatcgagcagttcggctacaagcaggaactgcgaagaggtatgggactatgggacgtggtattgtacggcgtcctgttcatggtgattatcgcgccgcagtccattttcggcaccatccagcagaacagccacggcatgacgccgctggtgtacatcatcggcttcgtggccattctgttcacggctatgagctacatgcgcatgagcaagcggttccccattgcgggttcggtgtactcctacgtgcagcgcggcatcaacccgcacgtgggcttcatggcgggctggctgatcctgctcgactacgtgctggttccctccttgctcatcgtcatggtgatgaactggggcgtggcgctggtgccgggcagcccggcatggctgtgggctgtggcgttcatcgcgttcaacacgttcgtcaacattcgcggcattcagatgagccgcggc

SEQ ID NO: 8996 - DNA, 10267 bp, Unknown
  gut microbiota DNA sequence
agttccctccttgctcatcgtcatggtgatgaactggggcgtggcgctggtgccgggcagcccggcctggctgtgggctgtggcgttcatcgcgttcaacacgttcgtcaacattcgcggcattcagatgagccgcggcgttgactgggtcatcttcatcgtcgagattgtggccgtggtcgcgttcatcgctcttggcaccaacttcgtgttgggcggcggcggcgcgggcggcttcgtcctcgacccgatctaccaaccgggtcaggtggacgcgcacttcgtggcggcgggcatctccatcgcggcgctttcgttcctgggcttcgacggcatgtccacgctggccgaggaaacgcacgagcctgagaagaacatcggcaagggcatcatcatcgcactgtccatcatcatcgtcgtgttcgtggcgcagacctacatcgccgccatcgtgcagcccgattgggcggccaccgatcccgacatgggcttcttcgattccgtctacctggtgggcgggccggtgttctacaagatcatgttgctggtcaacatcgtcgcggtgggcatcgccaacatcatcaacgcgcagatggcatcctcgcgcctgctgtacagcatgggccgcgacggcgtgatcccgcgcgtgttcggcaaggtgcatccgaagttccagacgccgtggttcgcctccatcttcttgggcgcgatcacgctgtgcctggcgcttccgctgcaggactacatgggcacgctggcgggcttcgtgaacttcggcgccctgtcgtcgttcatcctgctgaacttcgccgtgttctggttcttcttcgtgaaggaaaagaagcgcgcgtcgttcaaggacatcctgatgtacctcatctgcccgttcatcggcatagccattttgggctacgtgttcaccggcttcgagtgggccacgtatgccgtgggcgtcacctggctggtcatcggcctgatcatcggcgcggtgaaatccaagggttacaaggaagtgcccgaggcgttcaagaacctggaagtgtaaggacgcattcgttgattgaagggacggccgcggcgtatttgccgcggccgttcgcgttttcgttccccgcaacgcatcatcgcccgaaaaacacgcctcagcttcgatttccgtgtttttcgggcgatgatggtgcgcaagccgaatgagaaggagatgacgatgggcgaaggaaaggccgtgctggccgtcggagccatcatggtggacatgctgtgccaggttccgcgcctgccccgatcgggcgaggggatcgtggtggaggagtcgcgcgcggtcgtgggcggttgcgcgttcaacgcggcgaacgtgctgcggcagctgggtgctccgtacgagctgttcgcgccggtggggtgcggcatcttcgccgggttcgtggaacgcgagctgcgcgagcgcgggctcgaggcgccgcggttcgatgatcgcgacagcggcggctgcatgtgcttcgtggagccgggcggcgagcgcacgatggtcacgctgccgggcatcgagcgccatttcgtgcgcgcatggttcgaccgtgtcgaggccgcgcgcttcggttgcgggttcgcgagcggctacgaggtggaagggccgggcggcgacgccatcatctcgttcttcgaggatcatccctctatagagctgtattatgcgcccggcccgcgcgtctgcggcgtaggcgcgcagaagacggcccgcatcaacgcgttgcatccggtatggcatctgaacgaccaagaggcgcttgcgtataccgggcgcgccacggttgaagaggcgggcgccgccatcgccgagaagtgcggcaacgcggtggtgatcacggcgggcaaggacggcgcgcatctgttcgtcgatgggcggcatgcggtggtttctgccgggcttgtggatgtggtggacaccgtcggcgcgggcgatgcgcatctgggcgcgctgaccgcggcgcgcgcggctggacgctcatgggaagacgcgctggcgttggcgaaccgcgtggccggagcggtgtgcggcgtggaagggtcgacgctggccgacgaggcgttcgcgaggacgggtgcgcggctgtagggcgcgttgtctgatggcgtagtcgttcgttgagatattctcggacgaaactgttatctatacgtaaacttgtcgtacaattgaagttacttttgaagttacttttccctaacggctaggaattgtcgtcggtgcttgcccgtgcgatcttcccggatgaaagtggtatgctcatggaggcgatgttcggtgaagtcgaaactcttgcctacgtgatagacagtgaatgccgcgtcgtctacttcaacaagaagatggaggttgcgtttcctcatcttgaaacgggcatgctttgctatcaggccttgcgcggcgagcccgcctcttgtccggattgcccgctgattcttgaccacgccagcaagagccgggtctacaaccagcgcatccggagttggatagagacagaggtgagcgacatagactggcctggctcgggcgcgtgccacattttcctgagccgtgtcatcgatcggcctgatttgggcgcggccgatccgaagcctttcgatgccctgacgggcctgtatacgcgcgaagcgtttttctcggcggtctccactgcgatccaagcatatccggagcgctcgtattgcctgatggccgttgacatcgaacatttcaagctgttcaacgaatggtacggcgaagaggccggagatttgtttctggaagaggtggggaggctgctcggcgaggctgcagccgagagcggcggcgtttcaggctatctgagcggtgacgacttctgcatgctgctaccttgcgacgagggcatgatcgagactctgcgagcccgcattactcaaagcgcgcttcatcacggcaaaggcatgggctttcttcccgcgttcgggctgttccgcattgacgatcggtccctgcccgtcggcatcatgtacgatcgcgcgttgctggctttggcctcggtcaaggggaattacgctcagcgtttccgatggtacgacgatggtatgctcagagagatcaaggacgaccattcgcttttgctcgaagtgcagcaggctttggagaagggcgagatcacgttctacgctcagccgaaatgcaacctcgacacgggcaagatcgtgggcctcgaggctctggttcgctggatgcaccctgagcgcgggctcatcccgccgatccagtttatccccatgctggagcgaaatgggctgataaccgcgctcgatctgcatatttgggaggaagtgttccgcgctctgcgcgcgtgggtggacgccggccaggcgcccgtgcccatttccgtgaacgtgtcgcgccgcgacctgtatgcgctcgatgttttgggcacgttcgagggattgatcgaaaagtatgatattccccctcgtctgctcgccgtcgaaatcaccgaaagcgcgtacgtcgaggattgcgagctgatcgtggacatcgtcgagggtttccatgacctgggcatctccgttcatatggacgattttggcagcgggtattcgtcgcttggcatgctgaaggacgtgaacgtcgacgtcttgaaactggacatgaagctgctggacgcgatagacgcgcaaagccgcaaagcccgtagcattctggaagccatcatcggtatggcgaacttgctggacatccgcgtgatcgcggagggggtggaaaccgaatcccaacggcaattgctggtgaagatggggtgcctgtacgggcaagggtacttcttctacaagcccatgccgaaggcggagttcgagcctttgattgcgaatcggacgaaggttgatttccgcggcatccatgcggactccatcgagaggttccgtattcgcgacctgatagagagcagggtgctcagcgatgccatgctcgacgatatcctgggtcccttggtgctgtacgatctgtacgatggcgaagtggagcttctgagcgccaacgagcattactgtcagctgaacggggttaacgccgttgacctgcacgagctgcgttccacgttcgcgcgtcgagcgttcgagtcggattgggacgaggtcatggaagcgttcgagcaagctcgcgagaacgtcccgaatggcgcggtcgtcgtagtgcgtcgtatgcgcccggacgggtcgaccgctcacctgctcgtccatctgctgttcctgcgcgagcacgaaggccactacctgtatctgggttcgctgagggatgtgactcgcgagcggcagcaggcgcgtcagctggagtcctctcgtcgagcgttatcggctgccacggatgcttccccgcgcgatccgctgctcgtagcgttgggggaagagaaccggcgaaccgccctggcgctttccgccgagctttcgcccggaggcatgatcggaggatactgcgagccagagttcccgctgtacttcgccaacgctgctatggtggagcttctgggttacgacacgtacgaggaactggctgcgggcatcgattggcgcgtgggaaacaccatacatccggacgatctggcctcggttgcgctcgacatcgggcccgagtattacgtggggctcgagtacactaccacgtaccgcatggctcgcaaggacgggacgtggttctggacgctcgacaaaggccgggtggtcgaagcggaagacggcaggcttgccatcgtgagcgcttgcaccgacatcaccgaagtcatggcagtgcaacagcagcttgccgagcgaaacaaattgttgatcagtcaaaacgaagagcttgcattcctgaatgaagatatgcccggtggctatcatcgctgcctcgacgctcccgggtgcgatttcctgtacatgagcgaccgctttctggacatgttcggctacacgcgcgaagagataaaggagctgttcgacgacaagtacatgctcatggtgcacccggacgaccgcgacagcgtggccaaaggcgtgaccgcgctcagggagggcactgcggggtcggatccgttggagtaccgcatgagagccaaggacggctggcgctgggtgatcgaccagagccgtttcttggaatacgatgacacctcgttcctgcagggcgtcgtagtggacgtgacggaaaccgtggagctgcgcgacatgatgagcatgctgatcgagcacacctcgagcgacatcgtgctgctgtcatggtccgacaaagaggacgtccgcgtgaacgtggtggcgtgcggtgcgtcgaagaagtacgggctctcgcccgagcagtacgaggatatcattcgcggccagctgtaccttccgagcggagacgggggcgggcgcctggtcgacgagattgtcgacaagatcgatcgaggcgagagcttggcgattgtggatcgaccgcgctttcccgggcgcgagaacgtctggatgcacattgaggctcgccgcgtgggcctcgagtcctttgagcgtatggcgttgtgtttggtcaccgatgtgtcttctatgaagaaccagcaacaggagctgtggctcaccaagcgaaagctggagggggttctggatcaagccggcgtccaaagctgggactgggacatcaacagcaatcgcttggtgctctcgcgcagcgagcttatggatcgtatattcgcaggtctgagccgcttcgaggacgatatgctggtcgtggacgggttcgaccccgagactatggagttccgcttcgtgccgcccgactaccagcaggcgttcagggactcgtttcggggcgtgcgcactgctcgcgatcgacagcgctcggtgtttgagatcccgttcacgttcgaaggcgaggcgcccttgtggatcgaagtctcgtgcgagacggtgcgcgacgagcaggatcggcctgtccgtgcggtgggatactaccttgacatgaccgatcgcagaaacgaatccttgcagaacaaagcgaactccgaggcgttgcggcagctgcgaaaaaagagcttccagctgctcaagatggcgaagaccgatgcgttgaccgggttgcataaccgccaggcggccatcccgaagatagaggagcgcctacgcgcggtcgaggcgggcgagctgggcgatgcttcgtgtgcgctgatcatgttggatctggactccttcaagctggccaacgacgtgttcgggcacgcgtacggcgatcaggttatcgtgcatgtggccgaggctctgaaggagtcgttccctggcgacgtcgtctgccgtatgggtggggacgagttcctggtgtggtgcgaggacgtggacgagggagcgttggaggataggatcgcctctgcgctgcgtgccatggaggtcgaacgcgttgaggacggtcgaacgttcctgttctcagcgtcggccggttacgtgctggttccgcaggagggcttctcgttcgacgacctgtatcagaaagcggattcggcgttgttctcggtcaagatgggcggcaagcgctcctgctcgcgatactggtctgggatgaagagcgttcgctgcgagctggccgagtgacgggtgctgccggttctttgtctgcagccgcttcggctcgcttgcttgcgcgatcatgaaaacaacacttacgagaatgcttgagattcgctagaatcgaagatgccacggcgcgctccagcgcgcccggcgtgtctcgtttccccgaaaggcgccttctgcgctggtaggttcgatggggccaatcaagacaaccgaagacgaaaggacgattcctttatgcaagggaaacctcttgtgctgctgctgtccgtcttgtacggcagcgcgttcattgcggggttcaacgagaacctcgtcaacatggcgctcgtgtccatcatggcggagtacggcgtcgactccgtgacggctcagtggctggtcaccggctatatgatcgtggccaccgtcgtggtcacgtgcatggcgtttctctatcggcgcttccatgtgcgcacgctgttcttcggcgcggccggcttgagcatcgtcggctccgcgatggggctcgtcgctcccagcttcgagctgctgctggtcgcgcgcctcgtgcaggcggtgggcacgggcatcttcatcccgcttatgatgaacaccatcctcgtggtcacgccgaagaacaagctgggcacgtacctgtccgtcggcggctgcatgatcacgttcggtcccgcgttcgccccggtggtgtgcggcgcgctggtgacggcgttcggatggcacagcattttcgtcgtgcccatcgtggcgatggcggtgctgaccgtgctcggcttcttctacatgaagaacctcgaaacgcatgaagcgcatctcgacgtgctgtcggtgctcctttccgccgtggcgctgaccgtgttgtcgttcggtttgacgcagctgaccaccgacggtgttctggctgctgccgcccttgtgctggcggcggccatggttgcagtgttcgtggtgcgccagctgcgatgcgcgcatccgcttatcgatttggcgccgatgaagaatcgcgcgttctggccggcgctcattctggtgaccatcgcgatgatgagcatgttctcgatgagcgtgctgctgccgctgtacttcgaaggcgcggcgggcatgaccgccttcgccgctggtctggtgatcctcgttcccgtgctggcgaacgcaggcgccacgctgctgggcggccgcatcatggacaaacgaggcgaatggcctttgctgcctctgggcttcggcggcatcgccatcggcttcatcgcgttggtggcggttgcgccgcagctgtccgtgccggcggtgttcgtcgccatgctggtgatgtacgtggcggtgggcttcatcttctcgccttcgcagacggcaggcctgcgggcgctgccgcctcagcagaacccgttcggcgtagcgctcatgaccacgttcgtgcagatcgctgcatgcatcgggccatcgttgtatatcggcatcatgtcgtcggggcaagcgggcgctgcggccgggggcgcttctgcggcgcaggcgaccgcggacgggttcgcgcttgcgatggtggtggccgcggccatcggcgtcgttgggttcgctttgtcgctggcgtatgctcgcgcggcgcggaagcgtgcggccgtgcaggccgtggaacgcgcggcgcagccccaggcgctgtcggtgcttgcgtccatcatggaggctgacccctacacgctgccggccgccacgccggtgcgcgaggcgatgcgcgcgttcgtggatttgagggtcggcgggttgccgctggtggacgagcaggggcatccggcgggcttcgtgtccgacggcgacgtgatgcgctacctggccgacaagcatccgctgatcacgggatcgtattcgctggtggaagccgccaacagccagacgttcgacgagcgcctgcgcgagctcatcgagcttccggtgagcgcgatcgccaccgacaagctggtggccatcgaggccggatcgtcgctggaagaggtgtgcaacctgttggccacgcgccgtttgaagaaagtgccggtggtgcgcgacggcgcgatcgtgggcaccgtcaaccgctccgacgtgctgcgctacgcgatggacacctgcctgcagggagtgtaggggagacgtctggcttcgtagggcgctgcagggcgccggccggcttcgcagggcgctgcagggtgctgcagggcgccggccggcttcgcagggcgctgcagggtgctgcagactgccggccggtttcgcggggtgctgcaggatgccggtcggcttcgcagggcgccggctggcagagattgcacgctatgcacgattctaagccgcatttttaatgcggtcgggaagaaagcccaggtcgtaaaaaactaacgatgaaaaaatcgtgcatagcgtgcaatctctgccagctacggctcggtccgccgttaaaccaggattggcatagcccggatcggcccgtcccgcgaaagctcgccggcggctcggaagccctcctcggccatcggccaggcgctcgtcccgcccgatcgccagccgcccgacaggggaagcggcgtgcggcggtgcatgtcgatcccggtttagcagcggacgacctcgcttcgactgccaaggatgaagcgggttcgctgccggctttcgatcgcattcagaacccgagcagatcgcggcgaagctgtcggttggcgcgcgtgaaatcgggatcgacgtagcgaaggcgctttccggtgtgttcggcaacggtgtgcgcgatcgcgttcatgcttccgccgttttcgagttgccatttcgtgacggtcagcacggtgattcccatcgacaccagggcatctcgtctcatcgagtccttcagcatctgctctggatcctcgtggtttccgccgtcgtattcgacgtcgagtttcgcttcaggccagtacaaatcgcacacgaggtagttcttgccggcaatgcgccgttcccgcctgcccaagtcgatgcgatggttgagcagcggctgcttcaggccgtaacctcccattcggtacggcagcgtgagaagcatcgtcaggatcgtctcgcgcgatgaggccgatccgttcgccacatagcgaagcgccttgatcgccttccttttgccgtgcgtcttgtcgaggctgtttgcatacgcggtaagcttttcgacgctggtcagcggcgcgcacgttcggtaggagttgtcggagaggtcgtaggctccgcatagctcgaagcccagttcgataagcttcggaagattccataacgtggccatttgcacgaaacacaactccggggagcatacgcggaagccgttcatagagtcgagggtcgagcgtggcggcaacgttccgccttccacatgactgacggcctcgttcgaagctcgacgaacggagttgtgcggtacgagcacgtgcaaaggacgttcgagccaccatggccccggttcggcaagcgatccttttcggggaggttcgtcgagaagcggtcgggtatcttcgatggcgcgaaaacttcgctggccgatgcgaaccgatctccagtattcaagtgcggatgtatgacatagggttggctccattggctcatgatacgtggtcgatagcaagatgggaagccggttggcagagattgcgcggtatgcacgattattgaggcttgttatcggaagaaaagagagaaagcccaggtcgaa

SEQ ID NO: 8997 - DNA, 277 bp, Unknown
  gut microbiota DNA sequence
gcagaacggcgcgagcgtgctgctggtcgacaaggcgccgtttctcacgtccaccttcctcacctcgaagggtaacgtgtccatcgcccaggttccagagaataaggacgagtggtgcttcgaacccgagacgcccgacaccatggaccagttcgtcagccgttaccgcaacctcaccgagatcggcaaggtggacgcgccgtatcccgactatagccgcatgcagcgcatgatggaggaaagctgcgccaccatcgcgtgggtggagcagctgggc

SEQ ID NO: 8998 - DNA, 808 bp, Unknown
  gut microbiota DNA sequence
gagcacgttcaccagaaggcagttcgtcatgggggctatggtgctgggcggttcgctcgcgctgaccggatgcagcccgaagcccgagtccaagaagcaggacggcgcgtcgggcgcaaccgagtccgtgcaagccgatatcatcgtcatcggttcgggtctggccggctcggcctgttcgatctccgcggcgcagaacggcgcgagcgtgctgctggtcgacaaggcgccgtttctcacgtccaccttcctcacctcgaagggcaacgtgtccattgcccaggttccagagaataaggacgagtggtgcttcgaatccgagacgcccgacaccatggaccagttcgtcagccgctaccgcaacctcaccgagatcggcaaggtggacgcgccgtaccccgactatagccgcatgcagcgcatgatggaggaaagctgcgccaccatcgcgtgggtggagcagctgggcatcacgttcgagaagtcgtttaccaaggagatggtgggcaccgacacggtgaagcccgacgtcagcgccgaccccgcgacggaagcgggcgtccaggtggcgaacgcgttcgcggccgaattcgagcgcttgggcgtgcggacgatgctgtctaccgaggcgaaagagctgatcatggacggcgacaccgtggtgggcgtgaaggtcgaggggcctgacggcgcccaagagctgcgtgcgaaggccgtggtgctggccaccggcggcttcggcggcagcgcggagtactgcgaccagctggtgcccgccatcaacgagatgggcttccagtacctgggc

SEQ ID NO: 8999 - DNA, 295 bp, Unknown
  gut microbiota DNA sequence
ctcgatggagtacgaccccgagccgcgcgtgatggcccgcaggtccttcgtgtacgtgaccacctcggcgtaaggcacgcgcaccatgatgaccgtctcgcccgcgtcgttcgaatcggtgcccacgatgcggccgcggcgcgtggagatgtcgcccatcaccgcgccggcgtactcctcgcccaccgtcacgtcgaggttcgccatcggctccagcaggatagggtcggccttctcgcacgcggcacggaagccgatgcgcgcggctgtcttgaacgccatctcgttggagtcg

SEQ ID NO: 9000 - DNA, 1221 bp, Unknown
  gut microbiota DNA sequence
acctggccgtcgccctgttcgcgcaatgcgagcgcctcgtcgtcgacgagaccggcaaccagcagctcgaactggtcgggaaccggaccgaacggcgccttcgcatagcgcagacccgtgaaaccttccccgccgtcgcggtaggcagcgaaatccagatagaacagcaccttgttcagcttcgtgcgatacagatcgtgaacatgccgggcaaggtagaccaccgtctcgcgcatgcgatccgaatcgaacgcgcgcatgcccgtatccagcgtcttttccttcgcgatctcgtccagcacgttgagccgaaccaccgcgtagtcgacccggaagagaccgcgcttccgcaccgtatcgcacgctttggcgcgctcttcgtcagaaagcttgcgcgcgccccgttccaggcacttcagcaagaagcgcggatcgcgcgcgttggctagcagctgcgcatgggaatcggaagcgaggcacccccgctcgtaccgttgcaagctggccacgccgatgtcgagaatcgccgcgagcactcgctgcgagaacccgtatttcttacgcagcgcaacgatctcctcgggcagcatcagccccatcttttcttggtacgcgtggtagagcttatgaagacccttatccacgatcggcgcccatccgatagattcaccgcatttcgggcaaacgtaatgttcgatatcggcctcgaccgtcacgcctcggacttgctcgacatggtgccgtatctcgtatgtcgcgtcaacttcctcccagcattccgggcaaagcagcgatttcgtgcacgtcatgtcacgatgcctttctatacggatacgaaagaggtcgttccgcctcatggaacgaaacgcagatcgatttcaccgttccctgaataacgtagatcgcaaattttatatatgtttcgaattgcgccacataggctccgaacacccatagatcatgagggcgacctttgtcgtcagatagcggcccctcgcaatagtcttcgacttcaagccctcgcataatccggcgcacgtcacgatagtcgaattccaccaacctcatgaaagccctcgttttgctggatggattgtattcgccagcgacaaagaaatcgcaggcttcaacctgccgcaccagcgccaacaccgcttcgatcttccagcgttctgcaaccgtccccatcgctcaccccgcatcacatcatttgatgtgatc

SEQ ID NO: 9001 - DNA, 145 bp, Unknown
  gut microbiota DNA sequence
cacgagcgggccgaagtcgtccatcttgcgcatcagcgccagctcggactcgtgcgtgagcggcgagaggtcaacgttcgccgggatcaccttcgaggccagctcgtccatcgacatgtcgccgttcgcggccgcttcggcatcg

SEQ ID NO: 9002 - DNA, 273 bp, Unknown
  gut microbiota DNA sequence
gctttggtgccgacgtatttggtgtaggcgccgtcggcatcggacgcgatgatcgcgtccacgcgaccttccgtgccgttggcaaagccgccgcgaaccagctgctcgcctttgacgttccagcgcacgtctactcccaggtcttcggccacgtacctccccatctccgcagcgatatgcccttcgccgtttccgatggatcctttcagctcgctgtcgtcaacgtagaacgcgtgagctgcgggcggggtgaacatcgggtcgccttctttg

SEQ ID NO: 9003 - DNA, 2352 bp, Unknown
  gut microbiota DNA sequence
gcagaaggggcggggagctgggagtgtttcacgtgaaacatccgggcgcccgggtgccgcccgtccggacgttccgttttctcgtaaggatgtttcacgtgaaacatccctcgcgcttcagggccgcttgtccgggccgcgtgcgagcaaggcgagccgcccgtaatggcgaaaaggcatcgaattcggaagaggccgcgcgccttcgccgtccgagacgcgcggtcgcggaagctcgcctcctttcgaccaggcgctatgcggaagaagggtttccggtgcatccagagcccggcgcaaaacttccgaattcgatggtttcttgccatggggagagccctcttctgccgccgcgtcggcatcgtagcggtccgcataccactctacccgaagagatcgtgtcagcaatcgtgcaatagtcggagaagctcggaggtgcggcgtccatcctcgccatgctcgaggacaaggccttcccaactcagactctcgtgatcccaatgcagatcgccagcctttcgagccaaaacaggatcgaacaaacttgcggcaagtgcttcggccgccgcgatgtcggagagctcggaagaaagaccggtacggctaaccagcttcttgaaagcgccctcgtacagctgcttccattcatccggcaccgagaacctgtcagggagcactattccgcgtgcgcccgcctcgctgcgcacccgcctgcagagttcgccgccatcgatatcgacggtagttgcgtagatcgcaacgtcgacgagatcctttatgcgagacgaaggtttgccgtcgtgcgtctcgaccatggcgcagagcttgtcggcgagggagttcgcaaggggatacacgcggtagtcgaacatcggaacgcctgcaacgtcgatcctgtcggccggcgtcactatctcaggctctccgcaggcaacgcggtcggccaccaaatctatcgagacctcctgcagccgctttcctccaagcaagggcacgaaggcgaccttgagccccgatcggtactcgtcctcgaccttgatcggcacggctcctacgaactcgaagaccacgaaatcgccgagatcggcttctgcgagggctctgagctcggcgagcgcggcgtcgaggtctgcctcctccgaaagcaggtcgatatcccgggtggcgcgcgcgtccatggtgcgcgccagcatgctctggccgcctttgagcatgaaaggggagtcaggcttgctgaacacgcgacataagagcctgtggaagtagaagccggaaacggctctgccggtttcgaggggagaagccttggccgcggcctttatagccatttccagagctgccggggtcttgcacaccatcatgcctcccctccgaagagccgctccatcgtctttctctccctggcggaggccttcgcttccgccgcaagacgctcgagcttttccgtatcgagccccttcgcccgagcgtcggcaaacgcgtcttgcacaagcgacggctcctcgccgtccaggacaaggtctacgagggttcgctcggctcccgtcacgggtatgccttcgatgaaggacacgtcgtcacggggtacgccgcgtatgccgaaccttgcctcggcgttgcgggagttgatgcgcctcggggcgaggatacggtagggggagaggtagaagtccccgatgccgagaatcgatgcggccgtgcttcccgcaacggtgacgccgtcccattcgccagcctgcatccgctcgtgcgtcatcttcgcgggatcggtgagcttccagagggccgccaggtcgtcgagctgcgatgccggcaccccggccatccgatacgccccatgggcgacgcgcacgagcctccccgcctcgcatgctttggcgatcgcattgcgggggatgccgagacgctcggcctgcgctgtggtgaaaacgccttccgaagccgagagctcttctatcgcagaggtgtggcggttcttgttcatgtttcaattgtatcgaaatacgatacttttgcaacatctcttaacgtagcttggtgttgctcaggcgtctttgcgttcgacaggttcgtctccagcgatgatgctcgtaagcggtcggagagggattggggcggctcgctggacaaggcgagagcggtgaaagttgcttcggctagaaacacgaagcccgtgtcttcttataggttttcggaaaacagctggcatcgctgcgacgggctggcaggatgcgtggaggcggcaacagcgcgtcgtgctcgctctgttcgccgcgtcatcggtattcgtggtcagtgcgcgaattttcgttactgtttctcacttcgcgcatcttgcgctataatcctcaa

SEQ ID NO: 9004 - DNA, 4777 bp, Unknown
  gut microbiota DNA sequence
ggcgcggcgcagcgcttcctcgccgccctcgcgcagaagagcctcctccacgctgagcagcggaggctttccttcgtcgttgaaatcctcctgcactttttcaagcaggtcgtccttgccctcctctttcagcacacgcaccacctcgttgcgcaccgcttcgcgcacgtccccgatggagccgccgcccaaaagaccggtcggccctagatccacgacgatctcgaacacgccgccgcgcttcttcgccgcctcgagctcgctcttgatggcgggatgatcctcgatgccgcgcagcagctcctccgactcgcgcgcaacctcgctgccggcagtctgacgagccacgtcgtcgctcgaagccgaaacgtacgccacgccgcgcttctgcgcagccttcgcctgcagcagcaggaacacgaagcccagcacgcccgcaagcagcgaggccgccagaatggccagcttcgccgtggcgatgtgcatctcgtcggtataagcaagattcgccacgaagatggccatggtgaagccgacgcctcccaagatgctggctcccagcatatggaaccagttcacgttctcgggcagcgaggccagcttgctcttgacgatcgcaaagctcatcagcatgatgccgagcggcttgcccaccaacaggcccagcatgacaccgtacagcaccggatccgtaagcatggagccgatgtccatacccgtgaagctgacatcggcattggtcaaagcgaacaagggcaggatgccgaagtacacccacggatacagcttgtgctcgagacgagtcgccggcggcacaacctggcgcgtcacctggctgagatccgctacggtcttgatgtagtcgccctgcgcgatgacgggcgtctcgggctggaacgcgtcgcgcgcctgacgaaccttgtcgcccgaccacgagatgaagctctcgagattaacgcgcgaccccgacgggataacgaacgccagcaacacgcccgcaatggtggagtgaacgcccgacatgaacacgcagtaccacagcacggcacccaccagcagatacggcaccaacgagtagatgtggctgcgattcatcagcaccagcaccaccagcacggcggcggccatgcccagccagaacatcgacgggctgtggccgtagaagacggcgatcaccaggatggcgatgatatcgtcggccacggccagcgtgctcaaaaacacgcgcacgccgctgggaacgcggttgcccaacaaagccaggatacccagcgcgaacgcgatgtcggtggcggtggggacgccccagccttgcgcggtttcgggattcgtcgcgttgaacgccaggtagatgccgataggcgccagcacgccgccgatggccgccatgatgggcagcagagcctggcggatgttcgtcagctcgcccaccgtcagctcgtacttcacctccaagcccaccagcaggaaaaacacggccatgaatatgtcgttgatcacatgcgccagcgacatgcccgcgaacgcgtcgccgaagaagaagcccgcctcggtatgccagaattccaagaacgcctcgtacgcgcccgtgttcgccacgatgagagccacgacagccgccagcagcatggcgccggccgccttggtggacgaatgggtgaactggatgagtttcctgtatcgtgcctgatgacgctgcacttcgctgatgaagatacgctgcgttccgtcttggttctgttcggtcatggtgccctttcggcttcgtcttttggggtattatccctcatttgcccgatacgttcgcgcaattgttacccgtttttagatcgatttcacaacagatcaaaatgaccgggcaaaacgctgagaattgcgctattctgtactcatcagcttaggcgttaggagtcggcttgggattcgcgtggagggcatatcacccgatcgctcgtatgaccaggtacgacgacggcgaccgagctgtttttttattcgccacgaggtaagaggtgatcgctatgagcattaccgtcaccggacgcaagatgcctgtaaccgacgcgcttcgcgagtacgccgaggagaagatcggcaattccatgaaggtcatggacatcgacccgcttgttgccgaggtcgtgctgttcgtcgagaagaaccctgccaacccccgccccgccgtctgcgaagtcacgctgcgcacgaagggtcacatcattcgtgttgaagaacacgaagaggacatgtacgcggccatcgacgtggccgcagccaaggtggtccgccagctgcgcaagtacaagacgaaggtcgtcgaccgcaagctgcgcgccgccgacgaaaccatccgcatggccgagcctgccgcagcgggcgagctggacgtagacgggctcatgcaggaacttgccgccgatgacgaagtggtgcgcgtgaagacgatcgagttcgagccgctgaccgaggaggaagcgctcgtgaagatcgaccttctgggtcacgacttcttcgcctacaccgaccgcgacagcggcatggtgaacgtgctgtaccgtcgcgacgacggcggctacggcctgctcaagcagacggaggaataagagcatggcaaccatcgacaccatcaagaccatcctcgaggagaacctcgatatcgatccgaacaccgttgaggagagctcgacgttcgactcgctgggcatcgactcgctcgacatggtcgagctgatctgcgacctcgaagaagcctgcgacgtggacttcggcgagcccgagggcctcgacaccgtgggcgccctcgtggagtacatcgactccttgtaagcacgaccctgcaagcagcaccgcgaaggcccgccgatcggcgggccttcgcttgttcagggagggtacgctcggtgggaacccttacgcgagcgccgccttggccgcgttcttgcccgagtagcggccggaagtgtaggaccagttaaggccgcagccgcccgccggatagtcgtcgtagatgaacgtgccgcagcacacctcgcccgccgcgtacaggtgcggaatgggctggccgttcgtatcgagcacctggaactcggtgttcacgcggtagccgccgaagctgccgtgcgtgcacacgcccatggtcagcacgtagtagggagcctccgtgagcgggacgagcacctcggccttcttcttgaactgggcgtcctcgcccgcagcggccagctcgttgtacccgtcgagcgccgtctgcgctgcggcgccgtcgatgccgagcgctgccgcggcttcggccaccgtgtcgccctgggcgaacatgccctgctccaggccgaattcgaacttcgagcgcaggtcgtcgtcgagcgcgtccaccatggcctggtcgtacaccgcgaagaacttctggtcgtcgaagtgcgccacgtcatagtagatgtcgtgggtctggccggcctcgttggcgaagcgctcgcccttggagttgatccacagcgccttgttgctgatcagcttcgactggcccggctcgaccgggcaggcgaggataccattcgtgccgccgtggcccacgtagtccgcgccgatgtcgaggcccatccgcaggccctcgcctgtgcagccgacgcccacttcggtgtacacgccggaatagtcgggcatgtactcgtcgatcatgtcggcgttgcgacagaacccgcccgtggccacgatcacgttcttcgcgttgtagagcaccgtcgagccgttcccgcgcttagcgagcacgccggtcaccgcgccgccctcgtccacgacaagcgattccaccgtggtgccgaagtggaactcggcgccctgttcctgcgcgtacgccgtgaccgcgcgcaggtagtccatggcgttgttcgaacagttatggccgcgcggaacaggatccttgcccttcttggacaccgtttccttgaagggcaccttcagatcctcgtacagccagtcgatggtttccccgaaatgctcggcgcagaacttctgcacgtcgtagtccagcttgtcgccgccacgcgacaggaagtactccagcaggccctccggcgtatcctcgatgccggcctccttctgcagcttcgtgcccgcgccgtacagcgtgccgatggccagcgaactggaacccgccagccacgccatcttctccaccagcacggttttcgcgccggccgccgcagcctggcccgcagccgtcacgccggcgccgccgcctcccaggaccaccacgtcgtagtccatcgtctcgtgcgcctcggccgccgcagcctgttgcggtgcgcagccgaacaggccgcccagcgccaacgtggccaggccgccggtcatcgcctgggcgaactggcgacgcgtcaacggcacggaagccctcgtcggctgggtggtggagcgtcccgtcttgattcccgtcatgattgatcctttcctccctggggtgctgcttcatgccctgcactctacgcacgatgcgcgcagatcagaagccaccttccgggtgaaaccgacgtcggcgggccaagattcacccggaaggtgtgaggacgcgttctgtgcgttgcgcacgcgtccgcgcatgctcgtatatactggttgccgtactccgtcccccgcaagaatcgaggatcgatgccgcacacgagcgccgccgctcgaacaagccaaataatcgccctcatgggcggcaccttcctgccgtcgtttctggggctggcggccacgcgcgtctggctgcaggtgaacctgttcgcgtcgtaca

SEQ ID NO: 9005 - DNA, 751 bp, Unknown
  gut microbiota DNA sequence
ccccttaatcctcgatgccgtcgttgttcctgatcagcttgcgcttgatcttgccgccgatggtcttgggcaactcgtcgacgaactccacgatgcgcgggtacttgtagggcgccgtcgtgtgcttcacgtggttctgcagctcgcgcaccagctcgtcggagggctcgtagccgcgcgccagcacgatggtggccttcaccaccttgccgcggatggggtcgggcgcggccgtgacggcgcattccaccacggcaggatgctccacgagggcgctctccacctcgaagggcccgatgcggtagcccgagcacttgatgacgtcgtcgttgcggcccacgaagaagcagtagccgtcggagtcgcgccacgccatgtcgtgcaggttgtagtactccccgcccacggcctcgcgcgtgcggtcctcgtcgcggtagtaccccacgaacaggcccggcggataagcctccttgagccccgtcacgcagatggcgccctcctcgccgtcgggcacttcgttgccgtcgtcgtccagcagcttgatgttcaaaagcggcgagggcttgcccatggagcccgggcgcgggtcgacccagggaaacgtcgccagcagcaccgggccttcggtctggccgaagccctcgcggatcctcttgcccgtcagacgctcccaagccagcgtgacctcggcgttcagcggctcgcccgccgtggcgaagttgtgcacgctcgacaggtcgtaggcgctcac

SEQ ID NO: 9006 - DNA, 2998 bp, Unknown
  gut microbiota DNA sequence
tttttttatcaactgtcggacaacgccgattgtacgctcttttgttcggtttgcgaaccctcagaagcgtttttgtgcaggtgaacaaccaaatcgttgccaatcgtcaccgcgttgtcacgcctccgtttcgggtcggctacgcaaacttcccggccgcaaggtcacgcccgagcagtgaggcagtacctgggttcgctgtaaacgaaaaaacgcccccgcatgggcgggggcgcgatagctcggagatgcttgcgacctattccgcagcagccagcggggacggcacggagtacacgcgggcggcgttctcctgatcgaggtcgtacaaggccttcgcatcggagccgaacagcttcatgcgggtgatcatcttgtcggcgttgtcctcttcctcctgctgctcctcgatgaaccagtcgaggaacttcatggtgcggtagtccttcacctcggcagcggcggcgtagatgtcgttgatgaggctggtcacgtacttctcgtgctcgagcgcggcctccaacggctccaggaacgtggtgaattccttgtcgggctgatcgatggccagcagcttcaccttgcaaccgttctcgtgcaggtagttgcggaagataagagcatggtcgcgttcttccttggcctggatctcgtaccagttggcaaagccctcgagaccctcctcctcgtagtagtcggcgaaggacagatacagatacgaagagtacagctccttgttgatctgatcgttcagcaattcgtacacgcgtgcgtccatgagcatctccttcttgggtcgtacgggggtgtaaacaggttgggcaccccgtttcatctgcgtatatgataaacctcataaggctttccgacgaggttcgcgcgcacgctcgcgccaaatcaacacagcggccaaccggataccagatgcttattcgacctcttcggccaagtcgagcagctcgccctcttcactcgccctccgcgcgggttcgcccgccgcatggagccgccctatggccgccaccacctcgctcagcactacagccacgatgtagatcgataggacgctcgaccacagcaactgggcgtgagcgccgaacagctgaaatacggtcatgccgaccgccacgctggccgcacagcttgcgcaaaacgcagcgaacactttggagaatcccacgtcggagctcttcgccatccacaacagaaccacgaggcccagcacgttcatcaacgccacgcccaaataggagatggtggagaacagcatcagccccgataaggcgccggtaacgttggcgatcgggcacacaagcatgagagccgccgcaacgggaagcgctatacggtagaacgcttgaagaatgccgcctcgcgcgcggtacgcgtgcgcaactacccaccataccactatggctagcagcagatacgccatcggcttgtacgcgacgtccccggactcgacaccgatccgatcggaccatagcgtcaaaccgatcgtgaagaagttgaacatgagaccggcaaccgccgcccatcccttctgcatgacttcgcgcatggtttcgagcggctttaccgcgacgacgctgcgcaagccggccttgatttcgtcggcctgcacgatctggctcgccagcaagggcagcgccccgcacgataccaagacgagcattccaaggcagaacagaaacggcgtgccggcatgcgacaccacgaaccaccagcacgaggccgccaagaatgccagcatcgtgttgagcagtgccccttggtaggaaaacagacgatagtagcgaccccattgacgcagcaggcaggtcaggccgaagcccaggaacaaaccagcgcccgcagcgctcaccggagtaggcaaaacctggtagagcaacgcgcacagtacgcccgcgatcgatgcgagcagccctacgccgatggaccagcgtcgcttctcgccgtcgtgcgctgaaacgaacacgacgacgcacaacgccacaacgcccacaaggaaagaatggatgaacagatccgccgcgccttcgagcgcataggcgcccagcagcagattatcggcatgcaggcatagcgcgaatccggcaagaacgcaggacagcgccaagcccatgggcgaccactcgcgagcatatttcgtgataccgttgatcagattacctttccatgaagcgatctattatagtgcaaaagcacgtaaacgcaggtaacagataccagatcggccgcgtgagaagtccttgatcccagcgttgcgcagcagaaacgctcggcagcccgcaaacgcacgcgcgccgccccggaggagcggcgcgcggaacatcaggctgggcgatgcccgttacaacatgggcatcaccatggtcagcggcagggccgcgaccaccaccaggtagcgcagcaggaagccgcccaccagcacgcccgcgtcggacgcggcgctgatccagtgagctttgcggctctcctcgaactccttcgggctgaagaacagaagccacgtctccagcgctgtgggcagcacgaggccgatgagcacgagcccgatccagaacagcggcgcgtatccgccgaccagcagcgacatcaccgagttccagccggccgtggaattcgtgcacgtgatgaacatgagcgcagcgatcagcacaagctcgatgacgggcaggcagaagtggaacttcttgagcacgcccacgcggttgaactcgtcagcgtgcctgaagatgccgatgagcagcaccgacgccgcaccggtggacatggccgacacgaggaacaggatgggcagcagcgcgttgttccacagcgggaacgtcttgcacacgcccagcagggcgcccgtgtacatggccacggccacgccgaacaccacgccggcgatatcgagccacaccggcacgcgcttcttcatgaagtcgaggaccaccacgaccagcgatatcaccgtgaagccgccgaggaacacgacgccccaggtcatgac

SEQ ID NO: 9007 - DNA, 1287 bp, Unknown
  gut microbiota DNA sequence
atgcctgaagatgccgatgagcagcaccgacgccgcgccggtagacatggccgacacgaggaacaagataggcagcagcgcgttgttccacagcgggaacgtcttgcacacgcccagcagggcgcccgtgtacatggccacggccacgccgaacaccacgccggcgatgtcgagccacaccggcacgcgcttcttcacgaagtcgaggaccaccacgaccagcgatatcaccgtgaagccgccgaggaacacgacgccccaggtcatgaccgatccgaagtttgtcagcagcagggcgaagcgcagcgggttcatgaggcccgccttcgcatcgaacatcagcaagcacaggccgatgatcaccacgataggcgccaccagatgcccgatcttgcgcatcgacacggcctcgggatgtcgccaccccagaaaagccgaggtcacgaacgcgccgccgccgagaccggcgaggaacagataccatgcgatgatggcaccccaaataggttcaaacgtcatcgttcatcacctcacgtaaaatactttggacttggtcaggtcgcccgcgataggctgcgcgttcgtcgcgacgatctccttcgagatgtcgctgtccgggtcgtccagatcgccgaacatacgcgcccccgtcaggcaagcctccacgcacgagcacatcttcgtgcccgtcgtctcggccgacaccgtgcagaagcggcacttgtccaccgcgcccgtctcctcgttgcgcacgcgcacctggtaggggcacgccgccatgcagtacaaacagccgatgcagcggccgtggtccacgcccacgatgccgtccgcgccgatataggcggcgccggtggggcacaccgccacgcagggggcgtcctcgcagtgcatgcactgcaaaggcaccgtctccacgcgcacgttgggatacgttcccacctcgtgctcctcgtaacggatgaagtcctcggtgggcaacaggttgttctggcgttggcaggccacgcggcaggcgtagcagccgatgcacttcttcgtgttgatgagcattccgtagcgagccattacgcacctgccttcttaacgttgacgaccgtctcctgcgtgcaggccgacccgtagcccggctccatgcggaagggaacgtagtccatctggcgcaggcccacctcgtaggcggtgtgctggtcgggcgacgagcaaccgtagtggctgggcatgtacaacgccgtcgggttgatgcgctgcgtgaccttcacgcgcacgcgacccgtgtgctggccg

SEQ ID NO: 9008 - DNA, 589 bp, Unknown
  gut microbiota DNA sequence
cacgtagtccatctggcgcaggcccacctcgtaggcggtgtgctggtcgggcgacgagcaaccgtagtgactgggcatgtacaacgccgtcgggttgatgcgctgcgtgaccttcacgcgcacgcgacccgtgtgctggccgttggacacctccacctcgtcgccgtcggcgatgccgcggcgggcggccgtgtcggcgctcatccacacgcgcgtgaggtcgtagtccttcgtgatctgcatgaggtcctcgatgttggccgtctgggtgtggctgtggatggcctgcttgccgccgatcaagcgcagctcgtcgcccatgggcatgacggccggttcgacccacaccggatagggcgacagccccgccttctcgcacgcctcgctggcgaactgcaccttctcggtgggcgtcttccacttcggcgtggagccgtaggagaactccttttcggggaagtgcgccgtgcccgtcttcttcagcgcttccagcgacagccccacggtttggagctgagcgtcggccagctcgtccacgctgaactggaagtactcgcccacgccgcacgcctcggccagctcggagaag

SEQ ID NO: 9009 - DNA, 464 bp, Unknown
  gut microbiota DNA sequence
tttccagcgacaggcccacggtttggagctgcgcgtcggccagctcgtccacgctgaactggaagtactcgcccacgccgcacgcctcggccagctcggagaagatctggtccaccggacgcgtgttgggatgcaccttctccagcacctggtcgcgcagcgcgacagccggcaccttgccaccgatgaactccggcagctcgaggcgctcgaggtagctggtatcgggcagcacgtagtcggccaacagggccgtctcggacatctgcacgtccacgaccaccatgaggtccagctgcgacagcgcttcagccaagtacgccgtgttcgaatagccggcggccatgttcgagttgtagaagaacatgcccttgatgtcgccgttcttggcctgctcggcggcgaagaggttcgtgcccatgctggtcagcgccagcgggtactcctcggtgccggcgatcttg

SEQ ID NO: 9010 - DNA, 192 bp, Unknown
  gut microbiota DNA sequence
catactgcgcgcgccgtctcgccggagttcgcgtacgagcagccgaacgcgccgcgccagctgggctcgatggacgccgcgggggcggcttcggcgaactccacggccaaacgcgcgatggtggttgcggggatgccggtgatcttctcggcccattcgggcgtgcagtcggccagcgacgcggcccaatcc

SEQ ID NO: 9011 - DNA, 117 bp, Unknown
  gut microbiota DNA sequence
ttctcgggcttcggcacgctggggaacttctccttgtccacatcgcccgcagacacgctgggcgtgaagatggcgccgccctcctggttccagcagcccagcagcgtgttgaacagg

SEQ ID NO: 9012 - DNA, 117 bp, Unknown
  gut microbiota DNA sequence
gcctcgggcttcggcacgctggggaacttctccttgtccacatcacccgcagacacgctgggcgtgaagatggcgccgccctcctggttccagcagcccagcagcgtgttgaacagg

SEQ ID NO: 9013 - DNA, 5454 bp, Unknown
  gut microbiota DNA sequence
cgcttcggcgaactccacagccaaacgcgcgatagtggttgcggggatgccggtgatcttctcggcccattcgggcgtgcagtcggccagcgacgcggcccaatcctcgaaacccaccgcgttatcggccacatactgcttgtcgtacaggccgcgcgtcaccaacacgttcgacatggccagcaggaaggccaagtcggtaccggggttgatgggcacccattcgtcggcgaacgcgatggagttgttgcagcgcggatccaccagcacgatatgcgcgccgttttcgtgggcgcgctgcagctctgccaccgaactggggcgaatggcgtcggcgtagctgcggccgatgaacatcgtcatcttggagttctccatgtcggacgcatagctggccgcgccgatggcctgggtgaagccgctttccttcgacagattgcaggcagcgccgtgcgtgtacacgttcgccgagcccagcgcgttcatgaagcgcttcgtgtagtacttgcccgacggacgcggatcctgcaccatggcaagcgcctgcggccccttgtcggcgatgatggccttcaccttctcggcgatctcgctgtaggcctgatcccacgagatggcctcgaatgcgcccttgtcgttcttcttgagcggatcggtgaggcggtccttcgaataggcgatctgggaatagccgtagccacgggcgcagagcttgccctgggcgtacggatggtcctcgtcgccgataagcttcgtcaggcgcccgtcgacgacgtacgccgtgaaaccgcatttgctcgagcaggcgttgcacagcgaatggacggtcttggtttctcccccttgggccccgtcatcagcgtgcgcctgctcccaagcgtcgaagctcacatagccggccgccgccgtgagcgcgaccgctccggcgctgccagccaggaagctccgcctggttatagcgtgttctgacatagctgcttcctctcttatatgcatgcatgtaaacgattgcgttcggcacgcgcatccgcgtcgatcccttgctcgccagcacccgacgtcaacgccagatgctcccgcatgcccacgagcacgtcgaccagcccgatgtagaaccgggcgtcgtcggcaagctccagcaggcgcatgcgatacgcggtgagccacgagaaccgctccaaaacgaattggcgggcggcatctcgcatccccgaccgcagcagcacggctgcaaggtcgagctcgagcgcaagatgatccgggcacgccgaaaattccggcggcacccgcatgcccatgcgctccacgagatcgcgcatatagcgcgccgaatctccctggtacatgccctcggctttcgagaacggagacggcagcgacccgttcgaccacgtcgtgtacaacgactctgccggcactgccgattccggcagccctcccgtgaagtggcgtgcggcgaacagccgcttctcgtcgtacgtcggcggcgtgaacagcgccttcacctcgccggcggaaaggaactcctgaagcgggcagcggctgcggacgcgggctatcgggctggtcggctcgccgagcgcgtcgtcgtcctgcaagccgcgccgagcggcgtcaagaaaatccgaccagagcgggccgtctatcagctgcttccactcgtcttgcccgacgggcgcgaaacacatcgacagcaccgtgaacatctcgtcgtattccatggcttttgcctcctttccgcatctcttcggatcggccgcgctttcagcgggccgaaaccggacatgtccagcgatcacgcctacgcttgcacgagggtcgtcgtcctcacgacgccctggtcgatgaccttctgcgcgatatcctcccaatcgatgaacttgatggcgccgttcgggcactgctcggcgcagcgtccgcacgaaatgcacttcgtggatacgccggtctcgctgtcgacgcgcggcatgttccacgggcacgcctggctgcacatgccgcagccgatgcacttcttcgtgtccaccgtgcgcgcaccggactcttcgtcggcgtagatcgcgtggaccgggcagtagttcatgcatgccgggtcggcgcactgcttgcagtgctcgacagtgaactcgcagttatcgtagatgccgtccttggtatcgacgctggcaccgaagttgtagttcggccacacgcgcacgcgggctatgtgctggcacacgcgaccgtcgttcttcagcgtgcacatcatctcgcatcgctggcagcccgagcagcgggcacggtcggtcacgatcatcttcgtgggcgtggtgcgtatctcgatgcgccccgaagcgatcgaggccgacgtgacgccccacgacgccagcacgccgccgaccacgaggccggcaacgccgcagccggccattgccagcaccgtgcggcgcgtaaaggttttctgcttgggctcctcttcgggcccggcgctctgaggcgcgggcgcggatgcgttcgtctccggcgcagcggccgggaagttcgtatcctcggaggtgttctggttcagattggaatctgacatagcctagtgctccctccctcacataggtacggtgagtgtcgttttcctcgtcccgtcgtcgcgcgagtgttcgatgccccttttaggggaaccgccccgaatggaacgttcgcggcgacggcttgcgctcgatatcgctccgcgcgcagccccacacaacgcacgaaagtataggatggccccgtgcacggcccctcccctctttgaggtactttttaccgctgatcggctagttcctcaaaataccctcaaagaggggatgcctcgtccgcctctgtcggcatactggcgaacgacgattgttgtcagcgctcgcatcgcccacgcaggttcccacacaacaccgaacctcagtaatctatccaagatttggagatgcaacatggctgacgaaacatcgtatggatgggccggtaagatcctccgcgtcaatctgagcacgggctcgatcacgacgcagccgaccgacccctacaaggagtacatcggcggcatgggcttggccaacaagatcatgtacgacgaagtgcccgccggcaccgaccccttctcccccgagaacaagctcatcttcgccgtgggcccgctgacggcttccggcgttcccctggccggccgcaccaccatctgctcgctgtccacgttcacgaaggaccacctcgtggtggacgcccactgcggcggcatgatcggcgcgaagatcaagctggccggctgggacgccgtggttctggagggtgcatccgaccaccccgtatacctgaacatcgtcgacgacaaggtggagatcaaggacgccggcttcgtgtggggcatgggcacccgtgagaccaccgagatgctgtgccgcaaggaaggcgtcgaggcgtgcgtggccgccatcggccccgccggcgagaacctgcttccgtacgcgtgcatcatcaacgcgcgcaaccactccgccggcgccggcacgggctcggtgatgggatcgaagaacgtcaaggcgctggtggtgcagggcaacggcagcgtgaacgtgaaggacccgcaagccgtagccgacctgtccgactacatgctgcgcgaggtcatcggctccaacaacaaccacgtggttccgcagacgcagcaggaatgggccgaattctacgacaagggatcccgctggtccgcccgtagcggtctgacctggggtatggccgaagacggacccatcgacacgggcgagccgaagccgggcgagctgaacacggtgggctatcgctgcatgaagtcggtgtacgacctgggcgaggtggccgagaagtacaccatcaagatggacggctgccacggctgccccatccactgctactccgacctgcgcaccgagcgtaccggcgagctgggcggcaagaccacgtcgggaaacacctgcgcggccaacttcccgttcaagtacatggagggcatcctcaagacgggcatcgccgaggacagcgagtcgggcattgtatggaacacgctgatcggcaccaccattgacgagctgggactgtggtgcaactacgcgcagctgtggcgcgacctggcacactgcatcaaggctggcgtgttcgaccgcgtgctgcccgaagaggagaaggcgaagtacgactggcagcgcatctacaacgacgaccccaccatcatggtggagctgctgaacgacatcgcccagaacgactccgagatcgcccacatcgcctacggcccgtaccactggaccgagcgctgggacgacaagggctggttcgatcagcagcccagccagctgatcaactaccgcggctggcccgtgcaccacgccatcgagtgcttcggccaggtaggcggcgtgtacaacatgatgttcaaccgcgacgatatgatccactccgccgtgaatttccagggctgcggcctgcccttcgagctgaagcaggaaatcgccgaagaggtgtggggcggcaaggacgccatcgaccagaacaagaactacacgcccatgaacgaacgcaaggcgaacttcgcctggtggagcgtggtcaccgacgtgctgcacgactcgctgacgctgtgcaactggacgtggcccatgaccatgagccccacgaaggcgcgcaactaccgcggcgacctggacctggaggccaagttcttcaaggccgtcaccggcgaggacgtgaccaccgacgacctgtaccaggccggcgccagaatcatgacgctgcagcgcgccaacaccgtgcgcggcatgacgaaggaagacggcaccaggggcgagaacgacatgcgcaacgtccatgatgtgatgtgcgcctggacgttcgatatcgacccggacaagaagcccttcaccgagggcaccatcaagatggaccgcgacgacttccaaaccgccctgggcatggtgtacgacacgttcggctgggatcacgagaagggctgcccgacggccgcctgcctcgaccagtacggcatggccgacgttaaggaagagctggacagcctgggtctgctgccgtagagcaatcctccgcagggccgcaacccctccgcggctttcgcccccctaccagaacgcccccggatgcagcatccgggggcgttctcgattgagcgggaaaggcggccgaagaatacgacgacagccctacgcttcggccatcttcaactccactctcgtggatctcaaagaacagtgctcgcagatcatgcaggggacgctcagggagttgcaggggacgaccgcgtcaagctcttcgagggaggccccttggcgaacgagataatcgccgatgagggcacggacggcctcgatggcgaaatggatagtgtacaccttgtccacgggaaccccgtcgagcgccgtcttcacgtcgtcggtcgtgatggccagcgcctcg

SEQ ID NO: 9014 - DNA, 505 bp, Unknown
  gut microbiota DNA sequence
aaagcctttcaccgagggcaccatcaagatggaccgcgacgacttccaaaccgccctgggcatggtgtacgacacattcggctgggatcacgagaagggctgcccgacagccgcctgcctcgaccagtacggcatggccgacgtgaaggaagagctggacagcctgggtctgctgccgtagagcaatcctccgcagggccgcaacccctctgcggctctcgccccctacgagaacgccccgaatccggggcgttctcttttccggcaggaaccgggggcgcagcaggttgtcatcccgaacgcagcgcgtcagcgcgaagtcgaaggatcccatgcaacgatagccacggcgttttccgctggcgccgcgcgggatccttcgactcagctccctacggtcgctgcgctcaggatgacggggctctacgcattcgccatcttcaactccactctcgtggatctcaaagaacagtgctcgcagatcatgcaggggacgctcagggag

SEQ ID NO: 9015 - DNA, 2818 bp, Unknown
  gut microbiota DNA sequence
tgcgtcaagctcttcgagggaggccccttggcgaacgagataatcgccgatgagggcgcggacggcctcgatggcgaaatggagcgtgtacaccttgtccacgggaaccccgtcgagcgccgtcttcacgtcgtcggtcgtgatggccagcgcctcgtcgaacgtgcatccttcgagcatggagcacaccacgctggcgcaccccgtgacggccaggcagccgcgcgttttgaagccggcgcgcacgaacgtccgcgtgtcggggtcgatcacggcgaacaggcgcagcgccacctctccgcgcttcgacttgcccaccatgctctgggcgttgaacccttcgggggcgccgccgttgcggaagttcgcaaccacggacagcagcgtgtcggagtagcccgtcacgccgtcctcgatctcggtttggtacacgtcggccgtgcgcagcacatggcgatcctgcacctcgcggtacacgttgcgagcttcgtcttccatggaaaacctctctttctagcaagatcctgcaactccgcgcctgcagcgcttcgctcaggacgactaatgcaagtacgccgaacgggcgcgatagcgtttacagaaacatgtcgcgctcgacggagttccactctgcgagcgacttggcgtaggcgggcgtcaggtactcggtggagaagtagtacacgtcgccgttcgacgcagcgacggtatcgaggtccggataggcgccgctgtcgcgcacggtgcgccacaactcgtcgatttcatcggccgacaggttgaacggctcgttggacagcgacgacgcctccatggggcgcgggtacttccgcgattcgtcgcgcacgcactccacaaacgtgagcacgcgatcgtcctcgctggcgaggaacgaccaccgcgcgtacgcatcggtcatgcgctcggtggagtacaggtagtagctgtgcttgccgacgagcgcaacgatatcgtcgcagggaacgcacggaggatcggccagggtttcggcatcctgtgcgctatcgcgccgctcgggatccttcgactccgcgccttcggcgctgcgctcaggatgacggagctcctctgaggcttcggagctgcgctcgggctggcggggctcttctgcgcccttcgccgtcgcagcgccttccgactcgggctcctcctccgtgcgcagaatgcggggaacgcccaccgcacgggtcgccgtgcgaacgggggtcgcggaagccgcaacgacgcgcgcgtcgcgctcagccctgcgatcctcaaggtactcgtacacgaacatctcccagtcttcggccgagaaatgcgccggtacgaggcccgccttcaaccactgcgacggctgaacaagcttggcatccgcagactgcgcgcgcacgtcatcgaataccgccgtcagaaacagacgctcgacctcttcgtcgctcaattgcgcctcggcagcttccccctcgcgactatcggcagccgtttcggcaacacgctcccatgcgggcatcgctataggcgcgctgacgctttccgcttcgtcgggaaccttcaaaccgagcgattcgatatcttctccttgttcagccatagcccggatcacttcgtctcgaattcgctgagcttctaagtcaaccaccgcatcgctcctttcccctgcgttgtttttcgtatggtatgatgacccacggcgcgcatccgccatcccctctttgaggataaatcgaggtgaatggaggacgcgtccgcgtcgactacgtaccaagcacggggagggagtgtacggttgggcgcacgcacgacaacagcaccgactccaacaggcgccgagcaaaaccaggcccgcaacggactcgagggggcggcacatcgcttcgcgccgctctggccgcttatccttggtctggctttcgggcgggccggactgatcgtcgccagctatggaagctacaccagcaccgacgaaggtattttcaccgacggcgccatgctggtggcattagtcgtcttggctttgttcctggtcttcatcgtcctcagcaaacgaacgatcagcaagcacgtcaccaacgtgatcatgcgcacatgcgtcgcactggaagcgtttgtgctgatggctctcgccgtattcgaccttttcggcatcggcgacgaaatcgagcgcttcgcgctgagctcgctgtgcaccctcgtgtcgtcaggcgccatctattattggctgcgccgcgcccgcggaacgagcacgaccacggctgccgtcttcgtgttcgccgcgctcatcatcagcgaagtggagatttatctgtgcacgctgctgcccgtattcgcgggaaacttcgttgccgccgcgctcgtgctgctgcaatacccctgcataatatgggcgcgcaggcaacgccaaccgcatgacatcgtctcgccaacgcaggccaacgattacttcggattctcaaaaaccatgttgcaaagcaagcagttcctcactgccactgcactgggcatcggatgcctgtctatcgtaatcggcttgctgcgcggctaccccgacggcacctccatcgcgttcacgcccgctacgcgcatcgcgtacgctgcgctgaccatcggcgtgagcgtcgcgttgatcgtattggtgctgaagtggcgagaacgcgtcatgaccgtagggattttcgtgatcatggaactgctggcctgcttcgcgctgatcgcctatgccggatttcccgacatgctggacatcggagcggtattcaccaccacgctcaacgcgctcatggtgggattcacctggtacgtcatcatcgcgttcatg

SEQ ID NO: 9016 - DNA, 736 bp, Unknown
  gut microbiota DNA sequence
tccctgcataatatgggcgcgcaggcaacgccaaccgcatgacgtcgtctcgccaacgcaggccaacgattacttcggattctcaaaaaccatgttgcaaagcaagcagttcctcactgccactgcactgggcatcggatgcctttctatcgtaatcggcttgctgcgcggctaccccgacggcacctctatcgcgttcacgcccgctacgcgcatcgcgtacgctgcgctgaccatcggcgtgagcgccgcgttgatcgtattggtgctgaagcggcgagaacgcgtcatgaccgtagggattttcgtgatcatggagctgctggcctgcttcgcgctgatcgcctatgccggatttcccgacatgctggacataggagcggtattcaccaccacgctcaacgcgctcatggtgggattcacctggtacgtcatcatcgcgttcatgagctacggatggcgcgacccgtactattacgccatcgcaggatggctggtgtggctaggctgccgcgccgtagcgcgtatcgcgttgctggcggctcacgagctgttctccaacgacatgctcatgagcgccgcgatgggtaccatggtggtcctctccacgcaagtggtgttcgtgcaattcctcaatatcacgcgtcgcaacgccgaggaacaggaggagcagagcgcacgacgacagagcatgctcaagatcatgggactcgacgaacacgaaagccttgcggac

SEQ ID NO: 9017 - DNA, 2862 bp, Unknown
  gut microbiota DNA sequence
caccatggtggtcctctccacgcaattggtgttcgtgcaattcctcaatatcacgcgtcgcaacgccgaggaacaagaggagcagagcgcacgacgacagagcatgctcaagatcatgggactcgacgaacacgaaagccttgcggacatgcgacaggcctccatgaagcacaacgccgaagagatgggcaagcagttcctgttgtccgatcgggagatcgaggtgatggcgctgtatgcgctcggctacacgcagaagcgcgtggccgaagagctgttcatcacgcagggcacggcgcatgcccacatcaagcgaatctacgctaaaaccggcttgcactcccgtcaggagatcctcgactatcttgaacagtacgcgtcgtagaataggatgccggcgctcgccgcgcatacggcatgcgtcggcagacgaagagacgaaagaagaccctgggggaacgggatgccgaatctcatcgacatagcgcaacgcctggccgagcgaccgatggtggcgctgctgcatgaagagcgctgtctgccggagcgcgatctgggctccacctgcacgcgctgtgccgaagcgtgcccggtcgacgcgatcgccgtcgggttggagcgcgatacggaggcgtcgcccgccgccgcatacgggtccgtggcgaaaaacggcccggccggaccgcgcatcgacgatgacgcgtgcgtgcgttgcggccgatgcgtcacggcgtgccccaccgccgcgcttttggcgatagcaccgctcgacgacgacgcgctgttggaagcgagcgtgcgggcgggagccgcggcggcgaagcgggcggcgggttttgcagcggaagaggccgagggtcagggagattcgatcgggacgcgcgatgcggaagcccaggtcgaggccccgcaagccgcagtcgctcccgcttgcgctggattcgcgtgcgagcgcgctgtgcgcgcaggccacatcgatgccgagcgcacggtcgcccttccctgcctggcgtgggtggacgaagcgctcatcgtgcacatggcgcgcgcgggcgcgcggcgcatcctgctgctgacggctccgtgcgcctcgtgcgagcacgccaaagccgtcgtcgacttgccgaaaacggtgcgctcggctcagcgcatcctcgacacgtggcagctcgacgccgctgcgagcatcgtcgaaaccgtcgacgatgtagccgcgtccgaggacgaggacgccgctggcgaagtgtcgcggcgcggcctgttctcgcaagcgcgctcggcgctggtggaagcggccaccgatgcagcgtcggcgcagatggacgcgctgaccggccgaagcaccgccgacgctcccgagcccgagcccgaccgccgccgctggcagctgctggacgacctgcacgccgcgggcctcccggctggcgatgccgtcgtgccgcgcgcgcttgcaccgcgcgtggacatcgatcccgagcgctgctcgggctgcgcgctatgcgcgggcttctgccccacgcaggcgctgcgcaaagccggcaaagcgccaggtgggcgcaccctgctggaattcgatgccgcgctctgccgcgattgcggcacctgtaccgatacctgccgctacggcgccatctcctgcgaggagacgctcaccgtctccgagctgttcgcgctcgagccgcgcgccatcgtcatacccaagcgccgcgtgcttcccaaccgccgctgaccgcggacgattcgcaacaccgcccgcctgctaccataccccctcatcagaaaggaaccgacgccacgatgctccacttcgacagcgactatatggagggtgcccatcccgctatcctcgaacgcctggccgccaccaacttcgaccagacctccggctacggcaccgacgaggtgtgcgccgccgcccgcgagcgcatccgcgaagcgtgcgcgtgcccgcacgcgaacgtgtactttctggtgggaggcacgcaggccaacgccgccgtggccgaccagatcctgcggccctgggagggcatcgtgtcggcgaccaccggccacatcaccgcgcacgaagccggcgccgtggaggcgtgcgggcgcaagacgctgccgctgccgcacgtcgacggcaagctggtggccgccgacgtgcgcgcgctgtgcgaggcgtactggggcgacgagaaccgcgagcacatcgtggcaccgggcgccgtgtacatctcgcaccccaccgagtacggcaccgtgtactcgctggccgagctggaggcgttggcgcaggtgtgccgcgacttcgacatgaggctgttcatggacggggcgcgtctgggctacggcctggccgccgtgggcgccgacgtcacgctggccgacatcgcacgcttgtgcgacgcgttctacatcggcggcacaaaggtgggcgcgttctgcggcgaggccgtggtgttcacgaagccggggctggacgaccacttcttcacgctcatgaagaagcgcggggcgctgctggcgaagggccgctttctgggtttgcagttcgacgtgctgttcggccaggaggacggcgagctgcgctaccagcacatcgggcgccacgccgtcgagctggcgcagcgcatcgccgagggcttccgcgcgaaggactacgagctggccatcgactcgccgacgaaccagcagttcgtcatcctggacgacgagacgaaggagcgcctggccgaacatgcgtcgttcggcttctgggagcgcacgcccgacggccgcaccgtcgtccgcttcgccaccagctgggccacccgtcccgaaagcgtgaacgagcttctggcgctgctgtaacacgataaaagccccggctcgctttac

SEQ ID NO: 9018 - DNA, 3391 bp, Unknown
  gut microbiota DNA sequence
cagctgcacctcgcagggcttgcaggcctggctcaactccacgtcgctttgcaccgacatgtacatatacgtatcgacggcatcccaacccgtgatgcgcatgagcaggcgctgcatctccttcgagacgttcatcagagcctcgtcgaactcctgcgcgctggcgttcacgtaccacttgccgtgcgggccgaacgtctccagcacgggccagttcagctcgaagtccttcaccagcgacaccttcaccgtgatctcggccgcgatctcgatgcccgtgccgcacagctcggcatcgcccatggtggcgtgcacgtcgcccatttgcagcagcgcgcccggcacgcgcacggggaagtacatacgcgtacccttcgtgatcagcttgttgtccaggttgccaccgtgcgcgcccacgaagccatcgatgacgtcctcgccgtcaggcgcggtgccgatgacgccgatcatcgggtcgatggggaacttcacgccgttgaagtcggccatgccgtcctcgatggggatgatcttgctgcggtaatccgtcgtttggtacagcggtccgcagtggtcgtcggtggcgattacgccatggtcggccacttgcacgtcgtagatatccaccaccagcacgtcgcccggctcggcgccctcgatgtacacggggccggccgccgggttcgtgaacccgtacgagaagttgagatccttcatggtgacatcctcgttggggatgcgcccggcgaagcaatcctgcgtcttgaacagcagcacctcgcccggttgcgcggtcgcgcacggcgcgttgtccttggaaaacgccagaacctgatcggtgataacctgcatgaagtcctccttctacgacagccccagccacgtggcgaacttcggcacgtagcccatgacgaatatgatgatgataagcgccggaatgccgaacttcagccacaatttcgaccaagccgggaatttcacgcccttgcccgtgtcggcctcagccaggaagttgtcccagccccaaccgcccttcgtcacacagaacagcacgtagaacaagctgcccagcggcagcaggttgttcgacacgatgaagtcctcgatggactggatgtcgccgatggccggaacctgcacgcccgccagcacgttgaacccaagggcgcacggcaggctgagcaccgtcacgatgatggccgtgcgggcgaccgccgtcttgcgcgtccaattccatttgtccatcgaccagctgatgaggttctcgaacaccgcgatgatggtggacagcgcggcgaagctcatgaacacgaagaacagcgcgccccacagctgccccggcggcatctggttgaacacgctgggcagcgtgacgaacacgagccccggcccgctgcccggctccaccgcgaacgcgaagcacgccgggaagatgatgaggcccgccacgagcgccaccgcggtgtccaagccgcagatgcgcagcgcctcgccggtgagcgatcgctccttgccgatgtagctgccgaagatttccatggccgagatgcccagcgacagggtgaagaacgcctggcccatggccgcgtataccgcgtcgccgaacgtggcccattgctcggccgtcgtcgcgcccgcgaacagcttgccgaagtcggggatgaggtagaacttgagaccctccaagccgcccggcagcgtgaccgcgcgcaccacgagcacggccatgatgcccaacaggcagatcatcatcaccttcgtgatgcgctcgacgcccttctgcaaccccaggctgcacacgaggaagcccagcacgatgaccacgagcatccagcccaccaactcggtggggttcgccagcatgtcgttgaacacggcgccgacgcccgcgctgtccaggccgttgaacgcgcccgtgcccatcttcaccacgaacgacagcatccagccgcccaccgtggtgtagaacatcatgagcaccatgcagccgatgtagccccaccacgagaaccaatgccactttcgcgacggctgcagcgtgtcgaacgccgccgccgagctcttctggctggcacggcccacggcgaactccatcaccatgacgggcaggcccaggatgacgaggaatacgaggtacatcagcacgaacgccgcgccgccgtattcgcccgtgatgtaggggaagcgccacacgttgcccagaccgatggcgcaccccgcggaaatcaagatgaagcccagacgcgagccgaaccgttcgcgcttggcgacgcccgctccggccacgttcgccgcgccggcccccttgccgttgctcataccatacctctcccgatgattcttgtacgaaattgcccgtaagaaaagcgttacgattgtagcgtaagaatcgtagggatgaggctttgaccgctatttcgcagcgtttcgaacgatgctgctgtcccgatacgctctgcacgcgcttacgacgatgccgcgcgaaacccgtcgcgggcgcattataatgatgcgacgcagcctcgggggtcacgacggaggagatatggggaacaccgacaagcagcatggcgcagggcagctcggttccgaccgacgctaccttgtcgccgtcataggcttcacgtgcctgtacgccgtgtgcgtgtcgttcttctattccagctggctggtcggacggccgggctttgcgcccacggcgttcgacaacgtgctgaacccctccatccttgccgcttcgctgctgttctcgctgctcgtgcgttcgaaactgcccctcggccgcacggcataccttgcggcgggctacgccgggttcgcgctggcgttgggcggcacgttcttcgccgcgacgacttcgctcgaccctgccgtcgtcaccgcttcggcgatagcggccggcatcggcatgggactggtcatgcccttctacttcgagacgttcgcacgctactcgtcgcgccgcatcgccatcgcgttcggcatcatgtcgctgggcggcatggcggcgaacatgttgctggggttcgcgcccgacgccgcttcgctggcaacgtacgcggtgctgctcggcgcctcggcgctgtgcctgggcttcgcgcaccgtgcggaagccgatggaagcgaacgccgcgatcccccgtcgcatgcccgcggcgcgctctcgaagcacgatttcctcaacgtgttcctcgtatcgggcgtgtgcacgttcgcgctgtccatcgtgtacggcatcctcgataccgcggcaacgggcaccagcgcctcgcccgccgcgtcgatcctcatctcccagttcggaggcatcgcggcggccgccgtgttcctcgcgtacttcggaacccgttcgaagccgaacccgtccatgctgttcaacgtggtgttcggc

SEQ ID NO: 9019 - DNA, 3385 bp, Unknown
  gut microbiota DNA sequence
tgtatggttgaggcttgaatctgctggtcacttcaccttgagaggggcaactcgctccatgtcttcgtctataggaatgtagccaagcgaagctaagacgcagcgtcctacatgatagccaaggttgaccggcacggcattcccaatttgtttatattgatttgcgagacttcccgaaaaagaccagtcatctgggaaagtttgaattcttgcatattctctaaccttcagaggtcgtgtttccgatggatggcacctctctgtctgcttttgggcaggagcgcatgtcaatgttagactcggctgatcccacgacagacgtcgcgccataccggttcttcctccggaaagatgatagctgccccccatgtattcacgagcaacgtcatccggaagatcccgccagcaaccaccttcaggaacgcgctccatgaccttccgcttcttctcgggatattcttgaccctccgaatcgggacagccctccaatgcctgcttaagcgaaataaagtagtcacgctccttcgggaataagatcgggcaatcaagatcttttcgaactgcgaagataatgagcctctcgcgcttttgaggaacatcaaggtactgagcacgaagaatcttgtaattgaccctgtaccccagatcgtcaagcgccgcgagcatcgtcttcaacgtcctgccgccatcgtggcgttcgagccccctgacgttctctccgatcgcgattttcggctgcacaacatgaatagcgcgggcaaactcgaagaacagggtgcccctcgtatcttcaaaaccttttgatttacccgcatagctgaacgcctggcaaggaaatcccgcctgcattatctcggcctgataggggctgaattcgacatcgtgaacatcccgatcgtcaataacccaattcaatccatgagcatcgctgttgtctttcaacgcctgtgccgcattcttgtcgaactcgttcagaagtacatgattgattccagcattgctgaacccgagcgcagtgcctccggcgccggcgaaaaggtctatgcaggtcgcatcgtcgaatgtttcgtccgcacgcaggatctgataatcagtcgagtccccttcgccattgagcttgcggcgaaggcgatgcaactcggcaagattgaacatacgcttctggtttttatctcgcgttgactttataagaccgagtttgctccatcttctgatagtgtctgccgaaacaccgagcgcttgcgcagcagccgtcacgcttgcaaactcttctttacccatcgaccctcacttataaccattgcctatgtaatggttataagtataccttattgagctcagttcgttggcatgctgatcaagaaatattcaaacattccttcatcttcgaacggttctccctcggccacgtctttcagaatgcggggaaacgccatgtacagctcttgaagcgcattctctttgccaaacgcccacgtgtacgcagttgcaccatcacagcatcgcacggtttccttcacgggtcgccccgacactttccaaggacgatcgtatctttccggagtcttcggaacgatttggacgagataggaacttgaaccgtgcattttcgaaaacgattccaacttatcccacatatgcttctcatcagaagccttgatggtgttgtagcgattcttaacctcaacggcaatcggttccgcatcggaagactcccgaaccataagatcgacgtcgccgccgctgcatccaagatccttccatccctcggcaagcccgagaaccgcctggtgccagctgcccaccgcattcgagatcgacttgttgatagccctcagcttctcgaacgccatcatgctttcggcgctttgatcgaacagaaccgcctgtaccatgatggtgaaaggatcgggaggggtcttcaaggactggctagaggcaagcttagccaatcgctcgaaagaatgcttcgtgacttcgaaaagcttctgctcatttatccaatcgagcccatacgaatgatcacgatcactcatactctccccttaagactctgagcctgcataatggcaaaactcgctgtttttactagatcaagcatatcatctttccgcgaatgccgcagtgactttgctgatgagactaccctatccattagagcaagcagcacaaaatgcccgaacatgacgaggccaaaggaaaagatacttatctgactttcttcacgaaagttctccgatatgccgcaagcacgttgccgcgcgaaacccgtcgcgggcgcattataatgatgcgacgcagcctcgggggtcacgacggaggggatatggggaacaccgacaagcagcatggcgcagggcagctcggttccgaccgacgctaccttgtcgccgttataggcttcacgtgcctgtacgccgtgtgcgtgtcgttcttctattccagctggctggtcggacggccgggctttgcgcccacggcgttcgacaacgtgctgaatccctccatcctcgccgcttcgctgctgttctcgctgctcgtgcgttcgaaactgcccctcggccgcacggcgtgccttgcagcgggttacgccggcttcgcgctggcgttgggcggcacgttcttcgccgcgacgaagtcgctcgaccctgccgttgtcgccgcttcggcgatagcggccggcatcggcatgggactggtcatgcccttctatttcgaggcgttcgcacgctactcgtcgcgccgcatcgccatcgcgttcggcatcatgtcgttgggcggcatggcggcgaacatgctgctggggttcgcgcccgacgccgtttcgctggcagcgtacgcggtgctgctcggcgcgtcggcgctgtgcctgggcttcgcgtaccgtgcggaagccgatggaagcgaacgccgcgatcccccgtcgcatgcccgcggggcgctctcgaagcacgatttcctcaacgtgttcctcgtatcgggagtgtgcacgttcgcgctgtccatcgtgtacggcatcctcgacaccgcggcgacgggcaccagcgcctcgcccgccgcgtcgatcctcatctcgcagttcggaggcatcgcggcggcggccgtgttcctcgcgtacttcggaacccgttcgaagccgaacccgtccatgctgttcaacgtggtgttcggcatccttgctaccggcatcctgttcctgccgtttttgtcgaacgactacgccgtgtcgctgaacatcctggccgccgccggatggaagctcgtcatgctggcgctgttctacctcgtggtcaccacctacgcgcactgccgtacgaagctgctcgtgggcatctcgctggcgtacgcgctgccgcgcttcggcctgttcgtggggcagaacgtg

SEQ ID NO: 9020 - DNA, 344 bp, Unknown
  gut microbiota DNA sequence
agctaccggcatcctgttcctgccgtttttgtcgaacgactacgccgtgtcgctgaacatcctggcagccgccggatggaagctcgtcatgctggcgctgttctacctcgtggtcaccacctacgcgcactgccgcacgaagctgctcgtgggcatctcgctggcgtacgcgctgccgcgcttcggcctgttcgtggggcagaacgtggcgcagctgctgggcgtgggcagcacggccgatttcgtgcgcaccacggcggtggcgttcttcttgctgtacctcatcctcatggtcatctggatggtgaactcgcacgagcgcaagcgcgccgaatcgcaggcgc

SEQ ID NO: 9021 - DNA, 1132 bp, Unknown
  gut microbiota DNA sequence
cttcgtgcgcaccacggcggtggcgttcttcctgctgtacctcatcctcatggtcatctggatggtgaactcgcacgagcgcaagcgcgccgaatcgcaggcgcgcgcggcggacgagctgctcgggcgtttcgcgcaggagcaggagagcgtgcgcaagctgcgctgcgacgcgctggccgacgaccacgggttgacgaaccgcgagaaggacatcctgtacctgcttgcccaagggcgcgaccttgcgttcatctgcgagacactgtttttgtcgaagaacacagtgaagagctaccagaagaccatctacgcgaagctcaacgtgcacagcaagcaggagatcatcgacctcgtgcatggggagctcgacggatctcgccgttaaagcaagctcatcctgaagttcgctttaacgattcccctcctataacccctgatcgcgcaccccacctcaaggggggtttcgcagtttcccgcttcgggtggggtgcgcgcgcccgtttgcgtccgtaaggtggtttcacgagatgcgccccgacggcgcatcgagcacgtgaaaccatcattggaggaggcagtaatggggatcaacgaaacaggagtatcgcgtcgctcgttcatcacgggagcggcggcggccggcgtgctggcaacgttgggcttggcgggatgcgcgccgcaggataagcagactgcatcggcggccacaagcggcgccgacacgaaatgggatgaggagtgcgacgtcctggtcgtgggcagcgggtacacgggtctggccgcggcgcttgaggcgaagaacgccggcgcggacgtcaaggcgatcgagaagacggcgcgcgtcggcggcaactcggcgcttgcggccggcgacttcgccgtgtgcaactccagcgtgcagaagcgcgagggcgtgcaggattccgtcgagcagtacgtggacgacatgatggtggcgggcctgtacctcaacgacaaggaaaagtgccgcgtgatcgccgagaagtccaacgagacgtgggagtggaccatcgagatgggcgccacctgggcgaaaaacgacaacgacgagtacttcctctacccgtacggaggccacaccgtcatgcgctccatcgcgcagggcgac

SEQ ID NO: 9022 - DNA, 907 bp, Unknown
  gut microbiota DNA sequence
tctcgcgttcatctgcgagacgctgtttttgtcgaagaacacggtgaagagctaccagaagaccatctacgctaagctcgacgtgcacagcaagcaggagatcatcgacctcgtgcatgggaagcccgacggacctcgccgttaaagcaagctcatcctgaagctcgccttaacgattcctctcccataaccccaggttgagcaccccacctcaaggggggtttcgcagtttcccgcttcgggtggggtgcgcgcgcccttttgcgtccgtatggtcgattccagcagatgcgcttcggcgcgtcgggcaagggaatcgcaaaggatcgcaaaacaaaggaggctgagcatggggaacatcgcatcgaacgcagcgggagtatcgcgtcgctcgttcatcacgggagcggcagcggccggcgtgctggcaacgttgggcttggcggggtgcgcgccgcaggacaagcagaccgcatcggcggcaacaagcggcgccgacacgaaatgggacgaggagtgcgacgtcctggtcgtgggcagcgggtacacgggtctggccgcggcgcttgaggcgaagaacgccggcgcggacgtcaaggcgatcgagaagacggcgcgcgtcggcggcaactcggcgcttgcggccggcgacttcgccgtgtgcaactccagcgtgcagaagcgcgagggcgtgcaggattccgtcgagcagtacgtggacgacatgatggtagcgggcctgtacctcaacgacaaggaaaagtgccgcgtaatcgccgagaagtccaacgagacgtgggagtggaccatcgagatgggcgccacctgggcgaagaacgacaacgacgagtacttcctctacccgtacggaggccacaccgtcatgcgctccatcgcgcagggcgac

SEQ ID NO: 9023 - DNA, 172 bp, Unknown
  gut microbiota DNA sequence
ccccttcgccgagaagctgaaggaattgggcgtcgaagtcgagacgaagcgcatgctcaccgagctggtgaaggacgcgaacggccgcgtgatcggcgctatcgtgcacgacaagcccagcggcaacgacgtggaaagcggcacgcccgtcgccatcaaggcgaacaaggcc

SEQ ID NO: 9024 - DNA, 6424 bp, Unknown
  gut microbiota DNA sequence
tcccttcgccgagaagctgaaggagttgggcgtcgaagtcgagacgaagcgcatgctcaccgagttggtgaaggacgagaacggccgcgtgatcggcgccatcgtgcacgacaagcccagcggcaacgacgtggaaagcggcacgcccgtcgccatcaaggcgaacaaggccgtcgtgctgaccaccggcgggttcggccgcgacctggcgttccgccaggcacaggatccgcgtctcgacgactccgtggattgcacgaaccaggaaggcgccaccgccgaaagcctgcgcgcttcggtggccgccggcgctatggcggtgcacaccgactggatccagctgctgcctttcatgagtccggacgagcagggctacggcgtcgccgccttctacaccgacggccaggccagctatgctcccacgctggacgtggccaccggcaagcgcatcgtcaacgagctgaccgaccgcaagcgctacgccgatgccatcctggaaaccggccagccgtgcgtgcagatcacgtgcaagaaggcgctgtacgacggcggcagcggcctggagggcgcgctgaaggccggcatcaccaccgagttctcgtccatcgaagaagcggccgagcactacggcatgcccgtcgacgccgtgaaggaagagatcgcccgctacaacacgttcgttgagaacaagctggacgaggacttcgagaagcccatccccgacgacgcccaaaccatcgacgagccgccgttctacggcgtgcgcctgtggccgaaggtgcaccactgcatgggaggcgtgaaaaccgacctcgagtgccgcgtcgtcgacatggacctgcaggtcatccccggcctgtatgcagcgggcgaagcagtgggcggcatccacggcgcgtgtcgtctgggctcctgcgccacggccgactgcctggtgaacggccgcatcgccggccaaaacgccgccaaggagcagagcgcctagcatctgcgcgatgcggcgtgccgacccccgctcgcacgccgcatcgtttgtcgcccgaaagccgcggttttgccgccaagagcgaggctttcatgcgacaacgcgccccctaccaaccaactcgcgccgccccgcctcccggaagggcgacaagcgaacccccgaccaagcagcggctcgaatagaagaacgaaaacaagcggaaccgccgcgacccttgctactcctcgtcgtccaccttcgtctcgaacgtgaagcgtgcagcctgcatctctttgaggtacgccgagcatatcctcagttcgcggccgtcttcgagcgtgatggcgagcgagcccatctttccatccgtatcgagtcggataagcttcattgacgagaccgacagcgtcttgatggtctgcccgtcttccccgcgctccttgaatacgatcggcttcgtcttcgtgaacccgaatgcgtcgcgaatctccatctcgctcatgtcggccgtctcaaacatcgtcatcaccgttccttacctccgagtatagggcgccgcgcgtcatcctctcgatgccctggaacgaagggtcgcccacgcaaccctccgcagcaaaaaaaacaacgatccctaccgtagtatataatctttttaatcattgatgacgaagagctgttctaaagagcgcgcccgcaatcgcccagatgcgagcaaggccgaagacggggcgaacgagcttcccgcgaaacgcagcaaacaccgccgcacccagcggcggttccccatcgttcgcctcgcgccaacgatcatgcgctgtcgaatgctattgttcgagaaaaatcgacaccacgcactgacagaaaagacccccccccccccgggtcttttaccaagcgaacgccggcgtttgcgagagcctcgcagctgcaaacaccggcagcacaaggcagcgctacttgtacgtgatcagcaccagacagcacagcaggctgtctcccatgccgctgggcgacaactgcacgtccaggatctcgtagccctgcttctgcatgaactccagcacgccgttcaagatgcgcgacgtgttcttgcggctgtagccgcccgccatttcaaacgcgcccgcgtggaccatcccgtctttcgggcgcagatccatgttctccagatacgttgccagcttctccagcgctttatcctcggcgctcttacccgtacccatgaatcccatgcttcagaccccttcccttctgcgacgcgccctaccagcgcttcgcgatcgtcacttcgttgcacccgtcgacgtagcggtacgaatgcgcgtccatcagacgcttgaccatcatgatgcccaaacccccgatgggagtctcctccaccgagcggggagcctcgggatcggcgtgcccgaacgggtcgaacggcacgccgccgtcgcgcagcaccaccctcgccccgcacccgtcggacgcgagagacaccgacacctccacatcgcccgacccggggtcgtacgcatagcgagccacgttcacgaacagctcctccaccgccaagcgcagctccttgcgcgccttgggcgggcactccgtcgtttccaaagcctccgtcaggaaccgctgcacggcaggctcgttgcccaacgccgcctcgatgcgcatggtgcacgtctccgccgcctccaccttcctactccacatcgaagacgtcgataagacccgtgatgtcgaacacctcgcgaatgtcgtcgctggcgttcacgatacgcagagctccttccgcggctgtgacccgcttttgcgtggccaccaacacgcgaagacccgccgacgacaggtactccaggtcggcgaagtcgagcaccaccttgttcgtgcgctcgaacaccggctcaagagcctcctccaaatcggcagccgtattggtgttcagatgccctcccaacttgagaaccgcctcgtctccgaaatagtctactgcgatgttcacatccatggttaccctcgattcccggccgccgacgccgcggggccgttttcctgtccatcgtagcgcagcaccagcagcgtgatgtcgtcggcctgatcggccccttccgcaaaggcgcgcacgtcctcctcgataacgcccgacacggatgccgggtatccgtcgcactcccgctccaccagctggaacaagcgttcgtcgccgtaacaatgatccgacgcatccatggcctcggtcactccgtcggtgtacaggatcagggagtcgccccggatcatggtgcgctcgaacacgcgatagggcacaccctcgaagctgcccaacagcagacccgaccggtcgcgcatccactcgaccgaaccgtcagcgtgtcggtacagcggcgggttgtgcccgccgttggcgtaaaccaatttgccggatctcaaatccaacaccccaagccacaccgtaacgaacatgccggcttcgttgtcctcgcacaggccgtcgttcgctcgagcaagcacctggtcgggcgagaggtcctcgcgcagcagctggttcagcagggccttgacgcgcatcatgaacagcgccgccggtacgcccttgccggatacgtcggctattaccacgccgcagtgatcctgatctatcaggaagaagtcgtagaagtcgccgcccacttcctttgccgggtgcatggatgccgatagcccgaagtcatcgcatcctgagaacggcgggcgcacggtgggcagagccgaaagctgaatgcggctggccacagcgagctcggatcgcgcccgctcgcgctcggcgcccatgcgcgcgatgtcgtccatgtgagcctgcagctcgtcgatcatgtcggccgtgttggcagccagatcgcccacttcgtctttcgggtagcactgcgagcggatgacgtcggccacggccgcggacttgctggcagcgtagtcccgcacctgggagctgagcgctacgagaggtttcaccaaggtgcggcggagcagcagaagcatagccgtcaggcaaaccgcgaacacggcgaacgacaccaccaccgtgctggcaacctgcgatcgcactgcagcttccagctcgtcggtgcccatcgacacctcgtaaacccaggtctggccgtccacggcaaaaggcacgtacatagcgtacgtttcgccgtccggcgcaagggcgggatccgtgctgggctcgccggtttcgaccgcttcccacaaggcggggtagtcagctttgaggcgctgctcctcgtcgccgaagaagtgagcatccaccccgcgcttctgatcgccggaaatcccctccgcaacgtagaggacggtctcgttctgctcgtccggaacaactaccgcaagcctcgacacgctgaacgaagcgcgcagccggtcgagcatcgcgtccagggaatagagcgagaggggtatgctttttcgctcgtactccgccagcatgccgtcgagacgatcctgatcctcctcggtcgcctcctcctccgaccccttgagcctgtcgacttcggcattgtaagcgcttatcagcccctgcgtttccgcgaggctctgatcgtacgtcgtcgcggggtccaactcgtcagcgttgtctttccacgcttgcaatgcatccgaaggaagcgcctgcggagtggcgttcgcggcgtaaccgcccacctgccccaagcggtaggcttcggactgtaggaaggtatcgcgcgtgctgacgtacgcgagtgcgcagttgagcaccacggccactacggcgaacgccaggaacacgagcgccagcttgcgaatgagccttcccgcatgcccatcgtttcggccggacgaccgctccacccgcctttcgtcgtttttcacgcagcacccccgcatcgcgtcttcatcgcatattcgttcgatcataggccggtcaggcgatcgctggcaaggcgcgccgaacgaacgaccatttccagcgaacgaaggacgagttaagcgagagaaggcaaacagagcgagcggctctcgccgcacagcgagcggctgaccttggcatcgtgcatgatcgttcgttcgccgggatcggtctttcgttccgcgctgcttgccttcgcgaaggccgtttctatactgaaggaattcgaaacgtccggcacgaagccgagcgccccctggacacgagaaaggcggataggctatggatgactccaacaaagacgatcacgcgaagacccttccaaaggagcacgaccgcgacgcggcaatcgacgacgcgcggaaggccccggaagagcttgaagatgaaggcttagatgccgtatcggccgggtcgggcgaatggtctcgttttgggccaggcatccccccgaaacccgtaccccttcagtaacaactgccctttgcaacctggcaccgctcgtcatcaggcactttcagacgtctggtagaagccgcacccatacttcgcctcatcaatcctctacgataaaggacacgctatgagcaatccagcgcgtaccggaacccaaaaagccctgcacgtcgtgtccatcatcatgatcgtgctcggcgtgctggtaatcctatcgggcgcctccctcatcgcgctcggagtgtcggccgccacgatgggaatggaccagccgatgactttgggcgataccgagaccacggcagacaccacctccgtcgctctgggaatcatcgtcctcgccatgggcttggttcagctcgtcgtcgccgcattcggcctgcgcggctccaaggacgcaagcaagatcgggccgtttagaatcctcatctggggcatctccctggtcatcctggcgaccatcctgtacggatggtttttcaacggcaactggtacatccagaacagccctcttctgctcatcggcaacgtgatctacctgctggtgtgctccaccctcgccgacgcggtgaagagggagcacgacctgggcatcgtgggcgaggccaaggccgaagtcgagcgctcgggcagccagaaggcgctgctggtcatcggcgcctgcacgtggctggcctacgacatcatgcgccagagccgcggcatcgaggcgtaagcgcgagcggcccaggtgcccctgcacaggtttccgagcctgttgccgtagttgccaaaagagcaattgcaacaagaagtatatgcggtcacgagagaagggacgcggcgatggacgaaacgataaagcaggggaagggcgcgcttcgcttgctgctggcgactatgttggcggcaatgctgatcccctgggctccccgagcggcttgggccgatgaaaacgaagcagctgcccagacgcagacgagcgagatcgccgatctgctggctgccggagactacgtcgagggcgaggctctcgtcgtcgttgacaacgcggcatctcgaaacagcctccgttcgcgcagcgtcgacccgctctcctcggccgaaccgctcatggacgcgtcggc

SEQ ID NO: 9025 - DNA, 310 bp, Unknown
  gut microbiota DNA sequence
ctcctccaccgcgctcatcgagcgcaaaagcggcgtcttcttgtcgagggcctcgccggtgtaggagcagaaggccgtcgggatgcacagcacctcgtccttgatgaacgcgtaggacgtgggatcccaagcggtgtagccgcgggcctcgaacgtggcgcgcaggccgccggacgggaagctggaggcgtcgggctcgccctggatcagctcttttccggagaagctcatgatggctcggccgtcgctgcaggggtcgaggaagctgtcgtgcttctccgacgtgatgccggtcaggggctggaaccaa

SEQ ID NO: 9026 - DNA, 1645 bp, Unknown
  gut microbiota DNA sequence
gagatcacatacgactgccttgcgcttatgcacgagagtgctgctctcggcggttttagcctgcgcgcttctcataccggtcaccgccgaagaagctcacgcttccgaccagccacgcatcgtcaaggtgggttacaccgacagcgaaggcctgctcacaaaaaacgatgacggcacctatgaaggttacacctacgactacctcatgcgcatcgcccagttcaccggctggtcgttcgagttcgtggaagccgagggcgacaatgcaaacgaacgcgctttgcggcttttagagatgctggacaacggcgaggtggacatcgagggaagcatgtcgtacagcgccgcccttgccgaaacctacgaataccccgaaaacagctacggctcggcccacacggccctgttcgccccgaacatacatgccgccgtctcgaaaaccgatctgttcacccgcagcgagctgcgcgtggccatcctcgccaccgcgaagaaacgccgcgcggagctcgagtactactgcgatcagaacgacatacgactaaccaccgtagaatgctcctcctcacaagagatgcgggacaggaccaatgcgggcgaggcggacgcgtttctcgatatcgacgtcaacgcgcaagacggcttccatattatcgcgtcgttcgccgagcgtcccttcttcttcgccgcccctaaaggcgatcgcgagataatcgacgagatcgacgccactatcgagcatatcaacgaggacaacccccaactccagaacaacctctacaaaaagtacttcctaacctctgagaataacttcgaactaacccacgaggaaatgcagtacgccagccattaccgaacgctgcgcgtgggcgtggcgtcggagaaggcgccactccagtcgttcgacgccaaaacaggcgagttcaaaggcgtgacgaacggcatcctgcagtatctctcgaagcatgcgggcttctcgttcgaagtggtgaagatcccgtatcaactcgattctcaacagaccgcgagtgattttaacgtagacatcatcgcgggcgtgagcgacgacggacatacctcgatcgacaacggcatcgcgctgtcggctccctacatgaccacctcgatgttgctggtatacagcaagttcatcgaccccgaccagctagaaggcaaaaccatcgcactgccgtgggatcaagcctactccgctccggacaacgcgccggtgcaggtgtacggcaccattgaggaatgctttcaggcagtgaacgagggcgaggccgactacacgtacgcgacatcgtacactactccgtactacctcaacatcgacgagttaaacaacttgctgtatctgcccacctctacgaaaaccttggacgtctgcttcggcttggtgcagccagttgatccgcagttattggtcgtcatcaacaaatcgctgcgcgatcttagccccaccgagctcgactccatcgtctacgacaactcattgattccccaggaagagcagatcaacctgttcatcagggaccacgtactcgagtttgcacttgtctgcatttccatcctggtgctcatcatcgttctgcttgcgctgtacctgcgctcccgcatgcatgcggcgcgcgccgtacgcgaa

SEQ ID NO: 9027 - DNA, 287 bp, Unknown
  gut microbiota DNA sequence
tggctgccggacagcgcgggcttcgcgtcggccacgatgttgccctcggcgtcgagccactggaaggccttcgggccgcccacgcccttcgcgttctgccagtcgccggaccagaagatcagctggtcgctgttctcgtcccacgcggcgtacagctcctcgttgccgtcctccttgaggtacgactcgcgcagctggtagcccgtgccgttgccgtcggcgtccttctcgtcgatgaagaacggggcgttcgtgtacatgcgcgcgaattcggttgcgcacttgtc

SEQ ID NO: 9028 - DNA, 2165 bp, Unknown
  gut microbiota DNA sequence
gacacctcgcgcgtggcggtgatctcggccgcgtcgcccgcgtccagctcgttgccgttcaccatgccttcgccctcgatctggatgaggtaggcttgccgcgccgggtcgaggtcgtagtacagcgtctcgtccgagccgatgacgcctacgagcaccttcatatcctgatggatccggataggcgcgaaaccctcctcgcccgaggcgacgggcatccacttccccacgcggtcctcccagtcgaagcggtggtcgccatagttcggctccgcgttcttctcgtcaggcaagatccatatctgcaggaaacgcagcggttcgttcgtatcgttgtactcgctgtgcatgatgccgcttcctgcgctcatgtactgcacgtcgccccgctcgaggcggctcccgttgcccaggctgtcacggtgcgtgagctggccgtccacgacgtagctgatgatctccatgttgtcgtggggatgcatgccgaacccgccgtgcgggtcgaaccggtcgtcgttgaccacgcgcagcgcgccgaacttgatgttatcgggtttgtagtactcggcgaacgagaaatggaacaggctgtgcagccatccccggtcgcttctgcccatgttctcgtgcttgatgaccttgatcatggcccatcgctccttcttgttgtttgatgaagcgatgatagcgtgcccctgcgcgccacgcgtggcggttgcatgtcgctcgcgtaacgagatgatgaggagcaagcttagagggcaagcgagagcggggcggatttttcgcacgggtcggaagcggcgaggcggatcatcgcccgtttgcaagcccctgctcgaacgcggctatctcggacaggaaggcttcgccgtaacgggcgagcttcgtagcgcccacgccgctgacctcaaggaactcctcgtcggttgcaggccttttcgcgcacatatcgcgcagagccgcatcggagaacacgatgtagggaggcttgcccgcttcgtcggccaggcgcttgcgcagcgtgcgcagacgctcgaacagctcggggtcggcatcgttcgcgggcgctcccgacgagccgaacacgtgcgaaccgcctgcagccgaacgcgtgcgctcgggctttcgcagaacgcgcttcatcgacaagctgaaaccctcttcggcagcctcgcgggcacgcggccccagacccaccaccgggtacgtcccctcggtaatcagcaggtagccgcctgcagccagcagctcgatcacttctttcacctgtgcagccggagcgttcaccgtgtcgtagcacgcggcctcgtccagatgcatgtccagcagcttcgcgttctgcgagccgcgcagcacatccaccaccatgcccttgccgaagcgaccccgcagctcctgcacgcagcgcatggcggcgagcgcggtgtcggtgacgtccatcgactcgaactcccccgcgcagttcgagcagttgccgcaggaaaaacctctgtcgccggtcgttcgtaacgtcagcgaggaggcttctggcgccgaagattgcggtgaaagtccgacgtggcggccttcgggccgtgaggaggacttggagccgcaaggttcggcgccagaagcctccgcagcgtcggctcgttccgtcggccggcaagccgacggaaccttctgctccccgaagtaatcgaggatgtagcggcgcaggcagccggtggtgtggcagtagccggtcatcgccgccagcaggcggcggcgcgaggcgcgcacggcttcggcctcttcaggcgaaagctcctcgttgcccgattcctgctctatgaagaagcggcaggtggacacgtcgccgtcgctccagtacagaaggcacgtggaaggctcgccgtcgcggccggcacgaccggcctcctggtagtacgcctcgatgctgccgggcatgttgtggtggatcacgtaacgcacgttcgacttgtcgatgcccatgccgaacgcgttggtggccaccatcaccggcgcgtcgtcggcgatgaacgcgctctggctctcagcgcggtcggccgccgacatgcccgcatggtaacgcgcggcgcggacgccctcctccagcagcgcggcgtgcaccttgtcggtgtccttgcgggtggagcagtacacgatgccgctgtcgcccg

SEQ ID NO: 9029 - DNA, 304 bp, Unknown
  gut microbiota DNA sequence
acgctggctctcggcgcgatcagccgccgacatgcccgcatggtagcgcgcggcgcggatgcccgcctccagcagcgcggcgtgcaccttgtcggtgtccttgcgggtggagcagtacacgatgccgctgtcgcccgcatgctccaacgcgtagccggcgatgcgcgcgatcttgcgcttcggatcgagccgctccacgccgaagtacaggttcgggcggtcgaagcccgtgaccacctcgtaggggtcgcgcaggtcgagcaggcgcacgatgtcggcgcgcacgcgcgcggtggccgtggcc

SEQ ID NO: 9030 - DNA, 2509 bp, Unknown
  gut microbiota DNA sequence
gcgcgtagccggcgatgcgcgcgatcttgcgcttcggatcgagccgctcaacgccgaagtacaggttcgggcggtcgaagcccgtaaccacctcgtaggggtcgcgcaggtcgagcaggcgcacgatgtcggcgcgcacgcgcgcggtggccgtggccgtgaacgccgccacgacgggacggttcggcagctgtgcgatgaaatcgccgatggtcaggtacgacgggcggaaatcctggccccactgggacacgcagtgcgcctcgtccacggcaacgagcgggatggccgccctctgcgcgaattcgaggaacctcggatcggcaagtcgctccggcgccacgtacatgatctggtaggcgccgtccagcgcgcggcgcaggacggtggactgctgcccgggcgtgagcgtggagttgaggtaggcaccgcggatgccggcgtccagaagcgcgcgaacctggtcgcccatcagcgacacgagcgggctcaccaccagcgccaagccgtccatcaccacgccgggcacctggtagcacaccgacttgcccgcgcccgtgggcatgaccgcgagcgcgtcgcggcggccgaggatcgcctcgacgacaccctcctgccccggtcgaaaggcctcgtagccgaagtgctgcttgagcgcctggtgcgcctgcgatagatccgtcactgctgcttcctccccgcccgtttccggcttgctctcgtattcccatgatactgcattgttcctcgaacacgtcttgcgcgacggcaggaagcatgtataatgcagggtgtcagcggtgcccgtgggattgaagctccggacgggtgacgccggtacgtttcggggacggttagggactaggactcccgccgtcctttctgtttcctcgatgccttccgctttcgtcgcgcccagtcgtaggctgccatgaagaatgacaagatggaacatagtcctgcgatcagattgaaactatccatcgggtaatcacctcctctcgaaggcgccacccgccggaaacggacactgctgacagccatgattctagtgcctcgcacgctgtctgtgaagtaaaagttttcccagatcaaacaatatttttgacgttagatccgcgttggatccacgcgtgatccgcgttggatccgcactggatcgacgcgtgctgcgcgtggtatccgcgtacgatccgcgctagaatcgcgcaagatccgcatggactgcacgcaagaaccgcgtgggctgcgcgcaaggtttcgcaggcttgcggagcgaagcatcgccttccgctacaatatcctccaaattcatccgacaaaacccgccgctcgatcgtgttgcagtcagaaagggaaaaccgctgcagaacaacgtcgacatagccgcactgttcaaccgccacgccgcgacggtgtataggctgtgctactcgtttctgggcagcgcggccgacgcggaggacgcgacgcagagcgtgttcatgaagctgatcgaccgcccgcgccgattcaacgaccccgagcacgagaaggcatggctcatagtatgcgcccagaaccactgccgcgacgtgctgaaaagcgcgcaccgaacgcggcagaccgcccttcccgaagacatcgcggacgagaggcgcgcgcggcaggacgagacgctggatgcggtgctggccctgccggagaagtacaagacctgcgtgtacctgttctattacgaggggtatcgcacggcagagatagcggccctgaccggagtgccatcctcgaccgtgcgcagccatctgagcgaggcgcgggcgcttctgaagacgatgttgggaggtgagagacatggacgatagccgtttccacgcggaagaatcgctcgagaagtgtctggcggatgcctacgagagcatgagtcccgacgaagaggcccggcggcgcatgctggcggagctgctggccgcaagcgagcggcgcgcgccgaagcgccggtcggcgcggcgcgcgctgatccccctcgccgcctgcctcgtgcttgctgcgggcatcggcgcgctcacctacgcctcctccctcacgcagcccccgagttccggcggtgcggcgacgatcgccagcatcaacgacgaattgaaatcagccgccccctcctcggccgacgaagcgcaaagcgaatcgggcgcggctccgtccgacggagacgcacgtcacccgttcgtcacgctctcctcgggcgagcgtctgcgcgtcgccctcggcgacgacggccccctacctgccagccccgaaatcgtcggagaagaattggagcgcaccgtcgccaccggccccggcgtaacggcatcctcgccgtgcacggtgttcgcgacgagcgacccggcccacccttatgccatccgatacgacgaaaacggcgtcacgtacctggccgaccccgcgtaagcccgacgaacggagaacatcatgcacgcttccaaccgcagccgcggcaggctcgccgcgggctccatcgccttcgccg

SEQ ID NO: 9031 - DNA, 208 bp, Unknown
  gut microbiota DNA sequence
caccgacgtgcggcgtcgcgcgctgcgcaacacgtccttgcaggcgttcgccgtcgcgcgcacgatccaggcgcgctcgtgctcggcgctctcgaaggcgcgatcggtctgcagcagcttgatcagcacgttctgacagacgtcttcggcgtcgtgcgtggatttgagatacgtgtagccaagtcgcaggatgaggtcggcgtacgtc

SEQ ID NO: 9032 - DNA, 361 bp, Unknown
  gut microbiota DNA sequence
cttggtttttttggacatcatctcttcctgataggcgcgtcgcaccttgcggattttcgagaagtccacgtataaggcgccgatgatgcacacataggccaggcccagcaccacataggttcccacctcgggcaggaaggcgcggccgaaccacgacatagccgtcatcacgatggcgccgatcaaaagaccccaccagattttgcgaagacgcttgtattccggcgtgggcgggttgtagtactgccgatcgatctcggtctgcttcgctcgtgcggccttcttgtcagccttcttctgctgcttcgtcttcacggtgggctggatgcgcaccgacgaagccgccttcgtcttcggcttc

SEQ ID NO: 9033 - DNA, 1826 bp, Unknown
  gut microbiota DNA sequence
gggcgatgccgacgcgctgcgcctgtccgcccgacagctcggcgggatagcgatccatgatgtcgtgcggcaacccgatgatgtccatccatttcgcgacggcctcttcggtgcgaccctcgtcgccgctgttcagcagcgagggcacgtacgcgatgttctgctccacggtgaggtggggaaacagcacgctgccttggatggcgtagccgatgtttcggcgcagctcgatggggttgacgccgctcgtgtccttcccgtgcaccagcacgcgtccatcgtcgggcatcgccagcgcgttcaccattttcaacagcgtggtcttgccgcagcccgagctgccgatgatggtgacgaacgcgccttcgtcgatgtcgaggttcgcgtcgtccacggcgacggcatcgccgaatcgcttgctgacgtgctcgaacgcaacggcgggcgtgccggtctgctgcatgccgtccatgctacatcagccccttctcggccaggaacgcgtcggccaccgctttcggctcctgcccttgcgtctccacttcgttgttcatgcgtgccatgttcgtatcggtgatggcgccttgcagcttcagcagctcgtcgcgcagctcgggatgcttttccagcgcgtcctggcgcacgacgttgccgcagaggtacgacggatagaagtgccggtcgtcctccagcaccacgaggcgttcgtcggccacctgcccgtcggtggtggacacgacgatggcgtccacctggccctcgaacagcgcctggtacttcaagctgatgtccatgtcccgcgtgttgccgaagttcatgccgtaggcttgctgcaagccggggtagccgtcctgccggtcgaagaagtcgggctcggcgcccagcgtcaagtcgcccgctgcgcccgccaggtcggaatatgtgcgcaggttgtagcgctcggcggcgtcgcggctcacggccaggccgaacgtgttgttgaagccgtacatgcccacccaggtaaggcctagctgcgactcgtactcctgctgcatcgtgtcgaacatcgactcgtcgtaggtgtcgtcgtgcttgagcacggcgttccatcccgttcccgtgtactcggggtagaggtcgaagtctcccttctccatgccgggctcgatgttcgacgtgccgccgcccacgccctgcgtcagctccaccttgaggtcggtgtcgtgctcgatcagcgtgttcagcatctcgccgaggatgtactgctcggtcatgggcttcgtggcgatgttcaccacgtcctctccaccgccgcggttcgcgaacgcgaacgccccgcccgctatcagcaccacggctgcgcccgcggcgacggccggggccagcttgcgacgcgaaacccgtcgcgcgccggaacgcttccgtcgccgggcgttcgaaggctccaggtggcgtcgtgtggacttctcggctaagcccagcagcaggtccaccacgatggccagcagcgcgatcagcacgctgcccgccagggtcatggccaggttgtacgtcgtgatgccgcgaaagatggccacgcccaagcctcctgcgccgatgaacgtggcgatgccggccagcgcgatggtcatggtggccatgttgcggatgccgctcatgatgacgggcgcggccagcggcagttcgatacggtacagcagctggcggtcggtggagcccatgccgcgcgccgcctcgatgatggcagggtcgatggtggtgaggccggtgtaggtgttgcgcaccatcggcagcagcgcgtacacggtgagcgccacgatggcggtagggtcgccgatgcccgt

SEQ ID NO: 9034 - DNA, 459 bp, Unknown
  gut microbiota DNA sequence
cgcattccgcggccgtcatcgaaacttgaagccgattacatgagaattgcgcgggttcgaggagacaagggagacaagggaacgaggtttacgactcatcgcgggctatgagtcgtaaaccccgttcccttgtttcattccaagatgcagcgatggcccggcgtggtgctgcacttatcgcacgaaacgcagcggggcttcgcctgcggatcgacccgccagcgtcgcgccagtcgcgattcgcagataagcggccgacaaagaccgaaacccgctatgccgccggcgctttcaacaacaaggcgctccatcgcatcgagccgccgattgcctccggtaaggatcaggggaatgtcgacctcgcacgcaagccgcttcgcatagggagcgaagaacggctctccatcgaagtcgcgcacacggcagttccgccagttcccgctcacttctatagccgac

SEQ ID NO: 9035 - DNA, 671 bp, Unknown
  gut microbiota DNA sequence
tgcccctcaacgacgagctgagcgcgctgcgcatggtgaacacgggcgtgttcgtcaccgacctgggctatcgttgcgcgaacgagtctatgaccagccagttcgattacttcacgccgttcgtggaaagcggccgcaaggaattcaccatcatctgcgactcgcagcagcccgacaagcgcatggagcttatcaagaagggcgtggagaagggcgtcgtcgacacggccgacaccatcgaggagctggccgaggcggccgggctgccctcctacccgctgatgaagaccatcgagcgctataacgagctgtgcgaggccggtgaggacgccgacttccacaagaagcccgaagacctgcaggccatcgagaaggcgccgttctacgccatccagatcacaccgaacacgaacgactcgttcggccagctggccatcagcacgaaggccgaagtgctggacgccgaccgcaagcccgtccccgggctgtatgccggtggcacgctgggcaacgccgagctgttctacatgcgctacgccgtgagcggatcgtccatgtgcatgggcaccgtcaccggccgcatcgccgcccagtcggccctggagtactacggcgcgtaacgcgccgaacgctcgggagccggcacgcccgacgcccgagcgtcatcacac

SEQ ID NO: 9036 - DNA, 17485 bp, Unknown
  gut microbiota DNA sequence
cctgtatgccggcggcacgctgggcaacgccgagctgttctacatgcgctacgccgtgagcggctcgtccatgtgcatgggcaccgtcaccggccgcatcgccgcccagtcggctctggagtactacggcgcgtaacgcgccgaacgctcgggagccggcacgcccgacgcccgagcgtcatcacaccgccttccctcccctcacgccctccggctctcgccggagggcgctttgcatacgaacgggtcgcagccgcatcgtggccgccggctctcaaaaccgtcgttcgggctccttctcctgttcgaccccgaatgtttcacgtgaaacattcgtacgcttgttgatccttgcgcgcatagccagcgcttcgccgagccgcgggctatgcctcgcgccagcagcagccgtcgtcgtctcgcagcccgcggccgcctccgtgcaaccgacagcacggccaatggcgaaaaggcgtcgaattcggaagtcgctgcgcctctcctcagaaagcaggaaagggcctctcccgataacgcccggtcaaaacgatcccgtctccagcatcatgcgccgatgccgaacagggacgcccgctcgcttccgaattcggtatctttttgccattgcgagaccagccggggggcacgaagggccgtcaagcagacagcgcggtgccttgtgaagacgatatcgcatgttcgtaaaattctaatactatgcttgactttgtaatctgtatgcaatagcgttacagttacttaccgtcgaccctagcgctccccttaggaggacgttgcagctcatgaatagccgtatgagaaaacacgcggcgctggccgtcgtcacgctggccgcagccggagcgctcaccctggcggcatgcgcggaaacgcccgccgcatcatccgacgcgcccgcaattcaaaaccaaagcaaaagcgaggaatccatgacaaacgaacgcaacggcgggtacgccacaatttccgaggacgaggcggttgccatgatgagcgaaaactccgcaacccttgtagacgtccgcaccgcacgcgaatatgctgacgggcacatctccggagccatcaacatacccgtcgaaaccatcggctccgtcaaacccgccggccttcaaggcgtggacgaaaacgtctccatcatcgtctactgccggaccggcgtgcgcagcgaacacgcttcgaacatgcttctcaacctgggttacaagcacgtgttcgacctgggcggcatcgtcgactggaacggcgaaaaggtggccggaaccgagccaggcagcttcgcaggcgacgcgcagtagaatctgtcgccttggaggtccgtgcgtgtcccgccggaaacgacacgtggacaggtatgggcaaccgctccgctaagccaactgcggaacgcgcacggatctccaaggcgacaaaccgaaacgctcgtcagaccgagcgtccgcgaacatgcgtagaacgggaggggaacgtgcgccgcaagccgtcggcgcacgcgtcaaagccgtgcggatgcggcggatccctgtccaagctccgccgcacccgcacgaaacgcccgcgaatcacgcgaatgagacaatagccccgtccctttgtctcatcgaaacggcctcattgcccggggccgtttcgcgttcggaaggttatttcgcgatcagcacggggatgggcgatgcgtgcaacagcttgtggctgacgctgcccatgtactccttgagcccgctcaggccacggttgcccacaatcagcaggtcgtagtcgcgctggccgatcagcttgacaatctcggtggccggattcgtgccggttagcagcagcgagtcggtgcgcgcggcaacgtcctcgcccatcttctgctcggcctcggccagcagatcctcgccgtcggagatcatcatgtcgagaatgtccttgaagttcgccatctgcgtttcgtcgagcagcgggataggcaccacgtacacgacgtccacatgcgcctcgggattcactgcagccaggctggcggccatggcgagcgcgcggtcggcaccctcggattcgtcgaacgccacgagcaacttgttaacggccatggtgggcctcctctcggtcgcggcgagcgcggtgcgccgcctgaaaacgtcctacctccagtatagggctttcagcgcgggcagggaaacaagttgtccacgctttcatgaccgctttcgcgcggatcgccggccatcgccagccgggcggtcgggtgccctacgataaacatcttcggcagcgtgcaacatgccccgaatagagcggccccctttagggtctcgacgaaaggacgcaccatggaacagttcgacgcagcgatcatcgggttcggaacggcgggcctcgccctgggtggtgcgcttgccgacgatggccagaacatcgtagtcgtggagcagtccgacaccatgtacggcggcgcctgcgtgaacaacgcatgcatccccacgaaggcactcgtggaatcggcacgactgaccgcggccgtaggcggctctatcgttgaacgcgaggagcgctacaccgcggccgtcgacgacatgaaagaactgcgctccgcctcgcgcgaacgcaactaccgcgcgctggccgatcgcgagaacgtcgacgtcatcgacggccgcgcatcgttcgcgaacgccacgcacctgacggtggccaccgcgtcgggcacgcgcagcatcgaggcgaagcgcatcttcatcgacaccggctcgctgccgaagctgccttccatccccggcatagacagcccgcgcgtgttcgtcagcagctcgctcatcgagctgcccaccctgccgcgccagctcgtcatcatcggcggcggctacgtcggcctcgagttcgcctcgttctacaccgacttcggcgcacaggtgaccatcctacaaaacagcgacgccatcctcgcccacgaggatcccgagacggccgaagccgtgcggaggagcctcgaagaccgcggcgtcaccatcgtgtacgacgcgcacgtgacgcacatcgacgacgagcacgaccaggtgctggtgttcgcccaggtgaacggcgaggagaagcgctatcccggccatgccgtgctggtcgcggtcggccgcaccccgaacacgaccggcctcaacctggaagccgccggcatcgagctgaacgaccgcggcggaatcaaggtggacgagcacctgcgcaccacggccgacaatgtctgggccatgggcgacgtgacgggcggcatgcaattcacctacatcgcctacgacgacttccgcatcgtcgcatccgacctgctgggcgacggatcgcgcacgacgaagaaccgcggcgccatcccttattgcacgttcgtgcacccgccgttcgcgcgcgtcggcatgaccgcggacgaggcgcgcaaagccggctattccgtacaggtatacaaactgcccgctgaaaaaatctcgcaagcgcgcatcctgcaagacccggtgggtctgatgaaggccgtggtagacgcgaactcaggagtgctgctgggcatggatctgttctgcgaagatgcgcaggagctggtgaacaccgtgaaactggtcatggatgcacgcattcccgcctccgtgctgcagagcgccgtattcacgcacccgtccatgaccgaggcgttcaacaacctgttcctgcctcagaacatgcaggagtagaagccgtcgtggacacgaacctcctgaccggatcgccgcctttgacggcaagctcgttcgtcatccagcgctcgaagcccgcataggcgggcgccttgcgtcctttgaggctgacgaggcagataggcacggaaacggaatccttggccgccatgggtttcaactcggtgagggggttgaactgaccgagcgcaggaacgccaacggtgagcgccaacccgttctctcgcgtcagatagcgctcgaactgcgcggcagtagtcgcgctgacgagaatatcgatcccgcgctcacgatagaactccgcaacggaatcgttgaagcggtcgaagtcttccgatatggagacggggtacggctttatatcgtccaagctgacagtttgatgctgcgccaaggggtgccgatacgacataatcacgcccagcatcaccttgccgagattcaggcaatccatatcggggtgacggcatgcgccaaccacgataagcgcatccaggtgtcccgcctgcagcgccccgaagccgcgaagccccgcctcaagccgtatagaggtttcgatgcccgagttcttgtagacgaacgatgcaatgctggcgcatgcttgctcgtatccatagagcggagacgcgcacagccccaaccgcaacaacggagattcggcagagcgtcgtctgtgcgcaaacgcctccaactcgtcgaagcttctcagcaccggctcggctttgacgtagaaggcctttccgaacagggtgggatgcacgccgcggctttcgcgcacgaacagctcgttcttcagttctcgctccagatcagcgatagccttcgagaccgcttggacggttacgtactgctcctttgcggccgctgacaagctgccgctctggaacacagcgacgaagtatcttacttgcttgatattcaaaaagtctacctcgaacctatcgcgcgccgatcctttttgagattctaccgcgctcctaggtcgttgcatccgagacgcgccccgttcaactatcttttgaacagcagttcctgagcacaaaacgcgcgagaagagcgcctctgatcgcacgaagggcgcgcgtcgcttacgggctttgcgaaaggggctccatcggcgcaagctgcgtcacagcgcgtcgcagggacgggtggttttacgcgctttccgcaaatcccacctcctgcggaaaaaccgagtggcggaggggcgcaccctccgtcgcagcgcctataaagacgcgagccgctcgagcggctcgccgcaggagcccggcagactcgcatccgcatcgatccgacggcgaacggaggaacgccgtggcagagatcgcgcgctatgcacgatttcaggtggtcgttttcggaggcggaaaggaaaagcccaggtcgcgagaaacggcggcggcggagaatcgtgcataccgtacgatctctgccacgcgcgagtcaaccggaggcgaggccccctcgaacgacccgccaccagctcgccttcaacccgccggcgagccgtcgccagcaagaccccaagcaacccgccgccgacccaccgccgtccccaacgcgaccccccaagcaacccgccaccaacgcaacacccctccccgcgaagaaagcatgtcgcttgggcgtgccttcgagcgccgcgcgactgttggtgtaagctgcgttaggcaagaacggcgccgtcatcgggctccggctctgcagatcaaaccacctcgcccaaggagcacgcatggcatcacccgggttccccctccgcgccgccgccgacggcccgcgccgcatcggcatgccgcgcgcgctgttgcactaccgctacggcacgctgtggacgacgttcttcgaggcgctgggctgcgacgtcgtgctcagcgaccccaccgaccgctccaccgtggcgcacggggacgcgctgtcgaacgacgagtgctgcctggcctcgaagatctacctgggacacgtggcctcgctggtggattcggacgcgtgcgatgccgtgttcgtgcccagcatcgccaacgtgggacgacggcgcgggttctgcacgaagttccaggcgctgcccgacctcgtggccaataccttcgccgaccagcgcatcgaagtactgtcgtgcctggtgaacgaggtggatgaacacaaaagcatgaaagacgcgctcatcgagctggccacgcagcgctacacgggcccgcgcgaggcgaagcgcgcctggaaagcggccgcccgcgcgcaggagcaggccgaacgcgccgcgacgttgcggcaaacgcgcgccctgtcccagctggaagccgcgcgggcggcggcgcggcgccccgaggacgcaccgcttgccatcctgctggcagcgcacccctacctcgcgcacgatgcgttcatgggcggcgcgctgacggacctgctggaaagcatgaacgccgtggtgctgttcgccgacgaggccgaccgtgagcgctcgctgcaggccagcttcgacttctccgacacgctgccgtggatcgtgaaccgcgagatcatcggcgccatcacgcagctgcaccaccgcgtggacggcatcgtgctggtcagcgcgttcccctgcgggcccgactccatgaccgacgacgccatcgtgcgctgcatccagggcaagccggtgctcaacctcaccatcgacgcgcaaagcggcaccgccgggttggagacgcgcgtcgagagcttcatcgacatcctgcgctaccagaagaaagggggctacgttggcgcctgagacgaaacgcgacgcggtgaacccgctgcacaccgacggcgaccgcgaggtgcgcggcgcccgcgtggtggtgggcacgcggcgcggcccgttcaagctgctgccctcgctgccgaagaagccgcgcgccaagcgcgaacgccacgcccgcacgcgcgtggcgttcttccgctacagctactacgacatcgcgttcaaattcttcgtcgaacacgtgctggacgccgatttcgtcgcactgccgaagcccacgaagcgcaccatcgagctgggctcgcgccactccagcgacatggtgtgcgcgccgttcaagcacatcctgggcgactacatcgaggcgctggagctgggcgccgacgtgctggtgcagttcgccgggccctgccgcctggggtattacggcgagctgcagcaatccatcatgcgcgatctgggctacgagttcgacatgctgaacttcgccatgctcaccggcaagcccctgaccgagtacatctcggtatgcaagaagaaggtgaaccccgacctgtcggtgccgcatggcgtgcgtaacatgctggccgtgtttaaaatgatcgagcacctggacgaagtgaacgatttctacctggcgaacgccgggttcgaagccgagcccgggtcgttcgagcgcgcgcgggaggcgtacttcgccgacatgcgcgcggccacgaacgagcgcgagatcgccgaagcgcagcggaagggcctcgatgcgttgcgcgcgctgccgcagcatcgccccgcccgccccttgcgcgtgggcatcgtgggcgagtacttcaccgcagccgacccagccagcaaccttgatctggagcgcaagttcctggacatgggcgtggaactgcaccgagcgctgaacatgacgaaccgcaacctgcgctacaacgagaagaacctgcgcgccggcatctcggagtacgtgcagtacgacatgggccccacgtccagcatgaccatcgcggccgcgcgcaagtacgcgcaggaagggttcgacggcatcgtgcacctcaagtcgtcgggctgcacgcccgaggtcgactgcatgcccgtgctgcagcgcatcagccgcgacaccggcgtgcccgtgctgtacctcagctacgactcgcagaccagcgacaccggtttggacacgcgcctcgaagcgttctacgacatgatcgccatgaagaaggagaagacggcccgatgaccgaagcaagggaaactcacacgaccgccaacgccagcgagggacgccccgtcccgtcagggcgaacggactgctacctcggcatcgacatcgggtcgatttccacgaagggcgtgatcatcgacgccgaccggcgcatcatcgcgcgcacgtacctgtggaccgagggcaacccggccgatgccgcgcgccgcgtggtggccgacctgggctcgcaggtggatcgcgacgcggtgcgcgtgcgcgccgtgggcaccaccggcagcgcgcggcggctggtgggcgccatgtgcggcgccaccgtggtgaagaacgagatcacggcgcacgcggtgggcacgacgtttttgcatcccgacgtgcgcaccatcctggagatcggcggccaggactcgaaaatcatctgcgtggagagcggcatcgccgtggactacgccatgaacacgctgtgcgcggcgggcacgggcgcattcctgtcgagccaggcgcatcggctgggcgtggaggtggaagagttcggcgacatcgcgctgacctcgaagaagcccgcgaacatcgcggcgcgttgcaccgtgttcgccgagagcgacctcgtacataagatccaggtgggctacgcgcgcgaggacatcatcgccggcctgtgccgcgcggtggccacgaactacctgaacaacgtgggcaaaggcaagcagatcgccgcgcccgtggtgttccagggcggcgtgagcaagaacgccggcgtggtgcaggcgttccgcgacgagctgggcatggacgtggtcgtggacgaggacggccacctcatgggcgcgttcggcgtggcgctgctggccgccgaggccgctccgcgcgccggggagcccggcgacggcgaggcgttcgacttcgacgcgttgcgcacgttcgagttcgtcacccgcgaggtggagtgccagaagtgcgcgaaccactgcgagatcatctgcgtctaccgcgacgggaagatcatcgactcctggggcaaccgctgtgacaaaggcgccgtgaaggccgggtaagcgccgcaacgccatgcggacgcgctgcggcgagcttgcgccatctccaccaactcgtcccaaatcgcatcaggaccatgatgggcaaatatctgtagcataactataggtagatttatagctatagttatgctatttttgattcagccgatcgaaaggagacgctatgtccatcacaaataccgtgagcgtatcggaagctcgagcgaacttcaccaaaattggccgccaagtaagcgaaacgcgcaagtcggtcaccgttttcaagggttcaacgccctatttggtcataagccccgcccctcttgccaaggagcccaacgaggaaaccctcgaagcgttccgagagttggaggagataagaaaagatccctcgcacaggacgcacgaagacgcagatgagctcttcgctgccttagggatataaatgtatcgctccatcaactccccggcattcgagcgcgatgtcaaaaaatgcatgaagaagcactgggacatggggtctttcaaggcggctatatccgccattcttcattccgacgaggaacccatacctttgaaatacaacgaccacgctttaagcggcaacctccaaggaaaacgagagcttcacgtcaaaggacgaaccagtgactggttgatcatgtacgagatagtcgatggcgtggtcggcttcgcgcgaaccggcggtcacgacgacctcttctgagccgtcgccctagccctgcccgaactggaagccggggtacagcgtcatgccgccgtcgacgaacagggtggtgccggtcacgtagctggcctggtcggacgcgagccaggccgcggcggcggccacgtcttcgggggcgcccacgtaccccatcgggatgagccgttcggttgcggcgcgcgcttcgggatcggcgaacttctccgcgttgatgggcgtgttcatggctccgggcgcgatggcgttcacgcggatgccgcggtcggcgtactcgagcgccagcgtcttcgtcagcatgccgactcctgccttgctggccgcatagtcggcgaaatgcggccacggaatgatctcgtgcaccgacgacaggttgatgatgacgccgggcatcttgcgatccagaaagtgatcgatggcgcggcggcagcccgcgaacacgccggtcaggttcacgtcgatgacgcgctgccattcctcgatggacttccgatcggacggcgaagccacctcgatgcccgcgttgttcacccagatgtccacgccgccgaacgagaacatcgcagcgtcgaacagggcgtccacgcactcgttcttgctcacgtcggcctgcaccgcggccgccgctccgcccgcttcctcgatggctcgcaccgtttcgcgcgcgccctcttcgtcggagcggtagttcgccaccacgttcatgccctcggcgccgaagcgccgcgccatggcggcgcccagccccttcgagctgcccgtcaccaccaccgtcttgcccttgagatcgtcgtacatgggagccttctttccgcgcagggtcgtcgtatcatcccgcgaccataacgcacccggtcgcgtcccaagccgcccgagcccccgccgtcgcccgcccgtggcggacgcgttacgcttgctttgacgatgccggttcaaactacgtcgccctccctaaatcgcatggaacttgcgatgcggggcgggggttccttcgggatactggacggcgtacccgaaggaaaggaaccggcatgctcgttgaattcaaggggatgttccccgacgtggagaaagccgcgttcatcgcgccgaatgcggcgatctgcggcgacgtggcgatggacgagggcagctcggtgtggttcagcgccgtcatccgcggcgaagtggcgcccatccgcattggcaagaacagcaacgtgcaggacaacgccatgctgcacagcgactacgactgccccgtcacgctgggcgatcgcgtgtcggtgggccacaatgccatcgtgcacggcgccaccatcgaggacgatgtgaccgtgggcatgcacgccaccgtgatgaacggcgccgtgatcggtgcgggatcgatggtcgcggccggcgcgctggtgaaggagcgctccgtgatcccgccgtgctcgctggtcgtgggcgtgcccggcaaggtgatccgcacgctcgacgcccagacggtggcccgcaacatcgagcactcccaagaagcctacatagccgacgcccaagaatacgcccgcgcccgcatggtggggtaggaaacatcggggatggcgatgggattctatgccttgccggacgcaacgaatcccagtatgcctactcccacttgaagaaacgcacggcgatcacggtgcataccgcggcccacaccgccatgatcgccaccggcacgacggcctggtcgacgggcagtccgagcgacgtggctttcagcagcttcacgccctgggtgagcggcagcaggtcggccccgcgctgcacggccgtgggcatcatctcgtagggcagcgtcgtccccgacagcagcagcatggggaagtacaggaggcttgccagcacgcccgcgactttctcgttcggcgcgaggccgcccaccatcatgccgagcgccagcatagccgccagcaccaacacgtacgacccgacgaacgccggccacgacccggtgaacgcgtagccgaagaacagcgccgccaccccgaacacgagcacggccgagatcagcgcgtacacggtgtagatggccacctgcaccgccagaatggtgtgcacgctgacgggcgtcacgaagtagcgcttgagaatcttgcggtgccggtagttcgacaccacgagcggcaggcccatcgcgccgccggcgcagatgccgatggcagacaccgcgcccaccgattgcgccacgaacgtgtagctcgcgccctcgtaggcaggctgatcgccgaacatcatgccgacgaccaacatcaccaccacaggcatgatcacggcgaagatgggcatgttcatgtcgcgcagcgacaggcggaactcgactcggaacagggtgctaaaggctttcatgggcgcctccctcggagaaatgggcggttgcggcaggctcggcagcttccacggactcagcgtgttcggcaggttccgcgtacgcaaggtacgcgtcctcgaagctggcgaacggaccggacgccacagcttcggcaacggtgccttcgaagacgatgcgccccttgcgcagaatgatgacgcgatcgcacagcgcttccacctcatccatgaagtggctggtcaacacgatggtcataccctgctggcgcatctcgtccaacagattccacacgtcgcggcgggctttcacgtccagccccgtggtcagctcgtcgagaaacaccacctcaggacgcgggatgagcgccagcaccacgaacaggcgctggcgctggccgcccgacagcgactcgacggcttgcttgcgcacctcggtcaggctgaatcgcgcgagcagcttcgccgggtcgtcggcttcgcgatacagcgcgcgcgttgcgcggcacagctcgtccaccgtaatcttgtcctggtagcgcgcttcttggaactgcacgcccacccgctggaacagctccttgcgccgggttcgcggatccaagcccaagatcgtgacgctccccgcgtcggggcaactcacgcccagcaggcattccagcgtcgtggtcttccccgctccgttcgcacccagcagcccgaacgtctcgccgatggccacgtcgaagccgatcccgtccaccgcaggcacgcctccgtacgttttcaccagatcacgtacgtgtacaacgtcgttcatacgtcctcctatctttcggtcgccgaagatactagaagacgcgccaactctggtggcaaagtggagggtttgttcaggcgagttttttcatgcgctcgagcagctcgatcatctcgaaggcgttgcgctccgccgcatcgagcgacgtcagcaaacgatcgcataccgacaggatgtcatcgtcgggatcgggatggtccagcacgtgtccgatgtcggcggtcgcatcgcggtcaagcgcgtcgagcagccgcaggatggcggccagcgaatagttcgcggcacgcagcgcgcggatgatggccaggcggtcgaggtcggcggcgctgtacacgcgatagccgttctgcttgcgcttgacctgcaacaggccgttcatctcccaattgcgcagcgcatcgatggtggtgtccagctggtcagccgcctccttgcgcgtcagcataagccgttcggcgcgtgcggaaccgtcagagcgcgagagcagatcgcgcacgtggcgcagggcatcctcggcggcacaacgctcgcgccgcaggtggtcgatacgctgccgagccagcgagatcgcctcgtcgtagcgctggctcgccatcgtttcgacgatggcgagcacctcccggcgcagaccgttctgcaccagctcgacgttgagcgcagcgcgcacgagccgcacctgcagcagatgcaggtccgtgaacacgcgatagccgttcgcaaggcgctcgggcgcggtgatgaacccgatgcgctcgtagaggcgcaccgtgttcgggtggatgccgacggcgctcgcgatgcgcgaggtggtgtaagtgcgaggctggtccatgcgccgagtatagccgacgagcgccgctcgcggacgctcgaaatcggggattccggctcgcgcacctcgcacggtatactgaacgaaccgcgttttcgcgctcgtttcgaggaggcacccatgacgcacctgcccgctccccatcggataacccgccgatcgttctgcacgctgtccgccgttgcgctggcctcgctcgcgcttcccgcccgccgcgcgttcggcgatgaagcggcaaccgccgccactgcgacgcagcccggcgccatcgtcatcgtgcacacgaacgacgtgcactgcgccgtggacgacaacctgggatacgcgaagctcgtcaactacgcaaaaaccatgcgctcgacctacggcgcggacaacgtgacgcttgtggacgcgggcgatgccgtgcagggcaaggccatgggcacgctgaccgacggcgagtacctcgtcgacatcatgaacgagtgcggctacgacttcgccatccccggcaaccacgagttcgactacgggatggcccagttcaacacgctagtcgcccgcgcgaacgcgaagtacctgtcctgcaacttcaccgacctgcgcacgggcaacctcatgttcgacgcgtacgccatgcgcgaatacggcacgggcgccgacactaaaaaggtcgcgttcctgggcatctgcacgcccgagtcgctgacgaagtcctcccccgcccacttccaggaaggcggaacctaccgttacggcttttgcgaggacgactccggcgcgaagctgtacgacgccgtgcagcgcgccgtcgaccaagcgcgcgccgacggtgccgactacgtggtggcgctggcgcacctgggccaaggcggcgtgaccccgcgctggaccagcgcggccgtggcggcgaacacgagcggcatcgacgtgatcatcgacggccattcgcacgagctgtacgttcagaccccgctcaacaagaacggccaaccggtgctggtcacgcagacgggcacccagctggtgggcatcggccaggtggtcatcaaccccgcgaccggaaccatcgccgcctacgcgtcggacggcaccgaaaccgtcaccgcatccacgacgaacggcaccgccagcatcatcaaggcttgggacggcgtcgatgccgacacggccgcctgcatcgcagggctgcaagcggatctcgcgaagatcaccgggcgcgtcatcgggcgctcggacgtgcgcttggtcgccctcgaggacgacgactacacctgggccgttcgcgcgcacgagacgaacctcggcgacttcgtggccgatgcgtacctcgcgctggcatggcatggcggcatcatggccgatatcggactcgtgaacggcggcggcatccgcgcgaacatcgagccgggcgacgtgacgtacggcaacctcatcgacgtgcaaccgttcaacaaccagctggcctacgtggacaccctcggccagaacatcctcgacgccctcgaagtgggcgcgtcgaagctgcccgagcccagcggaggattgcagcatgcggcgggcctcacgtacaccgtgcgcacggacattccgtcgtcggtgcagatgccgggcggcaaattcggcggcgtggcgggcgagtaccgcgtccgcaacgtgctggtgaacggcgagcccctcgacgtgaaccggcgctacaagctggtgtcgcacacgttcctgctggtggacggtggcgacggcctcaccatgttcatgaacgacgaagccgtgctgctggatttggacaacaaggcgctcatcgagtacatccagtacgatttgaagggaacgatcggcggcgaatacgccgatccggacggccaagggcgcatcgtgatcaagggcgggtccgaccccgagcctacgccgctacccacgcccgagccgaccgacgagcccgtcgaggagcccgccgcccccggcggcaagccgctggcgagcaccggcgatcccttcggcgtcgcagtcgttggagccgccgcggtcgccacagtcgcaggagccgtcgccgtaagcgccggcgcaagcgcgcgccgctagccgctcaggatgacagacgggagcgaagcgacccgtctatgcgtccgcaggacgcataatgcgcgccccggttggcgtagtaagacagcgagggccgctgcggtgcctcgcattcgtgggatcgcggaggcgaagcgcgccccgcaggaagtccccgtaggggatactgtggtacgcgagcttccgggatcgcgcgaagacggggtgccgcagcggaccgcagcgtcgagctgttccggcggctggcaagccgccggaaccaagttacgccatcagcttggtcaccgcgttcgcatacgctaccggatcctcgatgggcaggccctcaaccagcagcgcctggttgtacagcagctcggcgtacagcttcaccttgtcggcgtcgccggcttcctgcgcggcacgcagcacgtcgaacaccgcgtgcttcgcgttcacttccagcacgcgctcggacttaatgccctcgccgccgtcgggcatctgtgccatgatgcgctccatctccagcgacaccggaccggccgcggtgatgcaagcgggagcatcggtcaggcgtgacgacaccgccaccttcatcaccgagtcgcccagcgcgtccttcatagcggcgaacagggcctcgttgtccttcgtcgtctcctcggcttccttcttctcctcttcggaggccaggtcgaggtcgcccgacgccacgttcttcagctcgaacggctccggcgcatcctcgccgtcggccgcgggcgcaccgtacgtcatcatcgactggaagcagaactcgtccacgtccttcgtgcacagcagcacgtcgtagcccttccccagcaccgtcttcacgatgggcatcttggccaggcgctcgacgctctcgccggcggcgtagtagatggccttctggtcggccggcgcggcctccaggtactcgtccagcgtgaccagcttctcctgcttggccgagtagaacagcagcaggtcggccagctggtccttcagcatgccgtagctgttgtagatgccgaactccaggccgcgaccgaagttctcgaagaacttctcgtactcctcgcgatcgttgtcgcgcatcttcttcagctcggacgtgatcttcttctcgatcttcttcgcgatggcgcgcagctggctgttgtgctgcagcgtctcgcggctgatgttcagctgcaggtcctggctgtccaccacgccgcgcacgaagttgaagtggtcgggcagcagctcctcgcacttctccatgatcaggacgttggagctgtacagcgccaggcccttcttgaagtccttgctgtacaggtcgtacggcgcgcggccggggatgaacagcagcgcgtcgtagctgagcgcgccctcggcgtggatgctgaacgtgcgcgccgggtcggtgaagtcgtggaagtcggtcttgtagaactcgttgtactcctcgtcggtgacctcggacttgctgcgcttccagatggggatcatcgagttgatggtctcgacctcggtgtaatcctcgtactcgggtttgtagtcgtcgccggcgtcctcgggcttgggcagctcgcgcgtcttcgacacttccatctgcacggggtagcgcacgtagttgctgtagcgcttgatgaggttccgcaagccgaactcgctgaggaacgtgtcgtagttgtcgtcgtcggtgttgtccttcagcgtgaggatgacgtcggtgccgtggccctcgcgctgggcctcctcgatggtgtagccctccacgccgtcgctttcccaggcccaggcctcgtcgctgccgtacgccttcgacacgacgtgcaccttcgacgccaccatgaacgcggagtagaagcccacgccgaactggccgatgatgtccacgtcgtcgccctgggcctcggcgttgtcggctttgaactccatgctgtcggagtgcgcgatggtgcccaggttgcggtcgagctcgtccttcgtcatgcccaggccgctgtccgacacggtgacggtgcgcgcgtccttgtcg

SEQ ID NO: 9037 - DNA, 742 bp, Unknown
  gut microbiota DNA sequence
gtcggcgttgtcggccttgaactccatgctgtcggagtgcgcgatggtgcccagattgcggtcgagctcgtccttcgtcatgcccaggccgctgtccgacacggtgacggtgcgcgcgtccttgtcgaacgccacgcggatgcccagctcgtccttgctcagctggatgtccttgtcggtgaggctgcggaagtacagcttgtccaccgcgtccgacgcgttcgagatgagctcgcgcaggaagatctcgcggttcgtgtagatggagttgatcatgaggtcgagcagcttcttgctctcggttttgaacttgcgcatagttggcgtcgctctccttttcgtacctgccggtctgcccgtttagcagtctcggacttcgagtgctaaacgggattttagtacgacgccgtgcgatgtcaagcgggacgaaccccgattgcagaacacgcgcacacgagaagcgaccgccctgccgcagcccgcatgcgcagagttgggcgcgaaacggcgcctatgacaatttcgagggcgcattgtgtatgctatgcgccctcaagaaacggaaaccccaggtggtgaaaatgtcgtaagccttccaaggcccgtcgatgctttcgaaattgtcatgggtgccgtttcgcgcccaataaaccggcggccccgcctcgcgctacactccctgcaggcaggtgtccatcgcgtagcgcagcacgtcggagcggttgacggtgcccacgatcgc

SEQ ID NO: 9038 - DNA, 214 bp, Unknown
  gut microbiota DNA sequence
gcatggccgatgacgacatcctggccctggtccaagcccggctggcccagaaaagcctgacgcgggcgtaggggatgcgcgctgggcgggcgctgtaccctcttgggcgcgagcctttgcttgtggacgaagaaacttgtgccgcggcgattcgcgatgcccgcgatatgcgaccggtgcggtgttcggcgcgcgcatcggcgcgtctctgtcg

SEQ ID NO: 9039 - DNA, 695 bp, Unknown
  gut microbiota DNA sequence
aaccaccccatcgcgctgtcggtgaagcaggcgtactcggggcccatcgaccagcagcgcatcgacgacgtgcaggagcagagcggccacggcgtgcgcgcgaagatcgacgagcacgtagtgctggtgggcaacgacaagctgatgagcgaatgcggcgtgggctgccacgagtgcgagctgaccggcaccatcctgcacgtgtcgcttgacggcgagtacatcgggcacatcgtcatcgccgacgtcgtcaagcccgacgcggctgaggccgttgccgcgctgcgggccgcaggcgtgaagaaaaccgtcatgctgacgggcgaccgcgccgacgtggcagcagccgtggcgaaggagctgggcatcgacgagttccgcgcgcagctgctgccgcaggataaggtcgccgaagtagagaagctgctggaggagacgcacgagaggggctccggcaagggcaagctcgcgttcgtgggcgacggcatcaacgacgcgcccgtgctgacgcgcgccgacatcggcatcgccatgggcgcgatgggctcggacgcggccatcgaggcggccgacgtggtgctcatggacgacaagccgtccaacatcgcccgcgctatcggcatcgcccgcaagaccatgggcatcgtgtggcagaacatcgtgttcgccctcggcatcaagttcctcgtgctggt

SEQ ID NO: 9040 - DNA, 317 bp, Unknown
  gut microbiota DNA sequence
ttaccggttcgtcaacggacgcacacctgcgtgcggcgccgccgtacgacaattatgcggacggcgaaaggggcggcatggcgaaatcggtgggcacgcaggatagggagttgcgcaagcggcgcatggctgtggcggcggcgctgcttgcgttcgccggcatcgtcggggtgttggcgctgctgttcggccgcgacgcgctggctttcctgaccgacggacatcgcgtgcagcagcaggtggagcgcttggggccgcttgcgcccgtggtgttcggcctgctggtcgttctgcaagaggtgacggtgatcgttccc

SEQ ID NO: 9041 - DNA, 240 bp, Unknown
  gut microbiota DNA sequence
agcatgtacttggagttcacggcgttcgtcatgaacgatttgctgccgttcaggtacaccttgccgtcgcggcgctggtacgtgctggccagcgacgagctgtcggagcccgcgcccggctcggtgaagcccagcacgaaaccgggcttgcctgccatgacctcggcgaagcactgctcctgctgttcgggcgtgccgtactccgtcatgtccttgagcgcgcacaggttgccgtacacg

SEQ ID NO: 9042 - DNA, 331 bp, Unknown
  gut microbiota DNA sequence
acaggccggccgcaaccagcaaatcccccatgacccctaatccttcttcttgaacttgatcctgatgggcgtgcccacgagctcgaagttctcgcgcaagcggttctcgaggtagcgctcgaagttgtcgtccacgaggtccgggcggttcgcgaagaacgtgaactgcggcggacacgtagccgtctgcgtgacgtacttcatgcgcagcaccgccttgcccttgctcaccgtgtgtccgaactctcggatgcctgcaagccacgtgttcaggcggttcgtggggatggtctgactgtagttctcataggccgcgttcacggcgtcccag

SEQ ID NO: 9043 - DNA, 161 bp, Unknown
  gut microbiota DNA sequence
gaggccatgacgtcggtctcgcgcgcgggcatcacagcctcgactccctcgacgtggcgcagcgccgcgatgtcgtcgtcggtgaggccgagggtcgaaagcacgcggatgtccatgagcgacgtgccgtcgaagtactcgtcggccgccagcttcatatc

SEQ ID NO: 9044 - DNA, 8648 bp, Unknown
  gut microbiota DNA sequence
tggagcgggtgacgggaatcgaacccgcgtcatgagcttggaaggctcaggttctaccattgaaccacacccgcgttttgcgcggcgactattgtaccgcaagttcgcccgatgcgagcgaaattatccgagaagaaccacgaggtgcccatgacctcccctttggacgactacaaccgcaagcgcaacttcgaccggacggccgagccgcccggcaccgcagcgccgcgcgacgacggcgccgccggcgggtgcgacgggcgcctgcgcttcgcggtgcagcaccacctggcctcgcgcgaccactacgacctgcgcctcgaatggaacgggacgctgctgagctgggccgttcccaaaggtccttcgtacaacccccgcgataagaggctggccgtgcgcgtggaggaccatccgctggactaccgcaccttcgagggcaccatcccgcagggcgaatacggcggcggcaccgtcatgctgtgggacgaaggctggtgggagccgcttgtggacgtggagcaggggttgcgcgagggcgacctgaaattcgcgctgcacgggcatcgcctgaaaggagcctgggtgctcgtgcatatgaagccgaagaagggcgagcgcgacgtgaactggctgctcatcaaggagaaggacgactacgtgcgcgcggatgccggcatcgatgggttcgaaacgtccgtgcgaaccgggcgcaccatggacgagatcgcgcgcggggaagacgaggcgttcgccgcgaaccccttcgaccacgtggacgtcgagctggccaagctggtgagctcgacgccgcccggcgacaactggctgttcgaggtgaagtacgacggctaccgcatcgtcgcatacgtcgaaggcggccgggcgcgcctcgtcacgcgcaacggcaacgactacacccgccactttcccgccatcgcgcgctccctggaagactgggcggcgggacgagcgatggtgctcgacggcgagctcgtggtaaccgacgaggccggaaagaccgatttccaggcgctgcagaacttcctgcgcgacccttcgggcaagcaccccgcctacgtggcgttcgacctgctggcgttcgagggagacgatctgcgcgaccggccgctcgccgagcgcaaggagctgctggagtcgctgatgagcgacgcgcccgacaacctgcgctacagcgtgcacgtgcgcggcaacggtgcggacagcttccgcgccgcctgcaagcagcatctcgaaggcgtggtgggcaagcgggccgattcgccgtaccgcggcgttcgcaacggagactggatcaagctgaaatgcggaaacgagcgggaattcgtcgtcggcggatacacgcagtccgccaagcgcgtgcgcgggatcagctcgctcttgctggggcagtacgaggacggccggctcgcgtacgtcggacgcgtgggctcgggattgagcgaagcgacctcgcgcgagctgctggccgcgttcgaaggcctcgagcgaccggacgcgcctttcgccgacgcgccgaagccgcgcccgggcgagcgcgtcgtatggctggacccccaaacgatcgtgcaggtgaaattcgccgaatggaccgaggacggcctgctgcgacaccccagctaccagggcatccgcaccgacaaagacccgcgcgacgtgcaacgggaacccgcatcggaacctgacgagcaaacccccgaccgattggagcgccccatgaattccgacaacgagaagaacggcgagctgcgcatcgacggcgttcgcatcacgaaccccggcaagctgttgttcgaagacccacccatcacgaaggaggacgtggtgcgctactacgccagcatggccgaccgcatgctgccctacgcgtccggccgcatcctcagcatcgtgcgatgcccgcgcggcgcggattcggcctgcttcttcaagaagcatcccgggccttccaccccgggcgtgcgcaccgtggacatccccacgagcagcggcgacgaggagccgtacttctacgtggaggatgccgtcgggctcgtgtcggaagcgcagatggacacgttggagttccatctctggggcagccgggtggacacgctcgaacagcccgacatgatggtattcgacctcgaccccgacaaggggctcggcctcgagcaggtgcggcgcggcgtgcgagacctgaagggcatcctcgacgagctggggctgaagtcgtttctcaagacgagcggcggcaagggctaccatgtggtgctaccgtttcagccggcagcttcctgggacgcgttccacgacttcgcgcggcgcacagcccaggtgatggccgagaagtggcccgaccgctacacgagcaacgtgcgcctggcgaagcgcaccggcaaggtgttcatcgactggatgcgcaacgggcgcggcgccacgagcatcgccccgtactccctgcgcgcccgcagcggcgcgcgcgtatcgatgccgctcagctgggaagagctggacgaggcggcgcccgacgccttcacgatgcacgacgcgctcgcgcgcatcgagggcgacgacccgtgggacggctacttcgacgtcgaccaggcactcgagtagcgaggggctacacgcgcagcgagccgcggaagccgcgcgaagcgtagtaggactcggcgccgttgtggaaggtgaacacgcggttgaagcggcgatcgcagaacagcgcgccgcccagcgcgcgcacctcgacgggcgtttcgatccagctcgacgtcttgacgtcgaactcccccagttcctgcagcgcgcgatactgcgcctcggtcaaaagcgcgatgcccatcgcggcagccgcgtcgacggcgttgccctcgggcttgttgcgcttgcgcgcctcccaagccgcacggtcgtagcacaggttcctgcggcctgccgggctttcgggagcgcaatcgtagaacacgtaggcatctgccgcgtgatcgtaggcgaccacatcgggctgtcctcccgtcttctccatcgcgaagagcgagcgcagcttgccgtcgtccgcttccagcttcgcccgcacgttctcccaggcgatacccggatgaaggcgctcgttgcgttcgaagcgcgcttgcagcgtgtccaacaacgcggtgcgttgctggacggtgagagtgttcgcggtttccatggcagatccttcgatcgcgggcgagtgtttccgccaatagtagagcgacagcccacttccggaagcacagcgtgtgcaatgcgcagcaagccgttaccggacggccatcccgcctgcatgggcttgaggtccctcaaggctgtcgagtatccatgcgaggcagctggcgcggccggcatccctcttggcaccgaagtacggcggagatcaggttgcccgcgcatgattcggagatgttcttcggctgagttctgctatactaactcctgccgttttcgcgtcgggatgtggcgcagtttggtagcgcgcctgctttgggagcaggatgtcgcaggttcgaatcctgtcatcccgaccattttccctcatgcacgcttttgacaagcgaaatcgcttctattggttgcagatggttgacaaaagcgtgcatcaagcagcaattcacgcaacttcttcaaacgttcgccccgctttcacctgcaacgcgggacgcgagccgcttcgaggatcgaacgcaagcgctcgggccgcatgagatcgtcccagccgatgcgcacgaaccgaaacccgagattccctatggcattttgccgctgtcgctctctttccaaaatttcggcataatcctgccggtacttcagcttgccgtcgaagtcgatgacgatggagccgttgtctccaagccgcctgcattggagaaagcgcccgaacctgctatcgcttcgatagaggctcttctgtacggcttcagaaggccaaagcccgtcgacgcgaccaagatgcctcccgttcgaagggtcgagaatgttgacctgcagataaggaatttcgaagccaagttcggcgcaacgggcgatcagcaacgactcagccggcgattcgacctggtcggtaaagtacagccctgcctgcaacgcgctgcgcactccgcgttttcttccattggcgaagcagagctgcgcgaaggcgagccacagaagctcggcttccggcgaaacgaatccggtcacgcgcgcagcgctgtagttagcaaggaattcaggttcttccatgtcgagcatgcggatatcgaacgcagagcggctgctcgcttccccgctcccggaggttgcaggctcccatacgagcgcttcggtcgtactctcgtcaatatccctgcatgccacaagaccgccctgcgctttcgcggaagaacgacgcaacagataattcgcagccaaaagcgcatccggcaaaggagaggtcgaggcgcactcgaaaagcgtttgcgctaccgggttcgatggcgtctcaagcgaagcctcgtgaaaagcgcagccgtcctgcttgctcttagcgtggcttcgagcgccgccgaaatgcaaaggcgctccgccgaggaccggcgcgccctcaagagcggctgcggtgatcccccacgctcgaagcttcgcatgcgtcgcaagaaacgcctgggcacgagcccggtatcttccagagatatcgagcgccgcgtactcctgcgcgtccatgtacgcgccacggaacaggcgcacgagacgatgcttttccgcctgctgtcgaagagcttgcctgctcatgctcgaattcgaatgcgtgatgataccgggcacgttgcctcttctcgtagtggcgaaagctgatcatgcagctgatgcacgcttttgacaagcaatcacgcgcttttcaggcggtttcgcttgtcaaaagcgtgcatcaacgtaacattgccgacgcagcctcaccgctcgccctgcgcgagcttcgcgcgcagctgacggagggcgttgccgcgatgggacacggcgttcttctcttcgggcaaggcctcggccagggtgcggccgtcttcgaacatgtcaggaaggaacagcgggtcgtatccgaagccgtgacgccctcgctcctcgcggccgatgcgtccctctatcgtgccgcgcgcgaccgtttcggttccgtcctcgtcgatgaacacgagcgtgcacacgaagcgacccgtgcgcttctcgtcgggtacgtcggccaattcagcaagcagcttggcgttgttcgccgcgtcgtcgcacggctcgcccgcgtagcgcgccgagtgcacgccgggcgctccgtcgagcgcgtccacggcaagccccgagtcgtccgcgagcacggccaagccgccgctggccgcacgggcggcctgcgccttgatgcgcgcgttgccctcgaacgaatcggcgtcctcggccggatcagagtccagccccagctcgcgcagcgtgcggaactcccaaccggggaacgcgagcgccgtggcgatctcctcggccttgtgcgcgttgttgctggcgatgacgatggtcttcatacggtgaagctccttctccttgaacggttgcgctacgaagggaacgcgacgcgtcccacccggtcgatgtcggtacggaacacgcgcgcgccgaagctgcggaattcctccacgtcctcccccgtcgtgtagaagtcgtagctcggctcgtgatcttccgaggccagcgcgccgcggcgcgaaaggatgtgcgccacgtcgtgagccgcctcctgcgccgacgagatcagcgtgacatcgcgtcccaccacgccgccgatgagcgccttgagcagcgggaagtgcgtgcaccccagcacgagcgtgtcgatgtcgcagcggcgcagcggctcgaggtactcgcgggcgatctcctggaacgccggacggatgtacacggtggacacgagggaggtgaaatcctcgatggggccctcggccatgcgcaggccctgctcggctatctccacgaaacgcggcgtggccgtggagaacacggtgatgccggcatcgagatggcggatggccttggtataggcgtccgactccaccgtggccttcgtggcgatcacgcccacgcggcggttcttcgtggcatgggccgcagcgcgggcgcccggctccaccacgccgatgaccggcacgggaaacgtccgctgcgcatgcgacaggccggccgccgtggccgtgttgcacgcgatgacgacgagcttcaccccgcgctcgaccagccacgcgccgatctgctgcacgaagccgtcgacctcgtccaagctgcgcggcccgtaggggcagcgtgccgaatctcccaggtagacgatggattcgcgcggtagctccttggcgatctcgcgcgccacggtaaggccgccgaaccccgagtcgaacacgccgatgggcgcgttgtcgaagcgcggcgcatccgcgccttcgagcggctctatcgttgtctcgttggtatccatcgccccagtataccgcagggttcgttcgttgtttgcaatcgataccggccggtcatagtttctgctaacctggttcacgagcgaaagaagcaagacgagaaacgaggcgaggctcatgaaagttctgctggtcaacgggagtccgaacgagaagcgctgcacctacaccgcgctgtccgaagtagccggcgcgctggaagcacaaggcgtcgacaccgagatcgcctggatcgggcgcgaccccgttcgcggctgcctgggctgcggcggttgctccaagcgcggcgacaaccgctgcatcttcgacgacgacgtggcgaacgggctcatcgagaaggcagtggaagccgacggcctcgtcgtcggcacgccggtgttctacgcgggagcgaacggtgccctgctggccgtgctcgaccgcctgttctacgccgcctcggcacggctgcgcttcaagcccgctgccgccgtcgcctccgcgcgccgcgccggcactacgcccgccatcgaccagatcaacaagtattttcagatcaactgcatgccggtggtatcgtccaactactggcccatggtgcacggccgaagcgtcgaagacgtacggcaggatgccgagggtctgcagatcatgcgcgtgctgggcacgaacatggcctggatgttgcaggcgacgtccgctgtgcctgcgccgaacgtcgagcagaagatcacgacgagcttcatccgctagcgcgaacgcgagaaagccatgtccaaagaacacgaccgcaagacgaacgccatgcgcgtgctcgatgcggcgggaacgccgtacgaagcgcgcttcttcgactgccccgaggccgtctcgggcgtggaagtggcgcgcatactggaactcgatccggacaccgtgttcaagacgctggtcacgcgcggcaaatcgggcgagcattacgtgttcatgatccccgtagcctgcgagctggatctcaagaaggcggcaaacgtcgtgaacgaaaaagccgtggcgatgatccgctcgcgcgagctgctgcccttgaccggctacgaacacgggggctgctcgcctctcggcatgaaaaaggccttccccaccgccatcgacgagacatgccagctgcatgagcgcatcgcattctcgggcggccgcatcggatgccagatcgagatgacgcctgacgacctggcgcgcgcggtgcccctcgccgtggccgatctcaccgtggtgtgaaaacgcctgaacgctaatcattcctattcgcgacgaaaaacgggcccgctcgatgcgagcccgttgcgtaggatcggagcgctgctttaccagtgcgacacaaccgtgtcgcccgacgacagcatgccgtagagctcggctgccttcgacggcggcaggttcacgcagccatggctgcctgcgccgtcggcgtacagcgttccgccaaacgcaggctgccaatcggcgtcgtggaacccaatgtagttaccaacgaacggcatccagtactgcacctcggtctcgtagatcttctcgttgccgttgtagccgattaacttcgacggactctgcttggcgttcaccatgtagacgcccgtcggcgtgtcgtgctcgccgtcaggcttgccggtgatgatgtcggattcccagataacggcacccgacgcgtcgtacaagcgcgcatgctgctcggacaggtcgacgtccatgtaacgagcgccccaatcccggctgcccgcgccgttgtacgcgtcgcccgtctgcgtgcacgggatgtccaccgtgttcgcggcgccgttcgccacgccgtccttcaccaaggcgagcaaggcgtccttgtccacttcccacccgtacgtgccgccggccaccgtgaccaccttgccgtcagaccgtgtgtaggtgcgctgcgtgccgacggtgttgcagacggccgccagctcgtcgacccaagccgtcagcgcgccttcatcgagcgtgaccgccagctcgtcgtcgagcgaaacccattgggagatcaggctcgcgtccacggttccggcgaccgtaccggccatgagcagctcaagatcggctttgatcatggtgttcgccgagtcagccgccgaggtgagcttcgggtcggtggacagcaccgtcggcttcaacagctgctcggaggtcagcttcacc

SEQ ID NO: 9045 - DNA, 965 bp, Unknown
  gut microbiota DNA sequence
acgactggtacaaggagtacggcaccaccatcgtgaaccagatcaagggcatgggctgctcgtgcgactacgccgacgagcacttcacgctggagccggcctacgtgaaggccgtgcgcaagctgttcgtggactggtaccacgacgacctcatctacaagggcaagcgcatcgtgaactggtgcccccactgcacgacgtccatctccgacgacgaggccgagtacgtggacgaggcggggcacctgtggtacctgcgctacccgctgaccgagcccgaggacggcctggagtacctcgtggtggccacgacgcgccccgagacgatgctcggcgacacgggcgtggcggtgaacccgaaggacgagcgcttcaagcacctcgtgggcaagacggtgaaactgccgctcgtcgaccgcgagatccccatcttcgccgactggcacgtggacagggagttcggtaccggctgcgtgaagaccacgcccgcgcacgacccgaacgactgggcgatgggcgagcgcaacggcctcgagcgcatcaatatcttcgacgagaccgcgcacgtggtggacggcttcggcgcgttcagcggcatggaccgcgacgaggcccgcgaagccgtcgtggccgcgttcgacgagctgggcttgctggagaaggtggaggaccacgaccactccgtcatgacgtgctaccgctgccacacgaagctcgagccctgggagtccgagcagtggttcgtggccgtggacggcctcaagcaggacgcggcgcgcgtggtggaggacggctccatccagttccaccccgagcgctggaagcaggtgtacctcgactggctggacaacctcaaggactggtgcatctcgcgccagctgtggtggggccaccgcatccccatgttctactgcgacgagtgcggctgggaggacgcgtcggtggaggacgtcgagacgtgcccc

SEQ ID NO: 9046 - DNA, 1234 bp, Unknown
  gut microbiota DNA sequence
cggcgctgtccgccctctacctgtgcgcggcgctgcccgccgtcagcgccgtcgtctgcccggtgatcaagcagtaggggcaggcgggctcgcggcggtcgtgcgggcgaggtcggctttcgtcgtgtcgtcgggcaggcccgcttgcggcatgtcgagcgtgccggccttctcgcgacggtgcaggtcccacagcatgaaagcggccgccacgatgaacgcgctgccgccgaggatgccgacgggcatgggtcccacgaacgggttgccgcctgtgaccgagaacatgattcccgcgctgacgaaaccgttgatagcgccatggcctacggctgccgccagacagctgcccgtgcgcacggtgacgtacgtgaggaagatgcccagcacgatgcagaacacgcacatggcggcgatgccggcgaacggccaacccgggtaccctacgccgtaattgtgcccgatgatggtgagcggcgcgtgccaaaggccccagatcacgccggtgaccagcagcgtgggcacgatgcgcatgcgcgtggccatcttcagcaccaggtagccgcgccatccccattcttcgccgaacgtggtgaagatgttgagcacgggagctatcagcacggcggagaacagctggacgatcatcatcgttcgcagctggtcgacggggatgccttcgacgcccgccgccgctgccgcttgctgctgcgtggcgacgatcgtggacatgccgggatcgaagtcctgcggaaacgcgacgaagtacgcagcggcgccgatggccatcaggatcgcgggcccgagccaggccacggcgaaccagggagcggacttcctgaaccgcttgggcttgatgacgctgtttttgaagccttcgcgtgtgacgaggcgcgtgatgagcacgccgatggcggggaagaacatggctgcccccgtgacgagctgcgcagcgatgggcggtatgtccgtcaaggccccggtcgagacggggtagaccaccccgaactcgtacgcccacgtcaacccgaacgtgactgctaggaagacaacgattcgcttcatggcgactccctttcttcgactgatgcaacgaacgaatgtttcacgtgaaacatcgactcgcagattcgttcgcctcgctgctttccggcaaacgccccttgcatctttgttccatctgttatagcataaatataacaaacaaccgcgggaaggtcaacaaccgcgaacg

SEQ ID NO: 9047 - DNA, 4347 bp, Unknown
  gut microbiota DNA sequence
ccccccccctgcgtgcgggcaagttcccgacttatgcgtacctctgccatcgaaaacgcccaaaaagcaccatgtacgcgacttatgtgcacctcggaagcggcctgcgcgatcgaagtatttcatagctaacttttgaccaggctttttattgggcgacgctttgccgcttcgtctgaaaaggccgtttcggcgtggcagaggtgcgcataagtcatggacagaggagatttctccggttttcgttgcaggcgctccgtttgacggggtgccgccacgttcgcgttcggccgatcatcgtaggcaggatcaaacaatggcgcttcgtcttcgaaagcgccggctaccgcttcgacgccgagtcgggccgcgtgctgtgcttctgctgcgatccggaacgcttctggaaatatgtcggccgatgaggaaaggcgagtagcgggagggtggcaaggcggcaacgctcagctgcggcctcttgcgcactcgcgcgcttcatgggatcgtggtcgttgcgacagggacgcggccgcgatatgcgcgccggtcgaccgcggcatcctcggactgcgctcctgccgcatcatccgaaagcaacgccctcggctccgaagagccgagggcgttttcatgcgagaggaagcgtgcccttatcgcacgaacaggctgaggaagcgcacgagcaggctcggcttcttcgcaccgcgcgttgcgggcggggctgccaccatgccctgctcggcgcacgggcgctcgccgacaggaggttcgatggcgtcggcttcgagtgccggggcggtggcagagccgaccggaatagcgggcgcggttgcgggcgcgatccgggacgatgcggccacggatgcctgaacggcggcttccgcagccgcttccgcctcgcgcgcggccgcagccgcagcgcgttcctccgcgcggatgctcgcctcgtcctcggtcatctcgtgtgccgccatcagctgggccgagcgtcgccgagcagcatcgcgcgccgcttcgtcctcggctgcttccaggcggcgctgctgcgcgcgcttgatgaagaactcctgcgattcgaacagcacggtctcgccgtcggcgtcttctttcgcgaacgcgccgagcggcgtgtagctgccatcgggcatgagctcacgcagtttggcggtgtcgctcaggctcacgtcgaggtatccgaggatctgctcgcgcagttcgctgtcgaggacgggccaggctatctcgatgcgcttgtccatgttgcgcgtcatgaggtcggcgctagacaggtacaccttcatattgtcgcgcgggccgaagccgtagatgcggctgtgctccagcaggcgccccacgatggacacgacgcgcacgtgctcggtgtagccttccagccccggcacgatgcacgagatgccgcgcacgaacagcgtcacgttcacgccggcctgcgacgcctccacgatcttctcgatcacgtccttgtcggtgatggagttcgttttgaagaacagcccgcacggctcgccggctttcttgcgttcgatctgcgcgtcgatcccagcgaggatcatcggcttgatctgcaacggcgccacccacatgatgtcgtagttgtcggaggtgttctcgagccccatgttgcggaagaactcggttgcgtctcgcccgaacgtctcgtcggtggtgatgaacgacagatcggtgtacagcttcgccgtcttctcgttgtagttgccggtgcccagctgggtgatgtgctgcagcccctggtcggtttgacgcgtgatgcagcatatcttcgagtgcaccttgaagtcgcggaagccgtagatgacgttgcatcccgcctgttcgaagcgctgcgaccattcgatgttgttgctctcgtcgaagcgggcgcgcagctcgaacagcgcggtcacctccttgccgttctcggctgccgcgatgagcgcctcggctagatgcgattggctggccaggcggtacagcgtgatcttgatggagatgacggtggggtcgttcgcagcctcgcgcagaagctgcacgaaggcgtccatgctctcgtacgggtacgatagcagcacttccttctcggccacctggtcgatgatgcgacggttgcggtcgaggcagccgggccactgcggcgtgaacggtacgttcgtcagctccgcgcgcgcggcctcgggcagatggccggccaggccccacgtatagctcatgtcgagcggcaccttcgtgacgtaagcttggtgcggcttgaggttcaggcgcttgagcagcagcttctccagggtgggcgacagcggccgttcgctttcgaggcgtaccggcgccaggcgcgagcgcttcttcaagatgcgcttcatgtgctcgcgatagtcctcgtcgctctcgtcggtgccttcggtggcgtcgaggtcggcgttgcgggtgacgcagatgacgttcgtgtgcttgatggcgtacatggagaatatctcgctcgccaccatctcgatggcgtgctccagcaggatgaactgcagtccttcgcccggcagcgcgatcacgcgctggcattggcgcggcatggggacgaggcccagcgtcacgccctcggctccgaggttcttccccttctcctccttgggcgccttttcgccgtccttggtcttcgccgccttcttcttcgcgcccggctcctcgttgaggcgcagtaccacgtacagcgcgccgttctccaagtgagggaagggatggcgcgagttgatgatctgcggcgacaggaacggcatcacgttcttgtgcacgtaatcggacaggaaggcgcgctgctcgtcgtcgaggtcttcggggcgcaggctgcacacgccgcgcgcgcacagctgtttccgcacgctttcgtaggtgcgttcctggatggggtacagctcgtggcagcgcgcgtagatggcatcgagctgctcggcgggcgtcatgccggacttcgagtcgatgatgtgcttcttcactaacgacaggtcggtcaggctgccgacgcgcaccatgaagaactcctggaggttgctccagaagatggagatgaagttcaggcgctcgagcagcggcaccgtctcgtcggctccctggtcgagtacgcgctcgttgaacgtgagccatgacagctctcggttctgcaagtaggattctttgctcggctcgccctcgacggaggggtttgcgccctcgacctcgtcgattgacgcgcgcatctcgtccgcgctcgtttccgcgagagcgtccggcgcttggccggcaggagtctcggcggtgctggtcgtggatttcttggctgtgtccatgaacgtccccttcccgtaaacgttcgcttcctgcgcgccgctaccgcagcatgcggtcgatcaggtacccttcgcgcacgccgtacttgcatacgtccagacgctcggctccgcatgcgtcgaacagctcgccgaggatgatgcagcccggtaccagcgtgtgcacgcgctcggccgaagccttgagcgcggcgtgcgcgaacgtgtcgggatcggtgcggcaccatgcaagtatcgcatgaatttgctgtttcgtcatggttttcggacgtacggccgcgccggtggcttgagcatgcatcttggcggccgcgcgcacgcttccgccgatgccgtacagcgcttccgagcggtacgcgtcggggtcgggcagaccggcgaagcgcttgcggaacgcttcggctatggcgtccatctcgccgggggtcggcaggatagcgcgtacgtgctgggcgaacgatgacaacgacccttgcccgatgctcgcgttgtcgaaatcgaggctgctttcgatgcgtgtgagctcggtcgagccgccgccgatgtcgacgagcgtgccccgctctactgcgcggtcgcaggtggcgccgacgaagcccaggtgcgcctcgtcggtagccgacagcagcgagatgggcagctcggctgcctcctcgatggccgcgacggcttcctcgcagttcaaggcgttgcggatgaccgcggtggcgaacacctccatcttctcgcaatcgaagtaccgtgcgcgcttcgcatgtccgcgcagcacgctgacggctcggtcgatgccgtcctgggtgaacaccccgtccacgacgtaggccgacaagcccgccatcaccttgtcgtttatgagactcttgaaatctttgttcgtacacgtgcgcttatgcgcgtctttcacgtcgtagacgacgaggcgtatcgagttcgacccgaggtcgatcaccgcgtagttgggcatggcatagtccgtccgaaatcaagcggctcgcccggggcgatccgcgatgtgctc

SEQ ID NO: 9048 - DNA, 741 bp, Unknown
  gut microbiota DNA sequence
cttgttcgtgcacgtgcgcttatgcgcgtctttcacgtcgtagacgacgaggcgtatcgagttcgacccgaggtcgaccaccgcgtagttgggcatggcatagtccgtccgaaatcaagcggctcgcccggggcgatccgcgatgtgctccatcgcttcattgtagtgaaccgcgccggtcgcggccaggccgagcgcgaactgaaagctggattttacttttcatcgcctgcgctcgggacgacggtctggttcgctcgttcggatggcgatgggccggcccttgcaggatggcggtccggttcttcgcgatccttgtggtaccatgagcttctcgaaggaaaggaagcgccatgctggaaaccgtcgatttctcacgcgaaccgctctcgaaggacgcctacaaggcgcgtcgggacgagctgatggagcgattggtggtgctgcagcagcaggcgcgcgtgcagggcgtcggcctggtggtgctgttcgaaggatggaacggcgccggcaagggcagccgcatctccgatctcatgtaccacctcgacgcgcgcgccaccagcgtgtacgtcactgaaaacctcgacgtgaaagccgcccgcgcgttcgcgggcgcgaagagcggcgtaacgggcttctatcccgtgatgcaggagttctggaagggcctgggccagcgcggcaccatctcgttcttcgaccgcggctggtacaccgccgccgttcagcacatgctgt

SEQ ID NO: 9049 - DNA, 5144 bp, Unknown
  gut microbiota DNA sequence
gcgcgcgttcgcgggcgcgaagagcggcgtaacgggcttctatcccgtgatgcaggagttctggaagagcctgggccagcgcggcaccatctcgttcttcgaccgcggctggtacaccgccgccgttcagcacatgctgtacaccgagttcggcaagctctccctgaaagcctccaagcgcaagggccagaaagccgtcgcggccgccatggccgaggcgcgcgacgaacgccacatcgacgtgctgcgccgctacctcacctctgcgtccgatttcgagcggcagctagccgacgacggttaccttgtggtcaagttcttcgtgcacgtcacgaaggaggcgcagaagaagcgcctcacgcgcctgcatgacgatccggccacgcgctggcgcgtgggcgaggacaagctggccaccatcggcaactacgaggaggcgtaccgcctgtacgacaacctgctgaagggcagcgacttctcgttcgccccatggcatctcgtgaacggcgaggacaagcgccgcgccaacctgcagatcgccgagacgctggtgaacgcgcttacgagcgcgttcgaggcggcgcccgacgccgaagccgccgtagcggcggccaaggcgcaggccaactccgccggcgctctcgatgaagcgcccctgttcggccgttctcccgaagaggaggcgcgcgtgcgcgaggaggcggaagccgccgcagccgctgcttccgcccgcgctccgcgcgtttcgaggttccgtcaggtggacgacccgccgtgcctcgagagcgtcgaccacgcgctcgcgctcgaccccgagacgtacaaggtcgagctcaaggcccagcaggagcgcctcaacaggctggagatggagatgtaccagaagcgcatcccgctcatgatcatgtacgaaggctgggacgccgcgggcaagggcggcaacatcaagcgcgtggcccaagcgctcgacgcccgcgcctataccatttttcccagtcccgcccccacgaagcccgagctgctgcatccgcacctgtggcgctattggacgcgtctgccgaaggcgggccacgtgggcatctacgaccgcagctggtacggtcgcgtgctcgtggagcgcgtcgaaggtttcgcttcggtgtcggaatggacgcgggcgtacgacgagatcaacgaattcgagcgcgatctggtgcggtggggcgccatcctgctgaagttctgggttgacgtgagtcccgaagagcagttgcgacgctttcgcgaccgcgagcaagatcctgcgaaacagtggaagatcaccgatgaggattggcgcaaccgcgacaagtatccccagtacaaagccgcggtcgaggatatcttccgcttgaccagcacgccgttcgccccctggataatcctcgagagcgacgacaagcgctacgcgcgcgtcaaggcgctcaaaattatcaacgacgccctggaagcgcgcttgcgcgaaaactgagatcgcgttactatgggcagcagtactcgaaacgaccgtgcgcattcgcgcgcttgaacgaaaaaaaggggtaaacagtcatgactctgttcggaatcaccgtgcccatggaggctatctgggtcatcgtcgcgatcatcgtcctcgtcatcgtcggcttcatcgcgaaaggcttcatcgacgagatgaagaagtagccgcttcggcgaacagcggtccctatcgtgaaaattgcgtttttgcgaacatcgcgcccccatcatgggggcgtttgtttattatggtaacggtctggcgacggcggggttccgctgtttgaagatcatcccgaaaggtgaacatgtccgagtaccgacagcatcccggccctgctccaagcgggcgacctgcgcagcagcgcgcgccgaggggcgccgcgcccgacgtgcgggcaggggcgcaaccgggcgcctaccggccggccaccgcgcagcatgccgcctaccgctccgctcagcctgcccagcgcagatcggctggaggcggaggctacccgtatcgacagcaaccgacctatcagcagcccggttccggacggcctcggaagaagagcgggccgtggcgcgtggtgttctggatcgcgctcgtggtgttcgtcgtggcgctggccgcgctcggtgccatcggcttcagttactggcagggtcagcaaacctataacgatgtcgcgcgggagggtttcacgccgcccgacgatctgtcggccacgtcgctcgccgacttcacggtggactgggatgcgctcaaggccatcaatcccgacacggtggggtggatctacattcccggcaccgtggtgaactaccccatcgtgcaagcggccgacgacgagaagtaccttacgcacgacttcaagggatcggaaggctggatcgccacgttcggcgccatctttttggcggccgagaacagctccgacttctccgacccgaacaacatcatctacggccatcatctgaacgacggctcgatgttcgcctgcgtcgccgatttcagcgatgccgcccagttcaacgaccatcgcacggtgtacatcctcacgcctgagggcaactacgagctgagcacgttcgcgctcgtgcatgtggcggccgacgatccgttggcacagatgcggttcgccgatgaggacgaacgcgtggcctacgtgcaggacaagatcgaccgatcggtggtgcccgcttccgacatacctgctgcttccgatatcaaacacaccttcgcccttgccacgtgcgacaatctgccgtcggacgggcgttacgtgctgtattcgtacgtgaaggccagcacggtgggcgagggcgacggcgacgtcatcgaccccgatgccgtcgcggccatcgattccgcagaacaggagatcgcttcatgagcacgtccatcctgccgggcgagcgccccgaccgcctcgaagaggagtgcgccgtgttcggcgtgttcgctcccggcgaagacgtggcgcgcatgacgtgcttcggcttgcaagcgctgcagcatcgcggtcaggagagcgccggcatcgccgtgggcgacggtgcgacggtcatggtgtcgaaagacctcggccttgtgacccaggtgttcgacgaagcaagcctggccgcgctcgagggcttcgtggccgtgggccacgcgcgctactccacgagcggcggcgccgcgtcgtgggaggctgcgcagccgcacatctcggccatcgacgacgtgctgatcgcgctggcgcacaacggcacgctcgtcaacacgaacgccttgcgcgcccgtctcgtcgacgagggcgtgcagttccgttccggcaccgacagcgaggtggcggcgaaggcaatcggccgggtgacccaggaaacgcaccacttgcgcaacggcatccgccgcgctatggaggagctgtcgggcgcctacgccatggtgctggccagccccgattcgctgtacgcgttccgcgaccccaacggtatccgcccgctgtgcatcggcgagctgcccgacggccgcggctgggcggtgtccagcgagacgtgcgggctcgacatcgtgggcgcgcagtacgtgcgcgacgtcgaaccgggcgagatcgtgcgcttcaaccgcgacggcatgcacgccgagcagggcgttgccgcccgcaagtcggcggcgtgcatcttcgagtacgtgtacttcgcgcgccccgacagcgtgatcgacggccagagcgtgtaccaggcgcggcgcaacatggggcgcattctggcgcaggaggcgcccgtggaggccgacctcgtgctgggcgtgcccgactcgggcgtgccgtcggccatgggctacgcgtttgagagcggcatcccgtacgccgacggcatcgtgaagaaccgctacgtgggacgcacgttcatcgagcccacccaggccatgcgccagctgggcatccgtttgaagctgaacccgctgcgctcggtgatcgagggcaagcgcctcgtggtcatcgacgacagcatcgtgcgcggtaacaccagcaagaagctcgtgcagatgctgcgcgatgcgggcgcggccgaggtgcatctgcgcatcgtgagccccgaggtgctgtggccgtgcttttacggcatcgacaccgacacgcgcgaccagctgatcgccgcgaacatggatctggacgagatgaacgcgtggatcggctcggactcgctggccttcatctcgctcgagggcctgcgcgcctccgtgcccgatgcgcgccgccaggggttctgcgacgcatgtttcaccggcgactacccggtggccatccccgattcggtggccaagaagagcttactcacgaagaaggatttcgaagagacttacggcgaaggtgcggccgacgaggcgcgccctcgcacgcgatagcagcatgacagggggaaccgccccgacatggacgatacggcacaaggagcagagatgaccgagagagtaaccgtgaacgcagcgcagaccgacgacggcccgcacatgcccagctggatggacgaggacgcggtgacctacgcgcaggcgggcgtggacacggccgagggcgcgcgcgccgtcgaagccatcaagggcgtcgtgcacgacacgtaccgtcccgaggtggtgggcgacatcggcggcttcggcggcctgttctccatcgcggcggccaaggacatggacgatccgctgctggtcagcggcaccgacggcgtgggcacgaagctcaaggtggcccagatggccggcaagcacgacacggtgggcatcgatctggtggccatgtgcgccaacgacatcctggccaccggcgccgagccgctgttcttcctcgattacgtggccatcggcaagctgaaggccgagaacgtggccgagatcgtggcgggcatcggcgagggctgcaagcaggccggctgcgcgctcatcggcggcgagatggccgagcatcccggcgtcatggacccggacgactacgacctgtccggcttctgcgtgggcgtggtcgaccgcgcgaagatgctcgatcccgcggcggttcgcgagggcgatgtgctgatcggcctggcgtccagcggcctgcactccaacggctactcgctggcgcgcaaggtgtgcgtggagggcaagacccact

SEQ ID NO: 9050 - DNA, 860 bp, Unknown
  gut microbiota DNA sequence
ccgccgcagcatgggccgcatcctggcgcaggaggcccccgtggaggccgacctcgtgctgggcgtgcccgactcgggcgtgccgtcggccctgggctacgcgtttgagagcggcatcccgtacgccgacggcatcgtgaagaaccgctacgtggggcgcacgttcatcgagcccacccaggccatgcgccagctgggcatccgcttgaagctgaacccgctgcgctcggttatcgaggggcagcgcctcgtggtcatcgacgacagcatcgtgcgtggcaacacgtcgaagaagctcgtgcagatgctgcgcgacgcgggcgcggcggaggtgcacctgcgcatcgtgagccccgaggtgatgtggccgtgcttctacggcatcgacaccgacacgcgcgatcagctgatcgccgcgaacatggacctcggcgagatgaacgcgtggatcggttcggactcgctggccttcatctcgctcgagggcttgcgcgccgccgttcccgacgcccgccgccaggggttctgcgacgcgtgcttcaccggcgactacccggtggccatccccgacgcggtggccaagaggagcttcctgacgaagaaggatttcgacgagacgtacggcgaagacgcgacgggctaggcgcgccgcgcacgacagcagcatgacagtgggggatcgccccgacctggacgatacggcacaaggagccaagatgactgagagaattaccgtaagcgcgacgcagaccgacgacggcccgcacatgcccagctggatggacgaagacgcggtgacctacgcgcaggcgggcgtggacacggccgagggcgcgcgcgccgtcgaagccatcaagggc

SEQ ID NO: 9051 - DNA, 2713 bp, Unknown
  gut microbiota DNA sequence
ggtcagcggcaccgacggcgtgggcacgaagctcaaggtggcgcagctggccggcaagcacgacacggtgggcatcgacctcgtggccatgtgcgcgaacgacatcctcgccacgggcgccgagccgctgttcttcctcgactacgtggccatcggcaagctgaaggccgagaacgtggccgagatcgtggcgggcatcggcgagggctgcaagcaggccggttgcgcgctcatcggcggcgagatggccgagcaccccggcgtcatggatccggacgactacgacctgtccggtttctgcgtgggcgtggtcgaccgctcgaagatgctcgatcccgcgtccgtgcgcgagggcgacgtgctgatcggcttggcgtccagcggcctgcactccaacggctactcgctggcgcgcaaggtgtgcgtggagggcaagacccactacgagctgcgcatcgagcgcgaggagctgggcgggcgcagcctgcaggatgcgcttttggagcccacgcgcatctacgtgaagccggtgcgcgccgtgctggaggcttgcgagggcgccgtgcacgcgctcgcgcacatcacgggcggcggcatctccgagaacctcgaccgtgcgctgccgaagagctgcgccgccgaggtcgacctgggcacgtggccggtgccggccatcgcgtcgttcgtgtgcgacgcggcgcacctcgacgaagccgaggcgctcaagacgttcaacatgggcctcggcatggtgctcatcgtggacgcggcgcgcgccgacgaggtggaggccgcgctgacgcaggccggcgagaccacgtaccgcgtcggccgcatcgtggcgggcgagggcgaggtccgctacgcgaacgacggcaagctgtacggcttcggtgcggaggcgtaagggcatgaccgaaccgctgaaaatcggcgtgctgctgagcggcagcggcacgaatttgcaagccatcatcgatgcggcggccgaggggctgcccgtggagatcgtgcacgtggtgtcgtcgcgccccgatgcgttcggcatcgagcgcgcgcatcgggcgggcatcccggtcacggtgctcaaccgcgacgtgtacgccgaccccgtcgaagccgacaagcgcatcgccgagacgctgcgctacgcgcacgccgagtacgtggtgatggcggggtacatgcgcaaggtgacgcccgtgctgctggacgcgttccccgaccgcgtgctgaacctgcacccggcgctgctgccgtcgttcaagggcgcgcacgccatccaggacgcgttcgacgcgggcgtgaaggtgacgggcatcaccgtccacttcgcgaacgaggactacgacaagggccccatcgtggcgcaacgcgccgtggaggtgcgcgaggacgacaccctcgacgacctcgaagcccgcatccacgaggtcgagcacgtcctgtaccccgaagtgctgcgcctcgtggccgaaggccgcgtgaccgtgggcgaggatcgcaaggtgcatatcgcccccgcccgatgaacccgcggggaaacccgcaggccaaccgtccgttccgcgcgtaagctcgtcgtccgcccaggcaaatgcccgccagctcgaacctcgaaggagccctcatgaacaaggaagccctccaatccgtcatcgccgccctccgcgagggccgcacgccgtccttgagcgtggaggatttcccgtgcttctcgcccgaggcgaccgaaggcaaccagcacgtggagccgacgtatctcgacgtggtggcgaaaagcctcacggccgacgacgcgcccacgttcgagcgcgccctgcgcgcgatggaggagggcgacctcgcctggctcggtttcaagatcgtctacgatgcggacgcggctcagcgcaacaccgacaacgaggtgacgaagaagtacggcgacgagggctcggccgacggcgagccgctcgtgttcttctgcaacgacgcgaaggagatcgtggcgtcgcggccgtactcgccccgcgacacgttccagatgaaggacgtcacgcgcggcccctcgatgcacaacgagcagttcgagggtctcacctgggcgagcgtccctctgttcgaccaggtgcatgtttggctgctgggcgcgtccgacgcggccagcgaagtggcggcgctcgccgaccacgtgggtttcgccgtgacggtggtcgactacgatccggcctacgtgagcgaagcgcgcttccctacggcgaagcgcatcgtgctcgagggcggcaacttcgatgcgctcgagcagttggacgccgcgcccgaggactacgtgtgcgtgctcacccgtggtcacatgttcgaccccgagggctgcgtctgggcgacgaggcatcacgtgcattacgtcggcatgatgggctgcgccggcaagaacgaccgcgtgcgcgagctggtgctggcctccggcgccaccgaggaggactgggagcgcgtcaagcgccccatcggcctgaagttcggggcgaagacgcccgccgagctggccatcgccatcgtcgccgagctcgtggacgtgcgctaccgccaacgctacagcgccgaagcgcgcgaacgccacgagaagagcctgggccgctgagggcgtgcgccttgcggcggggctcgctgaccttttcgtcgtgcgcgtttgcgggatatgcgcgcgcttcctcgttgacctcgcggttcgggt

SEQ ID NO: 9052 - DNA, 2661 bp, Unknown
  gut microbiota DNA sequence
tgtgcgttaccgccaacgctacagcgccgaagcgcgcgagcgccacgagaagagcctgggccgctgacatgggcgaacgcctctttgacgcccttattgtcatcgacgtgcagcaggctcttgtcgacggtcatccgtcgaaggaggattcgttcctcgttgcggtgggtgcgatgatcgatgcgtgccgtcgcgcaggcgttcctgtgctgtacgtgtgccacgatggaggagcgggcgatgagctggaacgcggcacggatggctggcgggtgcattgcgccgtcgcgccgcaggctggcgaaatagtcgttgacaagcgattcaacagcgcttttcggcagacaggccttcatgaaacgctgcaatctttgggcgcgaagcgcatcgtcatgtgcggcatgcagacggaattttgcttcgacgtgtccgtcaaggtggctttcgagctgggttacgacgtgactgtgccacgtgaggccgtcaccacgttcgacagcgggttcgcccctggcgaagttcttaccgcctacttcgaagatcgcatctgggacggccgttatgcgcgcgtgctggatacggacggcgtcgtcgaagagcttgccgctcgctgaccttttcgtcgtgcgcgtttgcgggatatgcgcgcgcttcctcgttgacctcgcggttcgggtggtaccatgcgtcgcaggagattggacgcaaggggccgttcagtcgcagacaagaggaaaggatgtaaggccatatgagcaatcctaaggtcaagcgcgtgctcgtgtccgttacggacaagagcggcgttgcggacttcgcccgcgcgctcgtcgacgagttcggggcggaaatcatctcgacgggcggcaccgcccgcgcgctcaaggacgccggcgtgccggtcacgcccatcgacgacgtgacgcagttccccgagatgatggacggtcgcgtgaagacgctgcacccgcgcgtgcacggcggtctgctggccaagcgcgacaacgaggcccacatggcccaagcggccgagcacggcatcgagatgatcgacatggtggtggtgaacctctacgccttcgagaagacggtggaaagcggcgccgatttcggcacctgcatcgagaacatcgacatcggcggcccgtccatgctgcgctccgcggccaagaacttcgagagcgtggccgtggtcacgcgcccggcgagctacgacgctatcctggccgagatgcgcgccaacgacggcgccaccctgcgcgacacgcgcgccaagctggcgctcgacgtgttcgagaccacggcggcttacgacggcgccatcgccgcgtggatgggcgcccagctcaaggacgagggcgacgtgaagttccccgccgaccgcacgctgcatctctcgaaggtgcaggacctgcgttacggcgagaacccgcaccagtccgccgcgttctaccgtcgcgacgactacgccgacgccccgcacagcctggcccatgccaagcagcatcagggcaaggagctgtcgtacaacaactacctcgacctcgacgcggcttggacggccgtgcgcgagttcgacgagccggcctgcgtcatcgtcaagcacctcacgccctgcggcgtgtgccagaacgacgacctcgtcgaggcctaccagcgcgcgcacgcgtgcgacccggtgagcgcctacggcggcgtcatggcgttcaaccgccccgtcacctccgacgtggtggtggccatcttcgacaacaagcagttcgtcgaggccatcatcgcccccgagttcgcgggcgacgcgcttgacatgtacagcgcgaagaagaacgcgcgcctgctgtccacgggcggcgtgaacccggccggcggggaagtggagtaccgctccgtcgagggcggcctgctggcccaggattccgacgccgtggccgaggatcccgcgacgttcacggttcccacgaagcgccagcccagcgaggaagagctcgccgagctgctgttcgcgtggaaggtgtgcaagtccatcaagtccaacgccatcgccatcacgaagggccacgcgaccatcggcgtgggcggcggccagccgaaccgcgtgaactccgcgcgcatcgccgtggagcaggcgggcgaggaagccaagggcgccgtggccgcctccgacgcgttcttcccgttccgcgacggcctcgacgcgctggccgaggccggcgtgacggccatcatcgagccgggcggctccatccgtgacgaagaggtgatcgccgccgccgacgagcacggcatcgcgctcgtcttcaccggccaccgccacttcaggcactagatccggcggcataccatgttgcaagcggcagcttcggaaacgaagctgccgttttttgcgggcgccccgtagcgggatccgacttcctcggttcgctcgacgcgtcaagttgcagccttctcgtccgacgtggacgcaaaacggcagctgtggcaaagttagccttggtttcaagtggatttcgtactttggatttcgtgcgatctggggtttcgtggatgctcacgacgcttacaacgttcgtcgcgacccgatgattgccatggctaccgttttgcgcccaacttccacgccggacgacgatgtttccgcggcttgtcggggcttgtggatgt

SEQ ID NO: 9053 - DNA, 282 bp, Unknown
  gut microbiota DNA sequence
tgcgggcgccccgtagcgggatccgacttcctcggttcgctcggcgcgtcaagttgtagccttctcgtccgacgtggacgcaaaacggcagctgtggcaaagttagccttggtttcaagtggatttcgcactttggatttcacgcgatctggggtttcgtggatgctcacgacgcttataacgttcgtcgcgacccgatgattgccatgggggaccccggacgtttttctggactgaatttcgatgaggaaagaggtccgtgaatggcttacggcaaagaat

SEQ ID NO: 9054 - DNA, 4428 bp, Unknown
  gut microbiota DNA sequence
cacgatatgccgcgcgcgtccttacgcgatgcgcacgggcatgacgaggtacaggaagttctcgccctcgtccgccttgaagatgccgggcttcatggatgactgcacttcgaggaacacgttgtcagtgttcacggaggacagcccgtccagcacgtaggcgtagttgaacgcaatctccacgtcctcgccttcgccctcgcacgacagcgtctcctgggccgaacccacgtcctgcgccacggcggacagctgcacggtctgcgacgccatattgatgtcgaagcgcaccggcgagctggtctgtcccagcagcgacgtgcgcttcacgccggccacgaggtgccccacgtccatgctcacgcgcgtggcgtaggaatcgggcagcagctggcggtagttcgggaagttgccttccaggcggcggttgatgaatacggtgtcgtggtacgtgacgacgatctggttctcagccagcgccagcttgaggtcgtcctccgagcgcggcagcgaagatatctcctgcaagaacgatcccgcgatgaccgcctggaactcctcggcgctggattcgggaagctcggcttcggtgatggcgaggcgatacgagtcggtggccaccatcttgagcgtggtgtcctccagcgtgatcagcacgcccgtgaggatggcgcggctctcgtccttcgacaccacgcgcgccacgcgcttcaccatggaagcgaactgcgtgaagggaatggacacttcctgctgcacgtccacgtgagggaatccggggaagtcctccgcgtcgagcgtcttgatggagaacgacgccgtgtcgcacgtgatgaccgccgagtcgtcctcggctgccacgtgcacggctgcgtcgggcaggttcttcacgatctcggagaacagcttgccgggaaccacggccttgcccgtctcctcgatgagcgccgaaaccgagtactggatggacagctcgaggtcggtcgcttgaagcgtaagggtgtcgtcgtgcgcgtcgaggtagatgcccgacagaatgggaagcgtcgatcgggttgcgatgcccttgagcaccacggacaacgcgttctgcaattccgattggttgatgctgaatttcaagacgttccctttctctagaagcagcgagcgctgccgtcattatagaggttcgaatgtttcacgtgaaacattgcgcatgatcggcatgacgtatgaatgcgggttttcgggttttgctctttgctcttgatcttctctaatatatctaaggttttaatagttgtaataataagggcggtggaaatgtggaaaacctacgttatcgcatgtcaacccttggaattcttcctgaatcgatcgtgcagaccgagcaccctccctcaacatcaattatcgcttttattatctttccatagggttgcaccgcttttcggcaacttgtcagtcatgtttcagtcatctttccgccgaacgcgcgtacgctacatctcgttgatgagcccgcgcagcgcttccagctcctcgcgcagctcgcggttctccttcatcttctcctcgacgttggtcaccgagtacattacggtggagtggtcgcggttgaacttcttgccgatgtcgttgaacggcaggtcgagcatctggcggcacaggtatatggctatctggcgcgcgtagatgatgttgcgcgtgcgcttcttgcccacgaggtcggcgtggctcaccttgtagaagttctccacttccttttgaatgtcggcgatggtgaggcgcttcgaagggccgccggtgaagtggttctccagcagcgtgcgcacgtcgtccagcttgaggtcgggctggttgaagaacgtcatctggtagatcaccttcgtgacggcgctcttcagctcgcggatgttcgagctggagctttccgcgatgtacatctggatgtcgtcggggatgttgaagtcgtgcgacccttccgactcgcggtactcgtccacgaagcttttcacgatgcccagcttcgtctcgatctcggggggctggatgtcgaacgtgccgcccgagttgaagcggctgcggtagcgctcgtcgatgtcgatgttcttcggcgcgcggtcggccgacagcaccacttggcggccctggctggtcagcttgttgaatatctggaacacgatgtcgagcgtctgcttcttgccctgcaggtactggacgtcgtcgatgagcagcacgtcggcttcctcgtagcgcgtcttgaagttcttgtagctggatttctgcttgtcgtgcgccgcgctggcctccatgtagtcgctcaacagctcggccgagtccacgtagatggtggaaagctgcggcatcgtctcgttgatgtagttctggatggcgcgcatgaggtgcgttttccccagacccgacttgccgtagatgaacagcgggttgaggtgcgccttgcccggcatctcggccacggccacggccatggagtacgccatgcggttcgaatcgccgatgacgaagttctcgaacgtaagcgtggacgcggggctgtcggggccgtcgagcgctatttctcgtttcgcgccgacgccggcgacctcttcccctaccgcccctctatgcgcttcgggacggcctgcgtcgatttgcggcgaacttgcggcattcgcggcaggagccggcgcgggctgcggagagctgacgggcgcaggcgtttctgccgccgtcgccatggttgccgccggggctgcctgcgcggcgggaggagcaggcgccggagcgggaggctcggcggctgtgatgtccacttcgatgatcacggtgaacggcatgtggtacaggtcgttcagcgcgcgtttgatgaactcgacataatgacgctcgatccatgtctttataaagtcgttgtccgcggtgatcatgaggaacccgtcgctcatagcctgcggatgcaggcgtgagaagaacgcgttgatctgcgacggatcgatattgttgtagcttttcacctggccgcatacttcggaccagacctgctcgagtttttcgctgttcatagcttgcttccttgatgggggcatcgcgaatgtttcacgtgaaacatctctctcgtgcgtcaagcgggcgccacccgccgccgcttcgattgtattaacagatcgaagccgggtaaaggccgattatagggaatttgccacgtggtatcccagatcggtcagaatgcgcttctgtccgaccgttttctcgataagcccggcttcctctaatttcgacagcgccacgtacgtgcttgattgcggcacgccggtcaaacgcgacaggtccgttactcccagggctccttcgctcaggaagatgggcaggaagtcgcgctcgcgttgcgacaacggggggataagcggcgccatcgcatgctgggcttgcatgtccatgccctgagcgcgatgagccggggcaccgtgctggggatagtagggcgcgcctgccgcgtagggattctgcgcatagcgcgggggcgcgtactgcggttcgggctcgtaaccgtaaggcggtcgtgcgggcgcggcttcctgcggatacggtgggtttgcgtatccgtattgcgccgggtaggcgggttgctgcatcggctgctggggaggaatctgctgctgcagctgctgcggcgcctcgtgcatcgggtaagcgggttccatggccgatggttgcgcggatgcagggtgaagcgcgctcgattggtcgacgggcggcatatcggtcgcctcgcccgcacgtaggctgatggtcactacggcgcctgttcccaggttgtcctcaatggtgatggtgccgtgcgagaaatcgaggtactctttcacgatgggcaagcccgaccccacgccgcgaatatagtgtttcatcggctccacggcggatgtgaacccggggatctgcgcttgatccttataaggtatgcccgggccctggtcggcgaaacggatggtattgccctcgtccaggatggacacggtagcctcggcgaaacgcgcgtggatgaagttttccgatacttcgcggatgacggtgtacggaatggtccctccggcgtttttagcctgttcataaattttcgatgcaaggctttcaatgaattcagccgtcggcgccgggtgtatctccgtcacgcgcggggcgctgcgaagatcgtcgtacagcgcgatgcgcgctacggcgtgtacatgcgtgtagtcgaaaggctccacgttttcatcagcggtttcatcctgatgatctgctttttcaatctggttgtccaatggtgttccgttttcagattcgatattcagcatttttcagcaacattcaaaggcattgtagcgttttttcgattctgaatctatccacctggggaattcatagcattcaaaactatgtattcatctatttctaaatcctgca

SEQ ID NO: 9055 - DNA, 933 bp, Unknown
  gut microbiota DNA sequence
tcctgggccgaaacgcgtcctccggcaggacgtgaccgtttgaattcgtttacgtgaagattgggtaacatattgcccggtcgcatgggtgaatcacccggcaagcaatatataacaccaggtcaaagctttgttaataactacgatcaccttttatgcctgatgagaggcttgtaaaagaatgagaaaatatcccttgacaaaccgatgacgttagagatttccacaacggctctcgaatgaatcgagagttttcaacattttccacaatcgagctgcgcgaaaaagaggaaaacggttgaaaaaatagccacccgggcatggtcaagggcattcagaacaaactttcgaggttttccacggcgaagagaccttccctggggttcgttctattcgaagcgacctggaaaaaatcatgaacccttcttgtgagttttccttgactccccggtaacgtgagctatactttcgaggttgctctaaaaccatgaaagggaatcaatatgaagcgcacgtatcaacctaacactcgtaagcgggctaagtgccacggtttccgtgctcgtatgtcgacgaagggcggccgcaaggtgctggctgctcgtcgcgccaaggggcgcaagcgtctctgcgtgtaaagagagctttaggttggagaccattaaatcccgcggggatatctccgatctgttctcatgcggtaagcgtctgcatacgccgtaccttacgttcatagtgttacccacgaagcagcacggccagcaaggtcgtgttgcttttattgcgggtaaaaagtcagggaacgcggtatggcgcaacagcgctaaacgacgcatgcgagccatatgtcacgatctgggcggtccgtgggcgggctacgatgtgatatttctcgcgaagtcgggtatcatgaggagttcttatagtaaagtg

SEQ ID NO: 9056 - DNA, 1649 bp, Unknown
  gut microbiota DNA sequence
tgcggtatggcgcaacagcgctaaacgacgcatgcgagccatatgtcacgaactgggtggtccgtgggcgggctacgatgtgatatttctcgcgaagtcgggtatcatgaggagttcttatagtaaagtgcatatagcatgtgctgagacgttgaagcgggctgaattacgttagggacgagaggaatgaaggcatttctgaaacaggtgccgtgcaaagtggcggtgtttctcatcaccttctaccgggctgccatttcccctctgttcccttcttgctgccgcttcacgccgacgtgctccgaatacgggctcatagccttccagcgctacgggttctgccggggtctcaagctcacggtgaagcgtgtgctacgttgtcgtccggggggttcgcacggctacgatcctgttccttgaggtcgtcgcgcgggcttctttggtatagaggaaggaacaactgaacatgtgggacgtatttaaggactggatattcgacattatccatttcttctatgacttctgcggcgactggggcctggccatcatcatcgtgacggtcatcttccgtattctgatctcacctttgatgcacaagcagacgaaatcgtcgtttcagatgcagaaggtgcagccgctcatgcaggagctgcagcgcaagtacgctgacgatcagcctcgcttgcaggaagagatgcagaagctctacgccgaggtgaagttcaacccgctggcgggctgtctgcccatgctgctgcagatgcctatcttcatggcgttgtttcaagtgctcagcgagatgggttcgcgcacatcgggcaccacctacgagttctacaacctggttcccagcttggttatgaggccttctgaggctctggccgttggttttggaacgtttgttccctatttgatccttatggtgatcttcgcgggcgccacgtttttgcccatggttctcatgcagatgggaaacaaggacaacccgcagcgcaagcagaccatgatcatggccgctgtgatgagcgtgttcatgctctggatcagctggagctcgcccgccggcgtgcttctgttctggggcgcgtcctccctcatgggcattgcgcagcagcagatctccatgcgcatcatgaagaagcgcgacgccgaggccgctgaaaccatcgaggtgaagcctatcgaggtggacgtgacccgcaagcagaagaagccccgtccgaccaagaaggatacgacgaagcgcaagtaaccgcgattgtttcacgtgaaacattgaggagtctgtcatggctgaagaattggttgatgagaagcctcttgatgaggaacccgctgaactgaccgacgaggatctggatcgcattgccgatacggcgatcggagcgctccaggatattctcaagtacttcgaggtgggcgaagtgaccatcgacgagtacgaaggcgacgaaggcgagctgatcctcgacatcacgggcgacgatctggcggtgctgattggccgtcacggcaagacgctcgatgctctgcagttcctcgtgtcggcgattaccgtgcgcaccatcgggttccgttacccggtcatcgtggacgtcgaaggttacaagagccgtcagcgcgagaagctcgaatcgattgcccgttct

SEQ ID NO: 9057 - DNA, 281 bp, Unknown
  gut microbiota DNA sequence
gccgtacgagcgtcgtatcgtgcacatctgcctgcgcgacgacgaccgtgtggagacggcatctgaaggcgaaggcagcgcccgtcatgtggtgattcttcctcgctaaacttgtaagtctcagtttagccgcaagcccgcatcgaaaggtgcgggtttttgtttctaatgtttcacgtgaaacattagaagttcctttcaatcgagactttcgatgatggctcccccgtctcccttcgtgtttcgaaagcgaatcgccttaaacctgattctcctttgtc

SEQ ID NO: 9058 - DNA, 783 bp, Unknown
  gut microbiota DNA sequence
cgctctgcagttcctcgtgtcggcgattaccgtgcgcaccatcgggttccgctacccggtcatcgtggacgtcgaaggttacaagagccgtcagcgcgagaagctcgaatcgattgcccgttcttccgcgaaccgcgcagctagccagaaccgcagcatcaagcttcgtccgatgacaccgtacgagcgtcgtatcgtgcatatctgcctgcgcgacgacgaccgtgtggagacggcatctgaaggcgaaggcagcgctcgtcatgtggtgattcttcctcgctaaacttgtaagtctcggtttagccgcaaacccgcatcgaaaggtgcgggtttttgtttttagtgtttcacgtgaaacattagaagttcctttcaatcgagattttcgatgatggctcccccgtctcccttcgtgtttcgaaagcgaatcgccttaaacctgattctcctttgtccttacgctaaatgtttcacgtgaaacattagaaaagggtcaagagctcggtttattgtcgtgagtgtttcacgtgaaacaatagacaatggtctaacctcagtctgtttcgcgtcatgagtgtttcacgtgaaacactcttacctgaggtgcgtttcgctcaaatgtttcacgtgaaacatttgaaacgtcgtgatttgaatgtttcacgtgaaacattcctctatactgagggcattcaattgtagaggagtgaacatgcgcgaggatcttttgaaacgccatctggagttggttatcgaggccaataagaccaccaacatcac

SEQ ID NO: 9059 - DNA, 360 bp, Unknown
  gut microbiota DNA sequence
gcatacacctcggcgacgttcgcggctcagcagccgagcggctacgacttgctgaactgcgcgtcggtcgactctcgcggcatctcgctgccggtgattccggcgggcgccatgaaaaccgacgagaagggcgaagcggcggccggcaacgatgtcacgtgcgacctggccattcgccaagccatcaactacggcgtcgaccgcgacaagatgatcgacaacgtgctgaacggctacggcaccgtggcctacagcgtgggcgacggcatgccgtggtcctcgcccgacatgaagtgctccaccgatgtcgagaaggcgaagaagctgctcgacgacggcggctggacggccggtgcggac

SEQ ID NO: 9060 - DNA, 487 bp, Unknown
  gut microbiota DNA sequence
ttacacgatgggcgtgatggagacgatctcccatttctttccctgcttcggcaaaggttggtgcagcatcatcgccaccacatgctcggtgccctctctgtccgaaagcgtttgcttgcagatgatcatgtggttcgtgcctgccacgatctgcttgccgcagtacagaaccgggcggtatttcgcgcccttgaggttcttcgtggcctcgctgaagccgctggcaaccttttcaggcaggcttgactttttcattttcgcgatttcccatgttccgagcatcgtgctctcctttcgctccgtcgtttcgaaaccctcggcctcgacttgttcagcaatcgtgtcgcgcggaaccccgttgacacctttctcgaaagaaagcgcctacccgcgccaaatgtcggcaacggcatcatcgacttcgttggccggatagcctacggccttcatcttgtcgatgatcacctggcgatgcgtgtactcgctt

SEQ ID NO: 9061 - DNA, 616 bp, Unknown
  gut microbiota DNA sequence
gaccctcggcctcgacttgttcagcaatcgtgtcgcgcggaaccccgttgacacctttctcgaaagaatgcgcctacccgcgccaaatgtcggcaacggcatcgtcgacttcgttggccggatagcctacggccttcatcttgtcgatgatcacctggcgatgcgtgtactcgctttcgcccggatacagggacgtagaatactgggtagcgcccatgatggtgtcgcgcggagggaatccggcgaaggccagagcctccaccacatcttcgagcggaccgttgggcgagagagcgaaaagatccctgcccgtctgctcgccgctaacgccgttttgcctgttgcgaaccgctatttctttgaaatccgacatggtgcctcctttgagacgatcggtgcgtgccgcccggcaacttaattatgagttgcctagttcgcattatagaaagttttttatcactttccattaatatccggggcgtcgtcacgaacgacgcgtttgacaaaacgaacgggaaggtcgatcggcaagcggcgatattttgattgcgaaaagcgtttgaaacgtcggcagaaaaaacgatcgggtttgccatcgaggggtaaaccgcttatg

SEQ ID NO: 9062 - DNA, 4421 bp, Unknown
  gut microbiota DNA sequence
ccaaaaacacggaattgccgacgaaaccgtgtttttggggcgacaatgttcgctacacgcccccgcaacgcaagcgggccgcccgagggcggcccgctgtgcgattcgcgtttgcggtcgagcttacttcttcgcccaggagcgacggcccatggggacgatcacgagcgagcagatgagcgtcaccacgtagaagccgatgatgaggtagaagcagccggcgaacgatccggtgatgtcgaagatctgcgcgtagatgagcgccgagaagccggagaacacgttgaggccggtggccaccatcgagaagatgttggcgtagtccttctggccgaacgcctggcggcacgccatgggcggcacgatgttgagcgcggcgaagccgatgccgaacaggaacacgcccacgtagaacatcatggcgttatcgacgctgaacagcacgatggcgatgccggcggcgccgaagatgctggcgaccacgccggagacgcgggcgcccgtatggtcgcacagccaccccagaccgaacttgccgaacagctggccgatcatgcacacggtcacgcccatggcgcccacggccgcgcccagcgcgccggtggaagcgtaggacgagaactgctgcatcatgccggcggcgatgacgaagaagcccgccatgacgatgagcagccacagcgccgggttcttgcgagcctgcgcggccgtagcgccttcgtcagcagcgacgtcgatgacggacttggcctcggacttcgcggacgcaacctcggcggcgccgtagccccagggcagcacgcccatcttctcgggagactcgcgcagcagcgcggcggtcagcacgacggacgcgatgagcgcgatcaagctgatgatgatacgggcggtatgccagccatagccgctgatccagccctggatgaccgggctcatgaacgcgcccagcagcgatgcgcacacgccgatgacgccgatgacggtgccgttgctcttagcgaaccaacggttgatgaacgtcggcgtggcgatgtacatccagaacgcggcggacgcgccgtacagcacgccgtacacgttccactgccacggctcggtaaaccaagcgcaggcaagcgatgccaagccgaaaacggcggccgcggcggtcatcacccagcgagggttgaacttggaaatgagcttgccggcgaacggcgtgcagatggccgccacccacggctggatggacatgtacagcgtcgcgtcggtgcgcgaccagccgaactcttccatgacgggcgatgcgaacaaaccggcctggttcgccacgacgcccaaggggatggcgtagaaggctacgcaggcgatggcgatcgcccatgcgtagttgctgcccttcattgtttcagttcccatagtgcctcctttgttttacctgagaatccccaacgccatagcgatatgcaaaatccgtgccatcgttagggcgccagagggttcccctctcttttctcgcggcggcacggcccctgctcgaacgcgccgggaccgcgccgtccgccgtcgagctactcgcccttgcgcagcacccccttctcgtacagcagctcgatctccttttccgaatagccgaattcctcgagcacgtcctgcgtgtcggcgtcgtacttcgcccctccgcgcacgatcttgccgggatgcttcttgaagcgcgggatcatgttcacctgcttgaccgtcttctgcgtgatctcgtcgtagcagtcgacgaacacctcgcgcgcctggtaatgcgggtcgttcagcatcatctcgtaggtcatatgggggctcaccgccacgcccatctggccgaagatgcggttgacctcctcaaccgtgtgcttctcgcaccagctgtccagcgcggcgcggaacttcgcagcgcggtcgggcagcggctcgtccaggctcttgcagccgggcttgcgcgtgatggaggggtaggtacccagcggctggaagtcgggatcgtcggcgaacccgaagaactcgacgagcttcttcaccgggccggcgccgcccacggctacctggcagtagccgtccttgcacttctgcgcgccggcgcacgcgcccacgaggtcttcgttgccgatgcgcatgggctgtatgccgtggttgatgccgtcggacagcgtggcgccctgcaggcgcacgagcgcctcgaactggcagcagtcgatggactcgccttcgcccgtctcgcgcgcgcggatgacagcggcaagcgtggcccaagcacccatgagaccggtcatgaagtcgccggtgaagggcttcgtcacgctgggcgggctgtcggggaagccgttgaggttcgaatagcccgagaacgcctggccgatggggtcgaacgacgccttgcgcacgtagtccgggtcgccccagttgccgaaaccggaaatatgcaagatgaccagcgcagggttcgcctcccacagcacctcgtcggtaaggccccacttctcccaggtaccgcccttcgacgactccaccagcacgtcggcccacttcaccatctgcagcaggatctccttgccctcgggcgaggggatgttcagcgtgatcatgcgctggttgcgacggtcgaccgaccatgcgtcgccgtacatgcggtacatgtcgggcgccaccgtgctttccagctcgatgacgtcggcgccttgctcggcgaacagctcgcagacgaacggcgccgcgatgaccgcgccggcgttgagcaccttcaagttctgcaagttgccgaacttggggcgatccgatgacttcatatgcgttcctccttgtgtcctgatcccgtatcgtgcgtcgtccgcgcggggcggggcgacaaccgtctctggccttcgacttagcaactagcgtgccaatctttcgctgccgctgttctcttcttacgccgccggcatcccgctatcctcgccccctaccctttgcttttacttttgtggattcctcgcgcgtcgactctcgacgggacgctttttcgtatgctgctggcaggaagacgacgaccggagggcgagcgacatgatcatcggcatcaccaccacgtacgttgaagaggagcagaaggacgagatcgtccccgtcgagcgcgtgacggtggaatacgtgcgacgagtggccgccgccggcgccgtgcccgtgctgctgccgcccgtggagggcggcgcggatgcgaaccgtcgagcggcgcgcgaactggtagaacgcctggacggcctggtgctggccggcggcggggacctcaacccggcgacgtacggcgacgaagcgcgcctggccgaaaccgtgaacgtgttcgatggacgcgatgccctggagctggagttggcgcgccttgcccacgagcgcgatctgcccacgctgggcatctgccgcggcatgcaggtgctcaacgtggcgctgggcggcgcgctgtaccaggacgtgcacgcctgcgggctcaccgacgcggcgcatcagcagaagcctccctacgacgtcgtgcgccagcgtgtcgacatcgcgccgggcagcgtgctggaccgggtgctgtgcgacggcgcgggcgagggcatggtaccaggctgcaagacgggatggcccgcatcgctcgaaacgagctgggagggcatcgcgcctgcgccgcattcgctgctggtgaacacgatgcaccaccaggcgatcgcctgcgtggccgacccgctgcaggtgagcgcggtcagcggcgacggtctggtcgagggtttggaggacccatcgcggcgcttctacctcggcgtgcagtggcatcctgagtacctcgacgacaacgccccgctgttcgaagccctggttgccgccgcgaagtagcacgcccacgtcggcgcaccgcccatccatgcttggcacgcatcgcccgccctttgtgaaggtcgcttgggtttcgcacacgggatggcgggcgcttgctataatccatttagtttgattatcaaagcattgaaggcgcgcctcgaaagcgcggccaaggacggagcagcatgggcagcacgatcatcggatgcggaaagtccctcccgaagctggaagtggccaacgacgagctgaaagcgctcgtcgacacgaacgacgaatggatcagcacgcgcacgggcatcagatcgcgccacgttgccgtcgaggaaaccgctaccgatctggccgaagccgctgcccgccaagcgctgggtcttgccgacggcggctggcgcgaggacggcgaggccatcgaccccgcttccatcgacctcgtcatctacgccaccatcacgcccgacgtgctggtgccctcggccgccgggctgctgcgccgccgcctgggtctcgagaacgccattgcgttcgacctgaacgccgcctgcacgggcttcgtgtacggcctgaccgtggcc

SEQ ID NO: 9063 - DNA, 1359 bp, Unknown
  gut microbiota DNA sequence
gcgacgaggccatcgaccccgcttccatcgacctcgtcatctacgccaccatcacgcccgacgtgctggtgccttcggccgccgggctgctgcgccgccgccttggtctcgagaacgccattgcgttcgacctgaacgccgcctgcacgggcttcgtgtacggcctgaccgtggccgagtgcatgatggccggttcgaccgccggagcgcccggtgccgcgggccgcaaccccgttcgccgcgcgctcgtggtgggagccgagcgcctgacgcgcgtgacgggctggagcgaccgcaacacctgcgtgctgttcggcgacggcgctggcgcggcggtgctggagtggaacgagaaccgacctggcatcatgagcagcttcatcacgaacgccgacgacgacacgaacgcgctcacctgctcgtttgcctacgacgccccgttgccgttcgacatcgacggcgcgtcgcccgaagcccccgaagacgcatcgctctcccgtatcgatgccgagctgggcattaccgaattcgtcgacgcgggcgaaccgcgccaggtattgcgcatggacggccccaaggtgttcaagttcgccgccgaggccatgaccacggccgtgcacgaggcgctcgaccgcgcaaacctcacgctggatgacgtcgcctgcatcgtgccccaccaggcgaacgagcgcatcatcaagtacgccgccaagaagctggggcgcccgatggatttcttccagctgtccatcgaccacactggcaacacgtcggccgccagcctgcctatggctctatgcgacgcgtacaacgccggccgcatcaggcgcggcgacaaggtggtgctcgtcgcattcggcggcggcttcacctccggcgcggtgctgctggaagcgtaaatcagcaagcgagcatggcagagggatgagatatcgaccacgtccctctgccatcgatcaccaaacgaaacgggcgcccgaaggcgcccgtttcgtttggtgatcgatgtttcctaccgcttgggcagagctcgaagcacagcgcgagcgcatagcacagcggccaccgccttcagcaagtcgggcacggcgaagggcgcgatggtcaccatgaaagctgccgccaaatcgacgcctaccacagcagcgtactggaagcatccgcacacgtacgtcacgatgatgaacgccaagcaggccaccatgtcgaccacgatcgccatcggacccgaaacccccttctcgcctatcgcacgcctcagaccctcgcgaacgagcagcgcaaccgccgcagccagcagaaatccccacaggtatccgcccgtcggtcccatcaacatgccgataccgccgcgcatgc

SEQ ID NO: 9064 - DNA, 944 bp, Unknown
  gut microbiota DNA sequence
gatcgcacgcctcagaccctcgcgaacgagcagcgcaaccaccgcagccagcagaaatccccacaggtatccgcccgtcggtcccatcaacatgccgataccgccgcgcatgcctgagaacatcggcaaaccgatagctcctagcgccaggtagccggcgatagaagccatgcactgcttcggcgtgagcaccataattgcgaacatgaccgcgaacatctgcagcgtcagcatcaccggcccgatcgggatggacacccatgcggacacgcccaagagggcgatagtcaacgcgacgaacgcgatcgagcgcgtgcgcgatgtccccatagaaccctgtttcaccttgtttgcttccatgctccgctcctcttccaggacgatccttcgttttcagcagcctcgcactataagcaaaccccgcagttttgtgaaccgcggggtttaagcaagggtgacaatctggatgcgcgatacgagcggcttagaacttcgctttcagttctccgctctcgagcttcttcaagcgtcccatctctaagacgatgaacaccaccgtggtgaagatggccaggaagtcggccgcgggggtggcgaagtacagcgcgtcgaggctgacgaactgcgggaaccagctgggcagcaccatcggcagcacgatgagcagcggcaccaggaacagtatctggcgcgtcagcgacaagaagatggacttgagcggctgcccggttgcctggaagtaattcgagcccacgatctggaagccgatgaagggcagcatgagcagctgcaccttgagggcgaacaccgtgaagtcgcgcagtgattcgttcgtgatgccgaagaacccgacgatctgctcggggaacaggtgcacgagcgcccacagcgccaaaccgatgcccgtcgccccgaagatgccgtaccatagcgtcttcttcacg

SEQ ID NO: 9065 - DNA, 1051 bp, Unknown
  gut microbiota DNA sequence
ttgcaccttgagggcgaacaccgtgaagtcgcgcagcgattcgttcgtgatgccgaagaacccgacgatttgctcggggaatagatgcacgagcgcccacagcgccaaaccgatgcccgtcgccccgaagatgccgtaccatagcgtcttcttcacgcgttcgaacaggtgcgcgccgtagttgaagcccagcagcggttggatggcgatggacacgccgatcagcggcagcaccgcgaacatggccacgcgctgcaccacgccgatagacgcgagcgccccctcggctcccagcgggctcatggcgccgtacatgttcagcagattgttcagcacgaagttcaccacggccatgcccgcctgtacggcgaagctggccagacccagcgacagaatcagccgcaccgtgcgcagatgcagcggcaggtagtgcagatgcagcttcatgggcacgttcttcgtaacgatgaagtaccacagcaccgtggcgcacgagatggcctggccgcacaccgtggccagcgcgctgccctgcacgccccagcccagcaccatgacgaacaggaagttgaacaccgtgcacgataccgcgccgatgatcatggtgcccagcgcgcggttcggtgcgccggccgtacggatgaagttgttcacgcccatgccgatgcactggaacacgaagcccagcgagatgatctggatgaacgagcgagcgtactcccaatcctccgccgtggcgcccgacacgccgagcagcgcattgacgcaggcgggaatatgcatgagcacggccacgatcaccgcgaacacgagagacaagcacaccgtgttgcccaggctgcgctcggcctccacccggttgccctcgcccatgcgcagcgccgccagcgcgttgccgccgttgcccacgagcatggcgatagccatgaacaccgtcatgatgggcatggccaccgtggcggtggcaaggccgatctctcccatggcctgccccaggaagacggagtcgatgacgttgtacgcaccgttgaccagcatgcccaggatagaa

SEQ ID NO: 9066 - DNA, 119 bp, Unknown
  gut microbiota DNA sequence
ggtgcgcttcggatctttgccgatcggtgctccggcacgttcttcattgaggtcgagagaggggttcgttgcttctgattccatgagttcgccgctgcctttcgagcttctccaatttc

SEQ ID NO: 9067 - DNA, 119 bp, Unknown
  gut microbiota DNA sequence
cgtgcgcttcggatctttgccgatcggcgctccggcacgttcttcactgaggtcgagagaggggttcgttgcttctgattccatgagttcgccgctgcctttcgagcttctccaatttc

SEQ ID NO: 9068 - DNA, 304 bp, Unknown
  gut microbiota DNA sequence
ggcacaccgtgttgcccaggctacgctcggcctccacccggttgccctcgcccatgcgcaacgctgccagcgcattaccgccgttgcccacgagcatggcgatggccatgaacaccgtcatgatgggcatggccaccgtggcggtggcaaggccgatctcgcccatggcctgccccaggaagacggagtcgatgacgttgtacgcaccgttgaccagcatgcccaggatagaagggatggcgaattccacgataagccgcggaatggacgccgtacccatgcggctgactttatcgtcgcggcc

SEQ ID NO: 9069 - DNA, 14708 bp, Unknown
  gut microbiota DNA sequence
gaggaacggcacattgtaacccatcttttcgccgccgcacagcctggaaatcggatacaccgtaaagccgcaccgcgtatgctatattggagcaacatcgccacgttacatggagaacaggggaagcatgtaccggatgaaggaattctcggccatgacaggcctgccgcaatcgaagatccgtttctacgagaagcacggcttgattctctcggatcgtcaggaaaacggttaccgagtattcacccccgaagatgccttcaaatcaaacgcatttcgtgtgctgctgcaatacgggttcagcatcgatgaagcggtcgctatgctcgacgcgaaacaaggcacagaagagttcgagcggtcactgctgcatcaacaagaaaagctcatgcacgaagccgacctgatcgcgtaccgactaagacggcttgaaagcacccttggcgcgatacagtctgaacctggtttagagttcgaactggtggatgccgccgatcaggtgtacatcaactcttcatacggacgagacttccatgtctcgctcgagcacgagaaaacgatctcgcagtattacaaccttctgagcatcaccagctgtgcacgcatcatcaagcgagacgacctgctggacaaccgcccaacggtcaaccccgactatgtcatgaccatgcccgaacacgagagctaccgccttgacgaaggggcgcgaaagcaggtaaagcgcctctgcttgggaaaatgcattcgctttagaagacaagcgacccgaacggaaagcgtgcagaaggaaacgttcacgagcctgttcgaacacctcgacagccacggttatcgagtgaggaacgacatcatcctcttcccctccttcctcaatctcgacggattcggaagcgacatcgaaactctgtacgtgcccgtcagctgaagtgcataaggaaagggcttcggcgcagcgaacgcgacgaagcccttcaagggagggaaagaaccgcgttgctagtacagcacctcttcgtcaggcgcgtacacatggcagttctcgcagtagttgaacgtgatctctttgtccttctcgtggcagttcacgcatgcattgtagccgccgtgcagggaatcatgcggattccaatcacccaggtcagcagtgcgctcggcaagcgcttcgtagctaccgccatggcagctgagacactgctcgtcggaaacgtaggcgcccgcctcgctcgacaccgtttgggtcttcgtaccctcgctcgacccggaatcggcctgttgcggcgcacaacccgctatcgcgaacaccgccaccaacgcaaccgccacgagggcaatcataatgtccagacgcaaggtagaccgactcatgcctggcctcctttcaacatatgctctaccgccacgtagccgaacgtcgccgcacgacccaccgacgtgccgggaatatggcgcgggtagttgcctgcgtagaagttgcccgacacgttgcccgtggcatagagtccttcaataaccttgccgtccttgtccagcacctgggtgtcgccgttgatggtgaggccgcccaccgtggcaaggatgacgctgttcgtgaccaaggcatagtacgtctcacccgtgaaaggcttgttgttgcccgtgtaacggtagtagtcggggtcgcgctccaagccgtcctcgaagaagctgttgtagcgcgccaccgtttcctcaagggcggcggcgtcgatgcccgccttagacgctagctcgcccaaggacgaagcgcggaacagatggcccttggcctcgtcgcgctcaagctgtttctcggcgctcggctccttctccaacgcagaggcgatcatagcctggtcgaagatatggaaacactgatggccgcggcgcttctgcacgttgatggcgttcgacatgtactggcgcgcttggttctcgttcacaaagcgcttgccctcttcggtgacgatgatcgagtagttcatagcgccggggaagtacacgcgcttctcgacgaacgtggacggggtggcgttgctgaagttcatgaccggatgcggcaatgagtccatgtccgcgccgatactgaggcccatcatgtggccgtcgcctgtggttccccagctgggattccaccacacagaggactcgtagtcttcagggcgcacccacgcttgcatcatctcagggttcgcgtcgtagccgcccgtggccagcaacacgcccttggatgcgttgatgcgcacgtatccgtcgccgttcttagcgatgcagccgatcacacgaccgccgtcttcgcggatgagctgcacggcgggcatctcatagcgaatctccaggttgtcgtaggtttcggcaaccgcgcgcagctccttgcacacgtacaggccgaacagccacgtagtgctgataccctcgggcatcttgaagttgacgtagctgtcgatgacggggaaaccgttgtagttcggcgcctggtcgaacttgtacagctgccaacccgaaccacccttgtcgagcatatcctgccagaaatcggctacttcgcccgaccggttcacgtacgtttcgatggagcaggggtcgacgcgccaatccgcagcacggtagatctcatcgcgcagctgagcaggatcgatatcaatcccctgctccttttggaacttcgcgcccaccgcgccgaaactctcccacgccgagcgtccctcggtcatcttctccaacgtgatgaccttcgcgccctcctcggccgccttcaaactgcccatcagcccgccgatgccggcgccgatgatgagaacctcgcactcctcggtagagctgatctcagattcggcgatatcacgatcctcgaacgcgatcggcccgcgcggaccgggaaaatcagccttgcgcagagggcacagcgacgcatcgtcacccagagccttggaatactcgttgcctgaatccgtcgcctccgttgattgcgcatcggcagccccgtcgtccgcaaacgccttgcctgctccgggaaacgcgagcatgcccgctgccgcagctccggttaaccccgctcctctgagaaagtctcgccgtgacaatctggcttgttccatctctcctcctttacgtacgttccctcttgacgccgctcagggcgcagggacaacggtagatcctgaaccatgtcgagggtcaagcaggagattcaaagagaacgacgggcttttcgacagaacgagcgtgctacacgaggtgcgcttcgccggaggagattgcggtttcgatgccggattcgctacgcagcacgagacggccttgagcgtcgacgcccacaaccgccccttccgccagcagattgtccgcacgatcgaccatgcgaacgttttgtccgttcaagctggagtaggcgttgaactcgtccacaagcggtgcgaagccgttgcgccgccatacaccgtacagcggcgcgaaggcggcgaggagcgcttcgagcactgcttcgacagcgacggccggcgcggcaacggaatccgcgaggtcggccacgtacgcaggacgattcttgcctcccacgtcggggcgcttgtcgggcggcagtacgttcacgcccacgcccacgcacacgccgccgccgtgcgcctcgagcgagatgccgcaaagcttcgcgaaatcaggcgctcggtcgtctcgcgcactgcaagcatcgccttcgttggcacaaaataaccgctgtgcacgatttttctgccctaattccttcccagattcggaaaaccccaggtcgcgaatttcggttgcttcaggaaatcgtgcatagcgcgccttttgtgccagcaccacatcgttgggccatttgatgcgcacggcctcctcagcccgcgcgcccgccagcgcaacgagtgcgcggcgcaccgccatgcccacaaccaggctcaacgtgggaagttcgcgcggcgccacctgggggcgcaacaacagcgagcaatacagtccgccttccgggctggtccacgaacgaccctgccggccgtaaccggaaacctggcgaagcgcgcggacgacgaggccttccggctctcccgcctccaacgcgcgcttgacttcgtcgttcgtcgatgcaacttcctcgtgcagagcgatgcgaaacgggaagccgctcggcgaaccgccttccccctcgttgccgaatccaaattccgaaacacgcgcatcgcctttccggagcgacgaagagccgtcgacgcaaaacgagggcacagagcgccccttgctcacagccgcacgctcttccccaccgtaaccccatcgacgctaaccggcacgtcattggcaagcacgtggccagggagcagctccaacaggggctgcactacgaaatcgcgttccagcaggcgcggatgcggcaacgtgagcacatcggcatccacgacgtacagctggtagtcgaggatatcgaggtcgcacgtgcgcggcccgttccgaacctcgcgcacacgacccaggctgttctccaccgcatgcaggtagcccagaagctctttcggcggaatacctgtgcgcaaaagcaccacggcgttcacgaacgaatcttggtcgaggtagtaggccggctcgctctcgtaaaagctggagatgtcgacgatctgcgagtcgggcagcgaacacagctcggtgatggcctggttgagcatggcgatcttgccctcgcgctcctcgccgggcgaggccacaagcgggacgttgcagcccatgccgatgagcgcgtagggccgcagcccttcgagcgcggcaaccgtggccgccacgttgtgcgcgcgcaccacgctggctcccagctcgcaggccatgagcgcctcggcagccgaaacctcgtcgcgcgcagaaggttcgtcgatgccgtacgcccagcccaagaagctcttgcgcgacaccgccaccatcactgggtagcccagacgcacgaactcttggaagttgcgcaccagctccagcgtctgcgacggcgtcttgccgaagccgggaccggggtcaatgcagatgcggtcgtgcgcgacgcccgcagcctccaaagcggcagcccggtcgcgcagccactcgcgcacgtcggccaccacgtcgtcatacgaaggcgcgttctgcatggtcgaggggtcgccctgcatgtgcatgaccaccagcccgcaatcgctgtcgcgcaccgcatccaccatggcggggtcgcggaagccggacacgtcgttcacgatggccgcgcccgcttccaagcacgcgcgcgcaacttcggcgtggcgcgtatcgatgctcacgcacacatcgcgctgcgccaatgcgcgcaccaccggcagcacgcgcgccagctcctcgtccacggacaccggcgcggcgccgggccgcgtggactcgccgcccacatcgattatgcgggctccctcctccgccatgcgctcggcatgagccagcgcggcatcgaagccgtcgtgctggcctccgtcggagaaggagtcgggggtaacgttgagaatgcccatgacgatgggcattctcgtatcgaactcataggttgcgcagcgccagatcatcgttcggtgccgtcgcctttctgctcaggggcttgcggagccggagcgtcgacaggcgcctcgtccgacgtcgacgaagcagatgcgggcgcatcgtcgccgtcgccctccgcaggctcgcggtacggcggattcggatcctggtcgcccggctcgaccggctcttccttccagttcgggtcggccagatgctcgtcgcgggcgcgcgcggcggcctcctcggcctccttggccgcgatgatctcgtcctcgtgcttgaggtactcgtcccacgtgttgtccagcagggcaaggcacgcctcgccttccaccgtttcgcgctcaagcagcacgttggccatgagatccatctgctcgcgatggcttgccagaatctcataggcgcgatcatgcgcgtccttcatgatgcgggcgacctcgtcatcgatgcgcttcgccgtctcctccgagtagtcctgcgtgttgccgtagtcgcggcccaggaacacttcgtggttcggctggccaaacacctgcgtgcccagctcggcgctcatgccgtactgcgtgacgatggcgcgggccatcttcgtggcgcgctcgaggtcgttcgatgcgcccgtggtgatgtcgtcgcagaagatctcctccgccacgcgaccgcccatgaacacggccaactcgtcgcgcatctcgccgagcgagttgagcaccttgtcctccttggggatggacagcgtgtagcccagcgctcggccgcgcgagatgatcgagatcttgtgcacgggatcggcgtgcggaagcaggtgaccgaccagggcgtgaccgctctcgtggtacgcgatggtgtgcttcgtctgttcgtccagcacgcgacccttgcgctcgggcccggcgatgacgcgctccatggactcggacacttcctgctgcgtgatgatcttcttgccgcgacgcgcggtgagcagcgccgactcgttcatgaggttggccaggtcggcacccgtgaagcccggcgtgagcttggccaccttcgacaggtcgacgtcgctgccgatgggcttgtccttcgagtgcacctgcaggatcttctcgcggcccttcacgtcgggcgcgtccaccacgatctggcgatcgaagcggccggggcgcagcagcgccgggtccagaacgtcggcgcggttcgtagcagcgatcagcaccaccgagtcgttgctctcgaagccgtccatctccaccagcagctggttcagcgtctgttcgcgctcgtcgtggccgccgccgaggcccgtgccgcgctggcggccgacagcgtcgatctcgtcgatgaagataatggccgggctggcatccttcgcctgctggaacaagtcgcgcacgcgagacgcgcccacgccgacgaacatctcgacgaagtcggagccggaaatgctgaagaacggcacgcccgcctcaccggcgacggcgcgcgcgagcagggttttaccagtgcccggagggcccaccaagaggcagccgcgcgggatcttcgcgcccatggactggtacttcgccgggttcgccaagaagtccttgatctcctgcatctcctcgacggcctcgtcgacgccggccacgtcggagaacttcacgtcggggcgctcctcgatggacttcttcgtcttggccttgccgaagctcatctgcgagttgttcgccttctgcatctggttgaagaagaagaacaggatgaggccgatgatgatgaagggcagcagcgtgccgagcagctccacgaacgggctgggcagcgccacctcgtacggcacgttgggatgcgccgccatgaggtcgccgagcgagccgccgtaataggtggacgtgaagttgcgctccacgcccagcgtggccccgttgatgtcggtggtgcccacgccgccgagcgccttgcccgtctcggggttcttcagcgtggccatgcgcgcgttgagcgcctggaaggcttcgttgaacgcatcggcgccggtggagcccgccgtgatggcgggatagtacgagcccgacaccgtgtagtcgccggcgttgtacaccaccttcgtcgcgcgatcctgctcgacggcctgcacgaactcggacgtgatcagacggtcggtaggcttggcgccggcagacgacatgttcaagaactgctggcccacgaagaaagccaccagcatgaacaggactaccgatatgatggtcgtcctcgggctgggttgctggaactgcgattgtttgttttgctgtgccatagcgtttaactttccttttctcaccgactcgcgctgcgatgacggacagacccgcgtgcccgcccgtcatcgcatgcggccgatgccgcatacccttagcacgacgcgactcggcaacgccgaaccggtcgaccgccaagatagcttcgctagtaaatctccggcttcaagatgccgatgtagggcaggttgcgataccgctccgcatagtccaacccgtagcccacgatgaactcatcggggcactcgaaaccgatatatttgcaatcgatcttcgcctgcgcaagcgtcttcttccgaagaagcgtggctacctcgatggaagccggttgacgcgacgacaggtttttcagcaagtacgtcagggtaagaccggagtcgaggatgtcctcggccacgatgacgtgacgcccttcgatttgagacgagaggtctttcaggatacgcaccacgccggagctcttggcgccgtttccgtacgacgagatggccatgtagtccatttcgagcggaagctcgatcttgcgcgccagatccgccatgaagatagcggcgccgcgcagaaccgagatcaggatgatgccttcgtcggccgcgtcggcgtaatcgcgcgtgatggccgcgccgatctcgcccacacggtcagcgagctgcttttcggtgaacaggatctccgaaatgtcgttgtgcacgttcctaacctctatcgtcgcatttcgcttccgctatcgcccctgatcaatctgcgagatcaatgggcgagagcgtcacgcttaccttgaattcagctagtgtaccattgcctctccgggaaaaggagacgatacggtaacgccagcctgcctgtcacgatttttacatttcgcaatgggaactgggacgataggttgaaaatgccataggctggcgcagcaagtcagcgagggaggttgcggcgcgcgggatcgtggggagagcgcaggcgaagcgcatttcgatgtgcgagccctcgactcgactgagagatcgggcggcgcagccgcccagcgtcgagtcgttcgccgtccgtcaggacgccgaacccgcgaagtccgggaactcctccagcaaacgacctacgggcaggccgatgacggtgtccatcgcgccgtcgacgcgcgccaccagatcggctccggccccctgcacggcataggcgccggccttgtcgaacgactcgcccttgcgcagatagtcgacgatctcttcgtcggtcagctcgcggaacgtcacagccgagcgatcgacgaacgtgcggaagcccagcgagatgttctcgggctcgggcgcggccaccatccatacggatacagccgtcagcacttcatgcgtgcgacccgacaggcagcgcagcatacgcttcgcgtcggacaggctgacgggcttgccgaatatctccccttcgcacaccaccatggtgtcggcgccgatgacggcggccatgcctgtgtagtcttcggccagcacctcctgcaccacggcgccggctttgcgctcggccagcttcttgcacgcctcgggcggatcggccaggaggtcgggctccaaggtctcgtccacctcggacgcgtgcacgacgaagcgcacgccggcgtcttcgagcagctgcttgcgacgcggcgacgcgctggccagcacgatgtcgagggcgggcatgggcgtttcggcgggcgcggccgccggttgggtgttctgttcgttttccatgcgcggtattgtagcgcagcgggcgcaagcgttgcaccaagagcacgcaggttccacgcgaagcgcccagacgcaagcgcgggcaactctgaccccgaccgcaaactcctccccgattctccctgctacacatctcaccgaattgtttcacgtgaaacaatcgtcgcgatgcgctgcgataagagaacgcgcgtacgcgatatcgttgagaacgcataagccgtccctcatcgagttcaataatcattgcgatatcgcaatgattattctatactcggatcatatgccgctcgcgcagaaccaaggaggttgcatgctgtcggtcgtcgaaagcgccgaaatcctacaggtcacgccaacgcgggtgcgggcgctcatcgcacaaggagcattgccggcgcagaaagtcggacgcacgtggacgctccgggaggaggacgtgatgcagcgtgccgcaacccggccgtccgcaggccgtccgcgcaaggcggacgttccgtcccctgcagacgacagcaagccgcacgcagcagcaagcgagctctatcgcgcatgcaaagaccatctggcagcgtgcccgagcgctgccgagatagcggcgatcgacgaccccgagcaggccgcgttccgcatcgccgtcgccgacttcttcctccaacgcaaacagtcggagctcgttcgccaaggggtcttctgatgagcgagcaaccgttctacgtggtgttcgccggcgtgaacggagcaggcaaatccaccctgttccgcagcgatttctggcacacgggagggatgcccgccaccatggcgcgcgtgaaccccgacgaaatcctccgagagcaaggcggggactggtcgaacggccaggatcaagtggccgcaggcaggatcgcgctgcgcagcgtggacgagcatctggcggcacgacgctcgttcaatcaggaaacaacgctggccggccatcgagccctgcgcaccatggccgaagcacgcgagaagggataccgcgtgttcctgttctacatcggccttgcaaacgagggcatagccctgcaacgcatcgaacgccgcgtgcaggcgggaggtcacgatatagatgaggcgctcgttcgaaaacggtaccgggcgtcgctcgcgaatctgagcaaagcgctaccctactgcgaggaggcgcacgtattggacaacaccgtcgcgttcaagcgcatcgccctatggcaccgcaacacgctcgcttggtggggcgcgtcgaagtcagtgggagcatggcttcccgaagccatcgccgacgaatcgctttggagacgatcgtagcgcgacctacccgcgctttcggcgggcgcggtaggcggacatgggctctatgcggacgccgcgcttgttcgcgctgacggcgaggtcgccttggatgttggccacgtagccgctgcgaggcttgccgcccgcctcgtcgtcgaacgcggccagcacggcctccaccgaggccgtctccacgcgggcgtcgcgacccagcatcagctgcagcgcgcgcatcacggcgcgccggcgcaggggcaacggctcggcgccgaatgcgggcgccagcacgcaacctgcgtcgtactcgtcgccgagcgcttcgacgtggcccgccatcagcccatccaccatatcctccagcatatcgtcctcgtcggcgatgaggttcatcgtgcggccgagcacctccagaagctgcgggttgcgctccttcgcgcgcgggacgatctcatggcgcacgtaggcccggaaccggtcggtgtgcgcgttcgtcgcgtcctcgcgccataagcaacccgcgtcgtcgcaggccacgggcgcgccgtcgcgttcgcgctcggcgatgtaggcgcgcagctcctcgcggctcgcatccagcagggggcgcaccaccggcccgttgcggtacttcatggcgcggaacccacccggccccgtgcccacgatggagcgcatgtagaagctctccacgcgatcgtcggccgtgtgcgccgtcaggatgcgtccatcggcaagcggtgtcgccgcatgcaagcagaggctttcgagcgcttcgttggccgccaggtaacgctcacgcctggccaccgcctccacgttctcgcccgtgcgctgcgcctctcccgctatgtctatctcgcacgagaacagcggaacgtccagcagctcggccaactgagcgacgaagcgagcgtcctcgtcggcatcctcgccccgaagccggtggttgacgtgcagcatggcaagctgccccagcgccccgcgttcccgcaactcgcaggcgatatacgcgagcgccgtcgaatccgacccgcccgacaccatcagcatcgccggcgtatcggcatcggccaagcggcgtgccgagagcaccgctgccgcccgatcgaccagcgtttccgtttgcacagcagccatcatgccctcccttccaagaacctccgctcgaactcttcttctggcagaggacgaccgaacaggaagccttggatataatcgagacccatgccgcccactacttcgtattcttcgttggtctccacgccttcgaggcacacgctgatacccacggcgtggcacaattccaccacgaacttgatgaacgtggcatcgaacgtgctcgtctggatatcgcggatgaacgcgcggtcgattttcacgatgtcggcaggcgacgtcttcaacacgcccaacgacgagtagcccgtaccgaaatcgtccatagccacacgcacgccttgcatgcgcagctgatcgaacagctcatgagtgacctgggcgtcgtcggcgaaacggctttcggtcatctccacgacgaggctctcaggaggcagctccgcctctcgcaacgtgtccacgataagaggaaccagaccgtcctcgtcaagttggcgatacgacaggttcacgctcatggtaaacgaggggatcgccttcctccatcgtttacaggtgtccacagcatgttgcagaacccacgtgcccacaggaacgataagaccgctctcttcgagcagcgggataaactcgagcggcgacaagtcgccatactcgtcgcaacgccaacgcgcaagcgcctcggctcccacgacgcaacccgttgcagcttccacctgaggctggtagcacaggctgaatcccttgaagccgttctccacgctgtcccgcagcagctccatcagctcgagctcgcgcacgcgctcggccagaataggctgcgagaagtttacgcagcgcttcttcccatgccctttcgcgtgttccaacgcgtaattggcgtacttcacgaggctctcgtacgtttcggcatcgccgggatattgcgcgatgccgccggacagcgtgcaatagaacttgcggccctcatgatcgtgctgtcgctgaaacataccgcctagctgcgcgtatgcgctgcgcagcacgtcgacatcgtcatcgacgatcacggcgaactcgtcgccgtccagacggtacacgcgcgcgtcctcgggcagcgagctttggatgcgctgcgccacgaaccgaatgacctcatcgccgaatgcacggtcgtagcggtcgttgatgtgccgcaagtcgtcgatacccagcaccatgaggctgatccgcgcgctctgcatcgtctccatacgacgacgcacgtcgtcctcgaactcgaacttgttgaaaagaccggtcagcgggtcgaccttgctcttctttcccaggttcgtgatgaacccggcgaacagcagcggctttcccttcgcgtcgaggatgagccggccgcggcatcgcagacgcacccattcgcctttgcggttgatggcgcgatactccacccaatggcgcgtcgtgcgcgcatcggcgacttcctggttcgattcgaggaacgcctgcttgtcgtcaggatgcaccttcgaaccccacacggccgccgcgttttccaccacctcggagggaaggtcgaactcttccaccatagcgcgcgggtagcggaacacgccggttctcatgttgcatacgtacagataatcgtcggtgctctcgaccagcgcgtcgtacagcttgctttcatcgtacgagaacgagcacggatcgaccgacacccccctgcccgatcgttcagcgctgatcagggcgttgatgttgcgatctatatgaaaacgtcgcttctcctcgtacatacgccggtccgccaaggccagcacctcgtacaactccagcggcgcttcggggtccgcctctgcgatgccgaagcagaaacccatctcgtagggaggctcggtacggcgcggagtcgcggagagcgcagcgcgtgcgcgctcgatcttgacgcgcgtggaagccgcgtcgcctaggaatacgcacacgaactcgtcgccgctcaagcggaacccgtaatcgttgggaccgaattcgcatcgtacggcgttcgcagccgaacggatcaggtaatctccctcggcatggccatgaagatcgttcacatccttcagccggttgatgtcgtatagaacgacggacacctgctcgccctcgaccgcagcccgcgcaagcgagatgcccagccgctccttaccggctcggcgcgacagcatcccggtcagttcgtcggtgttcgcagaaacgagcgccgtgatgtccaccgactgctgcaaatgcacacgcgacccgtcgacccaggtcaccaggctgtcgtagttgcggtacgtgcgccccgtcatggggctttcctcgtcccactccaccaatggaacttcgtcgccgcagcttagaagctcgtcaaccgggcagaaggcgcatcgctcggtcaagccgcgctgcagcacctgccagcacaccttgccctccggatcctccacgccgtaatcgtgcttcatgaacccgttcatataaagaatgcgatccgtcttcggatcagtcacgtagatgctcgtgcgcatgccttcgagaaccgtatcgaacacgaagctgcgcagatcggtggagccgccatggctcccgtcgaccgcgagcggcgcgtcgtgccgcatcctcggaaccgcttcgtcaggctcatcgttcgacgactgacgaatatcgcaatcgctcatcggtcgctcctttcaaagaagccctcgacgcgctccaccagcgcgatcgtctcgacgtgtgtctcgtcatctcggaaattcccgtc

SEQ ID NO: 9070 - DNA, 6485 bp, Unknown
  gut microbiota DNA sequence
gagcgtctcgatgtcttcgaccatcgtctcccaattttcctcgagatacgcgtcgatcttcctggtcagttcagcatgttccatggcaaattcgcctctctattcgagtgcgtcggcttcgaaagcggccgaaacgccgcgttcgcacgtagatactttcattatgatgcttgcggctgcggtgcgctaggccgtcatccatctgttgaccgaaacgccaagcgaccccacgcacgcatgcatggggtcgcttggacgaaaacccttcatcggcccgtccgctaggagggaagggagagggcggggagccgaaaaggtgcgttttagagagctcgcgccacgtcgtttccgctgcggatagcaagggcgatgttgaaaggctcgttgcaatcgccgatagcataggtctcggaaacggagatgccgtcgagcagagcggtgttcggctccatctcggcgccatcgatgacggcgtcgcaatcgatggtcacgttcgtgcccacttcggtggcgatggtgacctggccgtcgccgatctgcttgatggacgcccccgggtacaccttcacgcccagcgaatagagcgccgtggtcatgaagcgcatcgcatgctgggactgctgcatgtcgaggtctttgttggcgctcggcgtgacgatggtgacgtgcttcttgcgcacggtaagccagagcgcgcaatcgaacgcctgggcattcgagccgtacacgacgacgttctcccccatgtcggcggtcatgaacgagtcgaaatcgatgacggggacgccgccgctcacatcgagcttggtgcgcgtgccgcccactgccaggatgaccgcgtcgggcgcctcggagtcgatgagggcctgatcgacctccttgttcagcgtgacgttcacgccggcgatctcaagctgtcgctccaggtaggctgcaaggtcgtcgaggttctcgtgcgggcccttcaccatgctcgcgaaccccagcatgccgcccagagaaccggtcttctcgaacatcgacacttgatggccgcgcaacgccgcaatgcgcgcagcctccatgccggcggggccgccgccgaccaccatgaccttcttcggggaggatgccggctcaagctcgtaggtggccggcccctgctcggtcatgacgcgctgggtgagcgcgttgacgcggcaataccccatcatgcggttcagctggttgctgccgatatggcagtgcaggcagcgcgtgcacggggcgatctcgtccgcgcggcgttcgcgaagtttgttcacatactcgctgtcgacggtgatcgggcggttcatcaggaagaagtccaccttgccgtcggcaagcgcctgctcgaagaagtcgggggcgtgcgccggatccatataggtgaccgtgccgcaggggatcttcaccgcttccttgtagcgcgcgacgacgtcgatcagcatgccggcgccgctgtggcttccgtcaagctggccctggaagtggcggctgaaatcccattgggtgccgtagccggtcgcgccctcaatgccgttcaggatgaagtacagatcgctggcgaactgacaggggtggtttcccagagggcccaggcgcaggtgcatggaatcgcagccggcggcctcgaacagcttcgcgaactcgatgccctcttcgaccgtgatcacgaggttgctgggagcggtcagggtgttgtcgaggtccatgagcgtcgcgttgttggtgaggttgtcgttttcctcgacgcaatcgatgagcatctgcacgacgaagtcgtcgccgcaagcagccttgatcttcgcgatgcactcggtgacgaagcgggcgcgatcctccaagctgccgatgccgtactggtcggtgcgcgtgttgtggaagcgcgagaggaagtgctcgccgatgttgaagccggccgcgttgatttcgagcgccttgaagcccatgccctggatggtttgcgcaaggctgacgccgacatcctcgatcttcacgatgtcgtcgaccgaaagctcggccacatcgccgcccatgtacgcccattgcaagccgagcgacgtgccgtactgcgcgcactcgtcgaccaaacgcttgcagaagtcagccgcatcgggcgcggcctcgtccccggcgataagggatcccagttcgccctcgacccagatgaactcgacgccgcccttcgccatattgacgtagtactggaagaattcctcggtgaggccggccagatacgtcgccgatccggcggcggacttgatcatgcgatggctcgactcgatggagccgatcttgatcggcgagaagagcgtgctgaaatccgtggtgttctggcggtaatcggtatcctgcgggttgacgtacgatgccgcgatgaactcggtgtcgttcgcggccgccccgtttgcgcccgccgccttgccgccattgcccgtggccgccgcggaatcgttggccgccggagcgcagccggccagccccgcccctgcggcggctatacccgcaactccgagccccgtgagaaagcttcgcctggttaattcggttcccatgatgcatcctccctgcatgtcgttttggttcttgctcgaaagcaactccatcgccccttcggcgaccgcctcagactacgcaagacacgggcatttttcctcacatgcggcatgtgaaatgaggggaaacgaggcctcacgccccacatggcacgggcggttttgcccagaaccgttacaataggcgcggggactcaaagcgttcgcgacgggggggcagagtgggacatcgcatcatcatgtatttcggcttggcgctcgccctgctcgtcggattgttcacgctctggggcggactctccttgggcggcctcacgcgcctgggaatacccgaaatactgaaatactggtcgattcccctgctcatagcgcttgggttgacgttcttctcggttctagcgaaacgcaagccgccgacaaagcgctgttcgagcgcagctgcggtggcggcaggcgtcttcgttttgggcgggtacgccgttctgttcatggagacgacgggggttctgcgccttgcaacggtgagcacatcggcgattctggtaggcgtgggatacggtcttctctcgttagtttggcagcatcgcctatcgtcgcttgcgttcgacgacgtagtgaaaacgctgctgttcgccctggtcatccaatcggcaggctacctgctgctattcgcgctcttgcaagaccgcacgtggatggtcttccccttccttgtcgcgttggcggtcgttttctgccttatcaccctccgtcttcccaagtcgaacgaagatcgccgcacgaactcgaaaaggcgaaagggagccttgaagagcgcggttgccgagctgagcgatccgctgctgtgcgtatgcgccatcgccttcgccgttgccctgacgcgagccatcacgctcgacgggatagagcgaaccgacgcgatcaacctcatcgccagcggctgtatcatagtcgtcgcgctcgccctctacggcatatggttcgtgttgggagacgatcgcgcgccgttcaaaaagctgagcattctcggactctaccgagcgttcttcccgatcatcgtcacggcgctcttggcgctctcgatcgtgggcaattcgctggcgctttcggttgcgaccttggtgtacgtgctgttcacatttgtttcggtgttcatcatgtcaaccagcatctccgtagctcgcgcacatagcgtgccggcgacctccgtgtacggagcattcgcaggagccacgtacttcgtctttgcggcggcgaccgcgttgggagcatgggtgtactacccgcgaaacttcggcgcagccacgctttcggtcatcgttctgttcgtgttctacatcctggcgatgtcgtatgcggccatccaggcgcgcaagaagcgccgaggggaggatgccacaacgcgaaacccggtcgaagcgaaagccacggttgtcgatggggtttcggagcggtgcgcggtcctgtcgcagcaacacggcctcacggcgcgagaaaacgacacgttgctgctgctggcaaagggaagggacgttcccagcatcgcgaagcagctgttcatatcggagaacacggtgcgatcgcacagcaagagcatctacaagaagctggacatccactccaagcaggagctgctggacctcttggagacgatcgagcttgcatacgagaacgaccgctgagccggcgcgtctcgcgatgctccccatttgaagtatttgcagcagccgcgctccgtccggaatacctcccgcggcgaacggcggctttacgctgtggtattctgacgctatcgatacgcaaaaagcagctccccgttgaagagagggaattatgcaacgaaagaccggcgaaccggcccgcacggtaaggcgcgccccgcttctcgtcttcttcatgctagctttctcgctgtgcctcgcgcccagcgcggcttatgccgggcccgccctggagatcgagcagggctacgtccagcccgacggagcgaccttccaggccgggcagcgcggcgacgagttcttccactacgtgcggacgaccgagggtctcctcgttcagaagagccccgccgaccagacgtggtattacgtgacaagcgagggcttcggcctcgcgctcgggccgcgcgccgacgaggccgcaccggcgaacgctctggcgccctcggtgctggcaaacgataccggcaagatggcctactccgcgctgggcggaggcgcctacgtcccccgggaccggggcgtcggcgaggcggtgacgctctccgacatcgaggccgcgcaggccgcgtccggcgcaggcgcccgaaacgcgcggtcggtcgcgcagaccgagacctccctgccgctgatcaccatcgtcatcgggttcgcaggcgacgagggcacgaacctcggccccgacgacatcgtcacgggaccggacgggtcgacgtggaaggcctcggagcagcgctaccgcgacgactacgattggaacaggctgctctacagcggtgagaacagcatcaccaactactacgccaccatgtcgaacgacaagttctcctggacaccggcgaccgaggagaccagcgcgtacggggagggcggcaacaccaacgcgtacgacgcgcccggcgacggcgtgatccacgtgacgctcgaccgcaatcacggcaactggaaaggggcggaattcatgagccccgaggccaaagaccagcacgacgcgtacgtcgacgcgctcaacgaagcctcccagtacatagacttcgcaacctacgacgcgaacggcaacggcgtgctcgaaccgaccgaagtctgcctgctgttcatcgtggcgggctatgaatcctcgggaggcgaaatcgatccgtcaacctgggcctgccgatggcagctgtccagcatggacaaggacagcttcgcacccgcaacgatcgtcaaccccatcacgcacagcgaaatcgtggtcgacgactacatcaccatgggagaaatccttacgaacgacgtcgtcaccgctcagcccatgcccacgagcaccgtcgcgcacgaactgggacattacctgggactgcccgacctgtacgatgtcaactacacctcgtatgatcccgatgcgaccgtcgaccaatttccctggttggcctacgacgtaggagaaatcagcttgatggcaggcggatcgtggggcaactacattgccgatagcggcgaaactgtcttcgtccccgtcagcttcgaccccttctgcttggaacagctcggctacatagagcccgtcgaggtagccgccgacggcacgtacgacgtctccacgctctggagcgacgagggctaccggtgcctgcgcgtccccaccagcaccgaaggcgagtactatctggtggagaaccgccagtacgagagcttcgaccggggattgacgtcctcgtaccgcgccgaacgccataaagacaagccgcaatactacaacgaaacgggcggcgtcgtcatctggcatatcgaccagggaatcgtggatgcgcgcggcacgaccgccgacgatccccttttgggtaacaccgtgaacacggtcgaccaccgtccgggcgtcatgcccgtctatccggagaatacggagtatcgggacggccaggcactttacactcgcccgttcttcaacgccaacgcctgcgagacgttcggcatggagggcaacgtcgttccgctgctgcagtacgacggctgcaacacgcccgccgagcgcgtggactccggcatcgtcctctcggtgggcgacgctgtggccgacgtcatgagcgtgacggtggacctgcccgagccggaccagccgggcggcggctacgaggagagctcgcacgtcggcgagatcgccggatcgcgcgtggaagtgtcgggatcgttccccgcaggcgccgagctctccttggcgctctcg

SEQ ID NO: 9071 - DNA, 282 bp, Unknown
  gut microbiota DNA sequence
gcgtagacggcggccgtgatcgcaagaactccggcagcgatggcgatggtgcccgcgggcgactccaacaggttcagcacgttcgcgacgaactcgggcggcggcccgttgccgtcgagctggaacgcgaagaacacgccgattatgatgagcagcggcaggtagcggacgcccttcgtcatgccgaaccgcgagaacaagggcatcgtgacggacagcatgaccaagatgatggccaatccggcgacggacgcgaagagcatggcctgccacgagaagttc

SEQ ID NO: 9072 - DNA, 1452 bp, Unknown
  gut microbiota DNA sequence
tcgttgtcgtcgcccagcgcgccgtcgatggcgtcggccacggcttcggcccgctccgcatcgcccatgatgccgaacgcaggatccagccccaggtcgagcgcgtgggcgcgcaggatgcgcgcgcacatgccgtggatggtggatatccaggcgccgtccacacgcagcgcttcctcggccaacccttcggcgcgcagcgtgcgcttgacgcgcgccttgatctcggcggcggccttctcggtgaacgtgatggccagcacctcgtcgacgccggacgccgcagggccgctctcgggcagaagcgcataggcgatgcgctgcgtgagcgtgaacgtcttgcccgagccggcgccggccgacacgagcaagggaccgcgcacgtgctcgatgctctggcgttgaccaggggtgcaggttgagaggttcatgcgcccatccttttctcgcaggcgagcacggggcaatacccgcacgggtctcccccgcgcggatcgggaccgatgcagccgtcggccagcgtgcgcacggcccgggcgatgcgatcctccaccgcgtccaccagctcgccgaacgacgagacgcccagcgcctcgcctgccggccccggcacgccgcagcgctcgacgtcgatgccgggcacgtctcgctcgcccacgaccgtgcggtcgaaggcgcccgagacgcgccgatcgcggccgtacgacacgtacagcgcacccaccacgtcgagacccagcaccttgcgcgccacctgagcgtacatgagcgtctgcaccttatggggaagcaccgcgccgcccgcctgcgcggcgggcgatgccgaatccagcgcgtagtcgccattgagcgaccccttgtagtcgataaccaccgcctggccggccccgttcacgtcgatgcggtccacactgccgcgcagcaggcatcctgcgtacgggaacggctcgctcgagccgaaatcgaactcgaagcgcacgggctcgaagcccggcagcagcagcgcctcgcggtcgaggaaccggacgagcctcttcctcagatcggccgtctcggcgcgttcgaaggcggtgcgcgggatcaacgggttgaccgagcgcttgaggttgcgttgcgattccagatggcggtcgaacgtctcgcctagaagcgcgcgcgcttcgggaagcgtcgcggagtccaccttcgcatgccccgcctcgcggaaatgctcgtagaagctacgcagcacgttgtgggagaagctgcccatctcgagaggcccgaacccggcgtccggctccgacaggcgaagacggcgcagagcgaaccacttgtagggacattcaaggtagctttccagcgcagacggcgacagcgccaacgcggcgtcggcgccgcgcagcccctcgcgcggcgagcgcggcagcacgatgcgcgggcgctgctcgggcgacaccgcgcccgcggccg

SEQ ID NO: 9073 - DNA, 32251 bp, Unknown
  gut microbiota DNA sequence
ggcgaaggcgacgagcggcttgggaagccccgtcgcccggtcgtcctcgcccgcatccgcttcccggtagcagtcgagcagctcctcgaacatgaccgacggatacgcctcgttcgcatcctcggtgttcagcacgcgctcgcacaccaccgtctcgcaggcgctcgaaagcgcgcggaagaatcggcggcgggaggcggcgagcgcgtctgcggggcggccgaggcccagcttctccagcagcagcgtgccgccatcctcgacgagccgcaccgggtaggagcccgcgtcgagatcgcacagcacgagcgcggcgcaagagcacgcgggaagctcggccgcctcgtcgagcgacatgaacagcgcgtcggggcgcgcgccttcgtcgcgcgccgaccgagcgcttgaggaaaccggcatgcgctccagcaacggcaatgcgccgtcgaacaccgcgttcgcgcgactgcatgccgccgcgaacctgcgcgcgcacgacacggccgccagttgctccgcgcgaaacgccggatcgaggtccgtacgtgcgcgcaggcgcgcctcgaaccccgcgagcgcgccgtccgcgtcgcccgcctccagcgccgtcagcgcgtcggccgccgcctcgctttcgcgggcgagatcggccgcgatgcgcgcgcgctcgaccgtgcggtccccgcgccacgcggcatccagctcgcaggccgttcggatcccgatgcccgagaacggtccgagcgcgaagtcggacgcctgcgcgatgctccatgcgccgcaggcgaacgcgtgcagagcgagaaacgcgcgtccgaacgcggtgtcggcgaacgcccggctcgcactcacggccgaggcggcgcccgcttcgagcagcgcgcccgcaacgtcgtcgaacaacgcgcgaggatcgcgggcagtcaccgcaacgggcagcggatcgcgcccctcctcgaccgcgcggaggcgctcgtcggccacggcctgcgccaccgtgctcgccacgagggtcggcgcggcgtagcgtcccgccggaagcaagaagcgcacccgccccgtcgggcgcagaggctcgggcatcgcgggcttgaacagacgctccaacagcccttgcagctcggaggcgcgcccgtcggcacccgacggggcgcggcagccgtcatcgaggcgaacgacgtcagtccgctgcgcgagcgcggccgtcatccgctcctcagcgcagtcaaggtcgtcgaacccggccagcacaaggggcgcgggcgcctccatagcctcgggaagcagagccgccgcctgcgacgattcgcagcaccccgcctcctgcagaagctccgcgtaacgctcgagcaccatgagcgcatcgcgctcggccgcgctcagaccggcgtttgcggcgaccggcgccgtcagatgcggcaacgcctcgcgcgccaagcgcgcgagcaggtcgacgacgcccggcgtggcttcaagcgccgtccgttcggtctccaagcaggcgcggcgcacgagcaatgcgcgatcgaacgacgacacgatgcggcgcccgtcgccgaacagatcccacctgtcgcgcacccacatcataggcgtctccacgcgcgctcccagcgcgcacggcccctccgcgagcgcgcggcgcacgcggtcggcagcggcgggactgggaaccagcagcacgggcgcgagacccgccgccagccacgattccagatatgcgcgggcggcgtccagcacgtcgcccgcatggtcgagtatgtgatgttgaaaaggcatgccgcctattgtactcgcccgccgcgcgggcgtgcgctacaatggccgccatgcagaagaacaccttgaaatactccgccgtcgtgttcctcggcggcgccagctacggcgtgatggccgccacgatcaaatgcgcgctcgccgaggggttctcgtggacccaaaccgccgccagccaggcgttcttcggcgcgctgctgttcgccgtcgccttggccgcgctgaccgtcctcggcaagcgccctgtaccgctgtcgcccaagcgcgtgctgtccttgctggggctgggcctcgccacatgcaccacctgcgtgctgtacaacttcgcgctcaccatgctgcccgtgtccgtggccatcacgctgctgttccaattcacctggatcggcatcgtattccaggtggtcgccacccgtcgcaaaccccgcctcgctgaaatcgtcgcggcggccgtcatcctcggaggcaccctcttggcgagcggcctgttctcgaacacggtgggtcatctcgacccgctcggcaccctctgcgcgctgctgtcggccgtcagctgcgcgacgttcatgttcctgtcggcgcgcgtcggctgcgacctgccgccaatcgagcgcggactcgtcgtgtgcctgggcgcgtgcatcctcggcttcgccgtgtgccccgactacttctcaagcggcgcgctgcaggccggcatttggaagtacgggctgatcctgggcgtattcgggctgttcgtgcccgtggtgctgttcggcatcggaacgccgcacctctcggcggggctgtccaccatcatggcatcgtcggagctgccatgcggaatagcgatatcggtgctcgtcctgtccgaacccgtggacgcgcttcagacggccggaatagccgtcatcatgctgggcgtggcggtatcgcagctgcccaacctgctgccgcaaggcgcgtccgctcgctttcgaaaaaaacgcttgcaatgacgcgctcgctttgtaataatgttcaggctgcttttccagctaggaatcgcgcaagccgtccccatagtctagaggtcaggacgcggccctttcaaggctgagacacgggttcgattcccgttgggggcaccacgaaatgccaggccggaagctcatcgcttccggcctttttctttgcctgcgtctttcgtgtgccaacatgtgccgcaatcgacatgttcgcgcttcatcggacccgccgccgcgtgggcgagccggcgaacgtcggacgccggagagcctgccggatcaacccgctcccgcgcatcgccgtcgagccgctcccagatgcggcgatgcgatgggcgccccgcacgctcgcaccgaacgccgcccgtttgcggtatgattatgacatggacaccgacgagaacactgcgcgcccgctcgcgccggaaaacgaacccgcctctatcgagctggcggacgccgacgacggcgcgctcgcgcctcccgaagacgagctgaagaagcccctggtcatcgtgatgcacgcatcggtgggctccggccaccgcagcgctgcctacgccgtcgcgcaggcgttcgagctcatgcgcgacgcggacggcgagcggacggacggccagcctcccatccccgacgacctcgacatcgaggtgatcgacgtgctggattacggccgcatcgtgttcgacggaaacaacgctgcgtcgctgttcacgggcgccacgcgtcccatctacgacctcacctggcgcttcacgctcaccggacggcttctgtggggcggcggctccatctggtcgcacctcatgtactcgaagttcaccgactacgtgcgcgacaggcagccgctggccatcgtgtgcacgcacatcaccgccgccaacgtggccgtggcggcgcgcatgctgaccggccagcactaccccatcgtgtgcgttcccaccgactacgagaccgagggcctctggccgcacaaggccgccgatctgttctgcgtcgcgaacgagtcgatggccgagacgctgcgcccgcgcaaggtgcccgaggagagcatcctcatcaccggcatccccacgcgcgacgatttccgccgcgcctacgaccgcccctccgtgcgcgagcagttggagctgccccaggataggcgcatcgtgctggccttggcgggcgcgtacctgccccgcccctacgtgcacttccgcaccgcgctggacaagctgctgccctacctgcacggcttcgacgacacgctgcacttcgtgttcgtggccggaagcgacgccgactacgcgcgccacctgcgccaggaatgcgacgatctggggctctccaacgccaccgtactcgactacgtggacgacatggctgcgctcatggcggccagcgacctggtcatctgcaagtcgggaggcctcacggttaccgagtgcctgtgcgcgcaggtcccgatgatccttctgggcaaagcgtacggccaggagaaggtgaacgtgcagatgctcacctcgctgggcgccgccatgcacgtgaccacggcgcgcgagctgctggacacgctgcgccacgtggcgcgcaaccccgaaagcgcccacgccatgctgatcaacggcagcttcctgcgccacccgaacgccgccgaggacatcgcgaacgccacgctgcgcctgatagccgcgccgaagaaccccgacgacccgcgctaccgcaagcacctgctgcacttctactggggaaagaagcccgcccacatccgctaagggcgcagacggggtttcgcgtcggcttggtaccaggtttgtgcattatgcgctcatcggaccggaggtcgaccgatgagcgtatactggttgttcggcgcccgacgttcgctcggttgcgcctcgatcttccgaaatgcatgacgcggcggatcgaccccgcacctgcaatcagcggcacccgtgccgcaccgacacagaaaacagagacaaatgaagcaattcaacgaactcggcctgtccgaccaggctcttgaagccgtcgcgcgcctgggctacgaagcgcccacgcccgtccaggagcaggccatccctctcgcgctcgaagggcgcgacctcatcgccgccgccaagaccggcaccggcaagaccgcggccttctcgctgccctcgctcgaccgcctgggccatgccaagggcgggcagggcccgctcatgctcgtggtcacccccacgcgcgagctggcccagcagatcggcgaggtgtgcaccgccatcgccgcctccacgcatcaccgcatcctcaccgtggtgggcggcctgtcctacaccccgcagatcaacaagctcaagcacggcgtggacatcctcatcgccacgccgggccgcctggtcgacctcatggaacagggcgccgtgcgcctcggcgacgtggaggtgctcgtgctggacgaggccgaccgcatgctggacatgggcttctggccggccatgaagaagatcatcggcgccacgcccgcctcgcgccagacgctgctgttctcggccaccatcgacgcgtccatcaagaacagcgtgggcaagctgctgcacgacccggcgttcgtcgagatcgcccacaagggcgagacggccgacaccgtagagcagtacatcgtccacgtggcgcagaccctcaagccggcgctgctcaaggccgtgctggccgagaagggctccgaccgcgtcatcgtgttcgcccgcacgcgcagccgcgccgattccacgtgccgccgcctcaagcgcgcgggctacaccgccgaggctatccactccgaccgcagccaggcgcagcgccgccgcgcgctcgacaacttcgccgccggcaagacgggcgtgctcgtggcaaccgacgtgctggcgcgcggcatcgacgtggaggaagtggactacgtcgtgaactatgacctgcccacccagcccgaggattacgtccaccgcatcggccgcacgggtcgagcgggcgccgcgggcttcgccgtgtcgttcgtaagccccgagacggccgacgcgcttcgcgacatcgagaagctcatcaagcgccccattcccgagatggaggtgccttcgttcgatgccgagcaggccgccgaagaggccgcgggcaaggccgcccgcgccgacgcgcgccgcgaccccgagatcaagcaggccgccaaggagatggccgcgcgcgagcgcaagaaggccaaggcccgcgagcaggcgcaggccgaagacgcgccgaaaaacgccccgaagcgcaaggcgccgaagaagcccgtcgcgtcgaagggcgcccagccgaaccgccagcagccgggccgggcgaacgcgaagcaagggcagcccggccagcgcagcggcaagcccgcgtccggaggcgcgcgccccgcgcagtcttcggcgaagaagggcggtcccgatctccgtccgggccgcgctcatcgcgccagcctcgcccagcagcgcagcagaggcggcaagcgcaaatagacgtcatggacggcgggaagcgaagcatccccggttcccgccgcccgccgcattactccttctgcgttgtaaggcatgcgagaagacccggcagcgcgaacttcgggtccaacgtgcggcaaaaccgggggtttggcagtctcgaggtgcccatgacgaccatgttcccgtttcggcaaaccgtgaactgggggtttgcttggaagctgttcggcgaagggcgcgaaaactgccaaaaccccgattttgccgcatatgggttcgtgaaaccgtgctcgccgctgagtccgcgccgccgaacgccggctgcaacctcagcgccgcctcgtcgaggccgacacccgcgcgcggcaacctcttagcccaaggggttcttgttctggttggcggccacgtggacgaggcggttgcccagccacagcaggaacgccagcacgacgacggcgctgccggccagcatccattggccgcgcgtcaactccgcgatcagcaggaacaccaccacggccgcggcgaacagcagcacgagcgtgccgaaggcgaccagagccgtagcggccgtgcgggcgccgtttccctcctcgcgctccggatgggatccttgctcgatccgctcggattcatcgttcatatcggaagcccttcccatcgacaacggcccgacgggggtcgcgttcgctcagcatacgcttttcgtggcgacgacggccacgccggtgccgcatacgtcctcgatcagcacgtctccggccgcgaccagcgcgtcgagccgcagcgcggcgacggcggccagcacgtccttcatagcggctttcggcacgggacgctgcgtcttcacgctgaccggctccaggcagccggacacgcacagcacggcggtcaccatgcgctcgggggcgacggcctcctgcgccgcgtagtcggccccgcgcttgcaggtatagccggaaacctcgctcacctgcccgttctcgtcgagcgcgacctctatacggcagcccagcgggcagcagatgcacgtgtaggcggcgatgtcggtagcgaactgcatcagtcggcgcctcctccggccatgccggtctcgtcggccacgcgcgcggcctcgtcgcggccctcgacgcgcacgcgcacggccgagcaccccgccgcggcgcccgcgggcaggacgacgagcaccatctcggcgggcacggcgatcatcgtcttcgcgcgcttcagctcgcgcacccggccggcttcgtcgatcccctccaccacgaagcgcggctcgttcaccgtgcgcgcgacgcgcagcgacagcatgagcttctcgtcgggcggcgtggcggcgtcgatgctctgcggcaccacgtagcgcacgtcctcgcccgccatcacgggaacggcgacatgcgcatcgcgcgcggccgaggcgcccgaggccgcctgccgcgcataagcggccgcggcggcgcccgcgcgctcgccctcttgcgacgcatggtccaccagatcgtgcacgtgcagcgcgttgccgcaggcgaacacgccgggaacgtcggtagccaaacggttgtccacccgcgctccgccggtgacgggatcgagccccaccccggccgacttcgccacctcgttctcgggcacgaggcccaccgacagcagcagcgtgtcgcacgcgatgcgctgctcggtgccggggatcacctggatcgtctcgggatccacctgcgacacgtacaccgcgctcaggcgaccctccccttccagccgcgtcaccgtggagctgaggtgcagcgggatgccgaagtcgtccaggcactgcaccacgttgcgacgcagaccggacggatgcggcatcagctcgtgcacgcccaccacctcggccccctgcgacgccaaacggcgcgccatgatcagcccgatgtctcccgacccgaggatcaccgcgcgacgtccgggcaggcacccttggaggttcatgaagttctgcgcgctgcccgccgagaacacgcccgacggacgcgagcccgccaggttgagcgcgcccagcccgcgctcgcgcgagccggtggccagcaccacggcgcgcgccgcgatggcatgcgcgccgcgcgcgtccaccgcgtgcaccgtgagcggcgctccgtcgtccgggcgccccggatcgacggacgtcacgctggcacccgccagcacgtccaccgagcccgcgtccgcaagcgcgtcgatctcgcgctgcgcgtactcgggacccgtcagctccacgccgaagcggtgcagcccgaacccgttgtgcacgcactgcttgaggatgccgcccagcttctcctcgcggtcgagcaaaagcacgcgcgcgccctgctgcgcggccgcctgggctgcggcgatgccggctgccccgccgcccgccaccgccacgtcgtagacatgcgcgcgctcgcgctccgcgtcctgcgcctccgaccgctcgcccttgcgcgccagctccgcgtaatcggggcgcgaagcggccaccacgggcgatcccggcaggcgcttgtccagcacgtcgggcgccacgcccgtctcgcgcgccacgatgcgcgcgatctccggcgagcagaacccgccgtggcagcgccccatcatcgcgcgcgtgcgccacttcagcgcgtcgagcgacagcacgggcagcggagcgtgcagcgcggccacgatctcggcctcggtcacctcgcagcagcggcacacgatgtgcccccaccgcgggtcggcctcgatggcgcgcgcacgctcggcctcgtcgcgctcggcgaacggcttgcagcgctcgcgactcgcctggaattccccgttcgcctccgcgcccagctgttccgccaccgcctgcgccacgtgctcggctacggccggagccgaggtgagccccggcgagtcgaagcaggcgatgttgaagaacccgggcgcgtcgtccggttcgccgatgacgaagtcgtcgccgtcggcgttcgaggcgcgcagccctgcgaagttcgcgatcatgccgcgcgcgccggcgtcgggccacgtcttcttcgcggcgtccagcacgaagcgcagcccctccgcgctcgtggacaggtcggtcttgctcgcctgctccacggcgttcggccccaccagcaggttgccgtgcacggtgggcgtcacgagcacgcccttgcccgctgacgacggcgcctgaaacacggtatgcgagaacagcgggccgtactcggaatcgtacaggcagtactcgccgcgccgcgccgcgatgcgcaggcgatgcgcgctcacggcattgttcagctcgtcggcgaacacgccggcggcgttcaccaccgcgcgcgccgcgtaccgcgcgcctgtcgaggtggacagcagatagcgcgcggacgagggcgagcccgcggccaggcgctcgacggacacgacgcgctcgttgaagcggaacgccgtgccgtgcagcgccgcctgctctgccgagaacagggcaacctcgtacgggtcgcaaatggcgcccgtctcggccagcaggccgccgcgcacgtgcgggctcgcatgcggttcgagcgcgcgcacttcggcggcgtccagctcgcgcacgccttccacgccgttctccgccgcgcgcgccacgaggcgccgtatgctggccagctcctcatcggagaacgcgagcacgagcgagccgttgcggacgtaggagaatcccagctcgtcggcccattgcggaaacagcttggacccggccgcgttgaagcgagccttgagcgttccaggcaaagggtcgtagccggcatgcacgatgccagagttcgctcgcgtcgcgccgcaggccacatcgttgcctgcctcaagcaccacgacgttcagacgccagcgcgccaatgcacgcgccgtcgtcgcgccggcaacgccggctcccacgatcgcaacgtcgatgctctgcagaggttcggtatccatgtcgttcagcttactatttatccccgttgagcgaaagagcggatacacaatcggccaagcgcggtatcgttatttccacgaagcgacgaaaggaatcacatgagaatagcggtggcgagcgaaggactggccgtatctccctatttcggacattgcgcaagcttcacctgctataggatcgaacggggcatcatcgtcgagtgccagaacatgccgaaccctcatcagacccctgcccgcatcgccgcggtgctgcgcgagctcgatgtgacggcggtcatcaccggcatcatcgagcgcgacgccgtggaagcgctgcaagcagccgatatcgaagtagtgtccaaccaagcaggaagcgcccgagatgcagccgaggcgtatctcgcccacactctcatcggcacggacgaatggcataacgacgaagaagtcctcggagccatcgagtcgtagcaggaaagccggcaggaaaatcctcccctaacgaaagcgccccgccggcttatccgacggggcgctgtttttgcatagacgcgaagcctacagagccttcttggcgacctcggtgatggcggtgaacgccgcgggatcgttgatggccatgtcggacagcaccttgcggtccagctgcacgcctgccttcttgaggccgttcatgagcaccgagtagctcataccgttgatgcgggcggccgcgttgatgcgggtgatccacagacggcggatctcgcgcttcttgttgcggcggtcgcggtacatgtactggagcgaatgctgcacctgctccttcgcggcacggtaagaacgggacttcgcaccgtagtagcccttggcgcgattgaggacggtacgacgcttcttatgggcgctgactgcgcgcttgacacgaggcatgttctatcactgttccttttcgattagcggaggccgaggttacgggcgatgaccttctggtcagccgtggccacttcggtttcatggcggaagttgcgcttgcgcttctggctcttcttcgtcatgatgtggctcttgaacgccttcgagcgcatgatcttgccggaaccggtaacgcggaatcgcttcgcggtgccgcgatgagtcttcatcttaggcatggtcgttcccttcttctttcttctcgttctctttctttttcttcgccgcgactgccgcaggcagcggggcgatgagcatgtgcatgttgcggccttccatcttgggctggttctcgatgaccgcttcgtccttcaggtcgtcggccagacgctccaggatggtgagacccagctccgggtgcgccatttcgcgaccgcggaacatgatggtgatcttcaccttgttgccggcttcgaggaagcgcatgacgtgcttcttcttcgtcgtgtagtcgcccacgtcgatcttcggccggaacttcatttccttcgtttcgaccttgctctggttcttgcgagcctgcttggccttgatggcctggtcgtacttgaacttgccgtaatccatgatgcggcacacgggcggttccgcgttcggcgcgatttccacgaggtcgagcccctggttgtcggccacccgctgggcttccgccgtcacgtaaatacccatctgttcgccatcgaagccgatcaaacggcattcgcgaaccgtgatctcttcgttgagccgaggctcctgagcagctatcgcgctcacctcccaatccatcgcgcttccgcgccataataaaaacccgtagctttgggagcatacgggtttcgcattcgtattcaggctttgtagccggtattcgagcgacccatcagcagccaaagcgccgaaccaggtggagggtctcccctcgcttgaacaaacaacttgcttattgtagcacgggatttttaagatgcaagaaaatcatgagggtttttcgtccgggttttggatccgcatcttcagcaaggtgggcaaaacccgttaatttcccatgttccgacgatcgcacgatcgcgatgcgagcctcttcggtatactggctgcagcctgtaccgccttacgcgacggaaaggacgtcatgaatcgcatcgttcgttacctcatgctcgccggcgcttggacggcctgcatcatcggctgcatcggcgtgttcgtgcccgtgctgcccaccaccccgctgctgctgctcgcgacgttcctgttcgcgaaatcctcgccgcgctgccacgcctggatcatctcgacccgggtgtaccgcacctacgtcgccgcgttcaaagaagccggaggcatcccgctcggcacgaaggtgcgcatcctggccgtgtcgttcacgctcatgggcctgtccgcctggttcgtgcagaagcccctcgtctgggctatcctcggatgcgtcagcgcgtttttgctgtatctcatgttcgtgcgcatccccaccatcacccccgagcgcgtccagctgatccgccaggtcgaaaaggccgagtaagaatcagccaggaagcgggaacgtcgtcgaacggcaataatcgaccggtttggtaatcttggagaggatccggccgcggcgtttcgggtctgccgagcgtgatcgaaggcgtttttccaggtcgcatgttcaaagcgtaaaacaaagcgaatctgcgggattaccaaaccgatcgattcctgccgcggatcgggggtttcgccgtcaagccgatccggaaaagcggcggccccgtcttcggggccgcgctcaaccgccaatcgctagttcttgtcctcgtagagctcgatcacggcgccgtccttctcgacgaaggccagacgcacaccgggacccgcgtccatggggtcgcagatgacgcggtcggcatcgtcgacgtaccggtccagatcgtccaccgcgtaggccacgtgccagcgacgatgcagctcttcggggaagggcgtgccctcctcgaacttgaggtactccaccttgtagtcgtagtcgtcgacgttcgacacccagaacttcatggcctcgttgtagatcatgttcggcttcttctccgtgatggggatgccgatgtgcatataggttgcggtcataccgatctcctctcgtctccaggttggcgtagtaagtcagcgaggctggctgcggtgcccgagattcgtgggatcgcagaggcgaagcgtactttggtacgcgagtatccgggatcgcgcgaagatcgggtgccacagccagccgcagcgtcggctggttccgacggccgtcaggccgacggaaccatactgaacatgtccatggcggcttccgcgtcggcctgcatggcggcggtcgccgcgttggccagggcgtggaagtacttcgggtgctcttcggcgatgagcgcctcgacggcgcgcacgcccgcgttgctcatgtagctgaagtagttgatcttgcggatgccggcacggatggccgcccgcgtgtcctcgcacgacaggccgctgcccccgtgcatgacgagcggcacgccgcagcggatgcgcagctcctcgatcagcttgaaatcgaggttcggctcggcccggtagaagccgtgcaccgtgcccacgctggccgcgagggcgtcgatgcccgtgtcggccacgaagcgcgcggcctcgtcggggtcggtgtacacgttctcccggtcgtcgtcggcgttctcgagcccttcgtggcccgtggtgaagccgatctcggcctccacgtcggctccgtactcgcgcgccagctccacggcgcccagcgtcagcgccacgttctcctcgtagggcagctgcgagccgtcgatcatgacggccgagaaccccaggtcgagcgcgcggcgcacgtagtccatatcctcgccgtgatcgagcatcacgcacacgggcacgcgcgaagcctcggcgcgcgccaccatgatggggccgatcacgtcgatggacgtctcctcttcgtgcagctgggcgtgctggatgatgacgggctcgccgcgatgctcggccgcgccgatggctgcgagcagaagctccaggttcggcgtgtcgaaggccgcggcagcgcagccgttctcttccgcccaggcgaggacggagctcagggaagcgagcatgaccctcctcctacttcttcaggtacggcgtgttgcagggcgcgttccacagacgcagcagctcgtcgtccatgcgcgccatgaacatctggaaaccggcctgctcctgcacggtcagcatctcgccgacgaagttcgcgaccacttcgatgtcctgcttcgccagctccttgaccgcggctcggtacacgatgagctgctccatgagcgtggtggcgcccgagccgttcacgatgagcatgaccttctcgcccggctggatgccgatgtccttcgccagcgcgttcaccatgatggcggccgtctcgtcggcggacttcatgggctggcgtccgccgccctcctcgccgtgctggcccatgccgatttccatctcgtcatcgccgagctcggccagaagcgtgcccgtctgcggatgcgtggcgccgcgcacggccacggccaaggtggccatgttgtcggcgaagcgctgcgcgacggcggcaacctcctcgaggcttctgccctcggcggccgctgcgccggcgatcttgtacgtggggatgcagcccaccaggccgcggcggtcgtcggcgttctcgcgcggggcgttcgacacgtcctcctgcgtgaccaccttgactacgttgaggccctgcttcttgcactgcttcatggtcatgttgcccgtcagcatgtcgccggcgtggttgagcacgatgtagagcacgcccttgcccttgtcggccagcttgatggcgtcgacgcaggcctgcggaccgggcgcggcgaagatgtcgcccaccacgtcgatgtccaccatgccctcgcccacgaagccctcgatggccggctcgtggccgctgccgccctgcgtgacgatggtgacgcgatcggcctcggccagcttcttgttgatcaccatgttgtcctcgcccagctcgaggatgtcgggattggccagggccaggccctccaacagctcggcggtgaggttctcgggatcgttgatgaacttcttcatctgcatggtgctcctcctcagtcgtttgacagccggaaaagaaaggcctgccgcacgacgcggcaggcccgattgcctaatgatgcgcggctcccgttgcaagcccgcgcaagaacagcgaggtcgacacggctcccgcgtcgggcgtgccgatggtggcgtcgccgtaactgcgcgcgcggccgaacttcgaggcgaagccctctgacgcccgcgcgccggcctcggcagcctctgccgcggccgcgaacacagctgccgcgtcgtcgccttcggcctcgcacgcctgcgcggcctccacggcggggatgagcgcgtccatcatggtcttgtcgcccacctgcgcgttcgtgatgtcctgcatctcggctaggcagccggcgaacatgcggcgcgcggcgtcggcagacagctcgttctcgtcgtcgcccaattgcgcgcccaagccggagatgagcgtgccgtacaacgggccggccgagccgccccgcacggccatggcggccatacccaggtcgtcgagaaagtccttgatcgattcctcgtcccatgcctcggcgcgctcgtccatgagcttggcgatcttcgtgatggtgatgccgtggtcgccgtcgccgaacttcgagtcgatgtcgctcaagcggtcggcctgctccagcatgagccgcgcgctctcgcgcagcatggccttgcacgtgccccgatcgatcatggatgcccctctttcgtcggttatcgccctgcagcaaactctacccgcaacgtatcgagcggtcaatgggcgaaaagcgtgcaggttggcgcagtaagtcagcgaggctggtcgtggcgtcaacccgttccgccggccgccaggctgacggaaccctgctacgcgttgacgtacacgtatacgatgcggatggtgtcggcgaggttgcccgacgtgttcgccgtagagtagttgtacagcagcagcgccgaccattcgtgcgcggctccgttcagatcgaccgtgccggagaacgagtacgattccttgacgagcgtagtgccgtcgctcgcgtattcggagtattcggttttgtcggcgggaagctgcgccgagcccgcaggcacattgacgcccgcctcctgcagcgtcttctcgatgatgccctcgttcttcaccgcgtcgacgaaactgagcgagccgtagcccagcgacgcggtggccgcggagtagcccgcctgcacgaccgcaccgtcctcgttgagaccgaggtacaccgtcggcgtgccggagcgcgtgtcggccggctcgtcggtaagggccaccgtcacgttcgtcttgacgggattgccctcttcgttcacttccttcgaggtcgtctcggtggcgccgtgcttgagcgcggcgatggcctcgtccttcgtcatgcccagcacggcagccaggttaggaacgttcgtcttcttagcggtggcggtggtggcgtccttcgtttcgtcggtctgcatggaacccacttcctgcgagctctgctgctcttgggtctgctgcgtcgcgatcagctggctttcctcgaaccactgccatgcgaagtatcccagcgcgccgatcaacaggatcagcagcaccacgatggcgatgagcacgcggcgcatgcgccgcgatttgcgctgataggcggggatctgctgcttctgcttcttttccttcttctgctttccgtgacgcccctggggctcctcgggctccgcggctacggtatcgtcgccgaacaggagcggaggagcgtcaaccggctcaagagcctcgatggcatcagggtactcgtcgtcgttgtcgccccgatagctgaaaccgccggcatgcgcgccgtcgcccaccggggagaacgcctcggtcaagccgatgcgctcgtccgatccgtcgacgggcgcctgcgcgtcgcccacgggcgagaaggcctcggtgaggccgatgcgctcgtcggagcggtcggagggggtgcctttgggtacgttgggagcatgtttgggcatcgttgaaccttcctgacaggtggaacgggggcgctagcgcaagaacaggtaccacgcgacgatcgcgaccacgcccaccgcggcgagcgcaagcacgaccttctgcgcaagcggcatcggggcagctttgagatcgtccatcgtggtttcccgatagccctcgttcccggccttctcgcgcttcggccgcgcgtcctcgtcggtcgaggagccgttcgccgcagcgggctcgggctcgggcgccggctcctcttcgcacggcgatgcgggggcgggatcagcgggccgcgtcgggcgcgctcccgcctggatgacgacgtcgtcctcgtcgtcgggcgtcacggtaatatgggaaaacttgggttcgcctgcaaccacggatcgtcctttcacgtcaatgcgattatagatgattatcctagcgtatgccctcgtccaaataatatccatcgggcgcgaagcgcttgcggtacgtcatgaagcaggccgtcacgatggcgacggtgttggcggccgacagcatgagcatgacgacgatctggtacttcgccgccgacagaggatcggctcccgccagcagctggccggtcatcatgccggggaacgtcacgatgcccgccgccgacatgttcgccagcacaggcgtcatgcccgccccgatggcggccttgagcgaaggcgcggcggcctcgcgcggcgtggcgcccagggccgtgagagagaacatctcgcttgcgcgcgcatcgaggtccgagaacagcctgtcgatggccaccgccaccgcggccatggcgtttcccatgatcatgcccacgatgggaaccacctgccgcgcgtggaaccacgggtcggcgcgcacgacgccctccaccacgatgaacccgacgaccaacgacgacacgaacagcgacacgaacacggaggggacgagcccgggtatgcggctcttcacccgcgacacggctatctgggtggcggctatcaccatggcggccagcacgagcgcgacgagccaccaggtttggaactcgaacaggtacgtcagcaggaaccccgcggccaaaagctgcatgaagcagcgcaccgacgacacgacgatgcgcctcgtctggccgagctccaacttccacgatacgagcccggccaccagcatgagggcgctcgcggagaacagctcgacgtagccgatgtcgacgacgcccccgctcacgagcgcgtcccttccccgtcggcgtcggcgcgcgacgcgtacgacagcgccccgtcgcgcagcgagaaggtgccgcaggccacgccgtcggcagcgcggtgtcggatgcgcagacaagccatgcgatcgtcgacgagcgatttggtcaggcgccccaccgcgcgagccgactcgtcgtcgagcgcggcgtccacctcgtcgagcagcagcacccggggccgcgtggcgaacgcgcgcagcagcgcgacgcgcgcggcttggccgcccgacagctgcgccgcgttgcggccgagctccacgtcgtgcaagtccgccgcctccagcaggcgctcgagatcgccgtcggccggcggcgccgagcccgcgttcacggaaagcgtccagggaagcagcaggttgtcgcgcacggtgccgccgacgagcgccggctgctgcggcacaaggcacacgcggcggcgccattgcaccggctcgaacgaggaggacggcgcgccgtccaagaacagctccccgccgtcgcgcgccagcatgcgggcgcacacgcgcaaaagcgtggacttccccgacccggacggccccacgaggtcgtacacgccgccggcttcgagcgaaaagctcgcgcccgacaacaacgtcgtgcgcacgccggcgcgcaggtaggaggcggttatgtcctcggcttggaaaaggctcatggaaccatagtagcacccgggccccgcaacgcataggctgcggggcccgaagcccgcagggcgcgcgcctactgcacgccctcgatgtgcgggatgctggcgaagcccgcctccagctcctcgtcggtggggacatggtcgctcatctcgccgcggttgtacgcgtcgtaggccttcatgtcgaagtagcccgtgcccgtgaggccgaagaggatcgtcttctcctcgcccgtctcggcgcagcgcttggcctcctccacggcctggaagatggcgtgggcgctctcgggagccggcaggatggtctcgagccgcgcgaactccacggccgccgcgaacacgtcggtctgcttcacggccacggcgtccaggtagccgtcgtgcttgagcttcgacacgatgggactcatgccgtggtagcgcaggccgccagcatggtcggggctgggcaggaagccgttgcccagcgtgtacatcttcgcgagcgggcaggtgcggcccgtgtcggcgaagtcgtaggcgtagcgcccgcgcgtgaggctcgggcagctggccggctcgacggcgacgaagcgcgtgtcgggacggacgcctttgatcttgtcgcgcatgaacggcgcgatgaggccgccgaggttcgagccgccgcccgcgcagccgatgaccacgtcggggtactcgcccagctcctcgaaggcagcgtagctctccaagccgatgaccgactggtgcagcaccacctggttgagcaccgaccccagcgtgtagcggcccttgttgccgggaatgttgagcgcgcgttccacggcctcggagatggccgtgcccagcgagcccgaggagtcgggatgctcggcgagcatcttgcggccgatctcggtggtatcggacggcgagggcgtcacgtgcgcatcgaacgtctccatgatgttgcggcggaacggcttctgctcgtaggagcacttcaccatgaacacgtccagattgagcccgaaatgcgccgacgcctcggcgagcgccgtgccccactggcccgcacccgtctcggtggtgatgccgtcgagatcctgagccttcgcgtaataagcctgggcgatggcagagttcagcttgtgcgagccggacgtgttgttgccttcgaacttgtagtagatcttggcgggcgtgccgagggccttctccaggttgtacgcgcggcacaagggcgacgggcggtagatgcggtacatctccaacaccggttcggggatgtcgacgtaggccgtgtcgtcgtccagctcctggcgcaccagctcgtcgcagaacacaggtgccagatcctcaggtgccgcgacctggccgttcggcagccggatgggctccggcttctccggcatgtcggcccgcaggttgtaccactgcgtcgggatctggtcttcgcgcaggtacagacgatgcggtgcttgttcggtcatggtcgtttcctttccaatcggtcggtcccgcggcttgcccgccgcggatgttcgcagtcggcttcggttcgtgcagctcgcacgaaaagagcccccggatctccgagggctcttctgacaagtatgtgtgcgtgaacagaagccaggggacccgggattaatgcgttctgctccaccaccatgcgccgatacccggcgtcgcgaggacgctggcagcgcaaacgatgttggcgacaggttgcaaaagggagcctttcatgctcggtttccgggtacgcccgccagtatagcgcgccgcgcagcgaaatgcaaaacgcgattttggcccgaatgcgccgataatcgtgccgctcgcgcccgcctgttgcgctgccgcaggcgcctttgggcggtttttcgcgccgcagacggccgatatttgtttccatggggtaaattacctggtgcacagtgctttattgcactagagtatgttgatacgcttttttgctagcatgcgcgaaagcgtcagcaaagtcgcacgactcgctggagggccccgttcgacgcggggtgcgagggaaggagaacgacaaatggaagaaagcaagaacacgttcagcagacgccagttcgtcgagctgctcggcgtgtctgccgcaggtttcggcctggtgagcatggcgggctgcagcggcggcgacacgagcgcgccggctgcgagcggcggcgacacgacgggcggcggcgcggccgacgccatcacgtacagccttacggccgatccgcgcgcgctcgacccggcgtacttcgacgacggcgagtccgcagtggtcagctgcaacatccacgagggcctgtaccagtacggcgccaaggatgcgaaggtcgccccgtgcctggcagtcgatctgcccgagatctcggacgacggcaaggtgtacaccatcaagctgcgcgaaggcgtcaagttccacgacggcgccgagttcaacgcggaagccgtgaagaagtccatcgagcgccagctcgagcccaaccgcaactccgacatgccctacgcgtcgttcgtgttcggcgagaaggaggcgggcaacggcgtcgaaaccgtcgaggccgtcgatcccaccaccgtgaagatcaccctgcgcgccgcgtccaccccgttcctgaagaacctggccatggcgctggcctcccccatcgtgtcccctgcggcaatcgatgccgctacccccggccagcccatcgccgagcccaagggcacgggtccctacaagttcgtcgactggacgaagggcgcttcggtcaccctcgtggctaacgacgagtactggggagaagccccgaaggtcaagaacctcgtgttcaagatcatcgccgagggcaacacgcgcctgacctcgctcatgaacggcgagtgcgacatcatctcgagcgtcgacccctcgtcggccgaccaggtgaccagcaacggcttcgagctgttctccgaggacggcatgaccatcaactacatggcgttcaacaccgagaccggccagtgcaccgatcaggaagtgcgcaaggccgtcgcccaggccatcaacgtcgaagagatggtgcaggccatctacggcgattacgccaccgttgccaactcggtcatgcccacctggatggctccgtacgccaaggatgtcaagcagacggcgtacgaccccgaggccgccaagaagaccctggccgacaagggcatcacctcgctgcagtgcatcacgtacaccaccgcgcgcccctacaaccagaagggcggcagccagctggccaacatgatccaaggttacctgtccgaggtaggcgtcgacgtgagcatcaccgagtacgactggaccacctacaagaccaaggtgcagaccgatccctacgatatctgcttctatggctggacgggcgacaacggcgatccggacaacttcatgaacctcttggccgacacgaactggtccatgaacgtggcgcacttccaggacgacgagtacaaggccctcatcgctcagggcgtcgacacgcccgacggcgatgaacgcgacgccatctacctcaagtgcgaggaaatggttgccgagaagcagccgtgggtgctgatctcccactccaagaacctgctgggcatcaacccgaaggtcaaggacttctactaccatccgacgggcgtcgccttcttcaagggcgtgtccaaggaagcgtaagcctctcgcttcgcgcggacggggccgctcggcgtcgagcggccccttttttgggttctattaccgctcggcatggcgttcttgccgtcaaacgagagcaagtgcgctacactgtcatgcgatctttttcgatccacgactgcacgttcgggcgaaaccggacgcgcgctcgaagccgaaggcactgcctccggcttcattcctgttcgctcggcgccgacacgccgcccggacggatcccggtaaagaaaggagcagcagttgctcaaatacatcctcaaacgaatcctcatggtgattcccgttttgctgggtgtgacagtcatcatctttctcatcacacgcgtgttggccccggacccggctccggtggttctgggcgagcacgcaacgaccgaggcgatggcggcatggcgcgccgacaacgggctggacgatcccatctggctgcagtacatcaacttcatcgtcggcgcgctccaaggcaatctgggcacgtcgtactacacccaccagccggtcacggctgagatcgcggcgcgtttccccgccaccgccgagctggccatctgcgccatcatcgtggcgtcgatcgtcggcgtggccttgggcgtgctggcggcagtgaagaagaacaaggcggccgacaacgtgagcatgctcatcgcgctcgtcggcgtatcgatgcccatcttctggtcgggcatcctgcttatcctgctgttctcgggcatcctgcactggctgccgtcgagcggccgcgtgtcgcccctcctgcaaccgtcgggaggaaccggattcttcattctcgacaccatcatgcagggcaactgggccggcctcgccgacgtgctggtgcacctcatcctgcccacgttggcgctgtcgctgtactccatggccatcatcacgcgcatgacgcgctccagcatgctggagacgctgaacgccgactacatccgcaccgcgcgcgccaaaggcctgtcgaagggctccgtcaacatcaagcacgcgctgcgcaacgccatgctgcccgtgtccacggtcatcggcctgcagttcggaagcctcttgggcggcgcgctgctcaccgagacggtgttcgcatggcccggcatcggcaagttcgccgtcgactgcgtgctgaagagcgacttccccgtcgtccagggcatcgtgcttctggtggcggtcatcttcgtcatcatgaacctcgtcgtcgacatcgtgtacgcctacctcgatccccgcatcaagtacggcgcgaaggaagaggggtgatccgcatggcgaagaacaagctgctcgccacggagccggccggcgatgccgcgctgctgaacggccaaccggtcaaggagaagcacgagagcatctggaaagacgtgttcgcgggcatcgtgtccaacaaggcgtcgctcgtcagcggcatcttcatcctgatcctggccgccatcgccatcgtcacgaagctggctcccggcatcctgccctacgacccgtacgcgcagaacctcggcgaatcgctgctggggccctcggcgcagcactggttcggcaccgacatccaaggccgcgacatcttctgccgcgtgctcgtgggcacgcagatcacgctgaccgtgggcctggccgccgtggccatctcgctcaccgtgggcgtcatccttggctccatcgccggctacaagggcggcaagtgggacaccgccatcatgcgcatcatggacatgatgctggccatcccctccatccttctggccatcgccatcatggcggcgctcgggcccggcatcgagaaggcggtcgtggccatcggcctggtcgccattcccgagtacgcccgcatcgtgcgctcggagatcctctccatcaaggagaacgactacgtggccgccgcgcgcgtcatcggcgattccaacttcaagatcgtgttcaagcacgtgcttcccaacgtgctgccgtccatcatcgtccgcgccacgctgggcatctccacggccatcctcgacgcagccgccctcggcttcctcggcttgggcgtgcagccgcctgccgccgaatggggcgacatgctgggccgcgggcgcaacgagctgttccgcgcgccttggctcatgatattccccggcctggccatcacgctgaccgtgctcgcgttcaacctcctgggcgacggcgtgcgcgacggtctcgaccccaaagcaaggaagaggtgatcccgtgcttctttcggtgaagaacctctcaacggagttccccgtcaagaagggcatcgtccgcgccgtcgaagacgtgagcttcgacgtggaccaaggcgagatcctggcgatcgtgggcgagtcgggttccggcaagtccgtgaccagcctctccatcatgggtcttttggccgagccgggacacgtggccggcggctccctggagttcgaaggcaaggacctcgcaaccctgtccgagaagcagtaccgcgaactgcgcggcaacgacatggcgatgatcttccaggagcccatgacctcgctcaacccggtgtaccgcgtgggcaaccagatcgtggaggccatccgcacccacgagaaggtgtcgaaggccgaggcgaaggaccgtgccgtcgacctgttgcgcaaggtgggcatccccagccccgaggcacgcatcaacgactacccgcaccagatgtcgggcggcatgcgccagcgcgtgatgatcgccatggcgctggcctgcaacccgaagctgctcatcgccgacgagccgacgacggccctcgacgtgaccatccaggcgcaaatcctcgatcttctgcgccgcctgcgcgacgacacgggcatggccgtgctgctgatcacgcacgacctgggcgtggtgtcggagacggccgaccgcgtggtggtcatgtactgcggccaggtggtggaggaagccgaggtccgcacgctgttcgaccacccgatgcacccctacacgctgggcctgctgaagtccatcccccgcctggaggacgacgattcgaagcgcctgtacatgatcaagggcatggtgccgaacccgttggagatgccgccgggctgccatttctcagaccgctgcgactcctgcatggacatctgccgcacgaaggttcccgagcttgtggacgtcgacggccataaggtgcgctgcttcctgtacgagagcgccgacggcgaagtgaagagcgaggaagccatcgcccgagccgaggccgaggcgctggccgacgtcgaagcggcgcgcgaggtggagaccgccgaggcgctgttggctgccgaagatctgcgcgaggcggagatcgaggagatcgagaaggaagaggaggcgagccgatgagcgagaacaccgcgagcaacgcgaccgcgtccgcgcaagcgggcgcggtcgagctggacatcctgctcgacgtccagcacctcacgaagcgtttcgctgcagacacgaacttcttcggcaaggcgacctcctacgtgcaggccgtggacgacgtgagcttccaaatccgcaagggagaggcgttcggcctggtgggcgaatcgggctgcggcaaaaccaccgtaggcaagatgctggtgaacctgctgaagcccacgtcgggcaaaatcgtcttcgacggcaaagagctgacggcgatgaagccggccgagcgcaagcagtactgcaaagacatccagctgatcttccaggatccctacgcgtcgctcaacccgcgcatgcgcatcggcgacatcatcgccgagcccatcatcacgaacaacatactgccgaaagaccaggtggaggatcgcgtgaacgagctgttagagcgcgtgggcctggcgaactacatgcgcaaccgctacccccacgagttctcgggcggccagcgccagcgcgtgggcatcgcgcgcgccctggccgtgaacccgaagctcatcgtgtgcgacgagccggtgtcggcattggacgtgtccatccaagcgcaggtgttgaacctgctggacgagctgaaagagcagttcggcctgacgtacctgttcatcgcccacggcctgaacgtggtgaagcacgtgtccgaccgtgtaggcgtcatgtatctgggcaagatgatggagatcgcccccaagaaggcgctgtacgccgatccgctgtcgccgtacacgcaggcgctgctgtcggccatcccgtcggtcgaccccgccgccaagaaggagcgcatcatcctggaaggcgacgtgccctcgcccatcgacccgccgccgggctgccgcttcgccagccgctgcttcgcgaaggtgaacggctgcgacgaggtcatgcctcctttggtcgaggtgaagcccgatcattgcgtggcctgccaccgctacgacaagggcggccccgggacggccgtgatctgacaacgagaacctcgccgcccccgcgcgatcgaaccgcctcccatttctcggacatgagaaatgggaggctttttcatgaccgggcgctttctttgcgaatgcacgtcaagagcgcgtcaacagctggcgaaggccgggggtcacggggaactcaaaggcgcgcttcgtgcggacgcacttcaaaaacccaaggtcgacgagaccgtacaggtcggcacgcgccgtggcgtaagcgaccttgtgggttttctgatgcgactcgatgcgaaacaccgcctcaggattgctgagggccatctgcagcacggagcgctgccgatgattgacgtctacgtcgtttcgcagcgcgcgcacgaacgcctcatcacgtttgagcatgcgtttgagctccgcttcgacctcgtccagcttcttgcgcaccaaacccgtcgccacgtcgatgtggatggtgtagtcgacctcgccgtcaacgaggacagcggcgtctttcaccagcgacatgacggcgggcgggcgaaggatgccgctttcccaggcgcccataggcttcacgatgggcacgtacgccaacacgggccgttccgtcttcctgaacaacagcttcatcatgagcgagcacacggcgccgttccaatccggcagcgggtgcacgctcatgaacaggtggcggacgcccaaggccagcaacagcggatgctcggcatacgtttcgctgttctcctcgatgatcttcgacacgagcgcgagcgccgcagagcgatcgagcggcttgcgcttccacaagcgggaaccctgtcgcgacgaacgggtgacctggcgctccacgccgcgcgaaacccgttcgtacacctcgaggacgatctcgggcgtgcaaggccttccggcaagctcctcaagatgccaggcggttcgatgccagttcaaaaggaggcgctcttccgaggtttccgggtcgcgctcggaaagcagcacctcgcgcgccttctcgtaaccgatggacaaaccgtcctctttcagcgtcgcaacggcctcgtccacgtgcgcctctaccagaaagtacgtggcgttgcgcgaacgcacggccaaatcgagccacgaccctgcatggcagcgcttgtcgatatcgtcgaggttcgccacgatcgagcgcgtgggatagtaccaaccgcgccgcccttccccatcgcgaaacggcagttcgacggccgtctggcgccgcagcgcgttgaggatgtcccacgtctgctcgcgcgagacgccctccggcatagcaagcatttcgaactcttcgcgcgtcagcggacgctcgtccgccaacacgcgcaggccgcagaacaccggatccttcaaaagcgagatcatctgccgcaccgtcgcatcggacatggcggccgtcttcgtctccaccagatcgcccctcctcgatttgatagattttgatagttcatgatacgtgcttctcgttcgaatgccaacaagggaacggacaacggtggcaagaggtttgaactggtatttcttcggggcttccccgcttttcgcacttcgggaaagcctcagataactatcaattttccagatattgacagttaaatcgatggccgcgtacccttttcgccaggcgcaagccgaaagggaggaacaatcgacaacatcatgaaagggagtgggatcatgagcgatggaaagcgcatgacgcgaaggggattcgtaggagcggcgctcgccgggactatgggcgttgcggcgtcctcgttcttggccggatgcagcgcaccgacgtcctcgagcgattcgcaggagtgggatcaggaagccgatgtcgtggtggtgggagcaggcggggccggactcgcggccgccatcgaagccgcgaacgcgggtgcgagcgtgctgctgctcgagaaggccagcgccgtcggaggcgactccgcgctgagcgacggcatcttgggcggctggggcaccaaactggcgaaagagcagggcatcgacgccgacgccgacgacgtgtaccgctggttcacgcgtcatcccgaatggtacggaccgaaggatcccgccatcgcgcgcgtgctggccgacaagagcggagagacgatcgattggctgcaggagatgggcgtgcctttcctgaaggaagtagggccgctgttcgggtacaccgaactgccggtcatccaccatgtcgatggcaagggcgccgagatggtgcgcgtgctcgccgagacggccgaaaaagccggcgtgggcacgctcaccgacacctcggcaacgaagctggtcgccgacgccgacggacgcgtcatcggcgtggaggcggttcagaagaagaaccccgtgcgcatcaaggcgaacaaaggcgtggtcatggcaacgggcagcttcgccggaagcacggccatgatcggccagatgaacgccgaatgcgccaacctgctgccgggctcgaaccccggagccacgggcgacggcctggtcatggccatggagctgggcgcctacaccacacgcgtctcggacatgccgctgatgagctcgttggcaggccttgaatcgggcagcatcgtcaacatcaactacgggatgcgcctgccggggctctggctcgatgccgaaggccagcgcttcttcgacgaatcgaccccctacgaaaaccccaacgggcaccgcgccatcgtgcgcaagcagaacgagcagggatcgccggtcatcgcgttgctgggaaccacgcccgagctggacgccatgcaggccacgtacccgctgaaatgggccaccgccgacaccgtagaggaagtcgccggcatggtgggcctcgacggcgcgaaggcgaaggccaccgtcgagcgctataacggcttctgcgaagcgggcaaggacgaggactgcggaactcccgccgacaagatggtgcccatgaccggccccttctacgcagctcctatcgccgtgagcacctcggtcaccgtcggcggcttcaagacgaacgagcaggctcaggccctcaggctcgccttggcttccagcggctcgctgaccgaaccgatccccggcctgtacgccgccggcgtggtatgcgagtggaactgcgccgccggagccacggtgctcagcgcgatgacgctcggccgcatcgcgggtcgaagcgccgctgcggaggcctccgcagcctagcggcatcggacaatcgccccctccccttcgagaggcctgcctgcttgggcgggcctctcgccccgcatgagcgccttgggcttaaccggtgtgcaacgattctccggatcgtcggcgaaccctgacgacgatgcgacctgttcgcgctatcatagacgtcgacacacgaactcgcgctcgacggccgattatcggtatcgagctcatccggaaaggcggcattgcatggaccttgctcccgagcagaagctgcacggattcaccgtgcgcacgcgcgaagaacttcccgagatcgacggcacggcgtacgtgctcgaccacgacaagagcggcgcgcagctgctgtacctgcgaaacgacgacaacaacaaggcgttctccatcgcgttcaagacgccgcccgccgacgacacgggcgtgttccacatcctggagcactcggtgctgtgcggctcggacaagtttcccgtcaaggagccgttcgtcgacctgctgaaaagctcgatgcagacgttcctgaacgccatgaccttccccgacaagacgatgtatccggtggccagcacgaacgaccaggacttgctgaacctcgccgacgtgtacctcgacgcggtgctgcacccggccatctaccgtaaacgcgccatcttcgaacaggagggctggcactacgagctgggcggcgacacggaagccgaagcgggcgactccgttgcaggcgacgccgtggccgccacggaagccgccgacgggtctgcgcgcctcgtgctgaacggcgtggtgtacaacgagatgaagggcgcgctgtccgatccgaattcggtgctgtacgacgagctgcaggcggcgctgttccccgacacggcctaccgcttcgagtcgggcggcacgccgcgcgccatccccgacctcacctacgagcagttcctggaggagcaccgccgccactaccgcctggacaacagctacctcacgttgtacggcgatctcgacctggacggcatgctggccttcctcgacgaacgctatctgtcccccgtcgccgacgagcaggcggccgcgacgggcatcggctccgagggcgcgcctctcggcccccacgagctgcgcgagcaggcgcccgtacgcgcgctgggcgtgaagaggaacatggctaccgcgcccgagaacgcgtgcgccgggctgggctacgtcatcggcaacgcgtgcgagcgcacgcgcatgacggccgtggacatcctcatcgacgccatcgcaggctcgaacgaggcgccgctcaagcgcgccctgctggacgcggggctggcggccgacgctacggcgttcttcgccgactcgctgctgcagccgttcgcggtcatccagctgcgcggactggaggaaggcggtgccgagcgtttccgcccggtcgtggaggaaacgctgcgcaagctggccgacggagggctcgaccgcacgctcgtggaggcgtcgctgtcgcgcgccgagttcgtcatgcgcgagcgcgagtacggcatgcccgacggcgtagcgctggcgatgagctcgctggcgggctggctgtacgacgacgatgcggccacgtcctacctcaagtacgaggacgacttcgcgtttctgcgcaaagcgctggacgaggggtatttcgagcggctgatccgcgaggtgttcctggacagcgaccatatggccgaggtggagatcgtgccggtcgacggcgacgaggacgcctacgaggaggagcgcctggccgccgtcgaagccgccatgactcccgaggactacgttcgcgtggccgacgaggaggccgcgctg

SEQ ID NO: 9074 - DNA, 149 bp, Unknown
  gut microbiota DNA sequence
cgttcctggacagcgaccatatggccgaggtggagatcgtgccagtcgacggcgacgaggacgcctacgaggaggaacgcctggccgccgtcgaagccgccatgactcccgaggactacgttcgcgtggccgacgaggaggccgcgctg

SEQ ID NO: 9075 - DNA, 772 bp, Unknown
  gut microbiota DNA sequence
gcgcgcatcgggcgggcatcccggtcacggtgctcaaccgcgacgtgtacgccgaccccgtcgaagccgacaggcgcatcgccgagacgctgcgctacgcgcacgccgagtacgtggtgatggcagggtacatgcgcaaggtgacgcccgtgctgctggacgcgttccccgaccgcgtgctgaacttgcatccggcgctgctgccctcgttcaagggcgcgcacgccatccaagacgcgttcgacgcgggcgtgaaagtgacgggcatcaccgtccacttcgcgaacgaggactacgacaaaggccccatcgtggcgcaacgcgccgtggaggtgcgcgaggacgatacccacgacgacctcgaagcccgcatccacgaggtcgagcacgtcctgtatcccgaagtgctgcgcctcgtggccgaaggccgcgtgaccgtgggcgaggaccgtaaggtccatatcgcccccgcccgatgaacccgcggggaaacccgcaggtcaaccgtccgttccgcgcgtaagcttgtcgtccgcccaggcaaatgcccgccagctcgaacctcgaaggagccctcatgaacaaggaagccctccagtccgtcatcgccgccctccgcgagggccgcacgccgtccttgagcgtggaggatttcccgtgcttctcgcacgaggcgaccgaaggcaaccagcacgtggatccgacgtatctcgacgtggtggcgaaaagcctcacggccgacgacgcgcccacgttcgagcgcgccctgcgc

SEQ ID NO: 9076 - DNA, 318 bp, Unknown
  gut microbiota DNA sequence
agcttcgtccagcaccgcttcgaagcggtcgtcgtcggcttccaacaccagcttctgcgtcatgaagctgatggaggcgcttttcacgccttcgatgttcttgatggcgttctccatcttcgcagcgcagttcgcgcagtcgagatcctggagtttgaatgcctttcgcatggcggtgtcctttcgtttcggcgtagttgcgagcgggggcgcgcggtgcggagtcgaagcatcccgtgccgcggccgatgcggggcttattcgcagatatgggtcatgccctgggcgagcatcgtgtacacgtggtcgtccgacagc

SEQ ID NO: 9077 - DNA, 311 bp, Unknown
  gut microbiota DNA sequence
ttgcacggccaccatcccgctgctgctcgcctacaacggctcgcgcggccgcccgatgaagtggctgttctatgcatactaccccgcgcatattctggtgctggggttggcgaaggggttgctgctgggcgattggacgctgggactgtagaggctgatgccgcacgggatccttcgactccggcgctggcgtctccgctcaggatgacagaagacggctacttccagtcgcttcccagcaccacgaggaaatcgctctcgaacagatacgatccgtcgtttttcatggcttttccaacgccaagagcatc

SEQ ID NO: 9078 - DNA, 1858 bp, Unknown
  gut microbiota DNA sequence
tcgagccccgcctcgtcgccgacgtagacgatctcgttgccgtcgacggccaaggcttcggcgacgtcgttctcggacgtcatggtttggatcgtgccgccgcgaaacgcgagggtggccgttttctgctgggcgccggcgcctccctccgcctcgtccgtttgcgcttcgctgttttcgcttccgcagcccgaaagcgccggcaagatgaagagcgtggccgctcccgtcgcgccgattttgacgaacttcctgcgggacaacgtgttcgatggttggttcgtgtccatggcgtgctgctcccttcctcgtgcggcgggtcgtgtcgaccgcgttccagccgcttcctgacgcaggtatacaggcggattcgccctgtccggaagtcctatttgcgtttatacgaggcgaacggctcctatacccgaaataaccccgggttggtattgcgcttcgagcggcggagccgtaccctggcgagcttaggggagtcttcgccagcgcgaatgacggagggtggttccgatgacgtatccggtattcctgtacaacatgctccttgcggcgacgtacgttgttcttgcggtcgtgttcttctggctgcaccgttcgcggtccagccgtctggcgtggtggctcatgatcctgttcgcctgctcgttcgtggataacggaacttatttcatgaaagaagtgttcacggcgctaggccatcccgatcctctgttcgcgacgttctaccaggctgcggaagccctgttcatagcctgctaccccttcatcatccgcatgatcagcggttgcttttacgatgatatgccgtcgaagcgatcgatggtcgtgctcggcgcggcttgcgccgtcgcgacggcgctcggcgtcgcgcccgtcgtgccttactcggtgttcggcacggtgtacccccttctgtacgcgtgggtgttcctgcggctgattcccaagatggacggcgtttggccgaaggcggtggtcgtctcgctggtggtgctgcacgtgatcgacgcgacgtgccgtgtgctgggggtggaggccgtcctgttctgggagaaccgcgaccttctggtggaaacgtgctgggcgatctacgtcggatgcgccgtctatatcgcgtggacgctgctgcacacggtggaacagccgtacctgccgaacgtcgacatgtcgttccggcgtttcctcgacgcttacggtctgagcggccgcgagggcgagatcgtgaagctgctcatggagggcgagacgaaccagggcatctgcaacaagctgtacatcgcggcgggcacggtgaaggcgcacaaccacagcatttacaagaagctggggatagagaaccgctcgcaggttttgctcaagtacaccgattatctggagcgtagcgcccaggaagcgcgattgttctgctgagcgctggcggttccccgtccccttgtggtttctccttcatggtgcgctgtcgggcgtcgcgcgagagcttatcggatggtagaatcggcagcgccgtccgcgcgtgcgcgcagacggcgaccagaaaccttgcataaagccgccgatcgcggcttttcgtgctgttcgcatacggaagaggacgcgccatgctcatcgattcattgacgttcaccctggagaaatcgggctgcctcgacgcgttctggggcaagctggacgcgggcgaggacggcacgctgggcgtggcctcgtcggcgcgtccgttcctcgtggcggcgcggttcgcgcacaagccgcagccgacgctcgtcgtggtggcgggcgaggacgcggccgtggcgttctcgcgcagcctggcggcctacctgggcgacgagcgcgtcatgcgctt

SEQ ID NO: 9079 - DNA, 2165 bp, Unknown
  gut microbiota DNA sequence
cgcaggatgcgtctcatgattttaccgctgcgcgttttcggcagcgcgttggcgaaatggatgacatcgggcgtggcgatgggcccgatgctctcccgtacgtgcacgaacaggcggtcgcgcaggtcggcgtcgatgaccgttccctctttgacggtgatgtaggcatagatgccctcgcccttcaccgaatgcgggtaccctacgacggctgcttctgcgacctgcgagtacgagacgagcgcgctttcaacttcggccgtgccgatgcggtggcccgacacgttcatcacgtcgtcgatgcgacccgtgatccagaagtagccatcctcgtctcgataggcgccatcgcccgtgaggtagtagccgggggtggggaagtacacgtctttgtgagccttcgcgttgccgtacacgcccagcatcatgcccggccatggcctcgtcagcacgagactgccgcgctcgccggcatcggcctcggctccgtccgctccgatgacccttggttctatgccgaagaacggtagcgccgccgatcctggcttcatgtccactgcgccgggtatcgaggtgatcatgatgccgcccgtctcggtttgccaccacgtgtcgacgatggggcacatgccgtgaccgacggtggagtagtaccacatccaagccttcgaggtgatgggctcgcctaccgagccgagcagccgcaaggtcgagatgtcgtgcccgttcacccagcggtcgccgtctttcatcatggagcgcactgcggtcggggccgtgtacaggatgttgacgccgaacttctcaacgatctcccagaaacggtcgggcttggggaagttgggcacgccttcgaacatgagcgacgtcgttccgttcgacaacggcccgtacacgaggtaggaatgaccggtgatccagccggcgtcggccgtgcaccagaaaatgtcatgctctttgaggtcgaacacgtacttcgaggtgagggtggcgtaaagcagatagccgccggtgccatgcaggatgcccttcggtttcgccgtgctgccgctcgtgtagaggatgaacagggggtcgttcgcttccatccgctccggctcgcattggggcgcctcgggagcaagcacgtcgtcccaccagaaatcgcgccccgccttcatggccgtgcgtttctcgatgcggcgtacgacgacgcagctctcgacctgggggcacatgtcaagggctttatcgcagatttccttgagtctcaggatcttgcccgaacggtatccgtagtttgacgtgatgaccaccgtggcacccgagtcgacgatgcgatccttcagcgattcggcgctcaagccgctgaacaccacgcagtggatagcgccgatgcgagcgcacgccagcatgctgatcgcgagttgggggaccatgggcatgtacagcaccacgcgatcgccctttcgcacgccgaggcggcggagcatgttcgccgccttgcacacctcgcgatgcagacgctggtaagtgtagacgtccacctcttcggtgggctcgccctgccagatgagcgcggctttgttcctgcgcggcccgttcaggtggcgatcgatgcagttgcaagatgcgttaagctccccgccgcggaagtagcgcacgaacggctcatccgagtcgaaatcgtattcctcgacggcgtcccacggtttgaaccagtcaaggtgctcggtggccatatcggcccaaaaagcctcaggatcggcgatggagcggctgtacatggcgtcgtagtcctgccggcttttgatgagggcgttgtagctgaattcgggcgagggctcgatggacgtttcgttttggagcatttgtctgatgaaggcgttgcgggtgttgcggttcattgaggactcccttctgcgcggacgcgagaaatcgaaaaggatcaggccaccatcgggtagtggtcgggggcgcaggcgccgatgctcgacagcaggtcgggacggcgatgcgcgaggtgggcgcaagcgtcttcgagcaatacggtctcatggatgctcgtgcaggagtacagagcctcgcacagcgcgcctaccgaggtgacgtcgcagtgggaaggccaatcgtaatcgctcatgtccatgagcgcgactgcgaaggcgatgaggctcttctcgctc

SEQ ID NO: 9080 - DNA, 4313 bp, Unknown
  gut microbiota DNA sequence
gtggatgctcgtgcaggagtacagagcctcgcacagcgcgcctaccgaggtgacgtcacagtgggaaggccaatcgtaatcgctcatgtccatgagcgcgactgcgaaggcgatgaggctcttctcgctcaaacaggcgacgaggcgctgcgcgccgcgaacgtcgaggggcgtgcgatcgcatagctcgtcgatgcggtgcagcgcgtttctcctgacgaagctgggaccgttgccggcggcgatggcaagcaggaggtcgatgtcgtcgatggaagatacggctacgatcttggctacgcggctcacgtcgacgttcgagagaaaggccataagctcggggtcgcgcatctcgctcagcgccgtgcgcagagcctcgccgcggagtttcccgatggaaacggccttccgggcgctgactgcgtcgagcagttcgttcgaggtccagagtttccgtacgctcatctctttgttcgctaccttcattgtcgtcctcctcttcgttcgatgggaatggggatcggattcgcgcggtgacgtacggccatcatgggggctgtaacgattacagggtcaacgagcgcgcggcgactatgcccgcgattggcgggttctcggctgcgaacggcgatttacatgcttagaacaggctcgtctgcgctcccataggttgggagggcttgtaggtggcgacgatgtcggacatgcgccaaagcaggccgtgctgcttgcacagcgagcggaagagggcgcggttctcggttgcgcgggggctgttgcagaagtatcggtcgccgaatgccgcgcgatagcgctcgggcagcgtgggatccacggctgcgatgcggtcgaggaagtggtcgcgctggcggtcgcgcatggtgacgcccgtcatatggtagacgaaccgcgcgccagccgctgccgcgccttccaccacgccgcgcaccgtggcatcgtcgtccgtcacaaacggcagcgtcggcgtgaatagcacgccgcagaacaccccggcgtccgccagctcggccagcgcggcgaagcgctcgctaggcgagggcgcgtgcggttcgatgatgcgcgccagctggtcgtcggccgtggtgacggtgatcttcgcgatggccccgcccgccgctccgatggcgctcagcacgtcgatgtcgcgcgtgataagcgtgctcttcgtgtccaccgacacgccgaagccgaattcctcgatcagctccaacgcaccgcgcgttacgcgcagagtgcgctcgaacgggttgtacgtgtcggacatggcgccgacgcccacgatgcctcgcacgcggcggctgcgcagttcgcgccgcaggatggccaatgcgtcgaacttgacgctcacctggttgaagtcgtcgatgcggtagcattcgcttcggctgtcgcagtagatgcagccgtggcagcagccgcggtacaagttcatgttgtagtcgatgccgaaccattcgttgccgcccgcgcgcactttctggaggatcgagcgcgcgcggacgacggggcagggcgcggcggcagaggccgcgtcgctcatgcggacgcgggcttcacgggatggcggatcaccgtcttgaggttctccggcttggtgcggcgcggatcgcccaggtagatctcgtggtgcaggcgcactgcgggcacgccttcgtgcgcatcgagcgcgtccagcatggcctcgctgctcgctgggttcgcgatgtcgtcgaccatcctggacgcggcgacgaactcctccatctgcgcgatggtggcgggctcgtcgtcgtacggtcccttgtgcatgatctgcgcgcacggtccttcggcgaaccgcacgaggcgggctcgccgcagatcgagctcgggcttcttcgccgcgacctgctcggcggcccaggcgaacacttcgggcgtgacgaagtcgggctggcggatgagcgagatccaagagagcgcgtccttgtccaaaatgcgctgcccgtcgaacgcttcgtcgcttgtccaccacaggccttcgagcggaggcaccgtgtagtcgaagtagccgtcgggctgccaggcacccatcttcgacatcttgacggtgtacgagaaggcgtacagcaggcccatcgcaccggcgtacgagccgttttcctcgttcgggttgcccgtgccggccacggcgatgaagctcatgggcggcacgtcgatgagctcgggcttggtcttcggcaggtagaggtccttgtactctttcttgaaatcgaacgccatgcttcctccttcagttcccgtcggcttactcggcgatctcgcgctgcagcttcttcgtgagcttgccgagcacgaggctgtacgagtgatcgcacaggtcgcgtagcagctcgtcgggcacatcgccgatccagtcgtgtcccatcggggctcctcgtcggtttaaggtctcgagccagtatgacaggtgcggcggtcccgcgcacgcgagaccgcctccgcgacgggcgcgtttacctgagcgctacgaacacgtcgatgtcggcgcaggacatgtcctcgccgggcaggtacgcctcgaagtccacggtgaacgcgcgctgcgcccccagctcctcgtcggcccagatctcctcccaggctttctggacgctggtcacgcagtcgccgccgcggatagcgatcttcgcgtagcggcctgcggcgatggtctgcgcctccatgccctcgggcgcctcggcgggcgtctcgcagcccacgagcagctcgtagctcatgtcgctcatgtcgtagccgtagtacagcgcgaagcagccgtagggcacgacgcgcacctcggagatggtacgatcaaggccctcgcccatgaagcgctgccacagctggccgatgacggtcgtttcctcgggcgagttgttggacgtgcggacggtgggaccgacgatggtgcgtgcgggaagctcgacgatttcgtagtgcatggtttcgtgtcctttcgttggatatgctgactaggacacgataccgaacagaaccggacagggcatgtccggttttacgagaaagatgccgtgcgcgctcgtcgggtaggagcgttgccaaaccgggcgttttctgccatcttgtcgcaagcctatgaccaggtgaaacagtatgtttctcctggtcagaagcgtggtaaaaaacgaccgtattggtaatgtggctgccccgactgcccctcgcggcgcggttcgcgttgcaagttgatggcgttttccgaggcggcgcccacttgtgctatcctgttccgctgcgaagcaaccgatcgagcgaaatgcgggcccatggaattcagaacgctgcacttggaagataaagccgccgtcaacgacgtgctcctgcccctcggccgcaacgattccgcgctcgggttcgccaacctctactcgcttaccgagaagtacggaacgcagatcgcgctcgaggacggcgtgctctacgtgcgccagctcgatcgcatccccggcgccgtcgcgtactatccgccgctgggcacgctcgacatcgccgacgacgtgcgcacgctcatgcgcgaggcgcaagccgaaggtcgcaggctgcacctcgtgggcctgtcgccgaaggagaaggagcagctcgaggccgacctgccgggtgccttcgaattctcttccgaccgcaacttcgccgactacctctaccttacgaagactatcgcggcttacgagggcccgggcctggcgaagaagcgccgagagacgaacaagttcttccagctgtacggcagcgaggcgtccttcgagcccatcgccctcgaccatatggacgagctgcgcgcctaccagcaggtttggttcgagacgagccgccgtcgcggcaccgacgagcaccctctcgagctggagcatcgaaagatcctgctcgacatgaaccacttcgaggagctcgacctcgacggcatcctcttgcgcatcggcggcaccgtcgaaggctacgcgtacggcagcgtgctgcccggcggcgcgttcgacgttatggtgctcaagggcaacctcgacttccgtttcgtgtggcgagcccttctgcgcgagctcgcgcgctactgcgtcgacaaggcgacctacctcaacctggaagaggatctcggcctgcccggcctgcgcgagaacaagctgagctaccagccctgcgccctcatggaaaagtaccaaggccgcttgctctagcgctgccacagcagaagaattgcgcaaggtcggtgaatcgtcgcgcgaccgtcgagtcgccgtgagggcgtcgtcgcccgatgctgattcctcgccggcttt

SEQ ID NO: 9081 - DNA, 413 bp, Unknown
  gut microbiota DNA sequence
tcttgcggcccgcacccaggcggccctcggcggcgagatggaatcccatatcgtgacgaaggacagcccggcgatcgccctgtcgtaagcgcgctcgtcgcttccgtgcaaccctgcggttctgccgcctttccggtgcgaccgtagggctgcacgcttatatatcacctgatcaataggcatatctcgtcgctgaaactccatggtctgttcgcttgtgcgccgcgcttcagtgtgcgaacattcgttctccaaagagatcgagacgcggtgcggaaggcggcgaggagctatggcggcgacaggagaggtgcgggttcccgagacgttcggcgggcgcatgatcggctcgcccgaaggcgccggcgagcgccgggtgatcttccattccgacatgaacgcgttctacgcga

SEQ ID NO: 9082 - DNA, 213 bp, Unknown
  gut microbiota DNA sequence
cgccttgatacgctgcgtctttcccttcgcctcgaccaccgcgccttccgtcttgccctcggcgtccagcagaacctccaccagcttcgtgcccttctggatctccacgcccagctggtccaggcaggcggtgaaagccgcgacgaaaccgccgcccgcgccgtcgacgttatgcatcatttgcagggggccgtagtagatgtcgatctgatc

SEQ ID NO: 9083 - DNA, 232 bp, Unknown
  gut microbiota DNA sequence
acggatgccgcgggggcgcgaggtgactgggcttgcggccgccgtcatcgccacctggctcatcgccacgcagggtgaccccagcgcgctgtacctgccgctcatgggcctggcgtggggtatcgcgaacgggctgtcggtggcgttctacatcatgtacccgaagaagctgttcgcccgttggggaagcttcgcggtcacgggcatcggcatgttcatcggcggtatcgtg

SEQ ID NO: 9084 - DNA, 422 bp, Unknown
  gut microbiota DNA sequence
cgttgatctcgccgtgcgcctggtaggcgcggcgcgggaagatgacccacttcggatcgcgttcgaagccctcgtcgggcaccgggcgcgcgtcggtggcgtccgcgacgtcgaagaacgtcgaggcgtggttgatgcgcgtggtgggacgcacgatgacgggcgtatggtagcgctcggacaggtcgaatgcggcctgcatcatggcgaagccctggtcgggcgtggcgggatcgagcacgggcagtttcgcgaagctggcgaagcggcgcgtgtcctgctcggtctgcgacgagatggggcccggatcgtcggccacgaacagcaccatgccgcccttcacgcccacgtagttcaagctcatcagcgcgtcgctggcgacgttgaggcccacctgcttgcaggtgaacaggcagcgcgcg

SEQ ID NO: 9085 - DNA, 610 bp, Unknown
  gut microbiota DNA sequence
acgctcgttgatctcgccgtgcgcctggtaggcgcggcgcgggaagatgacccacttcgggtcgcgctcgaagccctcgtcgggcaccggacgcgcgtcggtggcgtccgcgacgtcgaagaacgtcgaggcgtggttgatgcgcgtggtgggacgcacgataacgggcgtatgatagcgctcggacaggtcgaatgcggcctgcatcatggcgaagccctggtcgggagtggcgggatcgagcacgggcagcttcgcgaagctggcaaagcggcgcgtgtcctgctcggtctgcgacgagatgggaccgggatcgtcggccacgaacagcaccatgccgcccttcacgcccacatagttcaagctcatcagcgcgtcgctggcgacgttgaggcccacctgcttgcaggtgaacaggcagcgcgcgcccgtgtaagacgcgcccgccagcagctccaaggccgacttctcgttcgtcgaccactccacgtggatgccgcgcgcggcgccgtcggcatgcagcttcgccaccgtctcgatcagctcggacgacggcgtgcccgggtagcccgccaccacgcgcaccccggcctccaacgccgcatgcgcg

SEQ ID NO: 9086 - DNA, 5412 bp, Unknown
  gut microbiota DNA sequence
cgacgcacccgctagcagctccaaggccgacttctcgttcgtcgaccactccacgtggatgccgcgcgcggcgccgtcgtcatgcagcttcgccaccgtctcaatcagctcggacgacggcgtgcccgggtagcccgccaccacgcgcaccccggcctccaacgccgcatgcgcgaacgcctcgttccccatcagcagtttcttcgtcatggtcctcgcccgccccatcgcgtacagatgtttcacgtgaaacattcgggttctttcgttcgagcatccatgatagcgcacaagcgcgcccctcgcgcggtcgcatccgcgaggggcgcgaaggacgcaccgccaaaccgcgcggttactacagcagcgacttgatgcggaaagcaaccctatcggcatcgtcgttcgcatacgaggagaagacgaacagcggatcggcctgttcgtcgaactcgtcgggcacgacgtacacaaccgaaagatcccgcgtttcgtgaggtgccagtgccgctccccaattcgaatcgaccccggcttcgaagccggtcatccatagggcgcgcgtcgccaacgcagagcagcggccgtcggcgtcgcgaacggcgaacgtgcccaatgttctcgcatcgacgggaacctcctcgtcggacgggttcgtcgcctcgaacgtgaccgtgcggtacgagaaccccggcgtcaacgtgccgtcgtctgcgatttggtagcccagcgtctcgtccgacaccttgttcatataggcgaagtctcccagaaagcccgcgtagtcggaggtgtcttcgaccgccagcccgaacggcagccggtcgctccgctcgatgcgaaggttcgacagctcgatgtcgcacatctcgccgtagcgctcttctgacagcggatccgccggcaccgaaaccgtcacccgtccgtcgggatcgcttatcgactggtcagccaacaccgcatctcccatgctggtgaacgtctcgcgccgctcgaacgtgtagggcaccgccgcatcgagccactcgttcgcgttgtcgagcgagtacggatgcggcccgtcgttctcgtcgacgatgacgccgtacaacgagtgcagacagaagggagcgccctcatccaccccgtcccccaacacgttcggcagcatcgagcggtcgacgatctcgggatacacctcgatggaaccgtaaccgtagaacgccatcggatcgttcatcgtcgccttgaagtctgccgtgtgcagctcgatggtttgcgtggcgcagctgccgtcctcgaagtaggccgtcaccgttatggtttggccctcgaacgtgtcgaacaccgcatcggtcgccgcaagtgggtcttccgcggtttcgaccgcgtcgccgtaatcctcgttggtccacaggccgaagctcttcgcgtcgccgtcatcgtccgcgctgataggcaggtcgatagtggaaccgagcattttcgtgaggcgcaccgtcatgtcacgatcgggatcgggcaggccaaatccgtcgaccacttgcacgctctcgtactttccgtaatgatcgcccaagcccgccttctccggtttccatgcagtgacctcggccacgcgctcaggatcgtctcgcccgttgatggtctcgtagctgttgcggtagaacatccccgccgaggtggtggcctggatgcgcacgatgccctcgccctccacggtgaacatgcagccggtgtacttcccgtattgcaagtaccaatccttcgttggcgtggtcaggctgccggagcggtcgaacacgatcatcccgttatcggtaggagggaccagcatgcgcgtgtccgacgcgtacgcccgcacggagaacgcctgacccgcaacggcgctgccatggccacccatatcgcccggcaacccagcaagctggccgctgaacggcacgagcgccgccacgactgcaagcgcgcacgcccccgcaataaccggcctccaccggcaccgccgaacgaccgccgccgttgcaccgtcgcgcgcttcctctgccgtatctccgcgaacgcccgctcggcgcgcatgcggtgcgcgacccttccgacgctcctcgcgacgcgtgtgttcgatctcggaaagaatgctctcatgcaccgtactcgggctctcgatttcctccatcaaagcacgatactcgtccatcggcgacggcttcatgagattcctcctgttctatcaacgtcttgagctgggcgcgggcacgacgcaagcggcttcgcaccgtcgagggccgacacttcgcgatctcggcgatctcctcggtcgaatacccttccacatagtgcagatgcaccaccgcgcgatacttgggcggaagggtgtcgagaaccctccacacctcgttcgccatcagcgcggccgatgccgggggcgttttgggaagcagcgtttcatcatcgggaagaggttgggtccgatggcgcgacgcggtacggcgaagctggttgcaccggttgatggtcacgcggatgagccatgccttgaggtgttcgtcgtcttggaacacagttgcgtccttcagcaggctgataaacgtttcctggcacacatcgcttgcgtcggcgggctcgcgcgtctggctgagcgcgagacgatacaccatgtcctcccaatcgcgcagggcatggttcatgaattcgtccgagcgcaaatcagccatggtttccaatcgcctccttaccccaaacatgccgacgccatggaaaatgttgcaaagttcttgaaaccatatagtacgcctccgaaagcgaagcatacgggcatgagaagcgcgtgggacgaaggcgcgaaaagcacggcccgcacgggcgcattcggtgcgggatgcagctggcgcccttctcctgcatccgcgcgaagacgtacaaatgtttcacgtgaaacatcgtggcgcttccgcgcaactcgcagcatctctaaatggcaagaaggcatcgaattcggaagaaatctcgcgccttgaccgtgtccgacgcaaagccgctcggaagagcacgctcacgaacaggcgttatgcacagggggggctttcttttgcccttgcgatccgcgcgggcgattccgaattcgatgcctttttgccattcgctgccctatcggctgctaaaccaggatcgacatgcactgccgcgcgcagcttcccctgtcgggcggctggcgatcaggcgggacgagcgcctgtccgatggccgaggagggcttccgagccgccggcgagctttcgcgggacgggcctacccgggctatgccaatcctggtttaacagcggactacccctatcggcttgcatgaagggcgcaacgctcgttgccaagaaagcgctatcgagaatcaagcgtcaccgacacgtggcaacgcaagcgttctaacgaaacagcgcggccggatgcaggtcgcatccggccgcacgctgcaaccgctcgagcaggacgccgcctacgcgtcggccatgcctcgcttgaagtcgatgatcttctgacggtcggcgtcgcagccggtgccgaggatttgcacggccaggatggccgcgttcttcgcgccgttgatggcgacgcaggccacgggcacgccggagggcatctgcaccatggacagcagcgagtccaacccgcccaggtcgctggtcttcatgggcaccgtgatcacggggttcggcgtgtacgccgccacgacgccgcccaggtgggccgccttgcccgccgccgccacgatcacgcggatgcctcgctcgtgcgccgaacttgcccactcgtgcacctcggccggcttgcggtgcgcactagccaccttcacctcgtagggcacgccgaactcgtcgagctgcttcatgcacggctccattgcgggcatgtcgctttcggatcccatgatgatgccgactaccgggctgttctgttcgcaggacattcgcactccttctgtcgccgtaactggttcgcattcagtgtagcgaaccgccgccgtgggcgctatcccacgatgcgcctgatcaccgcttctacttcgtctgcactgggcaggccggacgccggatcgtcggcgacgcggtacagcgcgaacttcgcggcttcaagcgcctcggacacgacgatgtacgactcttccgccgagctcagaacatcggagcatgtgcgcagcgaaggattcgtttcaaaatacgcctccacgatattgcgaaaatcgctgacgaagccgaacgcgttgtccaagaacagctgcatgagcgagggcgtttcgctgacgagcgcgatccgctgcgccgcgatgtcgctttcccaatcgaacgatcccgccacctcgaggaacaaggtgagcgtggcgtgcagcatcgagcagggcatgaggcgatcgaatgcggtgcgcacagagtcggcatcgaggtcgtactcgccgatgcccacgatagccgcgtctttcgtgcggaagtagttgaagaacgtgccttgcgatacggaagaaagctcgcatatttgagccacggtgacgttgtcgtagccgcgctcgctcaccaaggcgatggccgcccgctcgatggcgtcccgcgtggcgcggcgcttgcgctcgcgcaatcccatcgactgcccgccgtccgcctgccgctgttccatcgtccgccctccgcgattcgccgtgccgtttgctctgcattataagagccgtccgcgcttttcgtcgaaattgtcggttttactacaaaattatagtaactacaaatttaaagttgctataatgctcggcactgaacgcgaggaagcccggaaggagcgcacgatgaagatattcggaatgggcatgcctgagctcatacttatcctggtggtggtgcttatcatcttcggaccgaagaaccttccgaagctcggcggcatgcttggccgcagcgtcaagaagatccgcggacgcgtggaagacgacgacgtcgacgctgctccgggaaaacaaaccgcataacgaccctcggcccacgcctcgccccggtctcctcacgcagttcatcgcaaaccgcttgaggagaccggggctttttcgtatggcgaaggctcttgtatggcgaatcggcgattcgcgccgtcaaaccgcccttcgcgcacaaacgctcggacgctcgcaagccggtgatacaatgcgtcagagaaacgcatgccgaaaggcaagacgaggaggagcgctcatggcgacattgaagaagaaatgggactggagcctgatactggcgggaatcctgctgctcgcatgcggcctgctctgctgcttcgcgccgaaccttacgctggccaccatcgccatgatcgcgggcgtgggcttcttgctctcaggcgtgctgggcatcgtgttctacgtgcgtttcaggtctatgatgagcgtgtcgggatggtcat

SEQ ID NO: 9087 - DNA, 725 bp, Unknown
  gut microbiota DNA sequence
actcgcatgcggcctgctctgctgcttcgcgccgaacttgacgctggccaccatcgccatgatcgcgggcgtgggcttcctgctctcaggcgtgctgggcatcgtgttctacgtgcgtttcaggtctatgatgagcgtgtcgggatggtcattggcctacgcgatcctcgacgtgctgatcggcctgatgttcgtgctgcatccgctggtgggcggcgcggccatctcgtggctggtggccctgtgcttcctcgtgttcggcctgttcgagatattcgcagcgatgaaatcgaaaagcatcggcttctcagcatgggggatcggcctgttctcgggcatcgtcaacatcgtgtgcgccattatgctgttcgtctcgccgatcttattctctctgctcgtagccgtgttcgtgctgtggcgcggcgtcgcaatgatcgccgagggcgtgacggttggcaagatcgtttatcgctagaagaacggcgcggcaggtacgccgacaggtgtgcgtacaggcggccgatggatgcgcgccgggcttccaagcaggcggcccggtaagcagagggggatttttgggaatttcctcttgctgaggctatgggatatggtagaatatcgtcccacgtccccatggacggttgatcgtggtcgggtagctcagttggtagagcagcggactgaaaatccgcgtgtcgagggttcaagtccccctccgaccacca

SEQ ID NO: 9088 - DNA, 262 bp, Unknown
  gut microbiota DNA sequence
tctgtgcttcctcgtgttcggcctgttcgagatattcgcggcgatgaaatcgaaaagcatcggcttctccgcatgggggatcggcctgttctcgggcatcgtcaacatcgtgtgcgccatcatgctgttcgtctcgccgatcttgttctctctgctcgtagccgtgttcgtgctgtggcgcggcgtcgcgatgatcgccgagggcgtgacggttggcaagatcgtttatcgctagaagaacggcgcggcaggtacgccgaca

SEQ ID NO: 9089 - DNA, 685 bp, Unknown
  gut microbiota DNA sequence
gagtccggccaggcgcttgccgccgccccaggccatgagcacgatggaccccgcgatcatccctacgccgaatgcggcttctacgacagacgccatgtagccgtcgccgccgaagtgatcgtacgtcataagcgggaagatggcgcccagcggggcgaacgccatcatgccgatggtgatgccggcgatgagcacgacgagcccacgggttgccgacagcgctttccagccgtcgcgaaggttcgccagcacatgctggttctcggcggtctcgtcggcgacggtggggatcttcgccagcgcaagccccgccacggccacgagggctccggcgaagtcgaggaacatcacggagtggaacccgatggtggtgtacaggaagatgccgaacgcgggtgcgccgatagacgctacggacatgagcagctggtcgagcgtgttgatgcgcagcagatgcttctcgggcacgagcagcggcatggcggccatcatggcggggccgtggaaggcctgtccgatgctgcgcacgatgacgaggatcatgagcagcggaaacgatacctgcccgaacaggatgacgatgcccagccccagcgacacgatgcccaccgagaggtcggccacgatcatgaccgtcttgcggttgtgcttgtcggcgatgacgccgccgaagggcgacagcagt

SEQ ID NO: 9090 - DNA, 544 bp, Unknown
  gut microbiota DNA sequence
cctcgtggtggacgcccactgcggcggcatgatcggcgcgaagatcaagctggccggctgggacgccgtggtgctggagggcgcgtccgaccatcccgtgtacctcaacatcgtcgacgacaaggtggagatcaaggacgccggcttcgtgtggggcatgggcacccgcgaggccaccgagatgctgaaccgcaaggaaggcgtcgaggcatgcgtggccaccatcggccccgccggcgagaacctgctgccgtacgcgtgcatcatcaacgcgcgcaaccactccgccggcgccggcacaggctcggtgatgggctcgaagaacgtcaaggcgctggtggtgcagggcaacggcagcgtgaacgtgaaggacccgcaggcagtggccgacctgtccgactacatgctgcgcgaggtcatcggctccaacaacaaccacgtggtgccgcagacgcagcaggaatgggccgagttctacgacaagggatcccgctggtccgcccgtagcggtctgacctggggtatggccgaagacggacccatc

SEQ ID NO: 9091 - DNA, 924 bp, Unknown
  gut microbiota DNA sequence
cggcagatcatagaagtcccctgcaccgtcgaggcgctcgagcgctcggaggcgctttcgcagctcgcacccgaagcgttgaccgcgctcggcgcggaatcgatcgacggcgacgccctcggcgtcgaggcggcggcccgcgtggacgccgcaatcgaggcgtgcctggcggcctacgaccctcggggcgtgtacaagctgttcaaccccgccatctgcacgctgccgcccgagtactcggagccggccatcaagctggtgggcaccatgatgatgttccacggccaaagcgtctacgagcgcctgcgccgcgctgcgcactgcgcgctcatggccgtgaccatcggccccgacaaccccgccgcgctgcccgccgacgccgacgagctcgaccgcgcgctggccgacgcctgcgcccgagcgctcgtggaaagcgcggccgaccacgtgaacgccgccatcgtggccgcggctatggaagagggcctctacaccgacgatcgcctgagccccggcatgggcgacttcccgctggacacgcgctcgcagttcgtgttctacacgcaatccgagaagcgcctgggtctgaagctgggcaaggacggcgtcttcgagccgcgctacagcacggtgggcgtcatcgggctctacgacccgtcgcacaagggccgcaagcgcgcctgcgggcgctgcaagtaccgctcgtactgctccatccgcgccatcggcatgacttgccacggcggcaagggctcgttcaagtagaacctgccggcccagcccgatatcccgagcgggcgctccgctcgggacgacacgcaaaacgccccggccgaagccggggcgttctttcttgcttgttgcagcgtcgggttagatcgtgtacaggtaatcgggatcctcgacgaccttcgcgtactcctt

SEQ ID NO: 9092 - DNA, 1086 bp, Unknown
  gut microbiota DNA sequence
tgatcgcgcccgccgaatacgagttgcgcatcccgccgccctcgaacacgagagccacgtcgtgcaccgtgccggccatcatctcccgccgcctccttcgatctcggcgatctccttgcggagggcgggcaggtcggcgtgcggcgcgacgaggcgccgatagaggcgctcgacttcggcgcgcagcgcgatttccctggcctcgctcaaagcgtagaacgagacgcgcaggtacagttgcagctccttggcgctttcgagttgcaaggcatcgcacccgcagcaacgttccaagtcgtcggccaggtcgcgcagcagccccgacgtcacgcggagcatgcggtcgtagctcgccttgcggttgcggtacgccgtgtactgcggcaggaacagcgcggtgcacaccgccagcacctcggcgcacgcggtgaaccactcgggcagcgttcccagctccatcgcacgacctcctttcggtttcgcatccttaccggcactataggaggaggcgtcggtcgcgagcggctggcgcggcgctcgtgggagctccgttgaccggccgtgacgaaaagctagcgcaaaagctcgcggccggtccgcgcgatacgagcggcaaggtcgtcgcggggcgtgcgacgcaggtcggcgagggcttcgagcatggcggcgagccgagcggcttcggcgggcgcatcgtagcgctcgcccggctgggacggggcgtcggtttccagcagcaggcgctcggccgggacggcctgggcgtaggcacggccgcgcttcgacgccagcatgcgcggattgatcgagaagaagcagccggcgcggacggcgcgctgcagctcatcggacgtgcccgagaaccaatggaagatgcaggcgtttcccgcgagcgcgcccgcgcgctcaagcacgtcgagcgcctcgcccgcagccttcacggcatggatcgacagcaccttgccgccgctcgcgcacgcccgcgcgacgcgctcgaacgccgcaacctgcatgtcgcgcgtcgcggcgcgatcgcggccgaagtcgaggccgacttccccgatgaagcgctcgtccttcgccaac

SEQ ID NO: 9093 - DNA, 345 bp, Unknown
  gut microbiota DNA sequence
tttcctgttcggcggcgggggcaccgtggtcgacgtgggcggccaggacacgaaggtcatcgtgctgcgcggcggcaaggtggtcaagttcgcgatgaacgacaagtgctcggccggcacggggaagttcctcgaggtcatggcgaaccgcctcggcgtcagccaggaggagctcgcgcgcctcgcgcgggcgggcgcgcccacgtccatctcgtccatgtgcacggtgttcgcggaatcggaggtcatcagcctcatcggcaagggaacgccgcgcgaggacatcgcgtacgccgtgatcgaatcggtggtggagcgggtgtcggtgctcgtggcgcagggcaa

SEQ ID NO: 9094 - DNA, 549 bp, Unknown
  gut microbiota DNA sequence
gcggcgcgcgatggcgcgcagctgcgcctgcacggcctcggacagcgcgaacggcggcgtgcagcaggccgagtcgcccgaatggatgcccgccatctcgatgtgctccagcacgccgcccacgaacacctgctcgccgtcgcagagcgcgtcgaggtccacctccaccgcgccttcgaggaagcggtcgaggtacaccgggtggtcgggcgagatcttcgcggcctccgccatgtatttctccagctgggcgccgtcgtagacgatgcccatgccgcgcccgcccagcacgtagctggggcgcacgagcagcgggaagccgatgcggtcggccacgacgcacgcctcttggtacgtggaggccatgccggcggccgggtagacgatgcccagctcgtcgaggacggcggcgaagcggtcgcggtcctcggccaggtcgatggcttccggcgaggtgcccatgatgggcacgccgggcgccgccagcgcgttcgccagcttgagcggcgtctgcccgccgagcgtgaccaccacgccgtcgggctgctc

SEQ ID NO: 9095 - DNA, 378 bp, Unknown
  gut microbiota DNA sequence
atgttctggttgcgcaccaccgccagctccgccttgtacgccatcgagttcaacgccgcgttgcgcaggatggagatcatcggcaggaagaactgcgggcgaatggcgtacatcttctcgaagcggtacgacacatccacgatgccctggttgtacagctcgctttccggctccagcaacgtgaccagcaccgcgtactcgcaccccttcttcctgcggtcggcgtccagcttcttgaaaaagtcctcgttcttgtgacgatgcgacgaatcgtcggactcgttcttcatctcgaacatgatggacacgatctcgttgccctcctcgtcgcattcgcggaagatgaagtcgcccttcgagccctcggacgcgtcgttg

SEQ ID NO: 9096 - DNA, 2580 bp, Unknown
  gut microbiota DNA sequence
gagcttcttgaaaaagtcctcgttcttgtgacgatgcgacgaatcatcggactcgttcttcatctcgaacatgatggagacgatctcgttgccctcctcgtcgcattcgcggaagatgaagtcgcccttcgagccctcggacgcgtcgttgtccttctcgaagtacgcgcgcgggaacgcggcggcgcggatcttgttgaactcggtctcgcagtgctgctccaacgactcgcccaccatcttggtggacaggcgcgccttcatgtccttgtagcgctcgatctcgccgtccttgtaggcgatgatgtcgtccttggctttgagctcgatggccagctgctctttgagggcgctctcgcatcggctcttctcggcgtccttgagcgccacctgcgcggccagcgcgtcgcgctcgcgctccagcgccgaacgcgcctgctccaccgccagcttcttctccgcctcgaaggcgcgaccctgcgcctccacacgttgctccaactcgacgatgcgggcgtccttcgcagccgccgcgtcggccagcgcccgctcgcgctcggcgtgggccaggcgctgctggctctcgcgctcacgctgctccgcctgcagccgcgcctccagctcggcgatgcgcgcctccttctgagccgcgtcgccctgcgctttcgcaagagcctcggccacggccaactgcacggcttgctgcttctcggaggccatcagctgctcgtggcgacgcacctccttgtcgaactcggcgtcgcgcacctgcttcagaatggccgcgaaaccggcctcgtcgatggtgaacatctcgccgcaatgggggcacttgatctcgttcatgctcgctccttctcccgtatcccccgattctaccccatcgccgcgcaccgccagccctcctttcgggacagccgaagcgatacccggttatttccacggccggctcctcgataccaacacgaagggcaggctagatgagccgaaaaaccgggcgctgcggtaaaaacgagacggtttggtaatggcgctcaatacggtcattaggtaggacgatacgctgaacaggggtttcgcggaaaatctcgtcgtcacgataagagaagggcctcgaaagcgctcgattcaggcttcttgaattccaaaccgttccgattttaccgctgcgaccgggttttcgcctcatcgatccgtgcgagcctgtttgccgcgcacgccgacaggtgccgtcggatcgcggcggcttcgtcgcgccgattctcgcacctggcaccgtagcgccccaccgcgaaacgcgagcacgaggaagcacggcgcgcaggcggccccgcgcgccgaacgggctcattccgatgtcggctcaacagcgaggccgcttcgtcgcccccgccctgcccccgttctttcccgcacccctttcccttcgacatgctgttttgtttcgaatcgtttaaataagcgcaaccatcgcaattcggtctttataatgagcctagtatgaatacacgtgaatggaggtccgccaagatgagttacgtcgataacgtcatcgagcaggtcaaggaaaagaacccgaacgagccggagttcatccaggccgtcaccgaggtgctcacatccctgaagccggtcatcgagtccaaccccgcctacgagaaggccggactgctcgagcgcatcgtcgagccggagcgcgtggtcatgttccgcgtgccctgggtggacgacgcgggcaacgtgcacgtcaaccgcggctaccgcgtgcagttcaacagctgcctcgggccctacaagggcggcctgcgcctgcatccgtcggtgaacctcggcatcatcaagttcctgggcttcgagcagatcttcaagaacagcctgaccacgctgcccatgggcggcggcaagggcggctgcgacttcgaccccaagggcaagtccgacatggagatcatgcgcttctgccagagcttcatgaccgagctgttccgccacatcggcgccgacaccgacgtgccggccggcgacatcggcacgggcgcgcgcgaggtgggcttcatgttcggccagtacaagcgcatcaagaacgtgtgggaaggcgtgctcacgggcaagggcctgtcctacggcggctcgctggcccgcaccgaggccaccggctacggcctgatctacttcgtgcaggagtacctcaactgccacgacgacagcttcgaaggcaagaccgtcgccgtttccggctcgggcaacgtggccatctacgccacgcagaaggcccagcagctgggcgcgaaggtggtcaccatgtcggactccaccggctggatccacgacccggcgggcatcgacctcgacctcgtgaagcagatcaaggaagtggagcgcggccgcatctccgagtacgccgcgcgcaaggagggcgtcgagtaccacgagggccgcggcgtgtggagcgtgcccgtggacatcgccctgccctgcgccacgcagaacgagcttttgctggaggacgcgaagcagctcgtggccaacggctgcaagatcgtggccgagggcgcgaacatgcccacgacgatggacgcc

SEQ ID NO: 9097 - DNA, 277 bp, Unknown
  gut microbiota DNA sequence
aggcgtcgagtaccacgagggtcgcggcgtgtggagcgtgcccgtggacatcgccctgccctgcgccacgcagaacgagctgctgatcgaggatgcgaagcagctcgtggccaacggctgcaagatcgtggccgagggcgcgaacatgcccacgacgatggacgccaccgactacctcatggaaaacggcgtggtgttctgccccggcaaggcggcgaacgcaggcggcgtggccacctccggcctggagatgtcccagaactccgagcgcctgtcc

SEQ ID NO: 9098 - DNA, 17660 bp, Unknown
  gut microbiota DNA sequence
gatggacaacggcgtggtgttctgtccgggcaaggcggcgaacgcaggcggcgtggccacctccggcctggagatgtcccagaactccgagcgcctgtcctggacgttcgaggaagtggacagcaagctgcagggcatcatgaagaacatctaccatgcagccgacgacgctgccaaggagtacggccacgagggcaactacgtcatgggcgccaacatcgcgggcttcaagaagctcgccgacgccatgatggcccagggcatcgtgtagtcgcggcagcccggaaagcatcgcgcgcggaaacgggtctcgtcctcaggacggggcccgttctttttgccatgcaatgcgcaggacgaactcggccgtcgcccgcttaccgaccgggccgatcacgctccagcagcgacaccgtacgttcgacgagcgcgacgggatcgtcgccgtcctccgggaagcgcacggcggccgagcgaaccgcgcagaacgtcttcctgccgtcgatgcgcaccttccacagcaacgccagctcgagagcgcgcatgagatcgacgagcgaaccacgatcgacgtaatcgcggatgacgatcgcgaagcagcccgcgctcacgcgcgcagccacgtgttgaacctggatcacctcgtcgatctcgcctttcacgctttccagatacgaacggcgagcctccggtcccaacgacagcgccgcatgctcgaaaccgtccaccataagacagacgatcgtcaacggaacggcctcatcacggcaggcggagcgttcgagctcgtcgacgaacgcgcgataggcgagcaaccccgtctcgtcgtcgcgacgcacggcttcggcatgaaaccgacgcgcacgtcgaagggcgagcaaggcgaaggccagtccgaagatcagcgcctcgaccacgatcacgcccacggccaggaagatggaccattcccggggaatccaaccctgctcgggcataatggacagcgtccattgcgtgggcatgttgaacgtcgacttcgccgcatgggagaaatcgtgcgagccacccgaagcggcgatcacgtccttgctgccatcctgagggctgaccgaccatagctcgtacagataccccgcttcctcaagggaggcgaagtcgagctgttcaagcacgtaagactccttgacgcccaccaccgcctcgccgtagtacgaaccacccacgttcaccggtctgacgaacaggaagacgttctcgccgctcgacagctcgaccgaactctccaccacgaagccgtcggtccacttggccagcgtgtacacgtacgagaacgaggtgagatcgtcgccgacggtatccccgaactcctcctcgggataggcgtaggccatcgtgtcgccgcgcacgtaggcgacgtaggacacttcctcgcgctcgagcagctcgcccgccacgcgagggaaccaggcctcgtcgtccggatcgacctcgaaggcggccgcgaggtcgtcgaccgggctcacttcgtcgtagagtttcgtaaccatggcctgctggaaatagttcagcagattcagggcgtcgcgctggcgcatagcgcccatctctctatagacgaaggcgcccaaggagcctaccagcgcaacgacgatcaacgcgaacccggcgaagccgatcacggtcgccacattgcggcgtctcactgcgcatcctcttcgccgaacacgaaatacccttccttgccatgctgcttgacgcgatacagagcgttgtcggcctgccccaaaagcgcatcggcgtcggaaacccggtcccacacggccgcgccgatgctgcaatgcaccgagaccaccgcgtcgcccacctggatgtccacatgaaggtcgcccaccatctcgtcgagcacggcgcgcagctcgccttcgtcgtcgatgtcggtcatgagcatcacgaactcgtcgccgccgtaacgtcccaccatgccgtcgtagcgccgctcgtagccgcgcagggcgtagccgatggatttcaaagccgcgtcgccggtcgcatggccatacgtgtcgttgatcgtcttgaagtcgtcgaggtcgatgaagcagagggcgtacagggatccgccgtcccgcgcgttctcgagcgcactcgccagcttgctggagaacaccgagcgcgtgacggtgccggtcagcccgtcggacaggcccgacgaggtgagctcgaggatgtcggcgatgtcggcttcagccgatcgcccatcgtcgtacactttcctctgcagctcctcgacggacttctcaagcatgcgggcgttttccatttgacacatgaaatcgcggcgaagcaacaggaacacgcccgcgacgatcgccaaaccggcggcgatcagcggagcgagcgcggccatgaccttggtgtacgcgtcccagaagctcgtcacgcatacggcgtcccatgcggtatcggcgataggaacggccgtgtagtatcgtacatccaatccgtctacggtccagaaggacaccgggttgagcgccatcagctcccgctccacgacatcggcggtcataccgaacgcgatgctgctgcgaagcgggtcgaggaacatgtcgtcgtacacgaaacccgacgtggccgacatcgtctggccccggcttccgatgagcaccgatcccacatcggggccgacggcgctctcggcgaggatgcgcaccatatcgtcgaagtacagcgagacgaacagcgatcccgtcatctcgccgccgtcgaagaggggcacgagcacgacgtagttgagcgtcacgccgtcggcgccggccgcgaagctgtcggtgaccaagccctgacccgtggaatagcatttctgcatgaaatcgcggctggcgaggctcgccgaacctgtcacgtcccacacgttcatctcgtcatcgacgtagcatagcaggaagtagccgaaatgctcgttcacctggtcgagcatcgtcactttgtccatgacccagacggagcgttcgtacagcgtcggctgctcggccaacgattccagcagcttgaaagactccgcgacgctcgactcgatgcgcgccttggcgttcgtcagcgatacgtcggcccgatcgcgcatatcccgcacggccagaaccgcgcccatcacagcggatgcgataagcagcgccaacgcgagcgcgactccgtacaaggccatgcgccggaacgagaaccgcgttgttctcaggtttttgcctgttgttttcgccattacgtcgtctttctcatgcgcgccgatggtggcatcataacatacgccctcttcttcgaagcatgggcgaagactggaatgcccgctccgccgggattattcgaaagcgcatcgtccaagcgagaccgtctgcattcggaaatctcggccggttcgcgccgaggaagcccatctggctgcatcccaaatcgacacacaacgcacggaggccccggcgatcgccggggcctccgaatcatgcgcatcgtggaagcgaagctcttagaacatcccctggagcatgatgaacaacggggcgaacgtcaaagagacgatggtcatgaggttgatgaggatgttcatggacgggccggaggtatccttgaacggatcgcccacggtatcgcccacgacagccgccttgtgggcctcggagcccttgccgccatgatgaccctgctcgatgtacttcttcgcgttgtcccacgcgccgccggcgttggacatgaagatggccatgagcatgccggtggcgacggcgcccgcaaggaagccgcccagcatggcaggattgaagcagccgatggcgaccggcaccacgatggcgaggcagcccggaagcatcatctcgcgcagggcggaagaggtggagatggccacgcacttgtcgtactcgggctcggccttgtactccatgatgcccttgatctcgcggaactggcggcgcacttcctcgaccatggcatgggccgcacgggacacggcgcccatggtgagtgccgcgaacatgaacggcatcatggcgccgatgaagataccggccacgatcagcgggtcggtgagcgtcagcgcgaagtcggggatggaatggtgcatcgtggcctggtaggacacgaacagcgagatggccgacaggcccgcggacgcgatggcgaagcccttcgcgatggcggccgtcgtgttgcccacggcgtcgagggcgtcggtgcggtcgcgcacctcttcgggcaggcccgccatctcggcgatgccgcccgcgttgtcggcaacggggccgtacgcgtccacgccgatggtgatggcggtgttggagagcatgccggtggcggccaggccgacgccgaacaggcccacggcgatgccgccgtcggcagcggcgttcgggaacgccatgttgccgaaggtgtacgcgccgatgatggcgagcgccaccagcacgatgggagcgatggtggacagcatgcccgtgccgatgccctcgatgatgaccgtggcggcgccggtgtcggcggcttcggcgatcttgtggaccggcttgtacttgtcggagcagaagtactcggtgatcttgccgatggcaaggccggcgatcaagccgcacagcaccgagccgaacagccacagcggctgagcctcgaccgactgggaattccagacggcgaacaggcagaagatcacgacgatctcgatgccggccgccacgtaggtgccgcggttgagcgccttgtgcaacgcggcgccttccttggcgcgcacggcgaacaggccgatgatggacgtgatgatgccgcagcccgcgataaggagcggagtcacgagagcccaaaccaagtcgcccgtggcgaaataaccgcccagcgcgccgaacgtggccgccaggatggtgggagccaggatggagccggtgtaggactcgaacaggtcggcgcccatgcccgcgacgtcgcccacgttgtcgcccacgttgtcggcgatggtggccgggttacgcgggtcgtcctccggaatgcccgcttcgaccttgcccacgaggtcggctcccacgtcggccgccttcgtgtagatgccgccgcccacacgggcgaacagagccacagccgaagcaccggtggcgaagccctccaccatgccgatgttctcatgcatctgcgcgacttcgacgatgtcgatgccgaacaccagcaagagcagccacagcgacaggcccagcagcgcgaacgaagcaacgcacaggcccatggtcagaccggacttgaagctgacgttcagagccttggcaaccgactgctcggcggcatgcgccgtgcgcgtgttggcgcgcgtggcgacgtgcataccggcgtagcccgcggcagccgacatcacgccgcccgtggcgaacgcgagcgccgtgatgggcgacagggcgaccgccatgatgatgccgacgaccaccatgaagatgacgagcagcttgtactcgctcatgaggaacgccttggcgccctgctggatcttgatggagatgctgttcatcttgtccggacccggatcctgcttcagaacccaggaaccgaggtaggccgccatgcaaatgccgatcagggcacacacgggagccatccatgcgactgcagtagtcacgtgtctcctcctttttccgttccaatacaatagtgcgaccttttcgccgggcattctaagcgggaaagtcgcacgcaactgcactattgtatgatatttgcagataatgtgaagtcgaaatcacggttttttgtcagttgggtcgaatcgcccggtcagcgcctagaacttttacaaccgtcggcggatcggactgcgcgatcgagcccaaaccgctatcatgcacttcttacccttgtttacgaacacgttacgattgcatatataggagtatctatgaccgtacgtcggcgcctcgaaacggcgctcgcatcggccgctgcgcttctttccaacctgcgcgctcgcctgtcccccgcgccctgcgacctcgtcggtgcggttctgtgcgccttagcggcgctgttcctgattctgtacgctgccagcggcttctccgacgcgccctggttcgccgtggcgggcgctgcggccgtgctgctgggctgcggctgcgcgctgctgctgcgcggccggcgctcccagcgggccttggagcgctggcgccttgcccgccccatcgtgctgctgctagcggttcccataggattctaccttctggaacgtccctggaacgatcagctgctcgccatggatccgttctacgccgcggtgaacctgtgcgttctgggcgcgctgttcgccatcgtgtacgcggccgggcagcgcacccgcggcgccgtcgtcgcattcttggccgcctgcctcctcgccggtacggcgaaccacttcgtcatcctgttcaagggccagcccatcgtgcccgccgacgtgttcgccctgtcgacggcggcctcggtgggcgcgggctacacgttcgcgctcgacgcgcgcttgctggaggccgtctccgtgttcgcgatcgcctcgacggccatcgccttcctgccgaaggtggcggccactccgcgtcgcgcggtggcgaacggcgcgtgcgctttagcgctggcaagctgcttcggctggtggataggaacgtacgacatcgaggaagcctatgcctgcacggtggatgtatggggcgtgaaggagtcgtacgccgagcagggatcgacgttgtgcttcctcaaacgcgtgcaggatctgagccctgcacgccccgaaggatacgatgccgatgccgtttcggacctgctgcgctcgctctcagacgatagcgcgagcatgccggacggcgccgaagcccctaccgtcatcgcgatcatgaacgagacgttctccgacctctcgcgctacccgggcttggccggcaccgacgcgcgtcccgcccattactacgatatcgcggccgaggcgctcgaagcgggcgacgcatacgcgtcggcgctcggcgggggcacgtgcaacagcgagttcgagttcctcacgggatcgagcatggggcacctcggcggcggcgtgtacccctacgtgctgtacgaccttgacggaacggagagcctcgtgtcgtacttctcgtcgctcggatacgccacccatgccgtgcaccccgccgagagcacgaactggcgtcgcgaccgcgtgtacgagcagctgggcttcgacgagttcgcagaccagcgggcgttcgcgaacgccgacacgctgcgcgggctcaccaccgaccgcgccacctacgactacgtgctcgacctgctggaagccgacgagggcccgcagttcgtgttcgacgtgacgctgcagaaccacggcggctacgacgtaggaggcctgtccgacgagcttgcggtgagcgtgcccttaggcgacggcagcaggtcgtcggagctggacgagtacgccagcgtcatacgccaggcggatcgcgacctcgcctacctcgtggatcggctgaacgctctcgaccgccccgtggtgctatgctttttcggcgaccaccagccgggcttcagcgattggctgttcgaggcgacccacgacggagctgcagcagacgacctggggctcgaggccgtgcaggagcgctacacggtgccatacctcatctgggcgaacgacgcagcccgcgcgcaaggcgcacacgagcctcagggcgtcgcgcacgagcgcacgagccttaactacctggggtcgaggctcgtcgaggccgcaggcctgcccacgacgagctatcagcgcttcctgctggccatgcgcgaagccgtccccgccatcaatctgaacggattcctcacggccgacggcatttggcacggattcggcaacgaggaggcggcgggcgtgctcgacgcgctgcaagcgtacgcaaccgtccagtacgacaacctcttcaacaaggactcggcctgggcggtgaagtaaagggctacaggttctcgcgcacccaggctatgttgcccttcacggtggctatcaactcgtccagatcgtcgaactttctcatagggcgcagccaatagagaaattccaccttgacgggcttgccgtagagatcgcccgagaagtccagcagatgcacctcgcaggtggcggtggcgcggtcggcgaacgtggcggccacgcccacgttcacagcggctttgtagcgcacgccgtcgacgtgcgcataggcggcgtacacgccgtcgcccagcggccgcatctgatcgggcacgacgaggttcgcggtacggaagcccatatcggctccttccccgcgacccggctccacgacgccggtcatgaagtacggacgtcccagcagacggttcgcctcttcaacgtccccgccggccaacagcaggcggatgcgcgtggccgtaatgggcgcgccgtcgtcgctcttcaggtcgtgcgcctgcacgctggtgccgcccacggccgcccacgagtcgagatcgcgcaccgtacccgccgcccgcgcgccgaacttgaagtcgtagcccacgtgcaggaaagacggaacggtgccgtcaaaggtctgcacgaggaactcctcgggagacgaggcggcgaaatcgcgggtgaacggcagcaccgcgacgacgtcgacgccgctgtccgcgagcatgcgcacgcgctcctcgttcgtcatgagcttcttgagccgcgttggatggaacacctcgtccggatcgatgtcgaacgtcagcgccacgctggcgccgccggtttcggccgcggtggagcgggcgcagtccagcaggtagcgatgcccccggtgcacgccgtcgaacacgccgaacgcgcacgacgtgcccttgaagaacccatggtcgaacgatgcgtcgaccttatatatctctgccacgagacacccccgtttgaaacacgcagcgcgtctcgaaccgagcgcgcccctcgtcgtacgcgtacagcgcgacgagcttgttgtcggtcagcacggccacgagctcgccgtcgcgcggcggctcgcagctttcgcgcacgcccgcggtgcaggcgcacatctcgatggcggacgtcgtcctcctgcgctcgaacagcggaagctccgcagccggaagctgcgccccgttcgccaccttcttcgccagatcgccctgcgcataggagaaccgcacgcccagcaggcgcaccggatcgagcgcagcgcggtccttgaggtcggccaaggtctccaggctcacgcactcttcaagcgtgagcagccccagctcggtgcgctcgagcgcggccacgtgcgccgggcatcccagcgccacgcccgcgtcgcgcgcgagcgagcggatgtaggtgcccttcgacacctcgaacgacacgtcccacgagggaagctcttccccgtccccttcgtgcacacctagcaaccgcgcgtcgtacacctcgatgtcgcgcggcgcgaggtcgatgatgttgccggcgcgcgcggcctcgtaggactttttcccgttcaccttgatggccgagtacgccggcggcatctgcttgcgtctgcccacgaggctcgccacgaatgcggcagcgaactccggatccagcacgcggtcgggcacctcgcccgtgcgcaccaccgttccagcggcgtcgtcggtgtcggtgcccgcaccgaacgcgatggacacgcgatagcgtttgtcgtgcccggtcagatacgcgcccagacgcgtcgccggacccacgcagatgggaagcacgccggtagccatcggatcgagcgtacccgtgtgcccgacgcgacgttctccgaagatggagcgacagcggttcaccacgtcatgggagctcatgccggcaggcttgttcaccccgacgaccagcgacagccccgatagcccccgtttcacgcgcggcacgccccctcctcatccgaggcgaacgtcgcggcaagcgcctcgtcgaccaaacgacgggcttcgtcgagggtgcaggaaagcgtgaacccagccgccgccacatgccctcccccgccgaacgagcgcgcgacggccgccacgtcggtgtcgtccttggcgcgcaggctgccgcgcaccacgtcgccctgctcgcgcagcatgcaggccacgcgcacgcccgccaccgagcgcagcgcgtcgatgatgggctcggcgtccgccttgaccgcgcccgttgcctcgaagtcgtcacaggaaagccagctcaacgcataggctccgcccgcgccgaacgtcatgcgctcgacagctatgccctcgagccgcacggacggcagcgtccggttctggaagatggcgcgcgacaccgacgccgggtcggcgcccgcctccaccatctcggatgcagcgcgcatggcagccgcatcggtgttctggtactggaagcgccccgtgtcggtgacgaggcccgtgtagcagcactgcgccacgtcgccggcgcgttccgcgcccaacaggcccgcgagctcccacacgagcatcgtggtggaggcggcgtcgggatcgacgtatacgaggtcggtcatagtggagtccaccgcatggtggtcgaccgtaaccgtcagatcgcagccctcgagcagcgcggcggccgcctctccgatgcgttcgcgagtagggacgtccaccgcgacgaacgtgcgggcgatgccgtcgaacgaagccgccggaaccagctcggccgcgcccggcaggaagccaagacgctcgtcgatgggctcgtctttcgcgagcaagcaggtcacgcgcttgccaagacccttgagcgccgccgccaaaccgagctgggagcccaggcagtcgccgtcagggctcacatgcccgcagatgatgaaatcgtcgcgcgacctcagcgcttcggctatcgcgccgaggtcggtgttcgtctggggcgtgaccgccatggagcctccctattcgccttcggatgcctgctgagcctgcgcctcgcggtcggccatgatatcggcgtcggccggcacgtcgctgtcggtgggagccgccaccttgttgcgcgccgcgtcgcgctccagggccgacgcgatgcgctcggcctcgtccacgctcttgtccagcaagaagcgcagctcgggcgcgatgcgccacgacagcttccgcgccatgagcgagcggatacggccggacgccttctggaacgccgccgccacgtcctcgtagcgatcgggctcagtggtgtagaacacgttgcacacgctgcggtcgtagctgacctcgcatccggtgatggtgaccaactccagacggggatcggatatctcgaacagcaggattcccgcgataacctcgcgcgcctgctcgttgaccttgcggttcgatgaactctgtttcatgatgcgtctccttaccgataaaggcgaaccttgcaggtggaacaaagggcttctagctaaccgagtgacctcggcagccgccgatcagccccgaagttcagcatatcgcgaggcgatttccccgaaaagcgcaacgccgccacggtaaccacaaggttgccatagcggcgttgcggggtggtgcccactaagcgagttccgcacgagccggacagccctgcgggctgtccgagcgagcaggactgtctgagcgactgggcattaccccgcgacgccgcggcgcaggttcatcttcttactcggtgcgctcgacttccttcacggtgtaaccttcgatgtggtcgccgatcttgaggtcctggaacttctcgatgccgatgccgcactcgtagccctgcttcacggacttcacatcgtccttgaagcggcgcagcgattccatgacgccctcgaagatgatggtgccgtcgcggacaatgcgcaccttgtcgtcgcgatggatctcgccttccacgatgtagcagccggcgatcgtacccaccttcggcaccttgaacgtctcgcgcacctcggcgatgccggtgtcctcctccacgatgtcgggggacagcagacccacgcgagccgcgttgatctcctcgatggcctggtagatgatcctgtacagacggatgtccaccttctccttctcggcctgctgcttcgacttgcccgtggggcgcacgttgaagccgatgatgatggcgtcggaggccgatgccagcgtgacgtcggtctcggtgatgccgcccacggccgagtgcacgatgttgatgcgcacctcggactggtccatcttctcgaacgcgtcgcgcagcgcttcgatggagccctgcacgtcggccttcacgatgaggttcaggtcggtctgcttgccctcctcgatgcggttgaacaggtcgtccaggctcatgtggctcttggattcctgctcggccaggcgggcgcgcaacgcgcgttcctcggccagcttgcgggcgtcgcgctcgtcctcgaacacgcggaactcgtcgcccgcggtgggcacgctgttcaggcccaagatctccaccggatcggcgggaccggccgaatcgacgtgcttgccatgcggatccaccagcgcgcggacacggccgtacgaggtgccggccaccacgacgtcgcccgggtgcagcgtgccgcgctgcacgagcacggtggccacgggaccgcgacccttgtcgaggttcgcctcgatgacgaagccggaggcctcggcgtcggggttggccttgagctccagcacgtcggcctggaggatgatcgtctccagcacgtcgtcgatgtgcaggcgctgcttggccgacacctccacgaacatgttggtgccgccccactcctcgggaatgacgccgtattccaccagctcctggcgcacgcggtcggggttcgcgcccggcttgtcgatcttgttgacggccaccacgatgggcacctcggccgccttcgcgtggttgatggcctcgatggtctgcggcatgacgccgtcgtcggcggccaccaccagcacgatgacgtcggtgacctgggcgccgcgggcgcgcatggccgtgaacgcctcgtggcccggcgtgtcgatgaacgtgatctgcttgccgtcgatctccaccaccgacgcgccgatgtgctgggtgatgccgccggcctcgctggccacgacgcccgtgtcgcggatggcgtccagaagcgacgtcttgccgtggtcgacatggcccatgacggtgaccacgggcgggcggggcttgaggtcctcgtccttgtcgtggtacaccaccgcgtactcctcctccggagacacgacgcgcaccttgcggcccatgtcgtcggcgatgagctcgaccagctcgtcgctcattgactgcgtcagggtgagcacctggcccagcatgaacaggcgcttgatgatgtcgttgggctgcacgcccaggatctcggcgaatttcgccaccgtggctccctgggggatctccacgacggaatcgtcgagcaccagcgtgggatcgaggcccttctcgatggcctccagctccatgcgctcgcggttctcggcctcgcgcttctccttgcgcttcttacggcggccttcgccctcatgcgtggacgcggcggcgacggcggcacgagcctctgccagcaccttgtcgcgctgcagcttctcggcctgcacggccatctgcgcgtagcggtcctcgggctgggctgcctgctgctcgagctcgggcacgatctgctcgacgtgcccgccccgcttgcccttcttggccggacgctcgggcttggagcccttgcgcgcggcgtcgcgggcggcgggagcagcctgcttctgcgcctcgatgcgctgcttctcggcctcgatctgcgacagcagcgagtcgaacgcaggcttcttggcgcccagcaccggcgcgggcctcttcggcgccgacgcgctcgaagcgctcttggagcccttcgcgttgcggttgcgcagcgcctcttccaccgcctgcttcttggccacctctgcagccatcttggcctggcgggcgcgggcgcgggcctcggcggcctcgcgggccacgcgttccttctcgctctcgatctggctcgccaggctctcgaacggcgaggaaacgggcgccttcttcgggccgccttctccgtcggcgccctgcgcgcgcccgtcgtcggacgagccttcggctcgctgggcgcgctcggcctcgcgggcggcgcgctcctgctccaccgcttcgcgacgggcgcgctcctcctcggcctttttgcgctcggcctcggcgcgctcttcggccagcttcctggcctcctcgtcctccaactgcccggcgcgctgcttgatctcgggctccaggttcttgcggatcttgtcgacgtaggcgtccgcgagcatgctcgcatggctcttcgcggggatcttcatctgctgcagcttgtcgagcagctctttgctcgacatatcgaattccttcgccaactcatgtactcgcatgctggccatataccactcctctacttctgtctcgcttcgcgcgcagccgaagcgacgtcggcggcgatcctgtcgtactcatcgctgccgagcgtcgccttgagcgcccggtcgagctttttcttcttgcatgcggcggcgaagcactcctcggagcagacgtacgcccccctgcccggcgcacggccggtcttgtcgaacgacacggcgccggacgggtcgcgcacgatgcgcatgagctcggccttgccggccagcttcccgcatgcgatgcagctgcgctggcgcaccgtcctcgtcgtcgtcattcctggccgccctctctcgctacccttgccttatgcttcgtcgaggtcggcgtgcacgccgcaatagcggctgcccggacgggcatggttgcggcagcgcaccccgtcctcgcccacgtaggcgcacagaccggcttcgtcgtccgcggcctcgtcctcgtcgatcagcatgttgtccatcggagccagcgactcgcccgtgaagctggcgctcttgatatcgatatgccagccggtcaggcgcgcagccagacgggcgttctggccctccttgccgatggccagcgacagctggtcgtcgggcaccacgacggtggcgtagtggttgtcctcgtcgatgacgacgcgggtcaccttcgcaggcgacagcgcgttggccacgtacaccgccggatcctccgcccactggatcacgtcgacgcgctcgttgcgcagctcttccaccaccatgcgaacgcggctgcccttcgggccgacgcaggcgcccacgggatcgaggttcgcctcgcgcgacgccacggcgatcttggagcgggcgccgggctcgcgggcgatggacttgatctccaccatgccgtcgtagatctccggcacctcgatctcgaacaggcggcggatgaggtccggatgcgtgcgcgacaccacgatggccgggcgcgcctgctcgccgcgcatcttcggcgcgtcggagttcgggtcgcgcacttcgatgatgagcaccttgaggcgctggttgtggcggtagtgctcgttgctcggacgctcgttgcgctcgttggggttgcgcttcacgtcgtaatggggcagctcggcctccacgccgtcgcgaatcttgatgatggtgaagtccggcgtgccctgcagcaccgtgcccgtcacgaggtcgcccacgcggtccgagaactcttcgtagatggactgacggccggcttcgcgcacgatggacgcgatgacgcccttggcgttctgcgcggcgatgcggctgacatcgtcgggggtgacgtcgcgctcctcgaactcgctgtactcgccggtctcctcgtcgggctcgcccaccggcaccagctcgtacacgtagatgtggcccgtctggcggtcgatggtcacgcgggcgtcccactcaagatcgaggatatgctggtagctcttggcgagcgatgcctcgaggcgttcgatgaggtagaactcgtcgatcttgcgctcatgcgccagcgcctgcaacgcctcaatcagttctgaacttgccacgtcttcgcttcctttcctcagatgctcgtctgcgagccgaaatcgatcgtgcccttcagatgggcgcgtttgatggtgtccatagggatgcgcgcctcggcgccgtccacgtcgagcacgaccacgtcgccctccaccgatgcgatggcgccggtccagctgccgcgaccgtccacgggctgcgtcttgagcaccgccgtatcgccgacgaaccgcgcgaagtgctccgcggtgcgcagcggccggtcgatgccgggcgacgacacttccagcgtgtacgccccggggaacgggtcgagctcgtccatgaggtcgttgatccacgcctgcgcggaggacagctcgtcgaagctcacgccgtcgggcgtgtctatgtacacgcgaatcgtcggggccttcttcgcgcccgcgacctccaccgtgacgatctcgacgccctcctgctccgcccggggagctaacgcgtcgagcagctgctgttccttcttgctgagcacgcgcctcctccttcccgtttggtttcgcttcgccgccccatgctctcacgccgcggagcggcgagcccttacaaacaaagaaagcgggaacaagcccactttctcgtgtgtcgaaagtatggtgcgcgaaaacgcgcttgcttctttgtcgtgccgtgtatttataccatatcggcaacgctttgcctaggccgctcaccaggcagcgcgcaagttcaccacattttccgcgcctcggcgggcgccccttgcgcgacgggagccgaaaccttgcgagcacatgcgcatcatcggccgaaagacacggaaatcggctggaaaacgtgtttttcggccgatgatgcgtcgctcagccgtccaagcgaatgacgatgcacacgacggcgactccgccctcgacgtcggcgtagagcgcgccgccgtggcgttcgacgatctggcgcatggcgggcaggcccagaccgtggcgggacgcgtcggccttggacgtgcgcgagaacgacgcgccggggacggccgcgttctcgcatcgcacggccaaccgtccgtcctgcgcgcgcatggaaagcgagacgaaaggccggccggcgccctcagctcgcacgcgctcgcacgcctcgacggcgttcgacaacaggttcgacagcagcacggacagctcggtgtcgcgcaggggaagctccgcgggcacgcgcgcctcgcagcgcacctcgatccccgccgcctgggccggagccaaatacgctgccatgaccgcgttcgccaccaagttgtcggcgtagcgcagaggggcttcggcctcctgctggccggacagctcgaccagatacgctctacagcgctcctgctcccccgcgtcgatcaggcggctcagcgcggccgcatgatggcgcaggtcgtggcgcgccgccctcgcagcctcttcgcccgaccgcagatggcgcagccccgcctcggccgcacgcacctgcacctccagatcgcgcacctgctcggcggcgaggcgcaggcggcgcacccgctccaccaacatccaggcgaacacgcccacgagcagcagccccgcgtactcgctctgccacaggccgtacataggctcgtacgcgttgttgtcgagaaggttcgccacgagcgcggcgcccagcaccgcgcagccgcacagcacgaagcgcgcctcgtcggtgcgatcgcgcagcccgacggcggcgca

SEQ ID NO: 9099 - DNA, 1818 bp, Unknown
  gut microbiota DNA sequence
attcgtctatatcgtgaaaatatgctagtatattttcacgatataaggaggttttcatggcgacacccgctgagctgctagacaacatggtgcctgtttcggcgttcagccggggcaaggccgcgcaggctttctcgtcggcgtctaattccacgcccgtcatcgtgttgaagaacaatgcaccgtatcgcgttatcacgacgccggacgagtacgcctatctctcggaggtcgaggccgacatggtgcttatggccgaagcgatggcgcggttgacggcgaatcaggatgcaggatccgtccctgcggaagaggtgtacgccgagctgggcatcgcgcttgaggatgttgacgccatcgaagacgtggagctggcgtgatgtgggagctgtcgttccttcccgaagctcgggaggatcttcgcgcattggacggatcccagcgtatacgcgtggtgaaggcgatcgccaaagtgcagtcgaatcctcttccctcatccgaagggggatacggaaaacctcttgggaacaagcgcttgtcccagttgagcggcctgatgaaagtgaaattgaagtcggatggcatccggatcgtgtacaagcttgagcgcatcgagcatgccatgcgcatcgtcgtgattggggttcgctccgatgatgcggtataccgcgaagcccagaaacggcgggagtcgcacggattgtagacggggtgggcgctatgcgggacgatttcacgacgaaggagcgcacgggcgcggggacgggggaggtgctcgcgcggctcgggtacgcgctggcgggcgcgctcgtcgccgtgctggtttcggcgatgatgtcgctggtgccgtggcccgcggacgacacgctgtttcccgtgtacgtcaacgcatcggtcatgggggcgacgctcatgctatgggcgtcgttcaagccttcgcgcggttcggccggcgcggtagctgccgaggcgctcacggtgttcgtcaccgtgcttgttgtgcagatggtcggcagctgcctgcagtcgccgagcttgttcggcctctatcccaatcctctttcatgggtatgggatcatgcgatcttcatgctgtacagcgggcttgccctcgttttgccgatatcctgggcgctcggcagcaacgagcggtgggcgcggcgctcgttcaaacgggtcctcggcgagcttgcgttcgtcctggcggcatgggcgctcgctgcaagcggcgtccttgattcggctcattcgctgatcggcttcatggtgcaaggcctcgtcttcgtcgcgtccgcgcttgccacggcggcggtgttccagcggctggcgtgcgcactggtcgggcgctaccgtgcggtagaggagcagtctgcgccccggccgagacatgcaccgcccgtttccgagtcccggcgtcccgcgccgcgcgcgaacctgcgtgcggcgtgcatcgcggtgctcgtcggatcggtgggcgtcagcgtgtgcgcgctcgcattcttcttcgtttgccagaagcaggcggcggctcagggtttggagctgcgcaacatcgtttacgacatcccgaccgcttgcgtgctggtcacgtgtttcgtcgcgatcccgttcgtcttggtgggaacgctgagaggatccggcaaggattatcgcttggcggggtatgccgcgctttgcgcgatcgtgctgctgccggtcatgctgttatccacgtttcggctggaatctcccgaagaaaccgacctcggcggcggcgccatcgaagtggtcacgcctgaatggttcgatacgccgcgcgtggaatacgcgacgtccgaa

SEQ ID NO: 9100 - DNA, 844 bp, Unknown
  gut microbiota DNA sequence
cgaaaacgctgagaggacccggcaaggattatcgcttggcggggtatgccgcgctttgcgcgatcgcgctgctgccgaccatgctatcgtccacgtttcggctggaacctcccgaagaaacgtaccttggcggcggcgccatcgaagtggtcacgcctgaatggttcgatacgccgcgcgtggaatacgcgacgtccgaaggccccttgttcatgaggatgctgtcgaacgcacgcctctcgtcgacatcggacgaggggcagcctcttcctcccgtacgatcgggctactcgtaccacaatacgggcaacatcgtctccatcgaccacgaggcgctcgtgctcgtgctggcgataacgcaatccaccgaggatatcgcgacgggaacgcaggtgtcggtcgattgcgcgtctaccgagcacttcgacgtaccgttcgacgagctggcggtgggcgatagcgtgcagatccgctccactgaggctcataccgacggcgccatcgttgcgcagaaggtgttcggtccggcgcgcgatctggtgcccgagcagcaggggcgcgtcgaggaagaaacgctcgacgacatcctcgcgtcgtacgactgcggctatacggtgtcgggcacggtgacgtcggccgtcgaggagaacgggttctcgtttcgcgtggacgacgggggcggcttcatcgagaacggcacggagctgcgcgtgtccaccgcattcgtcgagcgccgcctgtacggcatgaagggcctgcagtgggggatggacggcgtgatcgtcggcttctcggacctgccggccgagggcgtgctgcgcgcgaaggtgatcgtgggcaacga

SEQ ID NO: 9101 - DNA, 1037 bp, Unknown
  gut microbiota DNA sequence
ggacgcgccgcgcggcagcgtgggcatcccgcgcgcgctcaaccagtacgagaactacccgttctggttcacgttcttcacgaagctgggctggcgcgtggtgctgtccgatccgtccacgaagaagacctacgaggcgggcatcgaatccatgccgtccgagtcggtgtgctatccggcgaagctttcccacggccatatcatgaatctgctggacaagcatcccgacttcatctggttcccgtgcagcaagtgggagcgccaggaagacgagggcgcgggcaaccacttcaactgccccatcgtggccagctaccccgaggcgctgcgcctcaacatcgacgagctgcgcacctccgacgtggagctgctcacgccgtggctgccgtacgaccagaaggagcacctcaagaagcgcctgttcgtggagctggtggaggcgcatcctgagctcatgggagcggccggcgcgccgacgcaggccgaggttgacgccgccgtggacgccgcgtgggccgaggacgaggcgttcaagcgcgacatccgcgcgaagggcgaggagacgctggcctggatggaggccacgggcacgcacggcatcgtgctggccgggcgtccctaccacaacgaccccgagatcaaccacgccatccccgagctgctgaccagctttggtctggcggtgctcaccgaggactccatcgcgcacctcggcacgctggagcgacccatccgtctggtggaccagtggatgtaccacacgcgcctgtacgcggcggcgaaggtggccaccgaacgggccgacctcgatctcgtccagctgaacagcttcggctgcggtctggacgcgctgaccaccgaccaggtgcaggagatcctcgaggcggcgggcaaggtgtacaccgtcctcaaaatcgacgaggtgtcgaacttgggcgcggcgcgcatccgcgtgcgcagcctgctggcggcgctcaaggatcaggccgacgagcaggccgatgccgaacgcacgccgtgcggctgcccggcggtgt

SEQ ID NO: 9102 - DNA, 442 bp, Unknown
  gut microbiota DNA sequence
cgagaagatgatgagcacgatgatgggaatgatcaggtcgaacacgcgtcccttgtccgagatggccatgcctttgaactcttcgacggccaccttcgcagcctcgtccagctcgtcctcctcggctacaatggtatccagcttcgccggcagcgcgtcggccgcgttcggatcggaaatgcccaccgtcgacatcgactcgagagcgctgtccttcgacggaatacgatgctgctggtcggccggcttctgcacctcggcctcggcaacgcgcatggggccgaagtccttcttggtagcgcacatgaagaagacgaacacgatggtgagcagcgcatagaagttgtacgggatggactggacgaacgttgtgaaaccgccttcgcccaggtagccgcctacggccacggcccacgacgacaccggcgcgatgatgcagata

SEQ ID NO: 9103 - DNA, 193 bp, Unknown
  gut microbiota DNA sequence
tgtccgtgacaggtttcggaaggagctcctcgtgatcacggttgcggacatacttgcgttgccggcgttcgagcaggtgcagccgctggtgctgtgcgaaggagccgagtcgcgagaagtccacaacgtgggcatcctcgattgcgctcccgataaggacggcggctacgaatcgtacattcccggcgagttc

SEQ ID NO: 9104 - DNA, 627 bp, Unknown
  gut microbiota DNA sequence
accacttcatcggcctgaactatgaggtcaacctgtccaagcccgccggggagcgcatcgagaatgtgactttccagggcaagcccctcaccgacgacatgaccctcaccctctgtgtcaacgactaccgctacaccggcctgaagaacgagggcatcatctccggcgagaaggagtgggagtcctccgcctccgtccgcgacatgctggtggcctatctggccgagcacgaccccctggagcccgcggtggaccacaactggaagatcaccggcgtggatctccagaaggacaacccggaccgggccaccctaattgagctggtcaataccggccgcctggagtccccctataaccagagtctcaacctggacacctactccgaggtgctgggcatggtggacaacgtaaaggtcagcgatctggacaagaccggtaccgccgcctcctttgtaggcgccgacggagccccctacttccgtatgcgggatctggcatacacctttaatggctccaagaaccagttcaacgtatcctgggccgagggtaaggtggccattaccaccagcacggcctatgacggagagctgttccccctgcccgtgcgcatccccgctgcggttcagg

SEQ ID NO: 9105 - DNA, 283 bp, Unknown
  gut microbiota DNA sequence
cacgccgtccagaggatcggcctcatcgccgtccaggcgcgcgtcatcggcgacaaacgcgtcctcgcgcgtggcgctcaagcgctcgcggatgaacgcgcgcgtgtcatcgtcgggcgcgaactggtcgagatcgggcaggtcggccgtggagcgcaggccgaacttctccaagaacgcgcgcgtggtagcgtaaagcgtggggttgccgggcgcgtcggctacgcccgcctcgcgcacgagccccttctcaacgagcgagttgatggagctgtcggagttc

SEQ ID NO: 9106 - DNA, 4940 bp, Unknown
  gut microbiota DNA sequence
tgcgctcaggcgctcgcgtatgaacgcgcgcgtgtcgtcgtcgggcgcgaactggtcgaggtcgggcaggtcggccgtcgagcgcaggccgaacttctccaagaacgcgcgcgtggtggcgtagagcgtggggttgccaggcgcgtcggctacgcccgcctcgcgcacgagccccttctcaacgagcgagttgatggagctgtcggagttcacgccgcgcaccgaggccacgcccgagcgcgtcaccggctgcaggtacgcaacgatggcgagcgtctccatggccgcctgcgacagcttgcgcgtgtcccacgacagcacgtagcgctcgatgagctcgtggtaggcggggtgcgtgtacagccgccagccgccggccacctcgcgcaactggatgccgcggttctcgccttccagctgatcccgcagctccacgagcgcgcgttccgcctggccaggctctacctccagcatgtcggccaacgcgatggtgcccaccggctcgtccgtgacgaacagcatggcttcgatcgcgcccttcagctggttgtcctgcaagccttggaacatggatcctacccctcctccaccgaggtcagcgagtcatcgcccgtgagcacgagctcgcccgacccttcgatgtagcgtatgtcgatatcgccgaacagctcggcctgctcgatcttcaccatggcgcgcttgtacagctcgagcacagccaggaacgtcaccaccaccaccggcaccggcgtgcgctcgtccaccagttccgagaagcgcagcgtcttcttgttctggatgcgctggtggatggcacgcacgtgcacctccacggggatgggcttcgcagcgatgtgctccgattccagcaggaacacgtcgcggcgcgcgaaggcgcgggcggccagcagcgccaggccgtccatcgtgacgtccttcaggtagtcaggcatgaggttcaggaagcacgcgtcgggcccgaacgggcgcggatgcatgcgtccctcggacacgaagcgcatgtgcagcgcgctggcagcgttcttgtactgcttgtaggccagcagacgctcaacgaggatgtcgcgcgcctcgctgggcgccagctcctcgaactcttcggccaccgcgtcgcgctcgcgcggcagcaggctttcggccttgatctccagcagcgtggaagccaccaacagaaagtcgcttgccacgtcgagatcgaggttgtccatgcgcgacacctcggcaaggtactggtcggcgatctgcgtgatggagatagcgccgatatccaccttctgccggctgaccaggtacagcaaaaggtcgaacggcccctcgaagctgtctatgcgaaccttgtacgacatggagccgccctgctacctgccaaaggagaacagcaggtcgaacacgttgccggccgtcgcgtccagatagatgccgataggattgaaatgcagcacgtacggcacgaggagcaccacgatgaggaacaccggcatcgcgtagcgctgcactttgtaatactgcggcagatacttctgcggcaggaagaacgcgaagatggacgagccgtccagcggcgggatgggcagcaggttgaagaacatgaggtacaggttgatgagcgaaaacatgggaaggaacaacgtgaggaagtagtagaagacgtcgttctgcgccagcgcgctcaccggcagcacgagcatgacgagcgtgtacacgactgcgcccaggacggccagcacgaggttggccgcaggcccggcgaggcccacgatgaggtcgcccttgcgcgggtccttgaagtaagcgggattgtacggcaccggcttcgcgtagccgaacacgggcatgttcatggccatgagcagaagcggcatgatcaccgtgccgaaggggtcgatgtgcttgagcgggttgaacgacagccgtcccgcgcgcttagccgtgggatcgcccagcttgtaggcggcgaagccgtggcacgcctcgtggcacacgatggcgggcacgaagctcagaatggagcatatgaggtagggtatcgaaatcatagtgcgatcagtctaccgcaaccgcagagggcgacatgcgccgggagggaaacttcacaaggagcgaacgccgcgaagccggactcggcatgcggaaacgcatcttcgctccaaaaacacgcctcagtcgctgaggcgtgtttttggagcgaagatgcccggcgccagcgccgctggaaaacgttttcgcgccgctcgtgtcgcgcgagccccgcgttcagcgccgaacaggcctttcgccgcggaaccggttcagcgcgacccggcgcgcatggtacgcttcgtgcatgatttcccgatcgcgaaaaggagccatcgccatgtcagaagcacgccacaaccccgttctcgcaggtcagaccgccgttatcaccggaggcgcttccggcatcggcaagagcatcgtccaacgcttcctggaggcgggcgcaagctgtctggccgccgacctcaacgaggaggctctcgccgcgctcaagcaggagctggccgagtacggagacaagctggacgtcgtcaaggtggacgtatcgaaccgagacgacgtggagggcatggtcgaccgcgccgtccagacgttcgggcagatggacatcatcgtgaacaacgccggcatcatggacaacctgcttcccatcgctgagatggatgacgacgtatgggagcgtctcatgaaggtgaacctgaacagcgtcatgtacggcacgcgcaaagccgtccgctacttcatggagcgcggcgaaggcggcgtcatcatcaacaccgcgtcgctgtcgggcctgtgcgccggacgaggaggctgcgcctacacggcctcgaaattcgccgtcgtgggcctgacgaagaacgtggcgttcatgtacgccgacaccggcatccgctgcaacgccatctgccccggcaacacgcagaccaacatcggcgtcgggatgcgccagcccagcgagcgcggcatggcgaaggcaacgacgggctacgccggcgccacccgctccggcacccccgaggagatctccgccgccgcggtgttcctggcctccgaccaggccggcttcatcaacggcgagaccctcaccatcgacggcggctggagcgcgtactaggccgagaagcataccgttcgcacaggctccccttccctaaccgccatcacgacggaagggggccgcgtatttggacgcggccccctcaatcccggtagcggtcaaccagcatcatgagctcttgttttgaatggacggccatctgcttgtagatgttgctcgtatggctgcgcaccgtgttctcggaaacgtacagcacctccgcaatgcgcttggcactgtaccctcggtacagaagccccatcacctccagctctcttttgctcagaccggcagcgacgcccgcacgctcacagcgagctttgaggccgtcttcgtcgccggcatcggttccgactctcgggcgagcgaccgccaagcgcagcaggaacacgatgaacaacgccgccgtagcgaacgacaagccgaaggcagcccactccccaaccggcgagcccgccaacaagcccgtcgcccgcaccacatccgaaacgaccatccagaagccagcattgcagaaagccgcatacagcccgagcaccgccacatgagaaagcctgcgctcgctcacgctgtgcacgatgagcgcgaacacgaagacgtccaaacactgcgcaattgccacgaacaccctcttgaacaggatgaattcctgagactgcatagcctgcatgcccgtaagcataaacaggtacaagatgacgagggcggtgagcgggtaaaggaacatctgcttcgtgaactcgccttcgaccgcgcaccgacggaagaacagagccataacggctatgatgcagcatgaaagcccataggaccacgtgcggtcgacgttcgccaggacgctaccaggatcctgcggaaacacgcccagaacgaacgaccacaatatcatgagcgctatgctcgccgcgatcatcccccatgagatggaagagagcgaggctcgctccgtcgcgttgctgcgatgcgccggaggcgggcaagccagcagaaggcaaagcgaaactaacggaaacaaagggcgcagcgcatcgaactccacccaggagagcgcgaaccgaacgagctccgacagcgcataggacaacgtcaccacgaaaggcgtcatctcggccggcaacgccacgatcctctcgccccaggcatccaggaacgtgcccacgaacacggcggacaacatgagcgcggcaatgaacagcaccggctcgtcagatgcccacgtcagcgtcgcaagcgcagcgaagccgcaccccgccgcgacgcaaacaaagacgcgcgaagagccggcacgaaccgagtctcgacgaaaacgtcctatgcacagcatgaccgccagcaataccgccgcgtatgcgacgtacaagccgatagccaggccgggatacccctcggcgccgatacgcacctcgcgagtcagcgcgagcggaacgcttttcaggcacagccagagaaaggctgagccgaccacgatgaacacggcacctctgtcgagccgaaaacgttgacctttcattaaaccccctccgcatccatcatagcatttcagtaatgctcgcggcagcggccatttacggaccgctgtgcgcatatccacgaatacgcctgttcaagccctcgtttcacgcaaaactgttgagctgattcgaagtgcgtgattttacttatccctccgtttcgtcagatgcgcgacgccggcaaggcccttaaggttaatccagttcgccgcaatcggaagagggcgatggcgaaccgggacgcgccgcaggcgcccgtcccgtggaggcacttcctttattatttt

SEQ ID NO: 9107 - DNA, 387 bp, Unknown
  gut microbiota DNA sequence
gaccaaacgtcccttttcgcccccgtcgacgcggccgcggcgttcgcgaacctgtaccagcgatggttcgacaacccgcgcggcctcgcgcgtgccaaccgaaggcaggcgcggtgcgccgtcggatcgtacgtggcagacgtgctcgccctgttcgacgaacgcacccgcgcctacctgcccggtgcgcccaccgtcctgcggctcgagggttgcgacctcgccgcattcgtgatgcgggcaccgcacatcgcgctgcacgtcggcagcttggaaaccgacgcgcccgtagcgggactgcgctggaagagcctacgcccctgctcgtacgccatcggacggcaggtgagcgatcttgtgttctgcaccgacgagaacgggttgctc

SEQ ID NO: 9108 - DNA, 1831 bp, Unknown
  gut microbiota DNA sequence
caggatgttggcttagaagcagccatgcatttaaagagtgcgtaacagctcactggtcaagtggacatgcgccgacaattcacggggctaagcatggtaccgaagcggcggactaatctatattagtggtaggggagctttccccgcagcggagaagccgagagggcgaccctcggtggagcgcggggaagtgagaatgctggcatgagtaacgagagcggcgcgagaaacgccgccgccgtaagcctaagggttcctgggcaaggctaatcctcccagggtcagtcgggagctaaggcgaggccgagaggcgtagccgatgcgcaacaggcggacattcctgtaccgcctgcggaccgctatcaccgacggggtgacggagaagggtagccgagcggggttctggacgtccccgtgaaagcgcgtagggagcatcgcatggaaatcagcggcgcacgtatcctgagacgcgagacgaaagcttatgctgaagtcggcgagcccatgcttccgagaaaaacctctaggaagggacgcaggcgcccgtaccaaaaccgacacaggtgggcaggtagagcataccgaggcgatcgggagaaccatggttaaggaactcggcatactgactccgtaacttcgggagaaggagtgcccctggcggtgacgggactagctccccgagcggccgggggtcgcagcgaaacggcccaagcgactgtttatcaaaaacacaggactctgcaaagccgtaaggcgacgtatagggtctgacgcctgcccggtgctggaaggttacgcggatgggtcagccgaaaggcgaagctctgaagccaagccccagtaaacggcggccgtaactataacggtcctaaggtagcgaaattccttgtcgggtaagttccgacctgcacgaatggcgtaacgatttgggcgctgtctcaaccatggacccggtgaaattgtattattcgtgaagatgcgaattacctgcggaaggacggaaagaccccgtgaacctttactgcagcttgacattgatcgttggctcggcgcgtagaggataggcaggaggctgcgaagcccgggcgccagcccgggcggagccgaccttggaatactgccctcgtcgcgtcggcgatctaacccccggccgtgatccggcggggggaccgtgtcaggcgggtagtttgactggggcggtcgcctcccaaaacgtaacggaggcgcgcaaaggtccgctcagaacggtcggcaaccgttcgcagagcgcaagagtacaagcgggcttgactgcgaggcccacaagccgagcagagacgaaagtcggttctagtgatccggcggcacagagtggaatggccgtcgctcaacggataaaaggtactccggggataacaggctgatcttgcccaagagtccacatcgacggcaaggtttggcacctcgatgtcggctcatcgcatcctggggctgaagtcggtcccaagggtatggctgttcgccatttaaagcggtacgcgagctgggttcagaacgtcgtgagacagttcggtccctatcctccgcaggcgcaagaggattgaggaggtctgcccctagtacgagaggaccggggtggacggacctctggtgcagcagttgtcgaccaacggcacggctgcctagctacgtccggcacggataaccgctgaaagcatctaagtgggaagccgtctccaagatgagtcctctttccggtaagggcccaggcagaacacctggtcgataggccgcaggtgcaaggcgtgcgagcgcctcagccgagcggtactaatagcccgagctcttcttc

SEQ ID NO: 9109 - DNA, 8143 bp, Unknown
  gut microbiota DNA sequence
cgtccatcgcggccagcacgtcgtcgatctcgcgcacgcgcgacgaggcaacctcgaagtcgaggtcgcgctcctcgatgcgccgcacggcgtccgcgagcggctccatcttgcgcgagatcacccgtgcggcgcgcgcggcgatgcccaccagcgtcagcaccgacagcacggcgagcgcgcccagcagcaggttctgcgggttcggcagcgcgtcgcgcagatccttcgaggcgaactgcggcagatactggtacacgagcacgcataccgagccgtcggccaaggtcaccggctcgtaccgcgtcatgccaaacgtctcgtaatcgatggccaggccgtcgaacgcagccgcgcgggcatcgtcgaccgcacccgaggcaacgtcgccggccgcatacgcgccgtccggcgagaacagcgcccacctgtacgccgagggcacggcggcgtcgatcgcgtcggcatcggcggagggcagcgcggcgagctgcgccgacgtctcgtccagggccgtatcgccgtagttcgccagaagcaccgtcccgcttccgacgagcaagccgaacgctgcgtacgcggccagcgccagcgccagcagcgcggccagcacgtaggcgaagtagcgcaggatgagcgcgcccaagggaaacctgcgtccgcggccgcggctcgcgccgagcgctccatgcgtccgcgcgtcccgcctcacgccgtccatttgtaccccactccccacaccgtgtcgatgggctcggcgcccgccgccttcagtttcgcgcgcgcgttcgccacatgcaccgatatcgtcgacgcggcgctttccgcgtcccatcccagcacgttctccacgatctggtcgcgcgagaacgcctggccgggatggcgcgccaggaactcgcacacgtcgaactcggtcttcgtcagcggcacggtggcctcgcccacgtacgcctcgcgcgacgcgaggtcgagacgcagcgcgccgaacgacagcgcgtgcttgcgctcgcgccgctcccgccgcaggtgcgccgccaccctcgcgcgcagctcggccgcgccgaagggcttgcgcagatagtcgtccgcccccaggcccaggccgtacacggcatcgtcctcggaacttcgtgccgtgagaaacacgatgggcgcgtccaccgagccgcggatggcgcggcacagctcgaacccgtccgtccccggcatcatcacgtccagcagcaccagatcgtagcggtcgagcttcagcgccagcacctcctcggcgcatgcggcgcagcgcacgtcgtgcccgtccttgcccagcacgcgtcccagcaggttgcggatcgcctcgtcgtcgtcgaccgcgagtatgcgggccatcgttcctccttccgtctcgcacgagtgtagcatgaggcatcggccccgttccttcaggtcgtccgttcctattcgccgctgcgacgcgggttctcgaagcggttcgcggccgccagcgccaccgccagcacgaccgccgtgatagccgtgcatgcgcacgtcacggtcgcgtacgccgcgaccagagcctcgacctgcgcctgcgctcccatgcccgcggcgatggacagctccaagggaagcgaagccagacgcgagggccacgcgaacggcacaaacgcggccgccccgatgctgaacgctccgctgaacgtgccggtgaccaagccgttcgccagccctcccatcagcgtcagcgccgcgatgaagccgagcgtccccatcccgatggaggcgttgcgaccgaagcgcagcgcgacgcaccacaggatgacgtacgagcacaaactgcccagcgcgatgcccgccgtcgcaagcgccaccgcagccgtatcgggaagcgaacggcccgccagcgccagcgagccgcagaacaatgcggctgcgatagcggcagccatcaggcacagcgccaacagcgccgccaatttcgccgccagcgcgccgcgcctcgacgacacgcccagcacgttcgcgccctcgcccgcccgctgctcggcatccgccgccaagccgcaggatatgcccgccagaagcggcgcgcccgcgccgagcagctggaagaacgcgtcggttcccagcagggaatcccatgccgagaacgcgaagtacgcacccgccagcgcgccgagcgcgacagccagcgccacatgcagcaccacaagcggcgagtggcgcatcctaaccgcctccgagcgcagcgcgcgccgaaacgtcacgcgcgcccgaccgggctccgcctcgcaagttcgcgtcccggcctcgcgcgccttcgcgcgcgcctccgccccggccatcaagcagcctcacgcttcgagaaccacgtcgccccagcccatgccagcacggcgaacagcaccgcggccacgacgatgccgaccacggcctcccaaccgaacgcgcccagcgcctcgcccgcctccaagggcacgccggacggcgccacgcccagaagcggcgacacggcgcagagcgtcgtcgccggcgggaacgcgaaccacgccgccgacgagtacagcgcgatacccgcgcccagctgcaacagcaccggaattgcgatgcccgcaagcgtcccgaaccgcacggtcagcgccagcgccgcaggaaccatccacgaactcgcaaccgtcaagatggtcgccgcggccagcccctcggcaaaaccgggggcatcaacgcccatcgctccaagcgccgtcgaacagaccagcaccgcgaggttcgcagcgaacgccagcgccagcgcgtagcacaccttcgcccaccacgtgcgcgccgggggaaacggcagcgccagcaccgaacgcagcttctgccgagcgtcgatgttcgccaccgagacgcagatgagcgcgatggcgacgggcatcatgagcacgtaccagaagttccacaaatacgttgcgacacccccggtcgcgcccgtgccaggaatgacgcccgaggacagcacgcccagcgcgcagaacggcaacggcgcgatcagcgccaccttgcgcggcaccccgcggcggcccttcagcacctccgctctgaacaccgagaagaacggcctcgtccgcgcctccatcatgccaccgccttccccaggcacacgtccatgaacaaacgctccaaatcgacgccctcgccgagtggagcctcgtaggccagacggccctccacgatgatccccacaagatcggccatatgctccacctcgttcaggatatggctcgacagcaccaccgtgatgccgtgctccggaaacgagcggacgagggcacgcagctcttgaatgcccaccggatcaaggccgttggtcggctcgtccaggatcagcagcctcggatgacccaccaacgcgagcgcgatccccagacgctgcttcatgcccatcgagaactggcccgcgcgcttcctgcccgtttcgggaagtcccaccgtggccagcgcctcgtcgatacggctttcgggaacgcccagaagcgacgtgcgcacgcgcaggttctcccgcgccgtcaagttgtcgtacagcgggggcgactcgatgagcgccccgatatcgttcaagtcgtcgcgcgtccacggacgacccgcgaaagcgatctcgcccgaggtgggccgcagcatgccgcacagcatcttgagcagcgtcgacttccccgcgccgttcggccccaaaaggccgtacaccgatccttccggcacatgcagcgacacccggtcgaccgctttctgccctttgaacgtcctcgtgagatcgttcgtttccaccatgaatcccatagagcctgccctttctcttgcctgagaacaggatgcgcccggtttataaagattcgttaaagaccgaaacgttttccgcgattccgcagccaccgacggcgtatccccgttgaccccgacgctgcgtcatggtctaccatgcgaagagcagcatcgtcacgcacacgtcaggaggccccatgccgttcgcgcccgttggaacccccgcgccgccctcccgcgccctgccgcgcatggcgatcgccctgctcgcctgccttgctctatacggcatcgacctcgcctgcatggcaaccgtccccgcaaccggattcgacttcgcgtcgggctttgcggtgccgttcgacctcatggtcttcgtcccggcggtcttctacctcctcgtggtgcgacgctacaggctgtcgcccttgctggtgctgccggtcatctggctgggcggcctcgtgtcgctgcagttcgccgcgcccggcaagccgtcgctgctggcgccgctcggcctgtgcgccgtcggagtggagctgggcatcgccgcgcgcgaggtcctccgcctcgtccgccgcttccgcacggcgaaagcgtcctcggacaacccgctcgactggttctcggacgcgttttccgctctcgctcgcaacgagcgggtcgcgcgcatggcggcgctcgaatgcgtcatgtggtactacgcgtcggcttcgtggcgccgcgcgccgcacgtgccgcacggctaccgggcgttctcgtcccaccggcaaagcggctacgtcgccgcggtcggcgtcatgctggttctcatcgccgtcgagacggtcgccgcgcacctgttggcagcacggttcagcgtcgcggccgcatgcgtgttgaccgcactctccctctacacgatcctctggatgatcgccgaagcccgcgccgtcgtgctgaacccgcttctggtggacgatgtcgagctggtggcgcgctggggcatgctcgtctgcgagcgcatccccctcgaccgcatcgcgcgcgtcggttcccaggatcccgctgtcccgaagagggagcttctgaacctggcggccatgggcgggcaggcgttgtggatcgagctggcggaacccctcgaagtgcgcggcctcaccggaaagccccgcctcgtgcgcgcgatcaagaccacgcccgacgatgccgccgcgttcaaggacgcgcttcgcccgcgaagctgacgcgatccttacccttgcgcttcgcctcgtacagcgcacggtcggccgcgtcgaacagcgattcgtacgttcctccgtcgataccggccaacgctccgcccacgctgagcgtgacgagcgcgcggccttcgcatctttgcccgttcacccgcagagcagcccgctgcgcctgaacgagatcggcgtgcggcagatacgcgacgaactcgtcgccgccgatacgcgcaacgatggcgtcgtccgacgccaacgcctcttcaagcgaccgcgccacgttcgacagcagctcgtcgccggccagatggccgaacgtatcgttcacgcctttgaagtcgtcgatgtcgatgacgagcagagctcccacgccgcgtttcgcaccggtgcgcaacagcgggtcgatgagctcggaggtggcgctctgattgaacagcccggtcagaggatcgcgtcgcgcctggtcggcgaggtcttcaagctgacgacgctccgcggtgatgtctcgccagctgccgatggtgcgcacgggcgctccgttgcggtcgtacagcatcatggcgtgcatgcgcgtccaacgccagtcgccttccggcgagcccccgaaaagacgacgcacgtcgagcgtcaccgactcgccgccctgcagcgcctcggccaggcgctcgcagtcgtcgggatggatgcgcccgccttctgcgatcatctcggtgtagcgctcgatccgacgctcctcgggaagcgcgctgccgtccgcgccgggcgcgcgctcgtactcgaccagcacgtcgcgctcgatatcgtattcgaacagcacgtcggtaacgctgcgcagcgcgatgcggtagcgttcccgctccaccgcgagcgcgatctccgcctccttgcgcgacgtgatgtccacgagcacgctgccgatcttcaccgcaccgtcctcggtttgcactttgcgacccgaatcgagcacccacgccagcgtaccgtccttgcggcgcgcgcggtactccgtctcgtacgtaggcccctcggcgaagcagcgcgcgacatcggcgagcgcctgcgcgcgatcgggagcatgcaccatgcccgccgccgtgccgccgctcacctccatcagctcttcgatggtgtagccgagcatgcgcgccagaccctcgttgacgtaggacagcgtgtacacgtcgtcgtcctcgctcatcttgaggccgcccgtgatgttatcggtgagcagatcgatggtggccgttttctcgcgcacgagctgctgcaagtactcgtaggtctgcctgccggcctcgaaggggaagtaccgctcgtccctcatcgcccgatagggattcgacgcatggacatggcggatcttgagctctccgcccgcatccaccagctcgtagctgcaccgctggcgctcttcgatcaccagctgcgagtcctcgcgcgtgcgcacattgtagcgacctatcacggtgcaactgcactccgtgacgttcaccaggtaaaactcctcgtcgaaaacctcgcacggaggcgcaagcggcgcgcgcttcgtcaaatacgacacgatctcttcggcgctggtcgagaattccacctcgcccgctcctatccacgagagatcgtcggaaaagcgctcaaccacctgctcgatgcccgttccggcgtaaaaccggcgcaccgtgtcgctcacgaacgacagcgcttcgtcgaacagcgggttcatcgcactcctctcgcctgcctcccgagcgaaagcctcggaggccgagacggcttgctcaccgtccccctacgcatttcgttcgaaagagtatagcgcgccggcaagcagaaggctctgtgaaacccgcgaacagttcgcgcttaggggcgttctacccctagatacgaaaagggccaccagcgaaagagccggtggcctggtgttccgtggagccagtgacaggaatcgaacctgcaacccacagtttacaaaactgttgcgctaccgttgcgccacactggcgtgcgcgtgaatcgcgtgcgtgcgtattgtacgacatcatgcgcttccggaaaagcgtttcccgcaacgcccacaagcatgatgggcatcatcgctcgaaaaacacggaatcgcttccgaaaacgtgtttttcgagcgatgatgcgcgcccgctgcgccaaaccctcccccgctgcgtccgcaggacgtcggcgcccctaaccagccgaggttccacccggctcgtcgatcctcagcgcgcggtacaggcggtcgggcacgaggctcacgagatcgtcggtccaacgcacgaggtcggtgggcgcatccgagcggaaccagtcgttcagcacctcgcactccagcttcgagaatatctccacgatgaaccgcatgttgtcgttcacggtcacatggcggtacttctcgagcgtctccaacagcaccgtcttgcggttctcgggcataacggtctggccgaagggcgtgttgatgctgtactggatggacttgcggtagaaatcgcgctcctgcgcgataagccggagatgatgatagtaccctgtcttccaatcgatggtgcgccctatctcgttgaggtagaactgccggcagaagatggaatgccaccaagggatgtcgtatttgctttgaaaatggcggtagaacgtctgccgggatattcccgcgttctcgcatatctcggcgatcgtgatgcgatcgagcgatttgtcgacggcatgcagtatcttcatcttcgtgcgcagctcgggcgatccgaagatgtcctgtccatgagcaagatccggcagcatacaaagcctcctcttagagcaccccgacttgaacctgcaagaaacctgtcaaccgaattaaacataccgcaccgaaacgcctgacagcacgttacattcttgcacaattgtccggcatagttgacaatcatattctttaattccgcaactcggacatacggatgaccttgtgcaacggcaccgcgacaccgaacggactgcgccctttgaatagcgtttcccagcccatcacaatatcttcacagagaggtggacacgccacccgaagaccttgaaggcggcgccggaagcgctgccggagaaaggagactgtcatggcgaagatagtcaattcttggaacgactgg

SEQ ID NO: 9110 - DNA, 181 bp, Unknown
  gut microbiota DNA sequence
ctcgtcggcggccatctgcgccgctctcgggctgacggggctcgcgggcggcgcggcgctggcagggtgctgcgcccagatggtgggcttcgccgtgctgagcttccgagagaatcgctggggcggcctgctgtcgcagggtctgggaacctccatgctgcagatgggaaacatcgtgaag

SEQ ID NO: 9111 - DNA, 817 bp, Unknown
  gut microbiota DNA sequence
caaatcggcacgttcgccaaaagcgtggcggggccggccatggccatcgccatcggatacgcgctgcacaccccgccgctcgtgctgttctcgctggccgctgtgggcttcgccgccaacgacgcaggcggcgcgggcggccccttggccgtgctggtcgtcgccgtggtcgcctccgagctgggcaaggccgtgtccaaggagacgaaagtggacatcatcgtcacgcccgccgtcaccatcctaggaggctgcgggctggctctgatggctgcaccgtggatcggcgcgctggcctcgtcggtgggcgggttcatcatgtgggccaccgagctgcagcccttcttcatgggcgtcatcgtgtcggttgtcatcggcatcgcgctgacgctgcccatctcgtcggcggccatctgcgccgctctcgggctgacggggctcgcgggcggcgcggcgctggcagggtgctgtgcccagatggtgggcttcgccgtgctgagcttccgcgagaatcgctggggcggcctgctgtcgcagggtctgggaacctccatgctgcagatgggaaacatcgtgaagaagccgctgatctgggtgccggccatcgtcgcctcggccgtcaccgggccggtggccacgtgcgtgttccagctgagccagaacggacccgccgtggcatcgggcatgggaacgtgcgggctcgtaggccccatcggcgtgtacaccggctggatatcgggcatggaggccggggcggccgcgcccggcgcgttcgactggatcggcctcgcgctggtctgcttcgttctgccggcgc

SEQ ID NO: 9112 - DNA, 229 bp, Unknown
  gut microbiota DNA sequence
cgccgcgttctcagcctcggccacctgcttccacaccggcgtcacgtcctcgtacgcacccttcgtcaacggtccgaccttcttctgcgcgtcgaacagctcggccggcgcgccctcctgccgacggttcgaggcccacgtcttggcagagagcgtttgcagctggatgaagcccttggccgccgcgtggtcgaacgagtcgtccttgtcgtaggtggccagcgcgtaa

SEQ ID NO: 9113 - DNA, 3699 bp, Unknown
  gut microbiota DNA sequence
gccgaccttcttctgcgcgtcgaacagctcggccggtgcgccctcctgccgacggttcgaggcccacgtcttggccgacagcgtctgcagctggatgaagcccttggccgccgcgtggtcgaacgagtcgtccttgtcgtaggtggccagcgcgtaatcgtacagggagtaggcgctcttgcggcccaccacggtgcaggagcccttgtagaacttgagcttcaccgtgccggccacacagcgctgcgtggaggcgaggaacgcgtcgacggcttccttgagcggcgagaaccactggccgttgtacacgcacttcgcccactcctgctccatgcccagcttgaagtgcagcacctcgcgctccagcaccaggtcttccagcgccttgtgagcctggatgagcgacagcgcgcccggcacctcgtagcactcgcggctcttcacgcccaccagccggttctcgatcatgtcgatgcggccgtagccgtgcttgccggcgatctcgttcagcgcgtagatgataccgaggaagctcttctggctcccgtcgatggcgtacggcagaccgcgtgcgaactcgagctccacgtactgcggctcgtcgggagcttcggtgggatcgaccgtcatcgtgtagatgtccgtcggcggctccatccagggatcctccaggacgccgcactcgatggcccggccccacaggttatcgtcgatggagtacggcgacttcttcgtggtgggaacctcgatgccgtgcgcctgagcccattccatctcctcggagcgggtgtgcagatcccattcgcgcaccggggcgataatctcgatgtccggatcaagcatgaggatgctcgcctcgaagcgcacctggtcgttgcctttgcccgtgcagccgtgcgcgatgtacttcgcgccgaacttgtgcgccgcgtccacaaggtgcttggagatcagcggccgggacagcgcggacacgagcgggtacttgttctcgtacagggcgttggcggccagcgccttggacaggaagtcctgggcgaacacgtcgcgcatgtccacgaccaggcattccacggcgccggttttcaacgccttctgcttgatcttctcaaggccctcatgctcctgtcccacgtcgccgaccacggcgataacgtcgaggttcttctcctcctggagccacttgatgcacacggacgtatccagtccgccggaatacgccagcaccgctttgtccttctgctgggtttgctgagtctgctgctgagccatggtagggtccttcccccgtgttcggttgtcgtcgggatgcccggtcatggtgcggctgcgaaggcgcctcccccagcgctcgccggacggtaggggtatgcgcgcgcccatcgcggttctcaccgcgcaaggctgtcgtcgtgcgcaccacggcttttcgtggtgacaggcatcagagccgggcggctcggacgctgttgcttgtactaagcgtggggatgagtgcagggagaaaagcgtccccgccaagaaatgtagtcgacgactagcgtcgtcgcagtcggtcgatggcgcgctcgacttcgacggcagcctcagggctctccgccgcgatcatgatcgtgttgtcgccggccaccgtgccgagtgctccgcgcaggctggccttgtcgagcgcagcagagacgccggctgctccgccggagaacgtcttcactacgaccatgttgcctgccacgtgcacctcttcaaccaattcggataccatgcgctggagccgcatttcctcagggagaacgtaatagccctcacgagacttcaccagacccatgtccatgatgtcgcgggagatcgtggcttgagtgcattcgtagccagcggcctgcagctgattggcgagatcgcgctgcgtcttgacattatgttcgcgaatgatgtcgcgaatgatgtcgtgccgttgttgacgttttctcatgccctcgatactctctgttcccgttcaagaacgatcacatacggttccgatcacaagtaccttcgcggggtatgcagaattgcgcaagacccgacgaaaatatgcattaaatagtaccctatccgtgagcgttccgaccccagaatttcaaaaagtgcagaaagattttcgacgaacgtccttgcagtcgttatcctgaacgagcgcagcgaccctgtcatcctgagcaagtcgaaggatcccgcaaggtgccaaccgtgagacttcctgctgtcgccgctcgggatccttcgactccgcgcttcgcgcctcgcccaggatgacagcctacggcgcctcgctcaggatgacagccgccctttcagaacaacagcgccgcaagcttctgcaccagcacgtccacgtcctccttcgaacacaccagcggaggcaggaagcgcagcgtgcgcgggccggtgaagttgagcaggaggccctcgtccaggccggccagcaccacgtcgggggcgctcacgccctcggcgaggtcgcaggccaccatgagccccaggccgcgcacctcttccacttgcggcagcgccgccagcttctcgcgcaggtacgcgcccgtgcgctcggcgttgccggcggcgtcctcggccgccagcgcccgcacggtggcctcggccgccgcgacggccaggcagctgcccccgaaggtggagccgtggtcgcctggatcgaacgacgccgccacctgggcgcgcgcagcgcacatgcccatggggaagcccgaggcgatgcccttggcaatggtcaccacgtcgggcgtgacgccgaagtgctggaacccgaagggatacgtgccgcagcggtacatgccgcattggatctcgtcgcacatgaacagcgcgccgcgctcggcggtaaggcgacgcaccgcggccaggaactcgggctcgcacggatgcacgccgctctcgccctgcacgcactccaccatgacggcgcagatgccgtcgccctgggaggcgaacagcgactcgagcgccttgatatcgttgatgggcgtgcggacgaagccgtcgggcaggggctggaacgcctcctgcttggcgggctgcgccgtggcggccagcgtggccagcgtgcggccgtggaagctggcgtcgagcgtgacgatgaggcgcggcgcggcggctgcggcggcgcgcactccgtcctcgtcggcgccggcggcctcggccgcagccatcgcgcgcttcttggcgtgcagtcgcgccagcttgaaggcgcattcgttcgcctcggcacccgagttcgcgaagaagctctgccacggctcgcgctcggcctcgtcgacgcactcgttcagcaagtcggatacgaggtgcgccacctcgccgcgatgctcgatgtagtagtagttgctcacatggaccagcgtgctcgcctgctcctcgatagccgacacgagcgccggatggcagtggcccaggctcacggcgcccacgcccgacacgaagtcgaggtacgtgcggccttccgaatcctccacctgcatgccgcgcccgcgcacgagctccaccggcttgcgggcgtacgtgcccatcacgtatgcggattcaagctgctgttcctcgataaagcccatggtcgtccttctttcgctcgcttagaaaatcttgttgttcggcgtcgcgctggcagcatgctggcgattctccagcaacttggaggcgaagttgcccaaa

SEQ ID NO: 9114 - DNA, 763 bp, Unknown
  gut microbiota DNA sequence
gaaacccatggtcgtccttctttcgctcgcttagaagatcttgttgttcggcgtcgcgctggcagcatgctggcgattctccagcaacttggaggcgaagttgcccaaaggatgggtgtcgaacgtgcacgactcctccgtggagtgcatcgtggtgcccacgccggtgctggtcagaagctccagcagcagcgagtgcggggtgatgccgttgatgatgtgcgcgcggaacacgcccgaatccagcgcgtggatgcacgacttcagcttcgggatcatgccggtagacacgatgttgttctccaccatgtactgcgcctcgaacagcgtgaggttcgagatgagcgagtccttgttctcgaagttctcgtacaggccgtccacgtcggtgaggaacaccaccttgtgcgcgccgatggcggccgcgatgtggcccgccaccatgtcggcgttcacgttgtagaagccgccgtcctcgcccagcgccaccgaagccacgacggggatgtagtcgccggcaacgaggtcgtccagaagcgggctgttgatgcgcgtgatgcggcccacgcgtcccagctccgggctggcctgttcggccacgatgacgcccgcgtcggcgccgctgacgcccacggcgaagttgccgtgctcgttgagagcctccaccagctcctggttcactttgcccatcagcacggtgcgcacgaggtccatggcctcgggcgtggtgacgcgctgaccgtccttgaactccacgggaagc

SEQ ID NO: 9115 - DNA, 8105 bp, Unknown
  gut microbiota DNA sequence
ctcggccacgatgacgcccgcgtcggcgccgctgacgcccacggcgaagttgccgtgctcgttgagggcctccaccagctcctggttcaccttacccattagcacggtgcgcacgaggtccatggcctcgggcgtggtgacgcgctgaccgtccttgaactccacgggaagctgcaggaaatccatggcctcggtgatggccttgccgccgccatgcacgatgacgggattcacgccgacgatcttcagcagcacgatgtcgttcatcacgtcggcgcgcagctgctcgtccaccatggccgagccgccgtacttgatgacgacggtcttgccggtgatgttcttgatccagggaagcgcttcgaccagcacctccgccgctttgttcgctacgcccttcgggcgggtgtccttcgcgtacttcatgagcgatagtctccgttgatcgtgatgtactcgtgtgtgaaatcgcatgtccaaaccgtggtcctcgcctcgcctgcgccgaggtcgacgtcgatgacgatctcgggctgctcgaaacggcgcagcgcctcgtcctcgtcgaacgcttgcgcaagcccgccgcggcacaccggcagacccatgatgtcgatggacgcatcctcctggcggaagaccgcgcccgacttgccgatggccgccgcgatgcggccccagttcgcgtcgcggccgcagacggccgtcttcacgagcggcgagttcgccacggcgcgcgcggccaggtcggcgtcggtgtcgttggcagcaccggtcacatgcacggtgaccaggcgcgtggccccttccccgtcagccgccatcatgcgggccagcgtctcgcacacctcgacgagcgccgcctggaagcgggcgaaggccgggccgtccggatcgaacgcgcttgcgcccgcaggtgctgcggcgccgctggcgaagaggaagcaggaatcgttcgtcgacgtgtcggaatccaccgtcaccttgttgaagctgcgattcacggcgtgcacgagcgccctgtgcaaggcgggcgcggacaccggcgcgtcggtggtgaggacggcgatcatcgtggccatgttcggcatgatcatgcccgagcccttcgacatgccgcccaccgtgaacgtgcagccgtcgtagccgatgccgtcgcccgagaacgtgacggcggcctccttcggacgcgtgtcggtggtcatgatggcgcgcgccgcatccgcgccaccgccggcagacagcagcgacgccgccgcaggcaggccgatcccgaacggcgccaggggcagctgcacgccgatgacgcccgtggacgccaccagcacctcggatgcggggcagcccacggcatcgcccgcgatgcgcgccgtctcgcgcgcggcctccaagccgggctcgcccgttgccgcgttcgcattgcccgagttcaccaccacggcgcgcgccgtgccgtaggcgggctcgcccggctggtcggcgcccagctgcgcgcgcgatacgatgaccggcgccgagcagaacacgttcttggtgaacacggccgcgcacgcgcagggttcgtcggcgaccacgagcgcgaggtcgaggcgctcgggatccttacggaaacccgcgtgcacgccggacgcgcggaacccgcgcgccgccgtcacgccgccttgggcgggatgcgttgcagcgatcggttggtcggtcatagcggcttctttctgttgcggctggtgcggctgtagcttactaggacgattcgcatcacacgggtacggagatcggttcgagccctcgagcctggggcaggcccagcacggcgttcgcgcactgcacggcctggctggccgcgcccttgcccaggttgtcgatagcgcccacggccaccagcatgcgcgccgtcgcgttgacggcgattcccaggtgcgcgtagttcgtgcccgccaccgacgaggtcttcggcatggtgccggcatccagcacgtgcacgaaggggtcgtcggcgtagaagtcccggtacagctccacgatctcgcccgcgtcgacgggcgcgtcggacgcgagcggcaggttcacggtggacagcaggccgcgattgagcggcgcgagatgcggcgtgaacacgaggcggccttccaggcccaggatctgctcgatctcgggcgtgtggcggtgcgtcgccacgccgtacgcttcgaggttctcgtcggcgaagcagaagtgcgtgcgcgtcgaggccttcttgcccgcgcccgtgacgccggagatggcgtcgaccaccacgacgccgttaggccgcacgagcccggcacggacggcgggcgccgccgcaagcgacgtggccgtgggatagcagcccgcgcaggcgacgagcacgccctcgcccgctgcacgggcgcctgcggcgcgcgcgaggtcgtccgggaacagctcgggcaggccgaaggcagcacgctgcagcaggtcggtggccgtatgcggcgtggcgtaccagcgctcgtagacggcagggtccttcaagcggaagtcggccgacaggtcgaccaccgtcgcaccgcgcgcgaccaggcgcggggccatggcgagcgccgcggtgtgcggcacggccaggaacacgaggtcgcacgcgtcgagcgcagggtcgtcgtgcgcggtgaaggcgaggtcggtggcgccggtgaagccgggatactccgcgacgacgggcgtgcccgccagctcgttggacgtgactacacgcagatcgagatcgggatggcgcagcgcgagcctaatcagctcgatgccggcaaaaccggccgctccaacgatgcctgtcgtgatcgccatgtcgatccccttcgtcttccgtcgtccgatgcgcggacgcgacgctcaagccgttgcgtcacctacgatttgtgcatatgcacaaaaatgaggcgttttgaatgatgcataccatcctatgaaagaaagcagcgtttgacaagattcgagcgcaaattggtacacgagaatcaaaccgcccggacgaggatcgagcgcgggggcgagtggtgcgaggggggtgtgggatgcgcggagaggtgcgggggtgcggagaggtgcgggaggggcgcacgtgaggcatcgggcgcgcggaccagcgcgcgaacgcgagaggccgggcgcgcgggccgacgcgcaagcgcgatgcccccacaccgcgcccgaaccgcgattctctgcccggattctgggttcccaagcaacgccgccccattgcgctaccgcaccatgggcctcgtgtcgaaaaaaccgtgcgcgcgcggtaaaatcgaagcggtttggtaatcccctgcctccgctttcttcgcgcactggttttccgagctggcaaaacgcgcgaagacaagaaccttcgaccgtcgagacggcgactcgagccccttcagggttgccaaaccgatcgatctttaccgcatgaggccggatttcgcctcacaagccgcaaccgacttcgcagcccgactgcgcgcgacgcgacgtcggttgcgcatgcctggtaagatccaaccgatatggctatcccaattcgagaatgcattgacaggaagttcgtacaacctgcggtttggcgatctgaacgacgaacatgacgagccggaggtgggaaaaggctcccgtatcggctcgaccttaccaagatttagctacgcacgcatcatcgcccgaaaaacacgcttttcgggcgatttccgtgtttttcgggcgatgatgcgccgggcatgcgacgcgtccatgttcgaacgcgtctcgaaaggagcgctcctctttaggatgctttgttgggggtgtggcgataggtgcagacggttttctccagcacgtggacggcttcctcgtcggtgagggtgagtgcggcttccagctcgtccagtttctcggccacttcggtgtagctgatctcctggccggtggagatgaggatggagtggttgtcggtgggcagcgtgctctcttcgtccatgagcagctcctcgtacatcttctcgccctcgcgcaggcccgtgaacacgattttgacgtccacgtcgggcgtgaggccctgcagctggatgaggcccttcgccaagtcgacgatcttcaccggctcgcccatgtcgaggatgaagatctcgccgcccttcgccatgccgcctgcttggatgaccaggcgcgacgcctcggggatggtcatgaagaagcgctcgatgtcgggatgggtgacggtgagggggcctcccgcggcgatctggcgctggaacacggggatgacgctgccgttgctgcccagcacgttgccgaagcgcacggcggagaaaatggtcttcgacgtgcgcgcgtagtactgcatgaccatctcgcccatgcgcttcgtggcacccatgacgctggtggggttcacggccttgtcggtggagatgaagatgaagcgcgcagcgccgtaggcgtcggcagcgcgcaccgcgttgagcgtcccgaacacgttgttgtgcaacgcctcgcgcgggcactgctccataagaggcacgtgcttgtgggcggccgcatggaacacggcgccgggtcggtacttcgagaacacctcgttcaggcgcgcctcgtcgcagacattgccgatctctatgacgaggtcgatgtcgtcgtattcggccagcagctcgttgcgcagcatgtaggcgtcgttctcgtacatgtcgaagatgacgatgcgggcgggcgccaccttgcacagctggcggcacagctcgctgccgatggagccgccgccgcccgtgaccagcacggtctcgccggcgatgtagcccgacaccgcgcgcgtgttgaggatgatctcctcgcggcccagaaggtcggccacgtccacgtcgcgcaggcgcacgtcgccgatctcgtcgagcgacagctcgcgcacgttcggcagggtgcgcagcttgcagtcggtcttcgtgcattcgccgtagatgcgcttgcgctcctcgggcgtggaggacgggatggccacgacgatctggtcgatgttgtgcttgtccacgaggtcgacgatgtcgttcgtggagccggccaccttcacgccgtggatgcgcgaaccgcgcttggtggggtcgtcgtcagtggccacgatggggatgcccggcatgagcgggtccttcgaggccatgcgtccgattgccagcgagcccgtctcccccgcgcccaccacgagcgtgcgcggacggtcgcacatgcgctgcgtggagacgagcgcgcgccttttctggcgcatgacgcggaagatcaaacggatgccgcccatgaagaatatgagcatgaagcacgagacgaaaaacacgcggatgggaagccgcacgtcgatgatccataagaacacagctcccaccagggtggacagcaccacggccagcacgatctggatggcttcgtcgacgctggcgtattcccagaggttgttgtacaggtggaacaagcccaacacggccacgttgatgagcgcgaggatgcccagcatgaagtagatctcgttgttgacgaacacttcgccctcaacgtcggtgagcagcgatgcgagccagtacgcggcgtacgtcgcaacgatatcgagcagcagcagaatcgctgtgcgttttgtgatatgagcgtccaaaccgggcctcgtcttcgagtagggcagcgaaacgatatggatttgccgacatgtcgacatgctcggcgaccaaagcggtattgtatacaaagtaacgcacgattgcacaggacacgcgaagttcaggagcttgctacatgaataaaacagccgcagccgggcaggggcagcctgcacgcgaaagcaacatcaacgccatcgtcagctacttcgaaagcggcatcaaagccttcggcggcccgggtgagctgggcatcgagctggagcagatcatcgtgcacgacgatatgagccccgtctcgtacagcggcgaacacggcgtggcgtgggtgctgcgccagctggaggcggactatcctcgcaccaccaccgacgagcacggcgaccttttgggagtcgcccgcccgagcgaggcggtcaccatcgagcccgcggcgcagatcgagctgtccgccggccccttcgccgatctcgcgaccgcgcgagacacgttcgaagggttcgcgcagcgcctttccgacgtgctggagcccgcgggagagaaggcgctggcgatcggctaccatccctccgccacggcgcgctcgctggagctcatcccgaagcgccgttaccagttcatggacctctatctgggcgaacgcgacatctacggcccctgcatgatgcgcggcagcgcctcgacgcaggtgtccatcgactacaccagcacggccgactgcctgcgcaagctgcggctggcgttcgcgctggtgccgatgctctcgcttatgtgcgacaacgcacccgtgttcgaaggcaagccgcgcgagcatcagctggtgcgcacggacatctggcagcatgtggacaacgatcgatgcggcctcgtgcccgacgtgctggatccctcgttcgacctgcgccgttacgctgagtacatcctggacaccgtggccatcctcatcccctgccagcagcagcggtggtgctactccgaccgcacgttcggcgatatctacgccgcgcgcacgatgacgcgcgccgaggtggagcacgcggtgtccatgttcttcaccgacgtgcgcctcaagacctacatcgagatccgccccgccgacgccatgcccatcccctacgtcatcgcctacgcggcgctgatcaaggggctgttctacgcgccgacgagcctcgacgcgatggacgggctgttcgccgacgtgcggcgcgacgactacctggcggcgcaggacgcgctcatggagcgcggctacgaagccgaggtatacggacgacccgtcgccgagctgtgcgaccgcatcgtgaagatcgcgcgcgacggccttgccgacgaggagcagggcttcctggagccgctcgccgacctcgtcgcgcgccgcgtgacgctggccgacctcgcggaacggagcgaacgggcgtgagcaacgaggatcgcatggtgaaggtggcctaccgcggctacttcgacgacggcgccaccttcatcgatcagacgaggcagcccatcgagttcccctgcgcagacgggtggatgccgcccgcgttcgtcgacgcggtgcgcgacatggccgtgggcgaaacgaagcgcgtccgcgtaggagccgacgaggcgtacgagaagcgcaccgaagagcgcgtcatcgaagtggagcgcgcgaagatccccgccaatatcaagctcgccgtgggcgatgtgatgagcctcgaacggccggacgggcagacgtatccggcacgactcgtggagctggacgaggagcgcgccgtgttcgacctcaaccacgacgccatcgccaaggcgctgaacttcgagatcacgctgctcgacgtgcgcgatctcccgaaacggtagcaccgcgggagactggagctggggcgagttgtcatcctgagcgcagcggcgaagggagcaggggcctcgcaacctccttccaggaaggcaggaggctcggttacggacttgtggcgacttggagcaagtttcgcgccgcgaacgggaaagctcgaacggctcgggtagactgatgggcattgcattctctcgaaaggagctcttgatgagcaacgaaggcaagaaggtcaaggtccactacacgggcaccctcgacgacggctcgaagttcgactcctccgtcgatcgcggcgagcccatcgagttcacctgcatggccggccagatgatccccgggttcgactccgcagtgaaggacatggcgcagggcgacacgaagaacgtgcacatccccgccgccgaggcgtacggcgagcgcgacgaggccatggtgcagcaagttccggtcgaccagatcccgaacggcgaccagcttcccgtaggccagaccgtgtacatgatgggtccgggcggccagcccttccccgtgttcgtgcgctccatcgaagacggcatcgccaccttcgacatgaaccacgagctggcgggcaaggacctcaacttcgagatcacgct

SEQ ID NO: 9116 - DNA, 792 bp, Unknown
  gut microbiota DNA sequence
tcgcgtgctagaatatcggcaacaaagagccagtgcgagcgcccctcctcacgaggcggcccattgcggaaaccgtgccctcgtttcccctaccacgcccgtaagatcctctcaacccaagggcactgaggaggcgcggtggcttcaccctcgatatgcttcggatacgaaaccgctttgcagatcctgcgcacgaccggcccgcgagagcgaacccttttgcgcagcggagcgcacacgatgccggatcgagcgcctagcatgtgcgcctttcggcaggccctcgaatcgctcgaaacgttgcacccatccatgatgctcgaacagcctgcgcatcttctggtgtctcgcgtatcccaatgcagatctacaagcgctttcacggtgcgcgtatgcaaaacgaccttgcacggacacccctttcaccggctcggcaacggcgcgtacgtaagctccgcacccctcgccttcgtgcatatcgcagcccaagaagacagcatgatcgcgctgctcgaactcggttacgagctgtgtggctcctatcaaaccaaacgaaccggcacgtcgtccgcctatcaggtcgaacccctgtcctcagtccgctcccttgcagacttcgccgcccggaatccgtcgcttcgtggcgcagccaaagccgcgaaagccttgcgctatgtcgccgacaattcggcctccccgcgcgagaccaagaaagccatcctcctcggcctgcccatgatgtacggcggatacgggctgggcattccccgcatgaactacgaggtgaaagcc

SEQ ID NO: 9117 - DNA, 299 bp, Unknown
  gut microbiota DNA sequence
cttgccgtcttggaggttctgctccatcacgcgcggatcggtgttgcgatacccctgcgccaccggtttcttcgccacggtcttgatctgctgcgagacgaacgtccagtggccgtcctcgatggccttcgtggtgagcggctcgctggtctcgtgccagcccacggaaaggtcgtgcaggtcgcagcccgcttcctccagcatgggggcgatgcgcagcgcatcctccatggacaggcccggacccgcggggctcttgatgaagtcgatgggcgaccagcgcacgacgatggggaact

SEQ ID NO: 9118 - DNA, 276 bp, Unknown
  gut microbiota DNA sequence
ggggtcagcatgccgctgatatagccgaagatgttgccgtccttgtcgatcatgaacgtcgtggggaacgacaagatgcgatagccgctgaacatctcgcccgtcgtgtccatgagcacgggatacgtaatgccccgctcgtcgatgaacgccttcacgtcggcttcggacacgtcgctgttgttgggacggctgtcggttttaggattcgccacgcccagcaccacgaggtcgccctcgttctcgccacgatcccggtacagcttctcgatgtcg

SEQ ID NO: 9119 - DNA, 207 bp, Unknown
  gut microbiota DNA sequence
gtcgggcggtggcggcaagggcatgcgcatcagccacgacgagcacgacttctccgagcagttctccatcgctcagcgcgagagcgtgggcgcgttcggcgacaacaccatgtacctggagcgctgcgtgctgagcccgcgccacgtggaggtgcagatcatcgccgatacgtacggcaccgtggtggccctgggcgagcgcgattg

SEQ ID NO: 9120 - DNA, 223 bp, Unknown
  gut microbiota DNA sequence
cgacggggtatccgcggtgcgcgagccggtctcctgggcgctgccgctcagataggcagccttcaacggattctcaaccgaagccggttcaggaaccgccagcttgttgaagtacgcctggacttcggatgccttcggagccgtgcgcacgtacaccgttgcattgccgtcctcgtcggccaagccgtggttcttatggttctcggcctcggcgtagaacttc

SEQ ID NO: 9121 - DNA, 207 bp, Unknown
  gut microbiota DNA sequence
agagcgaatcatggcatcgtttgcaatcgaaccggcgttttgggagctgttcccccaggcggagatcggcatcgtggtggctcggggcatcgacaacgcgcacgagtcgagcgaggacgtgaaggcggcgctggccgaggcgaacaaagcggcgctcgcccacgtgcccgatcccaccatcagcaagaaccccgcagtggcggtgtg

SEQ ID NO: 9122 - DNA, 7651 bp, Unknown
  gut microbiota DNA sequence
cgccccgccgtggtgatcgccggcggcgcgttcgcttcgctcggctgcctcgtcatcgtcctcatcgggccgtactacctcacgaaggtgcttccgtacgacctgatcaccgctcttttctacatcgccagcgcctgcacggggctgggcacggccgtcgtcggcttgaagtgcgggcagctctacggcgccatcgcgccgcgcaaggccatcctgtacacggcgctgtcgcacgtggcgatcgcagtcatctacttcaccgtcatcggatcgccctcatggcagcccgtgcccggcgggccgtcgctcgcgggcatcctcgccttcgtgggcatgccgcttgcggcagccggagccgccgcgctgtcgttcatcgcaccgttgggcgagaaggcggagcgcgccgagagccgctcccgcttcccgcgctcgttctggaagctggcagccgtcacgttcgcgttctcgttcgtcgtggttgccctgcgctcgatgctcgtcgaggtgtcgccgatcgacgtcacgttggacaacacgcgcctggtcatgctgctgcgcatggcgatggcgctcgtcttcgcagcggccgccatcggcgtggagggcgagcggttcgatttcggaaagatctactccgtcatcatggccgccgtcgtagcgctcatcgcgttctgtcccatcgttggcgtcacgcaccttggatggagcgcgctcgtcacgttcctctcggcggtcttcgaattcgtgctgtggtgcatcctcgcgttcgtggtgtaccaacgccacatctcggccgtactcgtgttcggcttcggttatggagcgttcatggcggggtcgggagcaggatggctggcgggcgtgcacgtgtttccgcagatagcagccacgggcaactcgatcgtgctgtacctcgtgctggcgttcgcagtgctggcctgcgcgttcgtgctgttctcggagaaggagttcgatcgtctgttcaagcccgaaggggagggggaggcctcgctcaacgacctgctgggcgacgagctgcccggtatgcgccccgacgacgctgacgcgcatacgaacaagaaggggcgcttcgggctggccatcgatgcgctagccgatcaggcggggctgtcgcgacgcgagaaggacgtgctgcgctgccttgccatgggctacgatgccggcgccgcagccaagcgccttcaggtgtcgtggaataccgtgcgaacccacacccgcaacgtgtacgcgaagctggatatccattcgcgccaagagctcatcgacctcgtcgaccgcgccaccgaacgtacgcaggagcgctgatcagacgaacagaatcgagagcgcggtcataacggcgcaggctcccagcagcaagacgagcaggcgcgcgccgtccttcttgaagcgatcccgatagttctgctcgtcgcgacccgcgaacagcgtccaaagcaggctcaggcagaacgccaccagcgctatgttgttgaggatggaggaggtttgcgcgaacgccggcacgccggtcatcttgctcatctcgtaggccatgagcgtggccgtcacggcgaagcaggcgaccatcacccatgccgcgcgctttcccgtattagcggttccttcggggaagaacgtgcccttcttcgtcttctcgggcttggcgatgaggaacagccagcgcccgttgtacagctgcaccgtcagcagcgcgaacgcgaccagcagcaacacgcctagaaccaaacgagcgatctccatccgcattctcctttgttcctcgcaagcggcgtccgtcgccgttgccgcatcgtagccgcagccccgggcggcgtctcccgcctcgtcgttttcacgtccttggaagtatacggcatgcacggcccttccgaccaccacgtgacgcgagatgtcccgaaagcggaagggtctctcgcacggtgcgtcgtgcgagcacgatgtttcgggggctcgcgtcggaggcgccttcccgccgagcatctcgagtcctcccctcggtgcatccgaaagcgcctccgttggcgaaaaatcatcggattcggaagttttcaaacggatagcagacgtgttggcgtgctcgcttccgcatacggcctgttcaatggaaagatccgttcttgtcatcgaattcgctttcttgcagggtacgcgatttcttccgaattcgatgtgttctcgccttttcgaggacggcgggctgctcggaagggcacaagcggaaagaagcggcttgccctcgcgatccgagaaatcgccgcagtcccgtcgagggagctcgcgtcgtcgtgcttcgagcgaggcagatcggcccgagtcgctacagccccgccgcgacggtcgcttccatgagatcccgttccttccgctagagcgcgaccgcgatgccgcttgccaggatggccgccgcgtagaacgcgcccaatgcgatgttcgcgctacacacctgcgccatggcgccgatgcgggcctgcggcgccaacgggttgcccagcagcgccttgagcaggggatagcttgccagcagcatgaacggcatcaccagaagcccgttcgtgaagaacgcagccacgagcacgacgatggcggccacccaggcgtacacgacgccgtgatacagcttgcgcgcccgctcgcgtcccagcagcaccgacagcgtgcggcgtcccgattccacgtccttctcaacgtcgcacgtgttgttcgtgaacatgatgagccccacgcccaggatggtgggcacggcccacaagagcgcacggaggtcgaacgtgccggaaagcgcctggtagcacgccagcggaatgagcccgcccatcacgaacccgctgaccagctcgccgatgggcaggtacgagatgggcgtcttgcccgccgagtacagcaccacgacgacggcgcccgccgcgccgatggcgagcgggatccatccggcgatccagatcacgtacgcccccagcagaaacgccgccgcgaggaacccgacggccagagccagcgccgcgcgcgggttcacgttgttgtacaccagcaccgcgtcggtcgggtcgacgttgtcgtcggccgagtcggcgcccttcacgtaatcgtagtagtcgttgaacgtgttcaccgccgactgcatgagcacgcagatgactagcagcacgcataccatggtcgccgagatgctgaaggaggtaacggccgccgccgcggcggcgacgagcacgggcaggatggcggccggccaggtatgcggcgcggccagctgccaggccatgcggggggtcagtcgtccgtacgcgctagcggtcatgcttcggttcctttctcggggtcgtacgtttcgcggcgtcggggaagccaggtgggcggggcgggcttgaagcgcttgacggtctcgtccttgagtatgcctccgagcgagcccagcgtctgccagatgaagctcttcgtctccgcgtccagcttcgagcgcgcacctaaaagctgcctcgtgttcgcgaacagcttggtttggaactcgctccaggttccggcctcggtggaggcgaacagctcgtagatggtgtcgatgaagcgctcgcgctcgtcgggagctttgctacgcagccacgcgtcaagcgcctcgtcgaaaaacacggcggaggggttgagcgcctcctggtacacgaagtcgtcgtcttcggtcaaccaggtgaaaggctcgtgctggaacaccgacatagccgaggatcgcaccacgcggtagtcggcgcggcgctcgaggatcatgccgaacgccgacgactcgggcacggtcttgtgcagcagggcgtggaatcgatcgtcgtcgatgcgcggcgaaggatcgtccagaaacgacggcccgtcgtggttgaacacgccgcgcaagcgctcgaaggcgctctcgtcggctacgagcgcagcatactcggcgaggttgccgcccttggagtgcccgccgacgatgagcgggcaggcgagcgccgacgccacgcccgacaggtacgccgccgccgtgcattgggaagggatcacttccttgaagcagaggttgaagtcttccttccaaccggcgaaactgccgtcggtgccgcgatacgcgaggtaggcgacctcgccgtcggcggcggggaacgtcagcgtgacggcggagaattgcttttccacgatctccgatcgctcgttggcatagaacgaggcgcgcacgtcgcgcatgcggcggcttgccgacaggacgtgcagaaacgcctcggtgtccttcgcgtcctccatccagctgtgcgcggtgagcgcttcccaatcggacagcatcaccacgtcgtgcagcaggacgccgtcgggggaagcgaggtcgacgccgggcgccacctcgtagttgaagtacgcgagcgtcgcgaacacaagcgagtcgacggggttaaacggtgattccgcgaaggtgcgctgctcttcggccatatacgttacgatattcctcatgcgaacattgtagccgattgcaaaggacggacagcgaagccatgcgggtttgcacgccaatcaccatacgctatgcggagaccgacatgatgggcatcgtctaccatgccaactatctgctgtacttcgaggatgcgcgcacgcggttcctcgaggctatcgggtttccgtacgaccatatcgagcaggcgggctacctgtcgcccgtcacgcatttcgaatgcgactacggcgcgcctttgcgttacggcgacacggccgtcgtgcgcacgcgcgtagtgtcctcgcgcccgacgaagaccgtatacgcctacgaggtgttccgggaaggccaggatctcgacatcgagaagccctgctgcacgggacggagcacccattgcctcgttgatgctgaaacgttcaagccggtcagtctgaagcgcgccgtgcccgagctgtacgaacgctacctcgaagtcctcgaacccgaggagggggagagccgatgagcgcgccgcatcgcatcctattcgtgtgccacggcaacatatgccgttcaaccatggctgagttcgtgatgaaggatctcgtctcgcgccgaggcatggccaacgccttcgtcatcgggtcggcagccacgcacgacgacgagatcggcagccccgtgcatcacggcacccgcgccgtgctggaagcgcagggcatcgattgctccggcaagaccgcccgtcgcctgcgccgcgccgatgctgacgaatgggacctgttcgtaggcatggacgaggcgaacatgcgcgacatgcgtcgccagctgggacgggctgcggagggccgctgcttcaagctgctcgagttcgccgattccgcgcgtgacgtggccgatccttggtacacaggcgatttcaacgtcacgtacgacgacgtgctggccggttgcgcggggcttctcgcgtggttggactccggcgcgccccgctcgtaggagcctcgcgtggacatcgccgttctcgacgccatccagcagcatctgcgcacgccgctgctcgaccagatcatgctgctggccacgcatctgggagacctcgccctcgtgtggctcgtcgccggcgccgtgctcgtcgcgcagccgaggtaccgcaggtggggcgtagccgtactcctggccgtcgtcgcgaccgcgatcctcggcatgttcgtgctgaagccgctgttcgggcgcgcacggccgttcgtcgcctacgagttcgccggtctgctcatcccgccgccgtcgggcgattcgttcccctcgaaccactccatggtgtcgttcgccgctgccgcggcgctgtgctgtctgccggggaagggcagaggcgtgctggcgctcaaggtctcggccgtggccgtcgcatgcctcatcgccttctcgcgcctctacctgtacgtgcactatccctccgatatcctggcgggcgccgtcatcggcatcgcggtcggcatcggttcggtttggctcgtggagaagacctggcccgaatcgtcgtcagactgagagcgttgccgaagaggcctctcccgtcgcgagcctctaggccgacgcccgcttgcgcgcgggtttcttcgccggagcgggcttcttcggctcgccgtccttgccgtcgcgcgccttgaggctggccgacagggcgtccatgagattgatgatgttcgacggctgggcttcttggctttcggccacgatctgcttgccggctatcttgtcctggatgagctgcatgagcttctcctggtacgtgttgcggaagcggctcggatcgaacggcgcagtcatgctctccaccagctgcttcgccatggacagctcctcgtcggccacgtcggggtgctggagcgtcttggggatgtccttaacctcgctctgatagtgcagcgtcatcatgaccaggtcatcgtcgtgggggatgagcgcgatgggcgtttccgaattgcccagcaccgtcgtgccgatagcgatcttgccttcgtccaccatggctcgtcgaagcagttcgagcgccttctcgccgccgggctgggctaccacctggtagggcttctcgaagtagagaggcggcacctcgtcgatgtcggagaactgcacgatcttcatagcacgatcggcatcggtcttgatggcgtccagctcctcgtcgtccaccactacgtacttgcccttctcgtactggtagcctttcacgatgtcttccggtttcagctctcgtttacagtcagggcatgtcttcacgtatcgcacgcgcttcatggtatctttggcaagttggttgaaccgtacggcgtcatcctgcgtcgccgtgaacagctccaccgggatgtacacgagaccgaacgcgattgcgcctttcctaccggccatgacctgctccttcctcgcggatgcttctcggcatcgtagcgcgggcttgccgtctgcctcgcttcggagatcgaccgaggacgaactgcaacgatggcgttttcacgcgggcaagctggcagatgatctgaggcgaggaaaggaggcggaagcgggcatggacgagcaggtcgtctattggatcggcttcttcgttgcgctcgcgttcattgtgttcggcgcggacgacgtgctgtgggacgtgttcgcactgtttcgcggcgcgggcaagaagcgcgtgaagctgtcgctcatcaacgagaagccgccgaagatgctggccgtggtcatcgccgcctggcacgaggacgccgtgctgggcgaagtggtggacaacctcgtggcctccgcgcagtacccgcgctcgctgtaccgggtgtttttgggcgtctaccccaacgatgcggctaccgtggccgtggctcgcgcgctcgaggcgcgccatggaggcaccgtggtgtgcgtggtgggagacgatcccggacccacgtcgaaggccgccaacatcaaccataccgtgcgggccatccgggaatacgaggccgagcgcgacgtgcgcttcgcgagcgtcaccatccatgacgcggaggacgtggtgcaccccaacgagttcaagatgacgaactacttgatcgacgactacgacgccctccagttccccgtgttcccgctgcagcgcatgccgcggctgcggctgttcttcaagacgttgacctcgtccacctacgccgacgagttcgccgagca

SEQ ID NO: 9123 - DNA, 3432 bp, Unknown
  gut microbiota DNA sequence
gcctgaccgaggattacaagctgtcgctcaccttgcgcatgcgcggcttccgcgtgcactacgtgcttgagaaggtgccgcgcgtcgacgcgcgcgggcgcaccgtgtgggactacatcgccacgcgctcgctgttcccgtcgacgttcaaggcggcggtgcggcagaaagcgcgatgggtgtacggcatcacgatgcagagcgcgagcatggccgatgtgttcggcaaaagcgagcttacgttcgccgagcgcacgtttctgtacaaggacctcaaggcgaagttcgcgaacttcgtgctgctgccgggctacgccgtgctcgcgtacttcctcgtgcagacgttcgcgccgcagctggagctgcccgtcatgtaccccttgcacggcccttcgtggtggatgtgcgtgtttctgctgttcatgatggtggaacggcaggtgcttcgcggacgcgcgctggcgaacgtgtacggctggaagacgatggcgttctccatcctgctgccgccgctgttcccgctcaggcttctatggggcaacctcatcaacatgtgcgcgacgtttcgcgcatggcggcagaagatcgcctacgtgctgctgcgcggacgagaggccaaggcggccgccgcgccggtcgtcgagcatcggggcaacgcggcagaggaggagggcgaaagaaagcctgcaacggacggagacgaggcgcaaacctcgaatgcgacgtctgcgcaggaaggtcccgcatggaacaagaccgaccacgaatttctccccgcttcggtgctcgaacgctatcggcgccttctgggcgacgcgctgctggagaggggtttcgtggagccagggcatctggaagacgccgtgggatcggcgcgtgcgcgcggcgtgcggttggggcaggagctgctgaggcagggattggtcgaagagaggcacctcacgcaggcttacgccttgcagcagcagtcgatgtacgtgcgcgcacagcccgacctcgtgcttctggagctgatggatcgcatgccgttcgccgcggcggatcggttcgccgcgctgccgctggtcgagagcgaaaaaggatggatcgtcgccgtggacgacgacctttcttgcgcggagcgagacgaactggcgtttctgctgggcgaaccgacgttcttcctgttctccagcacagccgacctgctcgaagcgttcgaaggcgctctcgcgttcgacaacgcggcggaagctccgcaacctgccggggtggcgacgcttctggaggagacgagcgtagagctgccacaggcgggcatggcgctggcttacgcgctgcatctcggccgctcggtatccatggcgcacacgataccattccgcagaccgaacgcaccaaagcgttcatatcggttaccgtgcagtatcctaaacgtaaccgccgcagatgacgcggactctagcctgagaacagcgcggtagacagcgcctgctcggctccgctcgccggcccccatgcgttgtccgtgcgcgtgaacggcaattccaccgggttggattcagtcggttccaccgagccgagcgcttcgagcaccagctggccgaccttctcgttgatctggtcggcatcgagctcggccgtctgctcatcttctgccagctccgtcgtagcctccgtaagcgcttgggcgaacgcgtcgaacttcttgcaggtaagcaccacggtcgccgtggcgctgtcgccgtccaccttcacctcgtcgatgcggtagtcgaatccgtcgagataagcggctatgaacgacttggcgtcgatgccgtaggttgccagctggtccaccccgctgtcggccgccagctcgtcgagcagcgcctcgtcgtgggtcttcaggcattccagctcgtcggccaccccctgtcgcaccacttcctccgcgctcgggccgcaggcgccgagcgatagggctccgacgctcagcacgaccgcggcaaggcaagccgccacgaccgttttaatgggtttcatcgttttccccttcctggtatgcgtcgttccagcataaggccttgcgagcctcgcgtccatcccggtttgtcggcttgctgatcggcgacggcataatgcgagcgaccgtcttagagttgctctaagacggtcgcatcgaccgctgcagggggaggctaaccgttcagcaacggctcggtgaaccagtcgcgacgttcccagttctaccgttccatgatgcgcgcgaacgttgaggagcagaaccgacgaaccgcggcctggggatcgtcgtaacgcaacgcatccttcagccgcagaaagtactcggagctctcggcatcgaagaacgcctcgtcgacattcgcatcgctcgacgaccctttctcgataaacggataggccagtacgaagaaggaaggatcgttcgtagcatcgtcgcccggccagaacccgaattccacgaactgctcgtcgaaggcgacgcgctctactatggaagccgtgcgttcgaaggggcagggctttccggagaacagaacggtcgtcatgtcgaaggtgccccagaacagcgaaggcgggatcttcttcccgcgaaacggcgccgcgaacccgctcaaagccccgcgcgcgaacaagaactgacggaagcagcgccgtgcagccgcggcatcgaacccgcgcgcgatgttctgccgatcgaacggaacctcggtgtgcatttcctgcgggacggtgttgatggctatcggatgcccgatgttttcgagcatcgccgtgaaacggccgtacagctcgctcactcttcgatagggaaacgcgcgcagtcgcctgccgcggtcatcgcggccatctcggcatccgcgatgttcagtttaatctcgaagccgtccgcgccgaacgggatcagtccggtggtgaagccgttcgcatcggcatcgagcaccacttgcttccattcaggttgcggatccatcgattgcagcttcgcttttcccatcatctgcagcagcatatgcgcggtgtcgcacgtgtcgcgccactcgccgtacgtcgatacgttcatatctatcacctcgcagccatcctacgagcggacgaagccggaaccgccagccgcggacggttcgtcagacgttcgttggcaaatcgggatgccgccgtactgcttgcccggcttattccgacgtcgcagttgagccttcgcccatgcgcgaaaggacgatcaccgacaaaacaggtacgttcggtagctgaagaagcatcggcgtgctcggctgcccgcaagccggtatcattgctcaaaatttaccactttagtaggaattaatcgaaaggagttgcgagcatgggggagatgaagaaggaagagcggggctcgtgggctgatccgagcgctctagggttgttcgggctggcgatagtcacgctcgtggcctgttctcaaaa

SEQ ID NO: 9124 - DNA, 1072 bp, Unknown
  gut microbiota DNA sequence
tcgcttacgggttgttttggcttgccatggcattcggctgggcgacgaccaacggcatgttcggctcttatgcggccgaaacgttcgatccgcgccaaacaggagccgctttcgtggcgtacctcatcttgactgcgtttatgaccataggagcgctgcgtaccacgaaagtgctgttcttcatattcctcgccattgattttctgttcgtcggcttggctctaagcgcgttcggggttgctcgggaagcgacgcatatgctcgccgcgatcagcgagcttgttatttcgctcctcagcttctactgcgcgggcgccaatatcttgaacaaccacttcggggagcaattcctatcgctcggcaaccccttctggtcgaaaaaatcctgaatatcagtataactttacataagacatattatcaataaaataggtaattgaggagcggtcgggggagtttgggctggcgagcattcggaagcaaaaagcaaagcgctgcgggttccgtgcataacctgcagcgctttatgcggtttcgacagcggataagattatccccaggtcgaggtcgatcctgcagcgccgatcccggcatccgtcacagctcccgcgtaatcgccgctttccatcatctcgagtactacgggcatcatcagatagaacgaaatcgcattgagcgtgagcgccacgccgcacacggcaacgccgacgatcgccgagcgcttgagacgctgcgcaagcgcggatacgtccgtgcgcttctcgatgagcttgttcagcttgcggagcgcgatgatggcgcaggccagtcccacgccgctgagaagcacgccgccgatgaacagcgacacgggtccggccacgctcgccaccatgaccatcgtctgagcctttttcagctcgcgaaggtcgttcatgttcgacgacggaaccgggacgccgttaagcgtcgtctgccggctgcgatcgtcaggctcgcgcccgggatcgcgcccttgaggcggctcaggcggcctatgttcgttgtcagtcatgcgctctttccctatttctcaaaatttcatagccattga

SEQ ID NO: 9125 - DNA, 266 bp, Unknown
  gut microbiota DNA sequence
tctatccgtcgacaattccacacctgcggcgctcaaccgcttcaagctctcgtcgagctcggctcgctggtactcgagcaccgtctcctgagcccgcacgatggccagccgctcgtcgcgcgtcgccgcgccgcggcgctgcaacttcacgtaatactggatgccctcgatcgacaggccgcttttccgaagcgcatcgacgaagtacagctgagccacatccgattgcgagaacgtgcggacgccgcgcgcatcgcgcgccagtt

SEQ ID NO: 9126 - DNA, 19443 bp, Unknown
  gut microbiota DNA sequence
catcgatgcccctttcgctcttgcttagagtaactctaagcgggtggaaggatcaggttcaaagactcacgccgctgctgccgaacccgcccgcgccgcgctccgtatccggcagctccgcgcacacgtcgaacgcggcatcgggcacgcgcatgacgacgagctgcgctatgcggtcgccccgcttgatcgcgaactcgctctgcggatcgaggttgaccaggatggcctggatctcacctcgatagttgctgtcgatcaggccgggtgcgttgaccagcgatacgccgtgcttgatagccagcccgctgcgcggcagcacgaacccggcgtacccgctcggaatggccacggcgatgccgcatgggacgagcttgcgttcgaagggcttcaagatgtcgtcgcaggtggcgcgcagatctacgccggcatcgccgacgtaggcgtacgcaggtacgggcaggtcggggtcgatctgctgcaaaggaatcgaaacgcgctctatcaacgcaatccctccaatgcggcagcgaactcctcgacgttgcggaagtccttgtacacgctcgcgaagcgcacgtaggcgacgtcgtcgagcttggcgaggcgcacgagcaccatatcgcccagatccttcgaaccgatctcgttacgggaggcgttgcgcagctccgcttcgatgctgtcgatgagcgaggcaatctgctcgggcccgatgggccgcttcgccgcggcgttgagcaggccgcgcatgagcttctgacggtcgtaggcctccgacgatccgtcagccttgatgacgatgagcggattgtcgcccaggcgttcgtaggtggtgaaacgacgtccgcattcgaggcattcgcggcgccggcgaatggccgtgccgtcttcggaaggcctcgagtcgaccactttcgactctggattgccgcaggaaggacaacgcatacttgctcctttgccgattttgggttcagcctaacatacaatatatagtggttcaatcaacatgtcggattcgcgcaaaaaacctgcacgagaagcgctccttcctatcggacaacgcgcacgtgagtatcgcccagcccaacctcccctttctcctgctcgacctcgaacacccagcgctcgtccacgagcgcgtcgaggaactgctcgtcgtgcgacacgagcacgagagcgcaggcgcaatgacgcaacacgtcctgcaaggcctcgatcgagcgtatatccagatggttcgtcggttcgtccatgacgatgaggcgaggcgacgagagcaggctacgcgcgatcatgagcttgcgcacctctcccgggctcagctcctcgccgtcgagcacgcgagccggcggcgattcgagtcgcgccacgatggagagcacgcggccccgctcggccgtcgggagcgcccgcagctcgacgagcaacgcgcggacctcgtcgtcgggaacctcctgcggaaagtacgccacccactcctccaacgtcacccggcgaagcaaggcatggagcaaggtggacttccccgccccgtttttgccgacgagcccgactcgatcctcgttgcccaggtacagctcgggatgatgcagcatgcgctccgggccgagcggcatgctgcctgcggggaggcgggcgagcaccttgcggggcgcgggcgcggcgtccagctccagggagccgcggcgctccttcttcgcatcgagcgcctcgaggcgtttctcggccacgcctatgcgcttgtccatctgggacgaaagcttgcccgccttgccgtcctgtcccgtatagacggcgagcttgatcttcgcacggccgtcgcggtcgtgtcgatcgagatgccgcgccgagcgtcgggcggccgatcgcgcggccacgccgtcgcgccgcacgctctcggccttgatgcgcgccagctcgccgcgcgcctgccggcgctcggttcgcacggtatcttggcgcagctcgagctcccggcgcgcctgggtgtacgtccccggaatagcgagcgctcggccggcctcgacgaacacgcacgaccgcacaagcttgtcgagcagcgcgcgatcgtgcgatacgagcaggccgacgcccttgaaggaggagagcgcctgcgcgacgagggcgcgcgtgggagcatcgaggtggttcgtcggctcgtcgagcgccagcacctgcggttctgcggcaagcgcgcacgcgatctggatgcgcttgcgctcgccatgggacagcatagcgtagctccagagctgctcgtcctcgatttccaatagcgagcgcagcttcaccgccgtcgaaccgtagtcgcaggcgaactcctcgagcgtctccggaggcgtcgcggtcgattgccggcacaccgcgccgcgcacgcggggcgtcacggcgccttgatcgggtgccagggtgccgcagatgcagtgcacgagcgtgctcttgccagcgccgttcggcccgacgatgcccgtccagccgctcgcaaacgcgagcgagacgtcgtcgagcgcaggctggtcggcgccttcgtaggtatgggaaagatgatgggcggtaacgaacatggcgacctccgtttaagaggcgcacgggtggctctgctcagcgttcggcgatgccgatgaaggaaggccgcacggatcggaagaggaagaaacgcgaggcgaagtcgagaacgatgacgaaagcgcacccgatgcggctgattaatgaatgcaaggggtgaaaaagggctttcgttatcgcttcatgttccgtttctccttcgcgaagcgcccgtccgcatgaggatgcgtcggcgcggcatgattggctgctcgcccgagtctagcacgccgcaagcggcgcgtaaacccccgaacggacgcgcctccggggtggcggaggcgctacgcagccgcagaaacgcagcatctgcgggttatggaacggccgcgcggggccgggaaaggtctcggctagaaccctgcgaacaggctggcgagtgcgagcgccgcgaacacgcatccgccgacgaccgcctgccagcgctgcacgcggccgaacgccacgccttgcgccgaacccgtgcgcacggccgaaacgatggaggcgccgtcgcgatcgggcagaaccgcatgctgggggaacgctatgatgcgggcgcgtcgagcaggcgccgaatcgagcttcggttgaagggccgacgttccctcgacggggcagttcatctcaaaattcttcattttgtggcctcctgctcttgcgtagaacctttgttcgcgtatataataggtcgaacaaaggttcatgtcaatagaaatttcatacatttgttcgataggcgtagaggcgacgaaaggattacctatggccgagaaagtgacgaagcgccagcaagcggtgctcgactgcatcgaggagtgcattcgggagaagggatacggcccgaccgtgcgcgaggtctgccagagcctcggcctctcctccccctccaccgtgcacgtgcacttgaaggcgctcgaggagaagggcctcatcaagcgcgatccgctcaagtcgcgctccatcgccctcacctaccagctcgaagacgccgcgctggccaccaacgtggtgcagcccagcttcagcaacatcgtgaacgtgcccctcgtgggcaacgtggccgccggctcccccatcctcgccgaggagaacatcaccgacaccctgtcgcttcccaccgagatcgtgggcgacgccccgtcgttcttgctctccgtgcgcggcgagagcatgatcgaggcgggcatcaacgacggcgactacgtcgtggtcaaggagcagcccgtggcgaacaacggcgacatcgtcgtggccatcatcgacgacggggccacggtgaagcgcttcttcaaggaaagcgaccatatccgcttgcagccggagaactccacgatggatcccatcatcaccaccgactgcgccatcgccggcaaggtggtcgcggtcttccgccgcctgtagcggcgaaccgcacgctggtcgtcagcttgatcgaaccgcgaagccctgccgcaatccgaccgcttcggcaaggcttttccggcttttccgaacgtgccgctgcgccggttcccgctttcgccgtccgataaggcgccgccgcagaccggccgcaagaacgaaacgcctaccctgcgacgaagcgagccgccccgggtcgatgcccggggcggctcgcttaccttagagttactctaaccgaccgtgtaaggacggaacatgctcgcgaacgaaggagccgccagcatgacgatgcgcgtgccctgctcctcatgggtttccgacaggatgtggcatctttcgtgcgccaccgacacgaggtcgccgcggttgtagggaatcagcacgtcgagatgctcgtcttgcgccgaggcgacgcgggcaacgtgctccacgagctcgcctacgccctcccccgtcgccgccgatacgaactgagcctgcggatggcgcgctttaagggcgccgaggcgctcctcgccgagcaggtcgcacttgttgaacacgagcacgcgcgacaggtcctgcgcgtgtatctgcccgagcacgtcctcgacggccgcgatctgcgcctcgtactcgtccgacgaggcatccaccacgtgcagcacgaggtcggcgcccgtgatttcgtcgagcgtcgatttgaacgcctcgatgagcgtggtcggaagcttctggatgaacccgaccgtgtcggtgacggtgatctcgcggccctcgggaagctcgaacttgcgcgtggtggagtcgagcgtggcgaacagcttgtcgtacgccagcacgtccgcattcgtcagccggttgagcaggctcgacttgccggcgttcgtgtagccggccagcgccaccttgaacatgccgctttcgtaacggctttcgcgctggacggcgcgcacctcggccagatgcttgagctcgcgcttgatggacgtgatgcgcttgcgcaccatgcggcggtcgacctcgagctggctctcgccttcgccgaagcgcgatcccacgccgccgcccatgcggttggaggccaggtgggcccacatgccgcgcaagcgcggcagcaggtactcgttctgggcgagccgcacctgcagccggccctccttgctggtggcgtgcagggcgaagatgtcgaggatgagcgccgtacggtcgatgaccttcacgtcgcggcccatcgccttctcgaggttcgcctgctgggagggcgtcagctcgtcgtcgaacacgacgaggtcggccgcgtgggcgcgcgcaagctcggccacttcttcggccttgcccgtgcccacgaacgtacgcggattgggcgcgtcgagcttctgcgtggtggtggccaccgcgtcggcgcctgccgtatccacgaggcgctcgagctcggcgagcgacgatgccagcggccacgtggagccggggcgatccacaccgacgagcacggcgcgctcgcggcgctcttcggagatcggggtcatgccccgcgtgatgactgattcgaattccgtcatggatccaacctttcgatgcagagacgagcacgccggcatcggcgtgcgaagacagtcgggagcggcggcgagccgctagagaaaggcgtgcgctgtctgcatgataggtgctccgatcttgaacggttcgacggcaggagtgtgcccgtggcttcgtatcatatcacaagcgttccttcgtctggagaaaccgtcaggcaacgccgtcatcaagcagctcgagcgcttcttcgacgagcgacggaatatcgcgcgacgtcgcatcgagccaccggatacgcgcgtccttgcgaaaccaggtgcgctgccgcttcgcgtagcggcgcgtggccagcttgatccgctccacagcctcgtcaagagagatgaacccgtcgagagcctccacgatctccttgtacccgatagcctgcggcgccgtcacgccttcgcgaaagcccctgtcgagcagcccttccacttccgccacgagacccgtctccaccatggcgtccacccgcgcgtcgatgcgcgcgcacagcacgtcgggatccaccgccatgccgaagaagacggccggaaccaactgcgggatgtgggcgagtttggcgcgctgttcggcgtaggtcgtgccctcctctagcagctcgaaggcgcgcacgacgcgcttgacgtcggcgggcgggatgacggaggcgctggcctcgtcgcgcgccgccagcagcttccacagcgcctcggcgccctgctcgcacgccagggcctggtagcgttcgcgaacggggtttcccacctgctcgcctgcgggaaagtcgtagtcgtcgacggctgcgcgcacgtagaaaccggtaccgccggccagcacgcagcggttgccgcgcgcgtcgatggcacggaagcgatcgcgcgcatagttctggaacagcgccgcggagaagggctcgcccgggtcgacgaggtcgaacccgtgatgcggcacgaggcgctcggacgcgggaagcttgcccgtgccgatgtccatgccgcggtagatctgcatggagtcggcgctgatcacctctccgcccagctcgagagccagcgcttgggcgaggtcggtcttgccggatgccgtggacccgacgacgcagaccgccggagccttcagcggatacggtgctcccccgcccgtcggatcagcgcccgtccgcagcatcgggcccgtccacgatctcgccggcgagataccacgtcttcgcctcgtccacgcgcacgcgcacggtgctgcccgcaaggtcctccgcgcgcacgcctgccggcgccggcgcgtggacggtctggttcttcggactcttacctgccagcaggcgctcgtcgcgcttcgacgcgccttccaccagcacgtcgaccgtgcttcccaaatcgcgctggttcgcctcgaacgcgcgctgttgcacgagatccaccaagcggtcgaaacgctgctggatcacctcgcgcggtgtgtcgtcgtccatggacgcagccggcgtgccctcgcgcttcgaatagatgaacgtgaacacctggtggtagcccacctcgtccacgaggcggtacgtgtcctcgaagtccttggcggtctcgccggggaatccgacgatgatgtcggtggacagcgcgatgtcgggtacggcgtcacgcagcttcgcgacaagcgcgcggtaatgatcgcgcgtgtagcggcggttcatggccgcaagcaccgcatccgagcccgactgcacgggaaggtgcagcgccggcatgagcgagcgcagcgtggcgaacctgccgacgacctcgtcgttgaggtccttcgggtggctggtggcgaaccgcaggcgctcgatgcccgtctggtcgagcgcgtccagcacctgggcgaagcgcggcgagccgtacaggtcgcgcccgtaggagttcacgttctgccccagcagcgtgatctccttcacgccggcggccacatagcgctcggcctcggccacgatgtcctccaacggccgcgacttctcgcgtccgcgcacatacggaacgatgcagtacgagcagaagttgttgcagccgatggtgatgggcagccatgccgcccattcgtgctcgcgcgccgtaggcagctcggtggggaacgatgacgcggcatcgagcacctccacctgatggctgccctcttcgagcgccgcttccagcaaacgcggcagcgaccccaggttatgggtgccgaagaccacgtcgaggtgcttcagctcgtcgaccagcttctcgccatcgcgctggccgatgcatccgcccacagcgacgatgcgcttcgacagcggcgtgccggcgcgcaaggggacgttcttgagcgaggccacctggccgtacagccgcgtgtcggcggcttcgcgcacgcagcaggtcatgaacgccacgacgtcggcatcctcgatggcgtccacctgcagcgctcccatgccctcgagcatgccggcgatgcgctctgagtcgtgcttgttcatctggcacccgaacgtgcggatgcagaacgtcaagttcgtaaatggtgtatgcatgggctcgttttcagcgaatctcggggacgggacggtgggcatcgtcgcctagaggctgcgcgacgccgcgcgtatagcgcggatccaccgtgaagcgtatggcagtgcggtactcgccgtcgatgacgatgtcggcgaacgacggtacgcaggcgatctcgatgccgatcggagacaggaagccgcgggagatggcgatggccttgaccgcctggttcaccgcaccggcgccgacggcctggatctcgacgcttacgccgtctttcaccatgccggcaatcgctccggcaacggaggcgggcgacgacttcgatgataccttcaagcagccaacgtctggcttttgttcggaagtggacatgcctatcctttgtcgttggtagtccgtgtggttcgtcttgtatgctgcgttaggattccgttgtgctatagataggttactcttacgcccttgctattctacctattcgcggtatggtgcgcaacctgcgggtatgctgttatcgagcaggttcgtcatcgtagcttttcaaccgggatgcggatgtgcacgccatccttgcctacgcgcacgtccggcttcaccgctgattccaggtagtagtcgcgcgccaaatccgagaacgcgcatgctacgcgtcgcgagaacgattcgaggtcttcgggcgcgattctgagaccgcgcgcatctcccgccggcgccttcgccggccgcgcggccggccgcgcgtcggcctccccttcgatgcggacgcggttgatcagcggctcgaccggcgcgatctcgccgtccaggatgcggcgtgcggagcgctccgagatgaccaggcccagcgcctcggcctcgtccgcgaagctcgccggatccacggccaccgacaagcgcttggccaccggcagctcggaggcatcggcgcagaacgcgcgcatagccgaggtgagcgacgacagtccgaatgcgtacagcgtcgccgcgatgtcggtgagcgaaccgaggtacacggtgcaatcgtggcggcattctatggcgaactcgcaggcggtgcgcaggatgttcttggggccgcgcaccgcgatgctgcccgattcggtgcgctcgaacacggggaagctcgactgatcggtcttctcgccgagcttgtcgaggttcgtctccacgaaaagcgcggcgcccttgcccgcgtcagaggcgacgacgcgggccgtctcggcgttgaccgcgatggagtacagcgccatgccgcggccgtggatgccccacttgtccatgtgcatgctgtcgagcttcgacgtgacgcgcggctcgaagatgcgctcgtgcatggctgccggcacgccgtcgccatcgtcgatcatgacgaggcggcggcgctgtccttcgcgcgacacggccaggaagatgctcttggcgtgcgcatcgcgggcgttgcgcagcatctcgatgacgatatcctcggtggagcggatgtcgtgcgcggcctgcctacgctcggcttcggcgctcctcaaacggacgaagccatccccgaggtcggcctcgacccggagatggctgtcgccgcatacgttctctatgaaggcttccagcgcttcgtcggccatgccgcgcgcgccctacttcgcgacgccgaccgcgcggctctcgcggatgaccacgaccttcacctggccgggatactgcatctcgttctcgatgcgctgcgcgatgtcgtgcgcaagcaccgtggtggcggcttcgtccaccgtgtcgggctccaccatcacgcgcacctcgcgacccgcctgaatggcgtacgtgcgctccacgcccttgtacgagctggcgatctcctccagcttctcgaggcgcttcacgtaggcgtcgagcgtctccttgcgggcgccgggacgcgccgcggacacggcatcggccgcctgaacgagcacggccagcacgctggacggctccacgtcgttgtggtgcgcctcgatggcgtgcacgatctcgggtcgctcgccgaaacggcgggccaggtcggctccaatgacggcgtggctgccctccacctcgtggtcgaccgccttgcccaaatcgtgcagcaggccggcgcgcttggccgggatgggatccagccccagttcggaagccatgacgccggagaggtaggccacctccagcgagtggttcagcacgttctggccgtacgaggtgcggtagcgcagacggcccagcgtgcgcacgagctcggggtgcagatcgtggatgccggtgtcgaacgtggcctgctcgcccgcttcctggacgcgctggttcacgaacgtctcggccttgccgaacatctcctcgatgcgcgccggatggatgcggccgtcggccacgaggttctccatcgtaacgcggccgatctcgcgacggaccggatcgaagcacgagatggtcacgcactccggggtgtcgtcgatgatgaggttcgttccggtcagctgttcgaacgagcggatgttgcggccctcgcggccgatgatgcggcccttgaggtcgtcggaggggatatggatggtggacacggtggtttcggccgagtggtcggccgccacgcgctggatggcgaggctgaggatggagcgggccttcttgtcggcctccgccttcgcgcgcgcctcggcatcgcggatgatggccgcggactcgtgcgtcacctcgtccttgagggtgtcgagcagctccgccttcgcctcgtccggcgtcatgccggccacgcgctcgaggcggtagttcacctcccgcgtggcctcttcgagatcgcgttcgcgacgctcgagctggccctgcatggatgagatctgatgctcgcgcgcgtcgagcgattcgacgcggcggtcgagcgattcctcgcgctgcgagatgcggttctcagcggaacgcacttcgcgcagacgctccttgctctcggcttgcgcatcctgcttcagcttgagagcttcgtccttcgcttcgatgatggcctcgcggcgcagcgtttcggcttgtcgtttcgcgtcgttcaccacggattcggcctcttgcgccgctcgcttcgtggatgcgttgaccaggtagcgggtgacgacgaagccgagggcgatgccgacgacggctccgatgatcagccagatgaattcgggcatacgctccccctttcgtttcagtttccgatagagcgttacattcaaaagaacataggcataaaaaatcccggaaaaaccgggcatgaacgaacgcacgcgatacgggcagcatcgtatgaatttgtctataggaagtaccctcatcaggtacgatcattcaagctataccatatgataaaggttgtgcccgaattgtaaaagccctgacaagaaataatctgaaatgcagggccgcgccgccgccgcaggcgcggccgacggcgcggatgcgctcatccttcgacggggttcgcctcgcaccagaggcgggcggcggaggatgacaccgaggcgctgaagcctttctgggcgaggcggcggtaggcggcgtcgcggcggttcttcgcgcgcggcggcttgcggtcgagcagcgcgagtgcacggtcgacctcccccgcgtcgtcgtcggcagcggccagcgcctcgacgctgtccgcgtcgatgccgaggctctcgagctcggcggcgatgccgcgtctgccgcgcccttgggcaaggcgactgcgcacgagcacgtcggcgaagcgcccgtcgtcgacgaggccgcaggcgagcgcgcgatcgagcgccgcttcgacggcctcggcctcgaagcccccgcgcgcaaggcgctggcgcagctgctcggaagcccgctcgcgcacgaggcagagccgctcgatcttgcggaaagcggcgtcgggatcggagagccgcacatcctcgtcgacttcgccggcgtcatggcgggaaggctgtccgccggccgcactggcagacagggagcgcgaagcgcggctcggccgtcgatcctcccgctcctcgcgaacgtggggaaggtcgggcgccctggaaggcttcgggacgcccttctcgatcgcggcgatctccgcgcgcaggcgcgcgcggagctgttcgggcgattcgggcatgctacttcttcttcgcaggcttcgcgaccgggctcatggcgtcggcctcctcggtcgagcgcgtgatgatggggatctcgaaggattcgcgcaccttcgtctcgagttcctcgcgcaggtccgggttctccttgagcgtctgcttcgccgcctcgcgcccttggccgagacgctcctcgccgtaggtgtaccaggcgccgctcttcttggcgacccccgcctcgacggccatgtccacgatgcagccctcgcgcgagatgccctcgccgtacatgaggtcgaactcggcctggcggaacggcggggccaccttgttcttgaccaccttggcgcgcacgcggttgcccacgatctcgccgtccttcttgatggagtcgatgcggcggatgtcgatgcgcacgctggagaagaacttgagggcgcggccgcccgtcgtggtctccgggttgccgaacatcacgccgatcttctcgcgcagctggttgatgaagatgcacgtggtgttcgacttcgacagagagcccgccagcttgcgcagcgcctgcgacatgaggcgcgcctgtaggcccaccgtggtgtcgccgatctcgccttcgatctcggcgcggggcacgagcgcggccaccgagtcgacgaccacggcgtcgatggcgcccgagcgcaccagcatgtcgcagatctccagcgcctgctcgccggtgtcgggctgcgagatgagcacttcgtcgatatcgacgcccaggcgcgcggcatagacgggatcgagcgcgtgctcggcgtcgatgaaggccacgatgccgcccatggcctgagcctccgcgatgatctgcagcgcgagcgtggtcttgccgctcgattcagggccgtacacctccacgatgcggccgcgcggcacgccgcctatgccgagcgccgcgtcgagcggcagcgcgccggtcgggatgaccccgatgttgaggtcgtggccgccctcgccgaacttcatgatggagcccttgccgaacttggtctcgatctgatcggtggtcagcttgagcatcttcgatttttcttcgttcatgcggttccttctcttcctgccgcgagcgccaaagacgctgagcgtttgccgcttaccattatacgaacatatgtttgttggtcaagcattttcgcgaaagaagcttgcaaccccagtatagcgcggccggctcacgtcccgatggcgcgcatccagcgcgcagcacctcccgatccagcgcgttttccacgccgaagacatgcggattccacgcgccttctacgtcgttctagcgcgtttccagcgcctcgagcgcgaactcgagcgccgcacgcacggcgagcaggcgcacttcttcgcgcgtgccgggaaaatggcagcagcgggcgcaggtgagcgacgcgtccgcgcgcccgatccacacggtgcccaccggcttgcccggctcggccccgcccgggccggcgatgccggtcgccgacaccgccacgtcgcagccgagcgcggcgcgggcgccttcggccatggcacatgccgtctcctcgctgaccgccccgatcaaggcgagcgtctcgcggcccacgcccaacacgtcgcgcttcacgtcggaggagtagctgacgatgccaccgcgcacgacgtccgagctgcccggcacgtcggtgaacgtcgcggcgacgaggccgcccgtgaggctctcggccgtgccgacggtcgcgccggcggcacgtgccgcctcgagcacgcgcccggccagctcgtcgagcgcctcgggcgagatgctcgcggcctcctgggcgctgagcgcgcgccctcccgcttcgtcctctcccgcatcggcagccgcggcctctccggcacccgcacggcgcttcgcgcgcttgcccgacggcgcgaacccgaggatctccttggccttcacgaaatagtcgagcatcgagatcacggtgagcgccagcgcgatcagcatggccagccacgacacgaggtacaaggggttgtgcagcacgccctgcggatcggtgatcaccacactgtccttgacgatgaacagcacgatggcgacgatctgcgcgacggtcttcgccttgccgtaccagctggcggcgatgaccacgccttggctggcggccaccatgcggatgcccgacacgatgaactcgcgcgtgaggatgacgagcgctacccacgagggcagcacgcccagctcgatgagcgcgagcagggcggcggccacgaggatcttgtcggccaaggggtcgatgaacttgccgaagttcgtcacctcgccgcggctgcgcgccaggtacccgtcgaggccgtcggtggcggccagcaggatgaagatgccggcggcgatccaaggcttcgacgcctcggcgtccgcccagaacgggaagtactccggccaagggctgatgatggccaccacgaacacgggaacgaggcagatgcgcagcagcgtcaccacgttcgccggggtccacagcttctcgtgcacggcaccttgcgccatcgggctcactccccttccatctcgtaaagcagagcgtcgacgatgcgcacgcggcggatctcgcccggctcgccggcgtcgaggtacgtgacgccgtcgacctcgggcgcctggcacatggcccgcccgaacagctggccgtcctcttcgacgccctccaccagcacgtccatctcgcgtccgacgcgcgcggcgatgcgcgggcagcacacggcgtcggccaggtcgcgcaggcgctgggcacggtcgttcttctcgtcctcgtccagctggccgggcaggtcgaacgcgcgcgtgccctcctcgcgcgagtacgggaacacgcccacgtagtcgaacagcccctcctcgacgaaggagcacaggtcctcgaactgctcctcggtctcgcccgggaagcccgcgatgagcgtcgtgcgcagcgtggcgcccggcacgtgcgcgagcacgcggtcgacgagcgccaggaactcctcgcgcgagccggtgcggttcatggcgcgcaggatgcccgcgtccacgtgctgcagcgggatgtcgaagtagtcgcatacgttgtcgtgcgcggccacggcatccagcagctcgtcggaaaggccttcgggctggatgtacatgatgcggaaccaggtttgcgggaactcctcggccaacgcggccacgagcgccgccaaagacgacggctcgtcgaagtcggcgccccagcgccccgtgtcctgggcgatgagcacgatctcgcgggcgccggcagccacctgggcggcgacgtctgcgcgcacgtcgtcgagcgggaagctgcgatagcgcccgcggatgtacgggatggtgcagtacgtgcagaaccggtcgcaaccgtcggaaatcttcacgtaggcgaacggcgcggccgggagggcggcaagcgccgcacgggatccttcgacttcggcggctccgccgcttgcgctcagggtcacggaggcggcggctcccccgcccggggcgtcgacgccaagcgcgtcggctacgatagcggcgatatcgtcctcgcggctgcatggcacgaacgcgcgcgcttccacaagctcgtccgcaagatcctcgccgtagcgggcgggcatgcagccggccacgatgagcggcgcgcccgccgcgacgttgggcatcccggccgcatcgaaaacggcttcgatgctctcctcggtggcgctttggatgaacgagcaggtgttcaccaccacggcgtccgcttcggcagggtcgtcctctatcagaaacccggcctccgccaaccgcacgcgcatgcgcgccgtgtcagcctcgttcttcgcgcatcccagcgtgacgaaagcgacgcagggcgcaacgagcgccgcgtcagatgagcgttccatatggcgagaccgtcctagcggtagttgacgaactggagcggctggccgtagtccttccccttgaggaaggcgatgacctcctgcagcgcatcgcgcgagggagagctgacgcgcagcttgtcaccctcgatctgaaccttcaccttgaacttctcggccttgatatccttgttgatcttgctggcaacgtccttttcgatgccttcgacgatggtggccttctgacgaacgctctggccggcggccgcttcgggatcggcccactgcacagcggcaagatcgatgccgcggcgaacgagcttcgagccgatcacgtcgatgacctgcttggccacgaaatcggcgggtgccgccaccgtcatggacttgcccgccttgtcgagggtgatctcggcgcccgagtctttcaggtcgtagcgctgcgcgagctccttcttcgcctgctggaaggcgttgtcgatctcttgcatgtcgaccgtggacacgatgtcgaagctggattccttggccatggaacgttcctttccgcgcgacgcggcccgcactggcgggccgctcgaattttcgtttgcgcacagcatagcgcattttcgcgcccaagccggcaatttcagaggcgctccatgacgaacgggttctccgaccggcggaaacccctaagcggcggatgttccatccccggttttcgcgccatcctcggctgctttgtcggcggcgtccgcgtcggccgaccccttcttcttggcatccggatgatcctcgtaccacttctccaggtaggcgtcgaaatcgaccgtggccatgggcatgccggtagccggatcggagccgtcgaacttgaccgcctcgccgtccaccttgatcgtcacgccgtcgctcgcccaagcggcgaacgtccacacgtcgccctcggccagctcaacggtgtcctcctcgccgcccgagaacatctggtcttcggacgtcccgtccttcgtgatgaccgcgtacaccggggtgtccttggcgatcgtgtaggtcaccttgatgctggtcggagcagtttcaacaggcttggcctgcggttgcgcgggggtttcgccgccttccgtgccgctgccgtcctgcgtcgggtcggcgagccccgtcaccggcagcttcgtcacatcctcgttcgagctcccgccgttgttgccgaacacgagcaccagcaccacgatgagcagcacgaggatcacgccgcccgcgatgacgaaaggcagcttcgactgcacgacgctcgaggccttcggccctgcgtagaagttcgtgtactcggcgttcggcagcgccgcatggcggctgggatgcgtgcgtccctcggaatagaggcgctccgaacccccgcgcgcgccgtaatcgcgaccgtagtcgcgccggtcgtcgtacatcgtacgcccgaacgcattctgccgcggcgggcgctcgtcgacttgctgcgaggggcgagcgccctgccgcgaggtcgagcgtcccgtgcgcgaagatcctcctcgatcgaaacccgagggctgcgcgccgttgcgcgcgcgtcccacctggtaggcgtaggcctcgtccaggtacatgcgcgtcatctcggtggggttgagccccacgaggcgcgcgtaggcgttcaccatgttgcgcgcgtagccgcgcggcggcatgcgggagaaatcgtcttcctcgatagcgcgcaggatgtcgggccggatgcgcagccgtcgcgcagccgtcgcgagatcgtagcccttgcgctcgcgcgcctctctcaatatggttccgaatgtcacctggccacctcgttactcctcagggttcgccgcgtcgtgcgcctcgaaggccttcaacgtctcgagctccatggcgtctacgagcacttcgcggggcttgctgccgttcggcggccccacgacgcccttttcctccagcatgtccattatacgcccagcgcgcgaatagcccaccttcaggcggcgctggatgttcgaggttgatccgaggccgctcgacaccacgatgtccgccgcttcccagatgagcggatcgtcgtcggagacgccgccgcccgaaccgtcgggttgcgacgcgcccagcgtgatgaggttcgtctgcaggatctcggaatggtactccggctcgccctggtctttgagcatggccaccacggcgttgatctcgtcttccgatacgtagcatccctggattcgctggggacgggcgaactcgggcttcgacagcaagagatcgcccaggccgatgaggttctcggcgcccggcgtgtccaagatgacgcggctgtcgatgccgctggccacgttgaacgagatgcggttcgtgatgttcgccttgataaggcccgtgaccacgttcgtggaagggcgctgcgtggccacgatgagatggatgccggccgcgcgcgcgagctgcgcgatgcggctgatggagaactccacctccttgcccacgttcatcatgaggtcggccagctcgtcgatgatgatgacgaggtagggcagctcggcccccagctcgccggccggcggctcttcgccggcttcgatcgctttctgctgcgcggccagctcggcctgcaccttcgcgttgtactggccgatgttgcgagcacccaccttcgagaacactttcaggcggcgctccatctcggccacgccccacgaaagcgcgctggccgcctcgcgcggctcggtgactacgggcacgtacaggtgcgggatgccgttgtagggcgtgaactccacgcgtttcgggtcgatcatgatgaagcgcacctcggaaggcgtggcgcgcatgaggatggacatgatcatggcgttgattgacaccgacttgcccgaaccggtagtgccgccgatgagcaagtggggcatcttcgcgaggtcggagacgatggagcggccctcgacgtccttgccgatgacgatctgcagcgggccctcgtccgcatctttgatgacgtcgcccaagagcacgctctggcgcgtgcggttgggcacctcgatcccgacgtagttcgtgccggggatgggcgcgaagatgcgcacgcccggcgctgccaacgcaagcgcgatgtcctgctcgagcgccgtgatgcggctgacgcgcacgcctgcgggcagatcgactttgaacagcgtcaccgtaggtccggcgacccagccaacgacctcggccatgatagcgaagctttcgagcgtctcctggagacaggccgcggtgtcggccagctcggcgtcggaagcgcggtccttcttggagttcttcgacacggccagcaggtccgcgggcggcagcacgaaaccgtccgccggacgaggagaggccaggggcgtggagctcgcggacggcttgggagccgcagggga

SEQ ID NO: 9127 - DNA, 9893 bp, Unknown
  gut microbiota DNA sequence
cgacggggcttgctcggtcgaccctttgcatccttggcgcgcggcaggacgttcgttgcacccgcctccacaacctcgccggtcgtgggcaccacgggaaccttcgcgcccgtcgagcgcttcatgcgggcgtagggcggagccgccagcacgtcgtcgtccgcatcgtcagcgacaagcgcccgacgggcgtcctgtacgcgttcgaccagcttcgataccgagaacccgatgatcacgagcccggccaggactatcccgatcatgatgatgcacgtcaccgcttgcccgaacaggctgattccaacccatgcgatgccggcgcccagatagccgcctcgcgcggcgagctcgtccgacaggaacagccggtcgacggaatcgggcgcggattcgggcgtgaagagggccagcagggagagcgcggcgacgaagatcatcacaaggcccacagccacgcgcaccggtacgcgttcgcggtcgaaacgcgcgaggaagctggctccgatgatcagcaagaggaacggcaaaagataggcgcctagacccagcgagaggtgcagcgccgtggaaacgaacgaggtgaccacggcgttcgtaggcagcaccgccgccacgaacaggacgaccgcgagcacggcgaaggccacgccggtgatgtcgcgacgcgtgcgctcgtcaagcagacggggctcctccgtcgcctgcgggcgcgcgcccttggcctgcttcgcccttttttcggcgggcgaggccgccttgcccttcgatttcgtcgccgaagacgctttcggcttcgcggtgctggatgactgtcgggccacgccctactcctttatgctgcgtttgatctgcgtttcatgggtttgtttcagcctatgctgcggccgcatgcgcccccgcgagggcgcatgcggccattatagcttaaacctcgagcaagttcacaatcaccatgggacgggttttcgtgcgttcccacaggagggacagcaaggcgtcgcgtccggccttcttccactccttctggccgccgccctttcccatagcgcgcccgagcgcgttcttcacggtgccctgcgcctcgcgcacgaggaaatcgtcgtcgccgcccgtgatgccgtgcatttcgatctgcacgttgcccaccacgttctttcccttcggcgacaccgcggcggcgatggccgcaaacccctgcgaacccaaagcgttgcgctcgtcgagcacgccctgcgaggtgtcgcccaccgacaggccgtccacgaacacgatgccgctttgcacggtctcgccgcgaacgacgccctgcgacgtcagctcaaggctttcgccgttttcgcagatgaaaacattgtcggtcggcacgcccgtcgcctcggccagacgagcatgcgcgcgcaggtgcgtggcctcgccgtgcaccggcatgaacgccttgggctgcacgatggagagcacgagcttgagctcctcggcgccggcgtgacccgacacgtgcacgcgcgcgcggttcttgtcgtatacgtccgcgccgatcttcgccaggccgttgatgacgcgcgtgaccgccttctcgttgcccggaaccggcgtggccgacacgatgaccgtgtcgccttcgtccatctggatggtgcggtgctcgccgttggcgatgcgcgccagcgccgagagcggctcgccctggctgcccgtgcacatgatgaccacctgctcgggcggaatgcccttgaggtcgtatgcgtcgatgaggtccgtgtcgctgatgctgagatagcccaggcggcgcgcgatatcggtgttttggatcatcgagcggcccgtcaccaccaccttgcggccgttggctacggcggcgtcgcagatctgctgcatgcggtggatatggctggcgaacgacgcgatgatgacgcgacccttcgcctgcgatatgatcttcgccagctccttgccgacttcggcctccgacggcgtgaagttggggttctgggcgttggtggagtcgctcatcatgaggtcgacgccgatttcgctgaacttcgacagcgcgccgaagtcggtggtcacgccgtcgatgggggtctgatcgagcttgaagtcgcccgtgtgcagcacgtttccggccgggctctggaagaacacgcccacggcgcccgggatggaatggttcacggcgaagaactcggccgtgaagcagcccagcttgatctggtcgcccggtttgatctcgacgagcttggcgttcttgatcttatgctcggcgaacttgccctcgatgaggcccagcgtcatcttcgtgccgtagatgggcacgttgcgatcgaggtccttcatgaggtacgggagggttcccgtgtggtcctcgtggccgtgcgtgatgacgatgccgcgcagcttgtcggcgttctccagcacgtaggtgtagtcgggcaggatgagatcgacgcccggatggttgtcgtcgggaaacatcaggccggcgtcgtcgaggatcatgtcgcctttgcactcgaacaccgtcatgttcttgccgatggcgtcgagaccgcccagcgggatgatcttgagcgtggcgttcggatccttcttcggcgaggcgaagttgcgtcgcgcgctctggtcgccgcggttggacgcagcgcgctgaccgccctcccccgccttcgacagctgcgggcgcttgtgctcgagctgcacgtgcttgtacgtgcgggtcttcttgttgccctggccgttctcgtttccgttcgcgcggggcgctttctctcccctgcgcgggctcccgccggagcggttctccgtgcgtgcgcgatcgcttccgcgctggacgcgcgggttcttctcttccatatcgttccttttttctcaggcgacgggggcgcatgcacgaggagccgggtatcccggctggtctcgcagcaggctgaaattcgctcgagcctgcaagcccgcacgtcgcggttatatcaagcgccgcgatgcgcggcgcttcggtccttcttcatgtcgtcatcctgagcagagcgccgttggtgcggagtcgaaggattccgctcggcgccagccggggtacttcctgctatcgtcgcacgggatccttcgactccgcgctacgcgctccgctcaggatggcaaacggctacagcacgcccacctcgcgcatggtggcggccaggcgctcggactgctcgggcgtggcatccacgagcggcaggcgcacgccgcccacggggaagcccagcagcttgagcgcttccttgacgagaatggggttcgacgtttcgaacagtcccgtcatgagcggcatcaagcgctcgttggccgcctcggcggcctcccagtcacctgcagccgccagctcgacgatctccttcatgcgagcgggagacacgttgccgatggtggagatgactccggcgccgcctcgcttcatgacgtcgagcgtggcggagtcgtcgccggagtacacgacgaagccgtccggagcgcctgcgacgatggcctcgacctgatccatcttgcccgacgcctccttcacggccacgacgttgtcgcagtcgtgggcgaggcgcagcgtggtctcggcttccatgttcaccacgcagcggcccggaatgttgtacaggatgatgggcagctccaccgcgtcggcgatggtgcggaagtgacggtacatgccctcttggggaggcttgttgtagtagggcaccacgcacataaagccgtcgacacccaactcggccacgtcgcgggcgaagcccaccgtgtcggccgtgcagttgtcgcccacgttcgcgatgacggggacgcggttgcccacagcctccaccacagcgcggaacagctccatcttctgcgggtagaacacggtcgggctctcccccgtcgtgccgttgatgatgagggagtcgctgccgccgtcgacgaggcgcgcggcaagcgcctgagccttgtcaagatcgagctcgcgattctcatcgaagggcgtgaccatggccgggatcatccggccgaaccgaggctgcgacatgctctgactcctcaccttccatgcgcgcgacccgtgccgcttgcgcatccaacatacaaaaacaagtgcctgaacggctattatcccacgagatgagccctcaggccatgaagttctccaaacctacaaccagcccgtcgcacgagcccacgctacgaatgcccaacagcacgcccggcatgtacgacgtacggtcccatgagtcatgacggatggacagcgtctggccgagcgatccgaagatcacttcctggctggcgacgtagcccatcgagcgcacggaatgcaccggcacgccgtccacgagcgcgccgcgcgcgccctcggcgccttcgatctcggtctccttgccgggagcttcgctcgcgcgcccgccacgcgcttcagcgatgatctgcgccgtgcgcaccgcggtacccgaaggagcatccttcttgttgcagtggtgaaactcgatgacctcggcctccgggaagtacggcgcggcggccttggcgaactccatcatgagcaccgcgcccgtcgtgaagttcggcgcgtagaacagacaggtgccgtcgggcgcgagcgcggccagctcctgcaacgtctcgttcgacaggccggtagtgcccaccacgcagtcgactcccgcgggaagcgcctcgcgcaggttgtcggccacgacggaaggctgggtgaagtcgacgagcacatcggccgtccaagactcgagcgcggccgccaccgtcgggtacacggggaagtcgacctcgggcctgtgcgggtcgatgccgcacaccagttccatatcgttcgccgcgcgcaccgcgtcgcatacggtcctgcccatacggcccgcgcatcccgcaactgccaccttgatcatcgctgcctgcctttcgcttcatgtacccgaacatcctaccacgcggatatacgccgcttgcgccgccgttacccggccggcacgattcgtcggccatccgtcctcccgcaacgacgaaggggccgcgttcggccccttcgctcgaatcaaaaccgcttacgcgtcgtgacggcggcgcggcgtgcggttgccgcctccgttgccctcgcgtccgctgcgacccggacgattgtcgcggccgccgttgcgatcgccgcgctcgcgacgctcgccgttggaagcgctgctttcgggggcgtccggcttgtcgaggcggtcgagcgatatcttgcccgtcttcgggtccacctcgagcacctcgactttgatgatgtcgccgaggttcagcacgtcctcgaccttgccgacgcggccgttggcaacgcgggagatgtgcagcaggccgtccttgcccggcgtcagcttgacgaacgcgccgaagtccttgatgccaacgacctcaccgtcgaacgtctcgcccacctcgggctccttgacgatgccgagaatcatggccttcgcggcatcgccggccgggccctcgatggcggcgatgtggatggtgccgtcctcctcgatgttgatgctggcgcccgtctcctcctggatgccgcggacgaccttgccgcccgagccgatgacgtcgcggatcttgtccaccgggatgtggatggtctcgatgcgcggtgcgaactcggagagctcctcgcgcggcgcggcgatggtctccagcatggcgtctaggatgtaggcgcgaccttcgctggcctgcttgagcgcacgagcgaggatgtcgaccgacaggccgcgggccttgttgtccatctgcagggcggtgatgcccttcgccgtgccgcacaccttgaagtccatgtcgccgaggaagtcctcgatgccctggatgtcggagaggatgaccacgtcgtcgccctccttgatgaggcccatggcgatgcccgaaacaggcgccttgataggcacgcccgcgtccatgagagccagcgtcgaaccgcaggtggaggccatggacgacgagccgttcgactcgaggacctcggacaccacgcggatggcgtaggggaactcgtcttcgctgggaagcaccgggatcagcgcgcgctcggccagcgcgccgtggccgatctcgcggcgcttcggagcgcccatgcggccagtctcgcccgtgcagtacggcgggaagttgtactggtgcatgtagcgcttgccctcggcggggtcgatggtgtcgaggcgctgccattcgttcagcatgccgagcgtgcagacggagagcgcctgcgtctggccgcgctggaacaggcccgagccgtgcacgcggggcaggtagcccggcacgatgtacagcgggcggatgtcctcgggacgacggccgtcggcgcgctcgcccgtctcgatgaccatcgcgcgcatggccttcttctcgagcttcttgagctcggcggcgatgtcgcccttccatgcggcgcgctcctcatcggagaactgctcctccttgatgcgggccttgagctcttccaccttgcccatgcgcgaaagcttgtcggcatcgcgcaacgcggcggacatctcggccatgaacggcgcgacgcgctcggcgatggccgggtcggcgacgtggacgggccactcgaccggctcgatgttcgcacggtcgaggaagcgctgctgggcttcgcagaacgcggcgatggcctcctggccgaacgtcatggcggccagcatgtcctcttcggagatctcgtcggcgccggcctccaccatggagatgtagtcggccgtgccggcgatggtcagctcgagatccgagttctcggattcctcgaacgtggggttcacgatgaactcgcccgtctccacgtcgcggccgatgcgcacgcaagcggcggggccgtcgaagggagccgcgcccagcatgagggcagcgctggcgcccatgacgcagatggtgtcgggcgggttgatgctgtcgacgacgagcgtcgtgcacacgacgtgcacctcgcgcttgaagccgtcggcgaagccgggacggatgggacggtccaccatgcgggccgtcagcgtgcccttgtcggaaggacgcgcctcgcgcttgaggtagcctcccgggatgcggccgaccgcgtacatcttctcgatgaagtcgaccgtgagggggaagaagtcgtagtccttctcctccttcgagatgacggccgtaacgagcaccgtcgtgtcgccctgcgtgacgacgaccgagccggtcgcctgcttggcgagctcgcctgtctccaaacggtactgcttcccgtacagttcgaaggattcgacgatttttttcatatgctgctttctttctcttcacctgaacgaccctagtgccgcccagcttcttcggcgcggggtacttaccgttcccccgccgccgcgagcggatgcgcccttgcgcttccgaccgcctctatgtaaaagcccgccaaggcgggctttcatacgctagatggtgtcgcggatgccgagctgcttgatgagcgtacggtactcctcgatgttgcggttcttgatgtacttcagaagaccgcgacgcttaccgaggagcatcatgaggcctcgacgagtgtggttgtccttcttgtgcaccttgagatgctcggtgaggttgcggatgcgctcggtgaggatcgccacctgcacttcgggactgcccgaatcgccttcgcccttgccgaattccttgacgagctcggcagtgcgctctttgctgatgctgagtttgctggccatgtgctattccacctttcgttcgcagcgccctcgtcggacgccgcctcctgcgcgcctgcccggcccgggcctgcacgcgtcgtatgcgcgtccctctgggtaggcatgcggtgaacatgcggaccaagcggaacgtgcctgcgttttcgcagcccgcctattgtaacggcaagcacggtgcgcggcaagcgggacgcggggcgcccacaggttccgcacaaagcgccgacgcttcgaagccgcgcccccatcaggacagacgcatgctgcagaaggcctccgtcaggagcgcgccacactgggtccctgggggatccagacggtgaacgacgtgaggcccgcgtcgctcgaagcgtagatgtcgccgccgtgggcgcgggcgatctcacgggagatggccagccccagccctgcgccgcccgctgccgacccgcgcgactcgtcggcgcggtagaacttctcgaagatgcgttcgaggtgctgcggcgacagctcgcgtccctggtcgctcaccgtgagctcccaccacacgaagccgtcggcggccgtcacgagccccgtgcgcaccctcacgtccgtgcccgggtcggcgtaggccaccgcgttcttgatgacgttgttcagcacgcgggccacgcgccccgcgtcggcgaacacggacagctcggcggggccctcgtacacgaggttcaggcgccgcccctcggccagggggaagaactcgtccaccacctggttcacgaacagcgcggcgtcgaagcgcgaacgctcgatggggatggtctgcaggttgtagcgcgtgatctcgaagaactcgtcgagcagctcctcgagccggtaggccttgtccaacgtgatgcccgtgtagcgctcacgcacctcgagcggcaggtccggagactcctcgagcagcgtaagatagccgatgatggaggtgagcggcgtcttgatatcatgcgccagatacaccaccagctcgttcttgcgatcctcggcggccttcgcagcgcgttcgttctgctcggacgtcgccttgatggtgttgagcgccatagcggtgggcgcaagctcgccgggcagcatgaccgggccgtcgcttttggccaggatgtcggacaccgaatcgagcaagaggtcgaagtagcgcagcgcccggttgatgcccgagcgcaccacgagcacgatacccgcgacgaagccgatagccgtcaagaccaggaacaggttcgacgcaagggtgtgcagcgcgtagtcgtagccaagcagctcgtagacgaagttcgacacggccgatccgagcgtggtcatgaagccggcgaacagcacgaggtacacgacgatgaacagcacgacgttcaccaccgtgcgacgcaggatggcgttcgagagccgcttcgtctggtcgagccgcgcctgcgagcgtacgggttcctccatgtcttcctccttttagcccagcttgtaaccgacgccccagacggtctcgacgaactcctgggacgagtcgacggcagccagcttcttgcgcagatgccggatgtgcaccatcaccgtgttgttgctctgggcgttggcgatctcgccccagacggtctcgaacagatcgcgcgaggccacaggccggctctggtcgcgcatgagacaggcgaggatggcgaactccttcggggtgaggctcaacgcctcgccgtgcagcgtggccgtgtaggcgctctcgtcgagcgcgatgccgcagcattcgagcatacccggcccatcctcccttgcgacgtcgttcgaggtagcgcggcgcaggcgcgcgcggacgcgggccacgagctcgcgcggcttgaagggcttcaccacgtagtcgtcagcacccagctcgaagcccaccaccttgtcgacctcctcgtccttcgccgtgaggaagattatgggaaccgagctcgtgcgccgaagctcgcgacagcacgcgaacccgtccatgccgggcatcatgatgtcgaggatgacaaggtcgaacggatcgtccgcctgacaggccagcagatcgggagctgcgtagaacaccgtcggggcgaacccggcctcgacaagcagctgccccaccaaatcggcgatggcctgctcgtcgtcgcatacggcgatgcgcatcttcgattccacgcgttcctcctcgcactccgc

SEQ ID NO: 9128 - DNA, 1454 bp, Unknown
  gut microbiota DNA sequence
gccgtgaccctgctggaagtgctcgaggcggttcaggggccggtgagcatctcgctgtgcgtgatggatcccgcttactgcgacaaacagaaggactgcgcctacaacaagctgtggcagggagccgatcggctgctgaacgcctacttcggcgctatcacgctcaaggacctcatcgagcagggggcgtcgcatccggtggtggaagccgctatggcgaaggcgaaggacgcagacgcggttccggccgccgtccgctgcgctgcgcaatgcgccgcgcccacgccgcgcattgccgcggaagctcccgaagccgacgacgcgagcgcgtgcgaatcgtgcgcatagcgggttccggctcggttgcgtggccgtccgaggcgctcgggcgcgacgagttcgtggagcttgtgcgccgcgagggcgctcggctgcatcgcgacctgccctggcgttacatcgacgacccgtacgccgtgctggtgagcgaggtcatgctgcagcagactcaggtggctcgcgtcgagaagcactggacgcgcttcctgtcgctgtttcccaccatcgactccctggcggccgcaggcacggccgacgtgctggcgcagtggcaggggctggggtacaaccgccgtgcgcttgcgctcaagcgggcggccgagacgtgttcggccgagcggggagggctgctgcccgacacggctgaggagctggaaacgcttccgggcatcggtccggccacggcggcgggcgtgatggcgttcgcctacaaccgcccctccgtgtacatcgagacgaacgtgcgcacggtgttcctgcacgagctgttccccgaccgcgacaaggtttccgaccgcgagctggcgccgctcgtggcgtccacctgccccgaggacgacgcccgggcctggtactacgcgctgctcgattacggcgcgcacctcaagacgctcgtggcgaacccttcgcggcgcagcgcccactacgcgcgccagtcggccttcgagggctcgcggcggcagaagcgcgccgagctcgtgcgcgtcgtgctggccgagccgggcatcggcgccgacgagctggccgagcgcctggacgccttcgagcgcgccgccgggcgcgacggcgtggatgcggccacgttcgagtccattgtggccgacctcgtgtccgaaggcttcttccgccgagagggcggcgcgttcttcgcctgacggggcccgctgcggcgggaggttgcattctttgccctcctccggttccggtccgcgcttgggatggcatgcggtcgaatccttttcttgcagggcggcgttttcgagcgctttggacgcaaaacggtacccatggcaatcctgacggcggaatcaggttacgagagctcgctgaatagtacccacctggggttttgcacgtgatcctgatcggacggcatgcaaaacaggtctcgagat

SEQ ID NO: 9129 - DNA, 704 bp, Unknown
  gut microbiota DNA sequence
cgggcgtggaggacgggatggccacgacgatctggtcgatgttgtgcttgtccacgaggtcgacgatgtcgtccgtggaaccggccacccttacgccgtggatgcgcgagccgcgcttggtggggtcgtcgtcggtggccacgatggggatgcccggcatgagcgggtccttcgaggccatgcgcccgatggccagcgagcccgtctcccccgcgcccaccaccagcgtgcgcggccggtcgcacgcgcgctgcgtggagacgagcgcgcgccttttctggcgcatgacgcggaagatcaggcggataccgcccatgaagaatatgagcatgaaacacgagacgaagaacacgcggatgggcagccgcacgtcgatgatccagaggaacacggcgcccaccagggttgacagcaccacggccagcacgatctggatggcttcgtcgacgctggcgtattcccagaggttgttgtacagatggaacagccccagcacggcaacgttgatgagtgcgaggatgcccagcatgaagtagatctcgttgttgacgaacacttcgccctcgacgtcggtgagcagcgatgcgagccagtacgcggcgtacgtcgcgacgatatccagcagcagcaggatcgctgtgcgttttgtgatatgagcgtccaaaccgggcctcgtcttcgagtagggcagcgaaacgatatgg

SEQ ID NO: 9130 - DNA, 221 bp, Unknown
  gut microbiota DNA sequence
accatcatgtcgtccacgtactgctcgacggaatcctgcacgccctcgcgcttctgcacgctggagttgcacacggcgaagtcgccggccgcaagcgccgagttgccgccgacgcgcgccgtcttctcgatcgccttgacgtccgcgccggcgttcttcgcctcaagcgccgcggccagacccgtgtacccgctgcccacgaccaggacgtcgcactcctc

SEQ ID NO: 9131 - DNA, 207 bp, Unknown
  gut microbiota DNA sequence
atgatcatgtcgctgttcaaggactatcgcccgctcgcgctgttcagctggctcgcgcttctgttctgcttgctgggcctcatcgccggcatccccgtcatctgggagttcgccgcgacgggcctcgtaccgcgtctgccctccgcattgctggccgtggccctcgtgttcgtcggcatcctcgcattcgccagcggcctcatcctg

SEQ ID NO: 9132 - DNA, 406 bp, Unknown
  gut microbiota DNA sequence
gagcttcatcggcttcgcggtgatacccctgttatcgttcggcttgctgctgttcgaagcgaaccgcaccggtctgtcgtggagcgacctcacgcagaaacccaaagaggaacccgcggtcgagaacgcgaatgccgacgacccctcggcccgctcgacgtctcagagtgacgccgaggaagaaccgggcgcgaagttcggcgtgggcaagctcatgttctctatcatgacgttctcgttcctgtgccgcttgttcgatgccatacccgcctacgacgacccgttctcgttcgtcggcggaagcgccatcttcgcgctcatcctcgtgggcgcagtgttcctcgtcatcgtggcgaagctgcgcgagcgcttcaacgccgcactcacctaccggctgtcgttgccc

SEQ ID NO: 9133 - DNA, 422 bp, Unknown
  gut microbiota DNA sequence
gcacttttccgggtcactttgacgagagaggcctcggggccggagcaacaaaaaagagccttcgcagatcgaaggctctttcgaattcatggtgggcgatacaagatttgaacttgtgacccctaccgtgtcaaggtagtgctctccccctgagctaatcgcccatgaatgcttgctgctttggaagttttccgcgtcagcaagcagatagtctaccagaagttcgccgaccatcaaagacaaatttcgaaaatatttttgcgaacttttctgaaatcgggggttgcgcgctacggacacttccagtattatatttcctcgccgatgcggacgtggctcagctggtagagcacgaccttgccaaggtcggggtcgcgggttcgaaccccgtcgtccgctccatgatcgtacaagcccgtcgg

SEQ ID NO: 9134 - DNA, 531 bp, Unknown
  gut microbiota DNA sequence
ctgctgggccagagtgagcgcgtccagcggcgagtacacgatctgcacgctgcggcccgccgcctgctcggccagcaggctggacgtggagcccggcacgcgcgtcatgtcgccgaacgtggcgatggtgacgcccggaacgcgcgcgagggcgatgaccgtgtcgatatccttgttcgaggtcacgcacacggggcagccgggacccgacgcgaggcgcgtgccctcgggcatgaggttgcggatgccgttgcgcgcgatggcgacggtgtgcgtgccgcacacttccatgagcgtggcgccgcctgcgggcgacagcttcgcgatggactcgatgaggccgcgcgcgagcttggggtctttgaaggccgccagctcggattccatcgtggccgcgtcgaccgcgcgcgcaaggtgcgcgggcctatccttcggctcgacggatgtttcacgtgaaatatccgttccggtcgaggaggtcatcgcgctacctcgtcggctgcggggatgtcgtcgcccgccagctcgggg

SEQ ID NO: 9135 - DNA, 234 bp, Unknown
  gut microbiota DNA sequence
gaggagatgacgcgcacgctggactacggctacgactacgacggctcgctgcactacggcttcgagatcaagctgcacgcgcccttcaagatgaacgaccgcatcgagacgttcgtcacccaggacgcgctgtacgaccgcggcgagggccgcgggtgcctctcgaagcagaccggacgctcctactcctccgacggcacgcttctgtgcgagaccgagacctgggacgtgtgc

SEQ ID NO: 9136 - DNA, 174 bp, Unknown
  gut microbiota DNA sequence
caggctgcacacgatgacggtgcccacgtacacgcccgggatggtgaacgtgacggtgcgcgtgaccagaagccaggcgaagcccagcaggatggcgatgccgcacgtctcgcccagcacgccggggtgcacgccgaacaggaggtccatgaacggcagctgcgcggcgcccgg

SEQ ID NO: 9137 - DNA, 185 bp, Unknown
  gut microbiota DNA sequence
gcatagcgctcggccgagcggttcgccacggcaaccggcacccgctttggctgcgcgtcgtccccgtcgggcgcggggagccaggcgaggttgcgcacgcgcacgagagggatgtgcggacccggcgacagcgcctccagctcgtcgccttcgcagaagcggttgtagcaccgcgcgatcacgcg

SEQ ID NO: 9138 - DNA, 8920 bp, Unknown
  gut microbiota DNA sequence
cgggccgacgggctacgcggagtagagcccgtccttgttgaagcggtaccacgactcgacggcctcctcgggcttcgcgtccaacaagcgcagcacctcgcgggcgaattccagcgtgccgctgccgttcgcggtgatgatgccgccctcggcgacggcctgggcctccacgaagtgctgcgcgccctggtagtgcggggcgccttgccgcatgaactccaccgtgttgcccgtgcgggctcggtcgtcgaggaacccgtgctcggccagaaacgtcgccgcgttgcagatgccgcccacgagcgccccctggtcgagcgcgcgctgcaccaggggaaggacgtcgtcgttgcttccgtcgagccacgcctctcctccgatgagcagcagcgcgtcgaagcgctcgggcgcctcggccaccgtgcagtcgggcagcacggtcagccctcccatcgagcggatcggctcgcggtcggcggcgacggctcgcaccgtgcgggggttttcggcccggccgagctcggcgcacacgtaggcgctctcccagtcggcgaatccgtcgaacacgtagacgagcacggtcttctcgggttgctccatgtcggttcctttccttagggtgtggacccatagtacggaagggaacatgacatcaatatgtcatggtttgcgagcttgtgcgaaatcccgcatcttggacgcgatgcgctcggcccaggcggcatcgtcggtgcggaagcgaacggcgcccgtgggctcgtcggcttcgcggtagaggaaccgcgcgtcgacgacgtcggtgagggcgaactcgtcggcggcgtcgtaggcgagctccacgaggaacgtgcccggcgcctcgttctcgggcggcagcagcggcggcgcatccatcgtttgcgttgcgggcggcgcgtcgcgcggctcgaacgtttcgcccaacacgtcgatggcggcgatgcgcttgagcttgaacaggcgaaacgcttcgcgcgtgcggcagtaggcatgcaggtaccagccggtttgccggtagacgagcttcgcgggctccaccgtgcgcccggcgcgcccggaacgcgacacgtactcgaggcgcacgcaacgccgctcgcgcacggcgtccgtcagacggccgagcttctcctgcgcgacgctgtcgaggaaccacggtgacaggtcgatggtcaaaggcccgtccggcccggaggcttcggagcccggcacgagccgggctatgagctgcgtgacggcctggtcgccgtcgatgctccgcaggccgtcgagggcggcgtacagcgcggctctgtcgtcgaggctcagcaggtcgcggcgcaccttgaagccctccagcgttcccacgcctccgcccgcgcccggaaacgtgaccagtggcacgcctgcgagttccagcgcttccaggtcgcgcgcgatcgtgcgcttcgacacttcgaaccgctcggccagcgctccgatggtggtgcgtttcgtgtctgctagcacgcacatgatcccgatgagccgctccatccgcatggtcgatcgtcctctcgtttctgcgcccgttcgcgtcctgtgcgcttcggcggtcgctccgcagtccgctcccagcttaccactcccgcatgtccggatgtttcacgtgaaacatttgttcttgccgtattcttcatgcgtgccctccatgctgctgatcctcggaagcgctccttgtcgggctatcgtaggggatgacgctgaattcgagcgctttcggtaaaaacggagcggtttggtaatcttgaatgcgcccggattcgccttttcgaggaggcggacccgggcagatcgacgttttcccaggtggggtggcgtcgccggatatctctgaaggtacggggattgccaaaccgccccgttcctgccgcatggcggcgttatccgcgtctcgcgtatgcgggagagggcttccttcgacgcggccggcgcgcgtcggcgagcgcggatggccgccgtctcgccacagggggcatgccggttgacgcgcgcccgggaaagtcaaccgatgctcgcttgcgtcaaccgctcgcgttccccatactgtagggcagggcgcgccgagcgggagaaggagccttgcatggacgacattaatttgggagccgccatcgcgcgcgagcgccgtgcggcgcaggtgacgcagggcgagctggccgcgcacctgggcgtgacgaaggcggccgtgtcgaagtgggagctggagcaaagcatgcccgacgtggctctgctgccgcgcatcgccgcctacttcgacctcacgctggacgagctgttcgactatcggccgcagctggtgggcgacgatctgcaagacgcctacctgaggctgctcgcgcagttcgacgaagatcccgaagccgctttcgcgaacgccgaggacctcgtccgttcgcactactcctgctggcccgcgctgcagcagatgggcatgctctacgcgcagcgcgcaaccctcgaccccgaccgcgccgagcccttggccgcgcgcgcagccgagctgttcgagcgcgtcgagcggcatgccgacgacgtggagctggtgcgcgccgcgcggatgatgcgcgcttccgtcatgagcgtgcagggtgacttggacggatgcatcgccctgttcgaaagcctcaagcccgacaggacagcggcgaacatcgatctcatgctggccagcatgtaccagcagagaggcgaccttgacgccggcttgaagctgttccaggaatcgatgggctggtgcgtgatgaacgccataagctgcgtctcggcgcagatcccgctgtatgccgacgacgccgagcacctggaggcgctcctgcgggccggcgaaggcgtgctttccgggttcgatttgcagaaccagagcccgatgacggtgctcacgttctgcacgaacgcatcttccgcgtgtttgcaggcgggcgacgaggatcgagccgcgaactatctcgagcgctttacgtctttgctggaggagcttgacgcgcgcatgctggtgtacggccggaaccagagcgcgctgtacgatcgggcgcccgagctttggagcgtcgatcccggccaggagcatatcgcggaaacccggttcggcgcgatcgacttcaggcggcagtgcgcgcagatggtggcagcgcagcccgtctgggccgaacgtgccggcgattcgcgtttcaagccgctgttcgaccgactggaggccctatgagcgaagcggacgtgctgtatgtggaggacttggcctatcgctatggcaagacggaggtgttcgccggcgcgtcgctttcgttgcgggcgggcgaggtcgcgtttctcaccgggccgaacggggcaggtaagtcgacgcttctgcgctgcctggccggctgggacgcgcctgccgaggggcgggtggagctgtgcgggaggcgtttcgacggcgcggatcgcgcgcagcgaagcctgctggccttcgtgcccgacgtcccctcgttctacgacgaccttacagcgggcgagcatatccgcttcgtgcggcaggcgaaccgtatgagcgccgacgacgacccgtcggagcggctcatggctctcttcggcctcgacggccatcgcgaccagctgccctcggcatactcgcgcggcatgcgtcagaaactggcgctcgtgctggccttcgcccgcgcgccgcgcttgctgctgctcgacgaaccgtacgggccgctcgacccggacgcctccggggtgttgagcgggcttatcgaggaagcgcgcagcgccggcgcggccgtgctggccagctgccatcatgacgtgcccaacctgtggccggacacgctgctgcgtctggaagacggccgcctcgccgtgctcgatgcgcgtgacggaggcgaagaccgcatggtgcggaacgcgttcggcgcgagcttcggaggcgacgatgcatgacgttcgcctgctgctgtggctgagagcgcggcatgcgcgctcggctctgaaccgaaccttgcacctcgtgggcgccggcgtcgacgacggcggctggggagagcgcgcttaccagctgtacgcggtgggcatcatgctcgtgtgggccgcgctcatggccgcagcgctcgtcgatgcgatccaaagggtcttcgtcggcctcgccgccgccgtatgctcgctcgcggttcagggggcgctgctcgcggtggcgctcgtcctgctgcgcgtcggcatcgcgggcgcgcgcacgacgccgttgaagctgtcgcatcccgacatagcctatctggcggccagcgcggtgagcgcgcgggcgctcgcgggcgtgtcggccggagtgcaagctttcgcaggcgcggctgccggggcggcgctagggtttctgctgggcgtggggttggagagcgcgtccgtgctcgcgggcgcgccggccgcggtggcgctcgcaggtgcggcgctggctgcggccgcggttgcgcttggctgggtcgtaggtttcgtccggctggcaagcgacggctggagcggatggcgcacggctgcggccgcattcgttctcgtggcgtttgccgtttcctggtgcggcgtcgcgctggccgcgggcgctgatgcgctgttggctcctgcgacgttcgcggttctttccgtgggcggattcctcgtcctcgccgtcgcggcgatcgccctcgccttgcttgcgccgcgcgtggatatgacgcgcgtcatcgacgagaactccctgcatgccgatctctgccggttcggcatgctgtcgcccctcgaccgcaacgacatcgccgaataccagcgtcgccgcaagctggccgaccgtcccgtgcggttctccctgccgcgcggggagggccgcctcgccctcgtgcagcgcgccgcgctgtcgcatgcgcgccagtacgacggccttgggagcctcgtgatgcaaggggcgttcgtcgtgccgctcggggtgctcgcgctcctcggcgcgggcggccccgtgctgttcgtgttctggctgccggtggccgttctcatgccgcagggcgtgcgcgaggccacgcgggcgtttcgggacgacgcgcgcaatcgcctcgtgcgcgaccgtctgccgttcggcgtgctcgaactgctggcattcgacacgctgcccgcgttcgccgccacgaccttgctcgcgtgcggcgccgtggctgcgatgattcccatcggcacgtcgcttcctctcgcgcttgcgcttgcggtgctggtcggcgccgcatcgctgctctgctgcggcctcgatgccgtgcgtctgttcccgggcggcccgcgtttgtgctacgagtacggcgcgcttgcgctggtgggcgtgggattcgcgctttcgctgttcgcgtcggcggccgtcgcggcgatgggtatggcgctctttgccgcggcggttgccctcgtcgtgcgcttcggttcggaatgcatgcgctgaacgcgtccccgtcctggatgggattccgcatacgaccccccaagcgcaggcgagcggcggcgcgctgcgagctcgagttcggccgacgacgaccctccgagccgcgctcgcgcgccgaggtcgtcgagcgcgatcagcggcggggcgcttctcgcccaatgcgccgcgcggccgccgcgaggtgccgggcgcggcgcctcgcggctcgcccttcgccgatgtccgacctgcgccctaagtggggcagctgcgagatcacgatgccggccaggatggcaacgacgccggcgacctggagcgcttcaaccggctcgcccagcacgagcgtcgacagggcgatgccgcagggaagctcggaggatgccatgatggcagccagccccggtgtcaggtgcggcgtggcgatgccgaacagcgctaccggcacgaacagcgcgcatagtcccagaacgaggccgaacttccagatgccgtcctgcagaacgccgcttgcgaaatagtcggggcacagcgcgaagcccagcgcgcacgcgcccaggcacacgacgaggccgcgctgaacggacggcatgccgcgcccgacgcggctcgagaagaacatgaagaaggtgcagctgacggccgagagcagcccgcatgcgatgccgatggggtcaagagcgcccaccgattcggagaacatgccgctggccatgagcgttccgcccaggataacagccgccgctgccgcctcggccgcacgcgggcgtctgcgcatgaccaccagctggacgacgatgcccatccaggtgaactggaaaagcagcgtgatggctaccgaaacaggcagcagggtgagcgcgtagttgtacagcacggtgccgatgcacgtgttcagtcccagagccaaaagagctatcgtctgtttgagggaaagcggggccagacgcttgccgcgcgctcgctgcacgagcagcgcgactgcgaacaaaagcgctgcgaacaacgcctggctcgctaccacctgggtccaggtgaagcctgcggcgtacgttatcttcaccgtggtcgcttgggcgccgtagctggctccggccaagaatacgataccggagtatctcaaggtgttcttttccatgaggccattctaacgtacggcgagacctttcaaatgctcgatgcctcgcacgtcgtcgggtacaatgaaacgcggactagaaggagcagggaagacgaaggagagcgaatcatggcatcgtttgcaatcgaaccggcgttttgggagctgttcccccaggcggagatcggcattgtggtggctcggggcatcgacaacgcgcacgagtcgagcgaggacgtgaaggcggcgctggtcgaggcgaacaaagcggcgctcgcccacgtgcccgatcccaccatcagcaagaaccccgcagtggcggtgtggcgcgaggcgttccagcagttcaagacgaagaagggcgcgcgctcgtccatcgaggcgcttctgaagcgcgcgagcggcggccgagaagtgggctccatcaatccgctcgtggacatctacaataccgtgtcgctgacgtacgcgctgccgtgcggcggcgaggacatcgacacgttcgccggcgacctgcgcctcacggtgacgcagggcggcgacgcgttccgcgcgctgggcgacgaggccgattccgagacgctgccgggcgaggtgtgctacctcgacgacgccggcgcggtgtgccgttgctggaactggcgcgacggcgtgcgcaccatgctcaccgagagcacgacgaacgcgttcctcatcctggaatccgtcgacccggcgcgccacgacgacctcgcagcggccctcgacgatcttgcggcccgcacccaggcggccctcggcggcgagatggaatcccatatcgtgacgaaggacagcccggctatcgccctgtcgtaagcgcgctcgtcgctcttgcgcggccctgcatctccgtcgcctccccggtgcgactgtagggccgcgcacttatatatcacctgatcaataggcatatcctgttgccgaaactccacggtctgttcgcttgcgcacgtcccttcggtgtgcgaacattcgttctccaaagagatcgagacacggtgcggaaggcggcgaggagctatggcggcgacaggagaggtgcgggttctcgagacgttcggcggccgcgtgatcggctcgcccgaaggcgccggcgagcgccgggtgatcttccattccgacatgaacgcgttctacgcgagcgtcgagcaggccgagcggccggagctgcggggcgtgccgctcgtggtgggcgggcacgaggagctgcgccacggcatcgtgctggcgaagagcgcgcaggcgaaagcggcgggcgtcaagacgggcgaggcgctgtgggaggcgcgcgcgaagtgcccggggctcgtggtggtgccgccgcgctacgaggtgtaccaggcgtactcggccatggcgcggcgcatctactaccagtacaccgacctcgtggagccgttcggcctcgatgaggcgtggctcgacctcaccggctcgctgccgcttctgggcggtgacccggcgcgcacggccgccgagatcagcggccgcatcaaggccgagctgggctgcacggtgtccgtcggcgtgtcgtggaacaagatattcgcgaagttcggcagcgacttccgcaaacccgacgccatcacgttcatcacgccgcagaactaccgatgccgggtgtgggaagctccggtgagcgagcttctgtacgtcggcgccgccacgcgcgccaagctgcactcgtcggggatcgaccgcatcggcgagctggcgtgcgcctcgcccgagctgctgcgccgccgcctgggcaagatcgggctcgtgctgcgcgcgttcgcgcggggcgaggatgcgacgcctgtgaagccctacgaccaggccagaaacgaggtggaccgcacggtgaagagcttcggcaacggcctgaccgcgccgcacgacatcgtgagcgcgtccgacgcgaaggcgctcgtctacctcttgtccgagtccgtggcacagcggttgcgcgaggcgcgcttccgcgcgtccacggtgtccatcggcgtgcgcagcgcgcgcgacctggccagctactcgcgccagaccacgctgcgccgcgccacgaacgtgaccggcatcgtggcgcgcacggcctgggggctgctcgcggccaacgagccgctggacggcgagcaccctttgcgcgggttgcacgtgcgcgcctcgaacctcgagccgtgcgatgcgccgcagcagctggagctggccttcgacgcgcgccggcgcatgttggaggacttggacgagacgatcgacgacctgcgccgccgcttcggcaacacctgcatccagcgcggcgcggagctgctggacgagagcctgctggggctggatatcaagaaggagaacgtcgtgcatcc

SEQ ID NO: 9139 - DNA, 1085 bp, Unknown
  gut microbiota DNA sequence
cgggccgaagcgggagcaaaaggggagccctggcagtttttcaagggctcgtcgacatcgagcgggcgactcgttttcgcccgtcaggcgtttctcgggcggcggggaggccgtgcgacggttttcggtcgtgagattgtcagggctctcaatttgcgcccaatcgggccggccgccgacgaagcgtcgggcgaagagcgcggatcggcaggatggagaggggagcgggggcatggtgcagggcatagcggcgcggcggaagcggtatgtggaggtggaagcgacgttcctcgaagatgggcgcatcgtgccgcgcgccgtaatttggcatgacggacggcgcttccccgtgcgcgccgtgctgggcgtgcggcggtgcgcgtcgctcaaggtgggcggcgagggcgtgcgctacgacgtgctggtgggccatgcgcatacgttcctgttccacgaggagccccgctggttcgtggaggagatcgtgtacgagccgctcgacccgcttctcgacggcggggcgtgcgcctggggtgcggactgagggttcgccggttcagcgggccacttcggcggcgggtgaggcgaaatccggtctcctgcggtaaaaatcgatcggtttggtaatcctggcggggcccgaaccgtcgcttcaacggtcgacgagttccgccttcgcgcgtttgcccaggtcggacgtttcatcagaaaatgaaatcgaaatggtgggattaccagaccgcctcgtttttacctctcgatcgcgattttcgccgcatcgaacttggaggcgggtggcgccgctgcgccctggtcgcgtagaatggaatcgtcagagggctgggaaaggagcgagcatgcatatcgaaacgccgggcgagcgctcgtccgagctggtggccgcactggtggacgtgtgggagcgctcggtgcgcgccacgcacgacttcctcgccgaggacgatatcgtggggctgcgccccgaggcggagtcgggcatcgcgggcgtcgagcggttgacggtggcgtacgacggcggtgcgccgtgcgggttcgcggggtcgcaggacggcaagctggagatg

SEQ ID NO: 9140 - DNA, 18011 bp, Unknown
  gut microbiota DNA sequence
attgacgtaatgcggggggggggggggtattctattttcattgctcatcattaccgagcgattacgtttgctggaaggcatacatgcatacgtactagcaaaagactgagcaaaagcagacgagaaaggcggggccgtatgaagaaaagaaaaggagcggatcagctgctagcagtggcgcttagcgcatccatggtcgtttccatgaatgcgcccattgccgcatgggctgatacgggcgaggaaagttctgccgtggtcggttcgcaggtggcggaaaccgagccggtcgtacctgttgaagagcaggtgaccgactcgagcgcagaaccgacggttgagtcgtccgagatcgtcgacgttgtcaagacgacggagactccggttgcatttgcagctggagaaacgcagaatgcaactgcagtggccaccatcgacggcaccgcgtacgacacgctcgccgccgccatcgccgccgttccagattcgggggccacgccgacaaccatcacgttgaacagcgatgccaccggcggagttaaaatcaacggcgacaagaacgtcatcctcgatttgaacagccatacgtacaacgtcgtgcagggagttggctccacaggcaccgagacgaacggcatgcagcttatcaagggcagcaccgtggtcatcaagaacggcaccatgacggccagcgcgaacgcgggcctgcacttcatgatcaagaactacggtgacttgacgctcgaaaacgttgtcgtgcaggcttcgggcctcggcaatggcgactcgaccgtcaacaactgcggcaacctgaccgttcggggagccaatgcgagtatcgccgctcctcaaggcggctatgcggtgactaccggcaactatgtcgtcggcacgcatccgcgcaccgttatcgaggccggcgccatcgacagcgtgtataccgagggaagcttctgggaagcgagcggtgctggtcaggatcatagcagctctacggtttccaccgagattaccggcggtacgatcggatcgatcggcatcagctattgggatgcggcgaaagatcttgcatggacgtttgacgtgggacccgatgctacgattgggaccgtcaacgatttcgcagctaacgtgggaaccggttactacgcaagcctcaaagacgccatcgcggcagctcaacctggtgatacggtgaccttgacgaacgacgtgcagctttctaggagcggagacgccttgcaggtgtcgggtgcggacaagagcatcgtgctcgatctgaatgggaagtcgatcgtcgccgatgaaacaatcggcgccaaagtgactgatggcgcgaaacttacggttagggactctgccgagggtggcaagatccagctcgtcaaatacggcttcgaggtggttggggatacgaagtacaccgacggatccaagccggatccgagcaatgcggtatcctctacgcttacgcttgagggcggtactatcgcgaacagcggtggctatgcagcaaccgtgtatccgtacggcaacggtgcgaccctcaatgtgaccggcggtaccatcgagaacacgtatgcgaacggagccgtcgatggcgggttcgccgtttcgggcaacggaactcgcaacggctctcttgattacggcggcatcgccgtcaatgtcacgggcggcacgatcaagagcgctcaggattgcgccatgtacctgccaggatatggcgatgtgagcatcacgggcggcaccgtcgagggctggaccggaatcgagatcgattccggcaacctctcgatcggcggagacgcggttgtgaagtcgacgtatcaaggcgacggcacgcgcaaatacaagaccagcggcgacggcaactacaatttcggagctgcgctggccgttgtgagcaaggggtcgcaggccgctacgggctattacggtcacatgaacattgacatcgccggaggcacgttggaaagcgcaagctactacgccatcgacgagtacaatcttgctcacgtgcaggataatgccaaggcaagcaccccgtatatcgactctcttgccatcaccggcgggacgttcaaggggtcggtaggcgccatcctgtctgataacatggccggattcgttaccggcggcacatattccagcgatcctgttgcgtacatccctgcggggtacgagacgacccagacggttgacagcatgtgggaggtggccgctgtcgctgtcgccaaggtgggcgatatcgagtacgcttcgttgcaggacgccatcgatgcgacggcggacggccaggccatttccctgatcgcgaatgcgaccgagaacgtcactgtacctgcgactgctaactgcacgcttgacttggctggctacacgctgaacggcgggacggttgcaagcaaggccgcgctgaccaacaacggtactttggtcatcaaggattcggtcggcggcggtgcggtgaagcgcaacgactcccagacggcgggctactacgtcgtggacaaccagggaacgatgacggtcgatggcggttcgttctcgaacaattctggtttttacgatgaagcgaagaatacatggagcgctgcttcgctggtgaggaacggcggagtcgcggcagatcgcgcgaacacgcttatcgtgaacggtggcaccttcgagcagcccgggttcatcgtcgtgaagaacgacgactacggcaagctgaccgtgaacggcggcactttccgcactcaggatcaaacgtacacccaaaaagatggcgtacaggctacgtctgtaaattcggcgatccagaactggggccaggcgaccgtcagcggcggcgacatccagggtgcgttgtgggttgatacgtggagcaacgatctgccatctagcgagatgaccgtgggcggcaacgtgcagttcaagggcaaagttgtcatgggcagctacgcttcccagcacggcatctccaagcaggccattctgaaggtgaccggcggatcgttcgacgtcgagagctggagcgttccgagcgaagccgctctggtgtccctgaccggtggcaccttcagtgcccagattccggcaggatgcgtggccgacggttacctggtggagccgaataccgataaaaccgtgtacaccgtgaagaaggcctctgagaccgagaacaaagtccaagttgtcgacaaagacggcaatgccacgggtgttgccaagagcgtcagcgaagtagttgaggaagtgcagaagtcgggcggctcgctggttctggcgggcgacgttgccgagactggcggcatcaccattcccacccctcaaactggaaccgaagcgaagccggtggccatcgagctgaacggcaacgatgttaccacgtcgggcactgatgcggcggttaaggtcggcaaaggcgccgagctggtcatcagcgatgcgaagggttccggcgtgatttcctcgacgagcactcaggctcctgccgtggaggttgccggtacggtgacgctcgacggtgccacggtgacaagctcgtccaacgacggcatcaaggttgcggcgggtgcaacgttgacggtgaagagcggcgtggttgaggctaaggcagcaactccgaagctggagtcccgctccgcgcgttctgcggctcccagtcagtacggcatctctgccgtcggcgagcagggcaagactaccacgctgaacatcgagggcggcaagatctccggcgaggcgggtgcgctcggcatcggccagaacgtgacctgctcggtaacgggcggcgtgttcaacagcaatgtttcgcagtatgtgaatagccagaactacaagcagaccgaggcaaacggcctgtactacgttgctccgaatgctgacaatgcgtacaacgtcgcgcagttcaagacgaatgcagccgatccgagcacgtggaccgcgccgactgctcctgaaggccagacgttcgcgggctggtacgccgacagccagtacggcactcccagcaccgcgaccgagggcactgtatacgcgaagttcgtgaacatcgccgacgtgatgaagttcaagggcggatcgcttcgcatggatgctacgccctcggtatcagaaggcttgcgttttgggtactcgctattccttccagaagaaatgcagtttgtgagctctggttggaagtacacaattaaaggcaccgactacaccaaggtggctgagcatcaagcgctgtatgactccggcgtgatcgatacaaacttggttttcctcaatgttcccaagaacgactatgcggaagatatttcagtcgaaatgtatgtaacgtacaaaacttccgatggcactacggtgacatttaaagaaccaactgcgcagattcgttcagtgaataaggtggcgcaattcatcctagattctccgaacgcttcggcggaagagaaagagtatgcacaaaagatcctcgcttagagggacgagagaaagagtaggtttaagcaatgaagtatgaaactcccagcatggaagtagtcgagttcgagggcaaggacgttgtgtgctcctccatgcctggcgacgataccgtggaatttcctcacgcactctaaagcatagcaagggcgacaggggcgcacgggttgcgcccctgtcgtgttgatgaagggcggttgatcgatggaacggaaacatatcgcaatcaccgctgcggttgccgctgcggcggtcattcttgttggaggtattggtttggcgtgcaccggcctgctaaatggcgaacccgacaaggcgacgcccgagaactcgcttccctctacggacaagcccgtccaagatgcgaagcagcagataagcgcgcctgatgagtccggcgatgcagtacagcctctgccaagcacggaaggctcttctggcgcagcggcttcgggcgaggggccggaggcggcgggcgatcagcccgcgcccgaatcgggcaatgagaattccggcggaaattctgccgataacacagtggacttcggctcgcccggatccgacaatccgtccgatgagcaaaagcctccggctgagcagagtccgtcgggcgatggagagcgttggacggggtactactaagatgccgcaattctgccttcagctggccgggctttcggtgtcggttgcatcgcagtactcacaggtggagcacatgtgttcaggctacgaggtgccgaaaggcgcctcgagcgatatcgacgtgcgcattgatccgcaggatatcgacgccgagcgcgacgagggcgcatggtcggacgcctacctggagacgcttgcggtgtatcggcagatcgccgaggccttgcctgcgttcgatcgcatgctggtgcatggggctctgctctcgttccaaggcgagggctacctgtttgcagctcccagcggcacgggcaagtcgacgcacgcgcttttgtggaagcgctttttgggcgatgcggtcagtatcgtcaatggcgacaagcccatcgttcgcctaaccggcgagggcgacgtccccgtagcgtacggcacgccgtgggcgggcaaagaaggctggcatgaaaacgcttccgtgccgcttcgcgccgtgtgttttctgcggcaggctccaacgaacagcatcgggctcctggacgcttccggttgcgttggccggcttttacggcaagtgtatctgccgttcgacagccgcgccgccgcgcgcacgttggaactgtcggacaggctggtcggatgcgttccgatgtacgaattggcgtgcgacgtgtcgcatgacgccgttcgatgcagctttgagacgctgacggggcggcgcttctcggattgggatataagcacatcgtgcctggatgcgagccaggcatgcaggggaaggagcgtgacgtgaggattaaggacgggttcgtgctgagggacgtggccgggcagacggtggtcatcgcaacgggcgaggccagccgcgactttcatggcatggtgaagctgaacgggacgggtcgcgttatttgggaagggctttctcgcggcgacgatgcggaagatatcgcccaggagctcgtgaaaagctacgacgtggatctcgaaaccgcgcaacgcgatgtcgcgtcgttcgtggccaccgcgcagaaagccggctttttggcatgacgacgctgtcgaccattgcggaggtgcttgagcgcgagggcgtctatgtgggggttaccagcggcgtcagcatgtggcccatgatccgcgaccgatgcgacaccgtcgtggtgcgtccgccatgcggtcggcttcggcgctttgacgtcgccctgtacaagcgcgatgatcgctatgtgctgcatcgcgtggtggaggtgctggctgattcgtatgtgatttgcggcgacaactgcataggccgcgaacacgacataaccgatgccgacgtccttggtgttctcacagggttttaccgaggcgaaacccaggtgaacatgcaagggacggggtatcggtgctacgtgcgcgcgtggtgcggggcgtatccggcgcgtcgagcgctcatgcgacttcgtcgctcgctcggtcgcgtcaaggctttcgttctcgaagcgggtaggtgcgtctgatgacgttgcgtgcaagcgccggagcgcaggtcgacgccttgcgcgatcggtttcgggtgcagcgatggatcgtgcgcgtgggcgggccggggacatggctggtggttggccttgcggctctgcgtgcggtggcggcggtcatcgcggtggcgttcgcccttgttatgagggcgtgcatcgatcaggctgtggcgggctcgtcccaagggttctccgctgccgtgtgcgcgttcggcgttcttcttgccacgcaggtgggcgtgctatgcacctgccgcgcgctctccgaggcggcccaggccacgcttgagaatcggtttcgccagcaagcgcttgcggcgatgctcgaaggtgatttcggcttggcgtcgagacgacataccggtgacgtgtctgcgcgcatgacgtccgatgcgcgcgtggtggccgagggggcaaccggagcgcttcccgaagcggcgtcctcgatcacgcggttactcgggtcgcttgcggtgatgggcatgctggcccctctgcttgccgcagtgctggtggcggtgggctgtctggttggcgcggtttcccttgcgttgcgctcgcatcagaaaaagcttcatcgttgcgtgcaggaggcggaaagctccgttcgttgctacgtgcaggaatgcttggaaagcttgctgatggtgcgttcgttcgggtgcgagcgcaaggtgattggccagagccgtcgggttatggacgagcatctgagctctcgcatgcgcaagatggcgttctcgaacgcctgcagcacgggtctttccgcggcaatgcaaggcggatacctcctgtgcttcgcgtggtgcggttgggggcttttgaatggctcggtcagctacggcaccatgatggccgttgttcagctgaccggtcaggtgcaggcgccctttgcgggaatgggatccctgttctcgcgctacgcctccatgttggctagcgcagagcgtctcatggaactcgatcaggccgtcggacgtttctcctgcgcaggcggagcgtacccgggcggacgcgactccgtggcagtgccggcttcctcgttggaatcgttcggtttggacaaggccttctttcgctacgatcaagacggcgcgcgcgaggctttgtgcgactgctcgttcgatgtgcacgcgggggaggtagtggcgcttgtgggggagagcggcgccggtaaaagcacggcgatgcgtcttctgctgggggcgtatcagcctgacgagggaagcgcgtatgtgcgtgcagaggggcgccgaatttcggcatcctcggttcgcccagggttgttcgcgtacgttccgcagggtaattgcctgctttcgggcacggcgcgcgaggtggttgcgtttgccgacggggatggcgctcccgatgacgcgcgtgtcagggacgccttgtatgcggcctgcgccgacgagttcgtcgacggcttgcccggcgggctcgatgctcgtctgggagagcgcggcgccgctctttcggaagggcagaggcaacggctcgccgttgcccgagctgtatacagcggcgcgcccgtgttgctgctcgacgaggccacgtccgcgctcgataccgcttgcgaggagcggatgatccgtcgtttgcgcgagcttcccgatcgcacggtgctcatggcaacgcatcggggcagggcggtggctctgtgcgatcgcgtcgtgcaggtgggcggtcgcgtatctacggagggctgcccgaatcttgaaagaaggaaaagcttatgagggaaagcgcgttctatttgattcacttgatgtcgtgtgcattgaacgacgtgcagccctgttcgctgcccgaaggcgcctcttgggatgaagtctacgcgttggcggagttcaacagcgtggagggcttggcttggacgtcggctcgccgggttcgcgatgttccggcagacatgctgaaggaatggagcgcgactgccgacatgaccttgtaccgttgcgtgagctacggcatcgagcgcgaggccgtgcttgccgctttggcggatcgcggcctgtcgtggcttcctcttaagggcgcgctgctggtggatttgtatccgtcgccccatatgcgatccatggcggacaacgatattctgtacggattcgtagaagaagaccctgccggtgggtttcggattgcgggggctaccgaagccgaccgcgagcgcactacggcgcgcgccgtgcgtgtggctgttgaggttatggaggcgcgcggttaccggaccatatcgaaaacagcaggcaatcatgagtcgttcgttaagaaccctcacttcaatttcgaacttcaccgcaggttggtatcgccttccagtccgcaggctgcgtactaccataacccctggcagcgtgccgtgcccgtccgcttggattcgaatgccgccgaaggcgaggcgtccgatgccggccggggcggaaggggatgggagtatcgcttctcggacgatgacttctacctgcacctggtttcgcatgctttcaagcattatgacgcatcgggttgcggtatcaggtttttggtcgatcagctggtgtttctacgtgcacgcggcaagggtctcgatcgatcctatcttgcagacgagctttccaagctgggtcttcgagattttgagcagtggacgcgcaggctgtcgtttcgcgcgctggaggatccgcgagcggcttgccgttgcgcgcaagggcgggacgctgaaagaggcccggcgcaaaagacagcgggtctttcggatgccgaccaggcgcgtcttctgcgcctgatgaacggcggcacgtacggtacgtggcagaccgtgatggagcgacgcctggaggccattcgcgcagactctcccaacgatgacgctgatgtcaagaagcgctacgttgcaagccgcgtgttcgtcagcgaggagcagatgcaagaagcctttccgttcttctggcgtcatgcatggatgcgtcccctgctcccgctttaccggatggggcggggcctggtacgcaaccctaaaaagatagcgtgcgagataaaggcgctgcgtcgcttgcgctgatcagctggcctcgccgtccgttcaaagcaggcgaaaccgtcgaagccgaaaagcccggacgttcccgatggacgagcatggccgctcagcagtcgagcgtccggctttgcttgcgtatcttgtgttcaggttgtgtgcaagggggttcgcgaatgatcgccaaaaatcgattcttgaatacaaagcgttttctgcgtataattctcggttgcgtctggacttagatggatacacccggacgcgtggcaaccggagtcgcacgtgcccagcctccctgcggcacatcggcggcaatcggagccacgaagagacgaaggattctcggtgtacggagaggcgtgcgagcgagaatccgcagaaaggaaagcaatgggagtcaaacagtacaagccgaccagccccggccgacgcttccaaacggtctcggacttcgccgagatcacgacgtcgacgccggagaagtcgctgcttgcgccgctgtccaacaaggcaggacgcaacaacaacggccgcatcaccacccgccatcagggcggcggtaacaagcgccgttaccgcatcatcgacttcaagcgcaacaaggacggcgtccccgcgaaggtcgcgaccatcgagtacgacccgaaccgcagcgcccgcatcgccctgttgcactacgtcgacggcgagaagcgctacatccttcatccgaagggcctccgcgtgggcgataccgtcatgagcggtgtcgaggccgacatcaagccgggcaacgccctgccgttggccaacatccccgtcggtacgctcatccacgccgtggagctgcagccgggcaagggcgccgctatcgcccgttccgccggcaccagcatccagctcatgggcaaggagggcgactacgccatcctgcgcatgccttcctccgaaatgcgccgcgtgctcatcacgtgccgcgcgacggtgggcgaggtcggtaacgccgagcactccaacatcaagatcggcaaggccggtcgcaaccgttggaagggcatccgtcccagcgttcgcggtaccgtcatgaacccggtcgaccacccgcacggcggcggcgagggcaagaacaagtccgctggtcgtcacccggtcaccccgtggggcgttcccacgaagggccatcgcacccgcaatcccaagaaggcttcgagccgcttgatcatccgccgtcgcaagaagtagcgcaaagcgttaaggagtaatagtgagtagaagtttgaagaagggtcctttcgttgaaccgcgccttcttgatcgtatcgagaagatgaatgcggcgggcgagaagaacgtcgtgaagacctggtcgcgctcgagcaccatcttcccggaaatggtgggtcacaccatcgccgtgcacgatggccgcaagcacgtgccggtatacgttacggaatccatggtcggccacaagctgggcgaattcgccccgacccgcacctttaagggtcattccgccgacaagggcaagaagagataagaaggggtgaaaacaatggaagctaaagcaattgcacgctatgtccgcgtttcgccccgtaaggcgcgtatcgtcatcgatctgattcgtggcaagtccgtgcccgccgctcgcgagatcctgcagttctccgaccgcgccatcgccgaggttgtcgccaagacgctgaactccgctgtggccaacgccgagaaccagcaccacgtgcgcccggaaacgctcatcgtgaaggccgccttcgccgacgaaggccccacgctcaagcgcatccgtccgcgcgccaagggctccgcttcgcgcatccgcaagcgcacgagccacatcaccatcatcgttgcaccgcgagaggaggcataagccgcatgggtcagaaagtaagccccaccgggttccgtctcggcatcaccgaggaatggcgtagccgctggtacgccgacaaggattacgccaagaacctggcaaacgacttggccatcaggaagtttttggacaagcagctcgcccgtgccgccgtctccaagatcgagatcgagcgcgccggcgacaagatcaagatcatcgtgaccaccgcccgtccgggcgtcgtcatcggcaagaagggcgctgagatcgactcgctgcgcaagaagctcgagaaggtcgccaacggtccggtgtccatcgaggtcgtcgaggtcaagcgccccgagctcgatgctgcgctcatcgcgcagtccgttgccgagcagctcgagggacgcgttgcgttccgccgtgcgatgcgcaaggccgtccagtccgcccgcaagagcggcgccaagggcatccgcatccagtgctccggccgtctcggcggtgccgagatgagccgtcgcgagtggtatcgcgaaggtcgcgtgccgctgcacacgctgcgtgccaagatcgactacggtttcgccacggctgctacgacgatgggctccatcggcgtgcaggtgtgggtgtaccacggcgaagtgctccccggccagaaggctccccagccggcgctcgagggcagctctcgccccagccgtccccgtcgcaacgatcgtaacgataggagggcaaagtaatgctcgtacctaagcgcgtgaagcaccgcaaggtgcagcgtggttccatgaagggcaaggccaaaggcggcacccggttgaaccacggcgaatacggcatccaggcgctcgaagccgcttggatcaccaaccgccagatcgaggcagcccgtatcgccatgacccgctacatgaagcgtggcggcaaggtgtggatcacgatcttcccggacaagcccatcacgaagaagcctgccgagactcgcatgggttccggtaagggcaaccccgaggcatgggtcgcggtcgtcaagcccggccgcatcatgttcgagatcggtggcgtcgacgaggccgtcgccaaggaagcgctccgcctcgccatcaacaagttgcccatcaagtgcaagattgtttctcgtgaaacggaagggcaggaataaatgaaagcagcagagatccgtgagctgtctgccgacgatttgcaggcgaaactcaaggaagcgcgcgcggagcttttcaacctgcgcttccagatggctacgagccagcttgacaacaccgcccgcgtgaagcaggtcaaaaaggacatcgcgcgtattcagaccgagatgcgcgcccgcgagctgagcgcatagcccgtcggctaggaaggttggatacacatgagcgaagaacgtaactcccgcaaggtccgtcagggcgtcgtggtaagcgccgtcaacgacaagacctgcgtcgtgcaagtcaaggagcgcaagccgcaccccgtgtacggcaagatgatgacgacgacgaagaagttccatgcccatgacgagaacaacgaagccggcctcggcgacaccgttcagatcatggaaacgcgtccgctgtcgaagatgaagcgctggcgcctcgtgaagatcgtcgagaaggcccagtagtcttgcgcgctcgtcgcgaaagactatcgagatgaaagttaggttgaagcaatgattcagatgcaaaccatgctcgcagtggccgataactccggcgctcgcaaggtgcagtgcatcaaggtcctgggcggctccaagcgccgttacgcgggactgggcgatgtcatcatctgcagcgttaaagaagccgcgccgaacaccaacgtgaagaagggcgacgtcgtccgctgcgtggtcgttcgcgtgaagaaggaagttcgtcgtgccgacggcagctacatcaagttcgaccagaacgcagccgttctgatcgacacgaacggcgccccgcgcggcacgcgcatcttcgggcccgtcgcccgcgagctgcgcgacaagaagtacatgaagatcgtgtccctggcacctgaaacgctctaaggaggtgtgcgcaaatgaacagcatgaacatcaaaaagggcgataaggtgaaggtcctggccggcaaggacaagggcaaagagggcacgatcctgcgctcgctgccgcagaagcagcgcgtcgtcgtggagaaggtcaacatcgtcaagaaggctcttcgccccacgcagcagaacccgcagggcggtatctcttcggtggaggctcccatccacgtgtcgaacgtgatgctggtgtgcccgagctgcaagcagcccacgcgcgtcagcaacaagcgcgacgagaacggcaagaaggtccgcgtctgcaagaagtgcggcaaggacatcgactagcacatgaaggcggcgcggcgcttcggcggcgcgcccctttgagcaatgaccccctccggccaggccggttggggacgcagggtcggaaatcctgcgtttaattcatcgaaaggatacaggaaaacatgactgctcctcgcttgaaggaaaagtacaccaacgagatcgtggccaagctcgagaaggatctcgccctcgacaacgtgaataaggttccgcgccttgagaagatcgtcgtgaacatgggcgtgggcgccgccgctgccgaccacaagctgctggacgccgccatgggcgacctgcgcatcatcacgggtcagcagccctgcgtgacgcgcgccaagaagtccatcgccggtttccacgtgcgcgaaggccagcccatcggctgcaaggtcacgctgcgcggcgaccgcatgtgggagttcctcgaccgtctgctggccacggcgcttccccgcgtgcgcgacttccgcggcatctcgccgaccagcttcgacggccgcggcaactacaccatgggcgtcaccgagcagcttatcttctcggagatcgattacgacaagatcgatcgcacgcgcggcatggacatcacgttcgtgacgacggctccggacgacgacagcgccttcgcgctgctcgacgcgctgggcttcccgttcaaggacaaggaataacccgcgttgtcccacccaaggctgccccaaggcaacctgcgctgaaacgtgcactcgagcccgtccggacgatcggacgggctggatataagaaagaaggatttgcatggctaagaaatcgatggtcgccaaggccaagcgcgagccgaagttctcgacgcgtcagcacaaccgctgcacgcgctgcggacgtccccgcgcctactaccgcaagttcggcctgtgccgcgtctgcttgcgcgagttggccaacaaaggcgaactgcccggcgtgaccaaagcttcgtggtaagccacacgacgattacgctcgggtgtgccacggttcaggcggaggcgttacgggcgccgacgaaccgaatcgacaggctcatcacggaccaaaggagaaaatcactatgaccatgaccgaccccattgcagatatgcttacgcgcgtgcgtaacgctaactctgccggcaagccgacggtgtccatgccgtccagcaagaaacttgtcgagatagcccgcatcatgcaggaagagggctatgttcagggctacgacgtcatcgagggcgagccgcgcgctacgctcgagatcacgttgaagtacggtgacaagaaggccaagacgatccgcggcatcaagcgcatctcgaagcccggcctgcgcatctacgcgggcaaggacgagctgccccgcgtgctcggtggcctcggcacggctatcgtttcgacgagcaacggcgttatgaccgatcgcgatgcccgtaaaaagggcgttggcggcgaagtcatcgcctacatctggtaggaaagggagggatagatatgtctcgtattggcaagctgcccgtgaccgttcctgccggagtcgatgtgaccatcgacggcacgacggtgacggcgaaaggggcgaagggcgaactgacccgcaccttccccgagatcatgaccatcaagcgggagggcgacgacatcatcgtcgagcgtccgaacgactcccgcgaagcgaaggcctaccacggcctcgtgcgcacgctcatcgccaacatggtggagggcgtgtctgccggcttctccaagaagctgcagctcgtgggcgtcggctaccgtgccgcgctcaagggcaaggatcttgagatgcagctcggcttctcccatcccgtgctggtggaggctcccgagaacatcacgttcgaggtgcccagccagaccgagatcatcgtgagcggtccttccaaggagcaggtcggccaggttgccgcgaacatccgcaagtggcgcaagccggagccctacaagggcaagggcattcgctatgagggcgagcatgtccgccgcaaggtcggcaaggccggcaaggactaggcgcgagccgcgaacgactgagatcgaagggattatcatgaacaagcttcagaaaaagcaggctgcgctggctcgtcgccatcgtcgcgttcgcggaaagatcgccggtacggcggctcgtccccgcgtgtgcgtcacgcgcagcaactccaacatgtacgtgcaggtgatcgacgacgtcgccggcaagacgatctgcggcgtttccacgctcggccccgatttcaaggccacgggcaagagcggcgcgaccgtcgagggcgctgccgccctgggcgcgatcgtgggcaagaaggcgcaggaatccggtgtcacggaagtcgtgttcgaccgtggcggcaacctgtatcacgggcgcatcaaggctttggccgatgccgctcgcgaagcaggcttgaaattctagaaggggttaaggtctatggctcgtaacaaacaagacaacgccgcggtccccgagcttcaggagcgcgtcgtctacatcaaccgcgtgtcgaaggttgtcaagggcggccgccgcttcgcgctcaccgcgctcgtggtggtcggcgacggcaacggtcgcgtcggcgtgggcatgggcaagtcccaggaagtgcccatcgccatcaagaagggcgtcgaggacgcgaagaagaacatgttcagcgtgccgctgacggccgagaagacgctgccgcacgagatcatcggcgagtacggcgccggtcgcgtgctcatcaagccggctacgcccggtaccggcgttatcgccggcggcgcggctcgtgcggtcatggagctggcgggcgtcaccgactgcttcgccaagtcgctcggcaccgacaacgtgatgaacgtggtcaaggccaccgccgagggcctcaagaacatggagagccccgagcaggtttccgagcgtcgcggcatgtccgtctccaagatctacggctggaaggagaagaactaatggctgacgcaaagaagaccctgcgcatcacccaggtgaaaagctccatcggctacaaggaagaccagggcaagaccctgcgcgcgcttggcctcggcaagatcaaccgctccgtggagcaggtggacaacgagtccgtccgcggcatgatcttcaaggtgaagcacttggtcaaggtcgaagagatctaatcttcgtggtacttggcaggtaggatataatgattcgtcggcgtgccgcaacggcacgccgatggtcgatttacggaagtttgctggcggcgagctgccagcgccgggaagggtcccggacagcgaaagaaggagaaactaacatggaactcaaggatctcaagccggctgaaggttcgcgcaagccccgcaagcgcgtgggtcgcggtcccgcgtcgggcacgggcaagacgtccggtcgcggtatgaacggccagaagtcgcgtgctggcggcggcaagggtgcaggcttcgagggcggtcagacgccgctcgctcgtcgtctgccgaagctcccgggcttcaagaacatcaaccacgtggagtacctgcccgtcaacgtgaagcgtctcgaggagaccttcgaggccggcgacgtggtgaacggcgaaagcctcaaggccaagggcatcatcaagcatgccgacgcgctcgtgaaggtgctgggcgacggcgagatcaccaaggctctcaccgtgcaggtggataaggtgtctgcttccgccaaggcgaagatcgaagcagccggaggaaaggtcgaagagccttgctaagctcgatcatcgatgcattcaaggtaccggagctgcgcaagaagatcttgttcactctggctatcctcgcgctgtatcgtttcggcgcgtacgtgccggtgcccggcatcccgttcaacgagttcgcgaactcgttccaggactcgggcgtgtccatgaccatgctcgacctgttcacgggcggtgcgttgtcgaacttctcggtgttctcgctgggcatcatgccctacatcacggcatcgatcatcatgcagctgatgcagggcgtcattcccgccatcgggcgctgggctaaggaaggcgagacgggtcgtcgcaagatcacgcagatcacgcgttacctg

SEQ ID NO: 9141 - DNA, 730 bp, Unknown
  gut microbiota DNA sequence
tttctcggttttctcgctgggcatcatgccctacatcacggcatcgatcatcatgcagctgatgcagggcgtcatccccgccatcgggcgctgggctaaggaaggcgagacgggtcgtcgcaagatcacgcagatcacgcgttacctgacgttgggtctgggtctgatcaacgccatcggctacctgctgctgttcaagtcgccgcagtacggcgtggtgttctccacggaggtgccggagatcctcaccgacatcctcgtcgtgttcacgctcgtggcgggcactgcgttcatcatgtggatgggcgagcttatcacgcagcgcggcatcggcaacggcatgtcgctcatcatcttcgtgagcatcgtgtcgcgcgtgccgagcgccattttctcgtcgatgaacctcacggccgataccactatgggcgtcgcgattacggtggtcaccctgcttgtggtgcttgcctgcattcccgcgatcatcttcgtggagcgtgcgcagcgccgcatcccggtgaactatgccaagcgcgtgcagggtcgcaagatgatgggcggccagtccacctacattcccctcaaggtgaatgcggcgggcgtcatcccgatcatcttcgcgagctgcctgatctacttcccggcgcagctggcggctctgttcaacgtgggctggctgacggcggtggccgacgccatctccaccggctgggtcaactggatcctcacc

SEQ ID NO: 9142 - DNA, 11483 bp, Unknown
  gut microbiota DNA sequence
aagctgcctgatctacttcccggcgcagctggcggccctgttcaacgtgggctggctgacggcggtggccgacgccatctccaccggctgggtcaactggatcctcaccgtgctgctcatcgtgttcttcgcgtacttctacacctccatggtgttcaatccggaggagacggccgacaacctgcgcaagcagggcggcttcattcccggtgtgcgtccgggcacggcgacggtgacctatatcaagaacgtgctgcatcgcgtcacgctgcccggcggcatcttcatcgccgccatcgcggtggtgccgacgatcatcttctacttcaccggcaatacgctcatccaggcgttcggcggcacttcgatcctcatcatgatcggcgtggccctcgacaccatgaacaaggtggaaagccagctgaagatgcacaactacgaaggtttcttcaaatagggggatctgtcgaagtaaaagccctgatcaagcgactgatcagggctttttttattgccccttccgacgcctgtgtacaagatttgtacaaacgacgactatgcgtgcgccgaacgtgcatagaacgctgacgccgctccactgttgcccctgaactttgaaaagaggtatgatgctcggcatcgtgaccttggataggggagaagagaagggcatcgttgtctttgatcggcatctgccaaacagcgaagcgtgcagcaatggaggaacccgccgcgtcttggcagcgagagggagtgagtgggcatgacgctaggaagcagcccgttgtggttcgggttcggctcttacccagctgaatttgacaatctggacgaacctgataacatagtcttcgacagttccgggggcacctctcaacgatgtgcaaaagccccggactatttgtttatggacggatttcaacccaaggtgccttccaagccgtttcttggatacggcgagctcatagagcatctggcagataaaggcatcgagatcggcgacgagaagtccgcgcacgccgtgctctcccgagtcggctattatcacttgaatgcgtatcttccagcggtcaaaagaacgatcggtccgcctgtctcgcttgcatcggtctataacgcctacgtgttcgacatgatgatccaagctatcctgtttgaatacatatcctatttcgaggtcgctttcagagcgcagatggcgcatggccttgcgcgtcagtacggagaattcgcccaccttgttccggatgcgttcaaaaacggaatggagcataaagacatggtgcggcgctaccgtattgaacgcgaccgcaagagacggacgggggaatcgttcgtcgtccacaacatggacaagtacggagagcttccggtgtgggcggccgtagagctgatgcctctcggaatgctgtccaaggctttcaagaacatggctgcaggtgatgcccgcgatactgtctgtgatttcttcggcttcgactcccgtgtgctttcgagttgggctcattctgtctcgttcgttcgcaatgagtgcgctcaccagggcatcctctatggtcgcgccattcccaaaccgcctatgcgccaagcttcaatcgaaggaatagatagcaggtcgacattctgccagtttgctgtgttgacaagtcttttcaagaagaacatgagggacttgagcgttcccatgatatgcgccttgcgaagggcaatagagcttccaccgttcccgctcgcgtggctgttcggcttcgaggacggtcagatcggcgatgcggagccgccgtgggttcgcaagctgtgtgaatgcgccgggatagacggggacatcacgcgcagatacatggaatcggaagtcgcagccgagaacatgaggaacaattgggctacggaagggtagggaagggattcgcgacggtttggcggcgtttcgcttgcgatcgagtcgttgacgggctctgcctgtctttctgttgaaatgcgcgcgtacggcgtagggctttgatacaatacggcgcatcgattgtatgtcgaaaggattgaaccatcatgaatatcgtgttgttaggggcgccgggtgctggtaagggtacgcaggcggccaagctggttgaagagttcggcacgccgcacatctccacgggcgacatgctgcgcgctgccgtaaaggccggcacgccgctggggcagaaggcgaagtctttcatggacgcgggcgacctcgtgcccgacgatgtcatcatcggcctggtcaccgagcgcctgcaggatccggacaccgagaagggcttcatcctcgacggcttcccgcgcacgtccgcccaggcggtcgcgctcgacgccgagctgtccaagctgggacgcccgctggacgcggcgctgctcgtggacgtggatcccgaggtcatcgtcaagcgcctcacctcgcgtcgcatgtgccgcgactgcaactacatcggcaccgccgccgacgagacctgccccaagtgcggtggcgagatgtaccagcgcgacgacgacaacgaggccacggtgcgcaaccgcctcgacgtgtacgagaagtccacggctccgctgatcgactactatcgcggctgcgacctgctcgtctccatcgacggcgatcgcgatccgaacgtggtgtacgccgacgtgaagcaggcgcttggtctgtaaagcgcgtccgcgcgctttttgcacgcaatcttgaaggcggacggggcttgagctgcctcgcccgccttttttcatctataattccataccaatatgccgaccgtacgccagaacatagcctatgcctacaacggcttcatgagcaggcaccgcttggcggcggttcacctgatcaagagcgcgcttgccatcgtactgatctcgcttctgctcgagacgttcctgttcaacatcaactacttcacgtcggcgaactacaacaccatctcgctgaacgacaagctcaccttgcaggagaccgttgacgaccagtacaaggtgaccgcggtgaaccacgtgctggagttctcgaacctcaacaccgaggtgcacaacatctggctgaacttcgactaccggcagcctgcgcaggatctgacggtgaagatccagttcactgacgacgcgcaccatacgtacttcgactccacggagtacacggtaggcgtgccaccggtgggggtgtccacgttcagcgatcagagcgagtacatcaacctcaacacgacgggcctcgtgaagaacctgcgtatcgagatcgcgggcgacgacgtgagctatcccatcaagctgagcgacatcgtcctcaacgcgcatcacccgttcgacttcaacacgacgcgcttcttcgtctgcatgggcctgctggcgttggcgttcgcgttccgtccgggctcggccatctaccgcatcggcatcgtcagcgagccgcgcaagtcgaaggccgccatcgtcgcaacggtggctatcgaggtgtgtctgctgggctcgttcctgttcctgggatcgaatctcgtgggcgtggccacgcaaagctacaacagcggctcgtgggacggcaagagcctggtcaacgtattcgaggtgggcggtgacaacgcgcagcagtacgcggaattggcgaaggccatggctcacggccagctgtacctggaggaggagccgccgcagtggctgcaagactccaacgacccctacgacaagggcgcgcgcgacgagatgcagaaggagacgggagagccctatcttttcgacgtggcgtattataacgggcactactacgtgtacttcggcgtggtgccggtcatattgttctacctgccgttctacttgctgacgggcgcgaatttccccacggccatcggcgtgctgatcgccgtcgtggcgttcgtgttgggatgctcggcgctgttggaccggttcgcgcgctaccacttcaaacgggtgagcttggggttgtacctgttgctgcagataccgctggtcatgtgctgcggcgtgctgtacctgctgaagttcccgacgttctactcgctgcccatcgcactgggcctggcgttctcggtgtggggcctgtacttctggatgaaggggcgcgcttcggcgggacccgagaagtggtaccttgcgggatcgctgtgcatggcgctggtcgcgggatgccgcccgcagctgctggtgctgtcgttggtggcgtttccgttgttctggcgcgcgtacatcaccaagcgccggctgctcaccccgcgtggcgcacgcgagttcgcctgcctcatcgcgccctacctcgtggtggcggccggcctgatggcgtacaaccatgcgcgcttcggctcgttcacggacttcggggcgaactacaacctcacggtgaacgacatgacgaagcgcgggtggaacatcgggcgtttggccccggcgctgttcgcttacttcctgcaaccgcccagcgcaacgggcgtgttcccgtatttgcagccggcgccgttcgataccacgtacatggggcagaccatcaaggaagtcaccttcggcggcatcttcgcgtgcctgccggtgctgtgggtgctgccgttcgcgaagcgcgtcctgcagctgcgcatgagccagcgctccacgcgcaccatcgcgggcgtcatcgtcgtgctgctgctgggcggcgtcatcgtggcgctggccgatgcggagatggccggcatcctgcaacgatacttcgccgacttcagcttcatgttcttggccgcggtggtgctgctcgtgtttatcgtgaacgagaacctgcagcccggttcgaccgtgcagaacctgctcatgaaggtgctgctcgtgctggtggccgtgtcggtgctgtacagcgcgcttctgtgcttcgtgcccgagacgggctggtactccgacgtgtatccgtgggcgtaccgcgacatcatcgaaaccgcgcagttctggacatagatccgtatccgcatccgttcgatccgagagaagagaggttccatggaattcatcatcgccgagagcaccgaggatatgagccgtcgcgccgccgaccgcatcgcgtcgttcgtcgaggccgacccgtcgtgcgtgctggggctggccacgggcacgacgcccatcggcttgtacgcgtgcctcgttgacgattgcgcgcagggcaagatcagcttcgccgacgtgaccacgttcaacctggacgagtatcgcggcctcgatcccgagcacgatcagagctaccgctacttcatgaagaagcacctgttcgatcatgtggacatcgatcaggcacgcacgcatgtgcccgagggctcgaaccccgatgccgaggccgtgtgcgcagtctacgaacaggccatcgaagaggcgggcggcatcgatttgcagctgctcggcctcggcccgaacgggcacatcggcttcaacgagcccgaggacacgttcccgaaggccacgcactgcgtggatctcaccgagagcaccatccaggcgaacagccgcctgttcgaccgcgttgaagacgtgccgcgccaggcgtacaccatgggcatcggcaccatcatggccgcgcgcagcgtgctcgtggtggtggagggttcccacaaggccgagatcgtgaagaaggcgttcttcggcccggtcacgcccgaagtgccggcgtccatcctgcagttccatcccgacgccaccgtcattgtcgatccggcagcgggtgcgctgtgcaagtaaggggcggctcggttctgacgggcgcgggattcgcgtccgccgacatcgtcatcgaaggcgagcgcttcgcggctgtcgacccgcagggcactgcggcgacggcggctgacggtcaggtgctcgacgcgtcgggatgctacgtcgttccgggcctcatcgacctgcatttccatggatgcgtggggcacgacttctgcgacggcaccgaagaggccatcgacgccatcgcgcggcacgaggcctcgtgcggcgtgacggccatctgcccggccacgatgacctatcccgaagacgtgctggctcccatcatggatgccgcggcctcctacgaggcgaagcgcgacggggcggcgctcgtgggcatcaacatggagggtccctacatctcgcccggcaacatcggcgcgcagaaccctgcctacctccatctgcccgacgaggcgatgttccgtcgcttgcaggaacgttcgggcaatctcatcaaattggtcgacgtggcgcccgaggtggacggcgcactcgatttcatccgctcggtgtcgtccgacgtgcgcgtgtccatcgcgcatacgcaggccgactacgataccgcgtgcgcggccatcgaagccggcgctcggcagatgacgcacctgtgcaacgccatgccgccgctgcaccaccgcaagcccggccccatcggcgcggcgttcgaccattcagaggtgatgcccgagcttatcgccgacggggtgcatatccatccgtccatggtgcgtctcctgttcgccgctttcggagccgatagggtcatccttatcagcgactcgatgatggcgacgggcctcgacgacggcgagtactcgctgggcggccaggatgtcaccgtgcggggcaacgtcgccacgctgcgcagcggcactatcgcgggctcggccaccgacctcatggcgtgtgtgcgcgtcgccgtacgcgacatgggcatcccgctggatgcagccgttcgggccgccagcgccaatcctgcccgcgcgttggggctggaaggggagcgcggcagcatcgaggtcggcaagatcgccgacgccgtggtgctcgatgagaacctccgcgtgcgccacgtgatcctgcgaggcgagctgctggggtagctttctgcgttcatcgcgccgggcgagggctcggcagcggggcgaagggttccgtgcggaggcgaccgacgctctcggccgctctgtgcagagcccttcgccctttgccgttttttagggggggcggcagccggcggcgctaccgttcggtgacgcttcattctctttgacggctttccggtttcttcttggcatgctcgtcctatactctacttttttcgtcggataaacgaggaagggcgttgcctatgtcgatggaggtgctggtgcccgtcgcaggtatcttggcggtgttcgccgccatgctcgtcgtgctcaagatcatgcgatcgaagggcctaagcttcacggcgagggtgttcaccgcgctcgggctgggcgtcctgctaggtttgggaatccagctgttgctcggccgcgacggggatgctgccacgacggcgctcgactggatatccatcgtgggacagggttatatcggcttgttgaagatgctcgtcatgccgctcgtgttcgtggccatcgtcggggcgttcacgcgcgcggaggtcaccgagcacttcgggcgcatcgccttcgcggtgttggccgtgctgctgggcacggtgaccgttgcggccgtgctaggctggggtgctacggttctgaccgggcttgcgcatgcgggcttcctcgatgccgcgacccccgatgccgccgagctttcgtcgctcgcctcccagcagagcgaggctgccagccttacgctgccgcaggaaatcctctcgttcatcccgacgaaccccttcgccgacctcgctggtgcccgatccacctccaccatcgcggtcgtcatcttctcggccatcctcggcgtcgcatatatcaggttgcgcgataaagacgttgaccaggcagacttcttcaagagcttcatcgacagcctgtacggcatcgtcatgcggatagtggccatggtgttagggctcaccccgtacggtatcctcgcgctcatcgcgaaggtgatggccgcgagcgattaccgcgccatcctcggactgggaaagttcgtgctcgtgtcttacggcgcgttgctggcggtgctgtgcgtgcattgtctcatcttgctggcgaaccgcgtgaatccggcgacctacttcaagaaggcgtttcccgtgctcagcttcgcgttcgtatcgcgttcgagcgcgggcgcgctgccgctcaacatcgagacgcagcataaagccctgggcgtggacagcgcgtcggcgaacctcgcggcaagcttcggcatgtctatcgggcagaacgggtgcgcgggcgtgtacccggcgatgctggccaccatcgtggcgcctaccgtaggcatcgacgtgctgtctcctacgttcttcgtgccgctcatcgccgtggtggccatcagctcgttcggtgtggcaggagtgggcgggggagcgacgttcgcctcgctcatcgtgttggggacgatggggcttcctatcgaggtggtggccgtcctcgcatccgtggagccgctcatcgacatgggtcgcaccgccctcaacgtcagcgactccatggtggcgggcattacagcctcgcatgttgcgggcggcctcgaccgctcggttctggacgatccggaggcgcgtgtcaccgccgaggcgcacgtgagctgacgggcatgaaaaaagccctggagggggatgatcccctccagggcttcgcgcatcggattcggtgcgtcctagccgatggcgtcggcgaaccaggaagtgatggactgcgggtgggtgatggccgtccccaccacgatggcgaaggctcccgcctccatggccgcctgcgcatcggcgagcgtgtggatgcgaccctcgcagaacacgggcacgtcgcccgctgcggcgacggcctcgcgcaggaactcgaggtcggggccggcggttttctcgcggccgccgggcacgtagcccgccagggtggtggacacgatgtccgcaccggcttcgagcgcccgttgcacgtcgtccatgcaggagcagtcggccatgatcagcgtttcaccgcgcaaagcctccacggtctcctcgaaggtgcgaccgtcggggcgggggcgtgccgtggcatcgatggccaccacgtcggagccggcggcgatgcaggcgcgcgcgtggcgcagcgtcggcgtgatgtagacgccgtcgtgcccctctttccaaaggccgatgacggggatttccacctggcctttgatggcggcgatgtcggcaaggccttggcagcggatagcggctgcgccgccgcgttcggcggacagggcaacctgcgccatggtttcggggtggcgcatcggctcgcccacgtaggcctggcagctgacgatgagcttgccttgcagggaggaaatcaggggatcggtcatgatcgtcctttcagggtatcgagcaggtattcggcggctccgatgagcggggctcggctgccgagcgcggcatcgacgatgggcaggccgtgcatcacggaaggcgcctgtcgctcgaagccttcttgcagggcggctcgccaggcttttccggcgttgcataccgagcctgagagcacgacaagttccggatccagcagatccgtccaggttgcgatggcttcgccgagcaccgcgcccgcctccagaatgatgcggcgtgccagctcctcgccgtctgcggcgcgcctggctatctcgtctcccgcaaggcgttcgcctcctgctgcgacgtaacgggcttcgattccgctgccggccgcgatggattcaagctcgctggcggtgccgcaggcgcgcggcgtgcccagcgcatcggggcagggcgttcgccccagctcgcctgcgaacccgtgcgcgcctagcagcacgcggccgttcgccacgatgccgccgccgagcccggtgcccgctgcgataacgaagcaggtttgagcgccgcgggcagcgccccaacgagcttcgccgagcgcatgagccttcacgtcgttgagcacggccacgggaaggccgagcgacgcgctcagacgctcggctacgggctgaccggtccagccgggcatgagctcgttggcgaacgcgatgccgcccgtgcgcacgtccacgagcccggccgtccccacgccgatgccgacaacgtcgtcttcggcatcggctaccacgtcggccacgagcgaggccagggtgtccagcacggcgctgccgccgcgctgggcttccgtgggaacgctgcgcagggcgtccaccgtcggcgccgcatcggcggcggaatagcgcacgagcgcacccgccatcttcgtgccgcccacgtcgaaggcggcaatcgtgcatggatgttcgacgctcatgcggcgctcacgctacttgcaagccggagcgccgggcgagacggggcacgcatcccagtgcgcctggcggatcggcgcgtcggcgtccatgagtcccgcgcgcttcagcacggcgacgatctgctccacgtcctcgccttcgagcgcgcacacgggctcgcgcatctggttcgtgttgaacacgcccatctgccacagcgccgtcttgaacgcgcccacgcccgcgccgaagcccacggtggccttcacctcgcgcgtgacgtacatgaggcgtgcgaggtgattctggatctcgcgcacgcgctcccagtcgccggcttgcgcggcgcgccactgctccacgtagcttgccggatcgatgttcgccagacccggaaccgagccgtcggcaccgcccaggtaggcgccgtccacgaccacctcgtggccggtcagcacttgcagcgggtggccggcgtcctcgttctgcaggcacagccagcggaacgacacgtcgtcgcccgaagagtccttcacgccctgcagcacgccgtcctcgccgaggcgcacgagcatcgtgggatcgagcttcgtgtgcacgcaagcgggcaggtcgtaggcaaacagcggcaggtcggtgtgctcgcggatggcgcggaagtggcgttccacctctttgggaccgccgagggcgtagaagggggcggttgccacgagggcgtccacgccgtagcccgtcgcgcgcttggcctggtcgaccacgcgcatggtttccatgtcgatgatgcccgtgagcaccggtacgcggccgtgcaccatggcgatggcctcttgcagaacgtggtagcgctgcgcgtcggtgaggaaggcaacctcgcccgaggatcccaggaagaacagaccgtcgacgcccgcgtcgatcatgcggttgatggagcgctcgagcgcctcgaggtcgagctggcgcttctcggtcagcggaatgacgacggggggaatgacgccgcgaaacggtgaatcagtcataggagcaagcctctctctgttcgtcggtaaacggtaaaagggtaaactccctcagcgtaagcgtcaacgcaagagggcaggtcgccacataaaaagcgcccccggttcaaccgagggcgcaggggaaacgtcgtaagcttacttgcccaattcgggatgcagaagcgacggagccgctcccagaagcagcttggtgtaggcgtctttcgggtgctcgaacacgtccttcgccgcgccgcgctccacggcctctccggcgttcatcacgatgatctggtcgga

SEQ ID NO: 9143 - DNA, 1917 bp, Unknown
  gut microbiota DNA sequence
ctgcggcgttgggcaagcaggtcgctctgtacgacgacagagccacgggcaacgtgttggcatcgcatgtcggcgcggacggcggctttcgggacttccaggtggtgagcgctgccaacacttcggtgtgcacggtgggcactgactcgtacatcatcaagaacgacggcgatgccttgttcgtgttcggcgacatcaagccgctcgccatcgtgaagaagaccacggccaaagaggcggcgggggagacgttcttgttcacggtgatcaaccgccttggggacggcaccctgcagacccgctcggtttcggtcaagtgctccgacaggccggaccaggacggactctacacggccagcgtgcaattgcagttgggccagggcgagtacttcgtgagggaggacgagtcctgggcgtggcgctacgggcagtcgtaccaggtgaacggcatgaccgttccttccggtgccaacggcgcgcgcgtggtggtctcgcgttcccaggacggctcgaccgtggtgtgcgagaacaagctggaaaacgacgcgtggctcgatgactcggctcgcgcgatcaacgagttcggacagggggcgatcttgtaatgggcaggggaatgcatgcgaggtcggacgagcgtcgggctgcggcgttcgatctgccgcacaagcgcccggggcgcaagcgcgcggcggtggttgccgcgtgccttgcggccatgctgtgctgcgggggcgcgctggcgtggttccatacggagtcgggccttttcaacatgttcaaggcggcgaacgtcacgccgggcgtgaacgagggtttcaactctccgcatacgatgaaggagaacgtgtacgcgaccaacaagggaaatgtgaaggcgtacttgcgggcttcggtgtcggttcgctgggagatcaggagccaggccgacggttccgccgtcgtgctgggcgacgttccggagcccgatacggactacacgatggtttggggtgccatcgcttcgcctgatgcaacctcccaacttgggaattcctggattcaggggacagacggcctgtactactggccgaaaccgctcgctcccgaaagcgaggctgccggaggggctgtcgatcgaaccgcgaatttgatcaacacgtgcacggccttgcccaactcttcgcctatggacgatcgtcatctggttgtcgagatcgacgtccaggccgtgcaggccgatccggtggacgcggtcaaggaggcatgggggcccgaccgcggcggcgcggttacggacgttgcggtcgacggtacgctgatggtttcaggcaagggaggtgccgcatgatgacgcgcagacgttcgaggcgcggtgctctggcgctcgctgcggccgcgctcgcggttgcagccgcgcttgcaatgccgatgttcgttcggccggctgcggcctatgccgcgcccgcggagccgcccaccgtggtgtacgacagcgccgcgcgtgagttctctgtgcgcaacgccgatggaggcagcttgttcgacatgctggagaacctcgtgccgggcgattcgtcgtcgcacaccgtggcggtgcgggtggagaacgcgcgcacgcccgtcgcgctgtacctgcgcccctcgtgcgaccgtgccatcgccgacgtgatagggccggtgcgcgtggtcatgagtgtggacggtcggacgctctacgacggcgagataggggagctgcttcgcgaaggcgcgcttcccgtcaagatggccgagctttcgggcggtcagtcggcggacttcacgctggacgtgctggtgcccgtgaccttgggcaacgaggcggcgggcttggagaaccatgttcactggacgctcatcgcccaggacgagggcggctctgcgggcgcgggcggttccgagggctcggagggcgag

SEQ ID NO: 9144 - DNA, 312 bp, Unknown
  gut microbiota DNA sequence
gcgcgcgaggcggccgacaaggtcgtattcatggagaacggcctggtggtagaccagggcacgccccattacctgttcgatgagactgacaacgctcgcgtcaagagcttcctgtcgaagatcctgtaggctcggccatgatcacgagaagaacgttcatacgctcctcggcgctggttgcggcgacactcgtgctgggcggggcggcgggcggcctcgccggctgcgccgcagatcccaacgtgctgcgcgtgggcacgaagatcgacgtgcccggcttcggcttccagaatcccgagacgggcaacatcg

SEQ ID NO: 9145 - DNA, 399 bp, Unknown
  gut microbiota DNA sequence
gtggttccgctgattggaaatcagcggaacataaatcaagcgcgtctttgttgagcagggcgaatcggtcggaccagggagccagcgtctcgaccagcacggcgggtaggtcggggtcgcgctccaccgacagcacgcgccctgcactcttgagcagcgcgatggtgagcgtgcctatgccgggccccacctccagcacgtagtcgtcgggcgcaagatcggccaaggcgacgatcttctgcaagatggcgtcgttgataaggaagttctggccgagcgagtacttggtcgaaagcccgtgcgcttccaggacggcacgcgtctcggacacgctggccagcggcgacagcttcgtcatcagacctgccccaccgcgcgtggaaacgtgccttcgggacc

SEQ ID NO: 9146 - DNA, 542 bp, Unknown
  gut microbiota DNA sequence
gatttcgacgcgatcgtcgtgggctccgggtgcgcgggcgccgtggcggcctacgagctcgcgaaggccggcaagtcgaccctcgtggtcgagcgcggcaacttcgccggcgcgaagaacatgaccggcgggcgcatctactcgcactcgctgaagaaggtgttcccggacttcgagtccgaggcgccgctcgagcgcaagatcacccacgagcgcatcgcgctcatggacccggcctcgcagacggcggtcgacttcacgagccccgagctcgccgaggagggcaaggactcctactcggtcctgcgcgcgcccttcgaccagtggctggcctccaaggccgaggacgccggcgccgagtacatctgcggcatcgccgtcgaggagctcctgaaggacgggtccggcagggtcgtcggcgtgcgcgccggcgaggacgagatcaccgccgaggcgacgatcgtcgccgagggcgtgaacagcctgctctgcgagcgcagcctgggcaacccccgcccgaagccctcccagatggcggtcgg

SEQ ID NO: 9147 - DNA, 200 bp, Unknown
  gut microbiota DNA sequence
ccgatgccggcgtccttctgaccaagatgaagatcgaccgagtcaaccgttcgggtcattcgcatagatcctcgcagatggcggcaatggatatggagcggttggacgaaggccccgcgcttgatcagttctacggggtcgtgcccgtgggcatcattcgctacgatttgtcgggcgacatgctgataacttatatgaat

SEQ ID NO: 9148 - DNA, 165 bp, Unknown
  gut microbiota DNA sequence
cgctgtggctgctgctcatgtggttcttcggcagctcgaacgtcgcgtcgaagctgatggcgcgttcggcggccaggcgcagcggcggcgcgcccgcttcgcgtaagcacagcggcccgcgtacgttgcggcaggtgctggcgaacagcgtgccgttcctcgcgt

SEQ ID NO: 9149 - DNA, 267 bp, Unknown
  gut microbiota DNA sequence
aggcgtgtacagccgccggccgccggcgaacatcctcacgcgcgagcccatgcagcgcgggctttcgggcggcgtgagcccgctgggtctcgcggccaccgtggtgggagccgtgacctcggcgtttctggccatgctgctgttctatgcgttcggctacgcgattcccaccgggcccgacgcgttcttcttcatcatcgcgtgcggcgtcgtgggctcgctcgtggacagcgtgctgggcgtggtcatgcaagcgaagtaccgctg

SEQ ID NO: 9150 - DNA, 544 bp, Unknown
  gut microbiota DNA sequence
ccgtggtgaggcgcgcgatctcgtagcccagcacggaatcgcccgccgacgcgtcggcgccgagggagagcgccacctcgctgccgttcgcctccgccgccgcctgcgcgacgtccttgtccaggaccgcgcccgtgtcctcgtgggagcgggcgtaggtccgggcgtcgtcgttggcgtagctcagcgcacggtcctcggccgggaactggctgacgtaggccttcgtggcctcgtcggccgtgaagccccaacgctggaagaagtcggtcaggtcgcgctcggccgcggcgctggccaggcggatgatgttctgcttctcgccgccgcctaggacaagctcggtccccttgggcgcgggcgccgtcttcggagcgcgggcgtagctgtccacgcgcgcgaagaaacggttgtcgaaggcttgctggtacgtgtcgtacagctggtacgcgccgccggcgtcgtaggccagacgcagctgccagtacatggccagctgcgtgaacacgctgccggtgcggccctcgtcgcccgaggtcacgcg

SEQ ID NO: 9151 - DNA, 208 bp, Unknown
  gut microbiota DNA sequence
gccctgcgcgatgacgggcgtctcgggctggaacgcgtcgcgcgcctgacgaaccttgtcgcccgaccacgaaatgaagctctcgagattaacgcgcgaccccgacgggataacgaacgccagcaacacgcccgcgatggtggagtgaacgcccgacatgaacacgcagtaccacagcacggcacccaccagcagatacggcaccaac

SEQ ID NO: 9152 - DNA, 947 bp, Unknown
  gut microbiota DNA sequence
ttctgcagcagcaaaccggtgtacagcatgaccacgacggccacgaccgcagccgcggcctcgacggctcggaccgctccgcgcggcacgctgggcagataggcgaaccgcacggccaccagcagcgccgcgcatgccgccagccccgcgagcgtgtaggtgcccaccgtgagaaacgagagcgagggccgcagcagaagcgatgtaacgcgatcgatgcgcccgaggtcgaacagcaagaacagcatgccgagcgcgagcgccccgaacccggcgagcatgccgacggccaccgtgcgctcaagcggcgtagcctccccgatgccgatgcgcgatgcatgcccgaacggagccttcacccacgcgagatcgaggatcgatgcaaccgcgatggcgcccgcgcccgcgccgccgaggaacagatagcccaccgccaaaacgctgaacatcgtccccctccttcgccttccgcgcgcccgagcgcttttgcgctggggtcagtatcgcacaaaacggaagcgtttgatatgacaacgtgtcatacgcggggcgggtcgcgccagtcggcggccgcccttccccgctgcgtgccgggcgcatggcgaagccctgacaggttccgcacaaaaagcggccgcgcgccgggattacggacctccccggccatacttggcgaatcgacggaatcattcccgcaagaaaggcgacggctcatggcgaaatggatggacctgcgccacacctacaacctcaaaggcaagctgctgctctcatgcctcggcgtcgtgtgcatcgcgctgggcaccacggtgtgccgcgtgggaaacgtgggcgtcgacccgttcaccgccatgaacctggggttcagcgcgcgtgtgggcatggacttcggcacgttccagctgctggtgaacctggcgatcttggcagcggtgttcgcgctggac

SEQ ID NO: 9153 - DNA, 3610 bp, Unknown
  gut microbiota DNA sequence
ttctcgtgcctcggcatcgtgtgcatcgcgctgggcaccacggtgtgccgcgtgggaaacgtgggcgtcgacccgttcaccgctatgaacctggggttcagcgcgcgcgtgggcatggacttcggcacgttccagctgctggtgaacctggcgatcttggcagcggtgttcgcgctggacaagtaccagataggcctgggcacgctcatcaacatggtgggcgtaggctacctcatcgagctgttcacgtggctgctcggctttctgccgaagttcgaaggcctggtcagcgcaggcgttcatctggccatcggcacgctgctgttcacgctgggcgtgtcgctgtacctgaagacgcgcatgggcgtggcgcccatcgacgccgtcgcgcccatcgccgccgaacgcctgcccttctcgtacacggcgtgccgcatgacgcaggacatctccgtgaccgtcctggcggtgctggcgggcggacccatcggcgtgttcaccgtgatcgccgcgttcttcaccggaccgttgatcacggcgtggaatcggttcgccacgctgccgctgtaccgccgcttcggaattctgaaccgcgaggagctggcggaggagcgctcatgagcgccgatgccgctcccgccctgcggcggctgttcgtcggcagctacaccgacggcgccgatcgcggcggtatccgcacgatcgcgttcgacgaaagcggcgacgaggcgcacgtcgtgcgcgcggacagctgcggggcgaacccaacctatctggcgcagcgcggatcgctgctgttcgccgctcacgagctggactcctgcgggcggatggccgcctacgccatcgagccggacggctcgctgacctgccgcggagcgtgcacggcgccctacgatgcgggcacgtgcttcgtgctgcccgatccgaacggacgcaacctcttcggggcgaactacttgagcggatccgtcgcctgctgcgcgctgctggacgacgggcgtctggcggcgggcgtgccgtcgcggcgccacgaagggcgcggtctgcgggacgatcggcaggaggggccccatgtgcactcgctgagcttcgtgccgggaacgcggctgctggtcgccgtggacctggggctcaacgcgcttgtgatctaccaggttgacgcgtgcggaatgctcgcgccgacggctgcggaaaccgtgcgcgtgccggcagggtcggggccgcgcatggtggcgtaccacccgcgtctgccgatggccgcgctggtgaacgagctggcgtgcgacgtgctggtgttccggatcgacgaaggcgggctgcattggcggatcgtcgagcagctgagtctgccgcaggcgccaagcggcgacgcgctggcggcgcatatcgcgttctcgcccgacgggcggcaactgtacgcgtcggtgcgcggaagcgaccagctggtcgtcttcccggtggacgaccaaggacgggttgcggggcgctgcgacgttgcgtccggagggaaggggccgcggcacttttcgccgtcgcccgacgggcgctttctggccgtcgccaacctcgcgagcgacgacgtgcgcctgttcgaacgcgatgccgacgggatgctgcgagcggtcgcgtgcgtggacgtgccacaaccggcgtgcgtcatctggaacgcgtaagccgcgagcggcggccacacaacggacgaccaaaacgcgccaaatacttcgcgctttcaacgcacgtgcgattgcgtcggcagaatatggcagaaaatcacggactgggcacgacataggccgacatcgagatgctttaccagggatttccgcgttatcaggcttcttcgaagccacgaagcaccccgatctgcgcctgaaccgtgaatctctaccggatttcgccgcctcgaccgaacgcgagacgaagcggccgaacagccggttaccaatacagtcattttttgtcacacctctgaccaggtaatatacattgttttacctggtcagagactcgcagcaagatggctggaatcggccggtttggcaacgtcctacccgacgagcgcccccaagtaggccgccgccgcgcggtagaagggatggcgcgcctcggcggccaggcgctcggcgaaggctggcatccaggcttgggcgtgcccggagaggaaggtctcgtaggcggcggccgggctccctccagggaggccggcgccgtccggggcgccctcggaagccggggctccggccgcgcgcagggccaggcgctccaggagctcgcattccgtggcgacgtggtcgaggggctcgttggtgccctcggggcggccgaggccgcaggagcgcatgaagcgctctacctccatggagcgggggttcacgaacagaagcggctgcaccccgtcggcctcggcggcccacacgccctcgtagggcgagcaggcgggctcgggcgccccgacgaacaggcgcgtggcctccgggcgcagggcgcgcaggagcgcgtcggcgcccgcggcggcctcggcgccggccgcgcgggcggcgggagggcctgcgggatcgcccgccgccgcggggacctccgcgggcaggcccagcgcggccaggatctcccccgccgcctcgtcccactcgccgcccgccgcggcttcggccagctccgcgtccgggtagcgcaggctcagcgccgcgagctcccaggcggcggcgcgggcttgccagacgctcgcgtccgcaacttcatttcccatgacgttcccctttcccgttcttgaagaaaccggccagccagcgccaatgcgccacgacgtgcacgagcagcagcgcgagcagcgccttcgccgcgatcgcgtgcagcggatcccagaagtagtagccgtccgcgtacagccccagcgccggcagcactgcgcccgacaccatgatccccgacaccgtcaccgtcatgaacgcggcgacgatgagaaggtcgagcgcaaggttccccgtccgcgcccacgaaggccgcgcgaacgcagacctgaccgcctcgacggcccagtcgacatgcatcgcggcatgcgcgaagaacacgaccagcacgccgagacccagccattcgtggatgccgatgcccgtgagagccgggctcgccgcgaccaggtaaaccagcaagcacgccgcatcgacggcgagaagcttcctatccatacggcatcaccccaccttccgcacgatcagcacaaggcccacgaccaaggccacgggcgcaagcacccacaggttcaggctcgcgtcggacgcctggtaatagcgcgtggccagcgtgtcccacgcatgacactcggtcgaggcgcacgacgcctccgggcacgtcatctcgtggacgccgtcgggctcgggcacgtcgtcgaagccgtggcacaaccccgacgcgcacccgacggccgggcagggggaatcggcctcgatcggccgcacccccgtcgcaggctcggccgcggcacccgccgcgagcacgcacgcgcccgcaagcaggaaggcgacaagcgtcacgagcagtttcttgaacatggcttcacctcgtcagacaaggaaggagcgcgcgaagccgcgctccttccgaagcgtcc

SEQ ID NO: 9154 - DNA, 553 bp, Unknown
  gut microbiota DNA sequence
gtgcaggtgatggtggaaggccccgggcatatggcgctcgatgagatcgccgccaacatgaagctggaaaagcggctgtgccacgacgcgcccttctacgtgctggggccgctggtcaccgacatcgcgccgggctacgaccacatcacggccgccatcgggggcgcggttgccgcggcttcgggcgccgacttcctctgctacgtcacgccggccgagcatctgcgcctgcccgacgccgccgacgtgcgcgagggcctcgtggccacgaagatcgccgcgcatgcggccgacatcgcgcgcggggtgcccggagcgcgcgaccgcgacaaccgcatgagcgacgctcggcgccgcgtggactgggagggcatgttcgccgaggcgctcgatccggtcaaggcgcgccgctacttcgagagcgctccgccctcgaccgacggcacctgcaccatgtgcggcgagatgtgcgccatgcgaaccgtgaacaccatcatggacggcctgacggtcgatctcgggaaggagtagcctatggaaccgttcgctttga

SEQ ID NO: 9155 - DNA, 8079 bp, Unknown
  gut microbiota DNA sequence
agcgacgagcccgccgacgtggccgacatcacgtccatctgcggcggcctcacgctgaacatcggcacgctcaacgagcgctccatccggggcatgttcgcggccggcgagcgtgcgagcgagctgggccatcccatcgtactcgacccggtgggcgccggggcgtcggctctgcgcacgcgcacggcttccgacctgctggacaagctggccgtgtccgtcgtgcgcggaaacatgtcggaggcgaaggcgctcgcaggcggcgcggcggccacgcgcggcgtggacgtgtgccccggcgatgcggtcactgaggacaacctggcggccggcgcggcgttcgcgcgcgacttcgccgcgaagacgggcgccgtcgtggccgtcacgggcgccatcgacatcgtggccgacgccgagggcgcctacgccgttcgcaacggcagtcccctcatgggccgcatcacgggcgcgggctgcatgctgtcgtgcgtgtgcgcggcgttcgcgacggcgaaccccgatgcgctgctcgacgccacggtggccgccgtcgtcggcatggggctggcaggccagatcgcccaaggccgcatgggcggctacgacggcaacgggtcattccgcacgtacctgctggacgccctgtacaacctcgacggcgatgccctggaagcgggcgcgcgggtcgaagagctagcataaggaggagcgcatgtacccgagggagaacctgcgccgggcgatggcgctgtacgcggtcaccgatcgcgcgtggctgggcgagcgcacgctttccgcgtgcgtcgaagaggcgcttgcgggcggtgcgacgttcgtgcagctgcgcgagaaggacgctccccgggccgaggtggtgctgcgcgcccgggcgctcgcgccgctctgccgcgaggcgggcgtgccgttcgtggtgaacgacgacgtggaggcggctcgcatcgcgggcgccgacggcgtgcacgtggggcaggatgacgccgcatgcgtcgaggcgcgcgagaagctggggcccgacgccatcgtgggcgtgtcggtgcagacggtggagcaggcgttggtcgcccaggccgacggcgcagactacttgggcgtaggagccgtgttcggcacgcccacgaagcccgatgccgccgacgtggggacggacggccttgccgccatctgcgccgccgtcgatattcccgtggtggccatcggcggcctgaacgagcgtacgatccccgagctcgcggggacgggagccgacggcgcggcggtggtgtcggccatcttcgcggctgaggatatcgaggaagagacgcgtcgtttgcgggcggcggtgcaagcggcgctcggcgcatagccgacgctcgccgatagaaagaaaagcgctatggaagcagtgctcagcatcgcgggttcggattccagcggcggcgcgggaatccaggccgatatcaagaccatcgccgcgcaccgcctgttcgccgagacggcgatcacggcgctcaccgcgcagaacacgctgggcgtgacgggcgtgctcgacgtcgatccggcgttcgtcgcgaagcagatcgacgccgtgttcgaggatatccggcctgccgccgtgaaggtgggcatggtgtcgtcggccgccatcatagaagccgtcgccgacgcgctcgagcgccacgcagccgccaatatcgtggtcgatcccgtcatggtggccacgagcggcgcccgcctcatcggcgacgatgcgatcgaggctttgaaggagcgcctgctgccgctcgcggacgtggtcacgccgaacatgccggaggctgcggtgctgtgcgagttcgaggttgtagacgagacgtcgatggaacgcgccgcgctgcgccttgccgaggcggggacgggcgctgccctcgtgaagggcggtcatcgccatgatcgcgccgacgacgtgctggtcacggcggagggcgatgtcgtgtggctgcgcgcgccgcgcgtcgacaccgagaacgcccacggcacgggctgcacgctctcgtccgccatcgcctgcgggcttgcgcaaggccgctcggtggaggaggcggtgcgctctgcgaaaggctacgtccacggagctctttccgccggcctcaacctgggaaagggaagcggccccctcgaccacatgtgggagtattaggttccggcggccttccggccgccggaacatgccgatgctgcggccgcccatggcacccgatctcgcggcgatgccgagggctcgcgtaccgaggtacgcttcaccctcgccatccccacgatctcgggcaccatggccgccctcgctgacttactacgccgacctgcgcgcccgtttcgcgcttagcgcgaagctccgatccgtcaccgctcgaacacgcacgtcccgcccatgaaggtggccagcaccttcgtcttctggatgtcgtcggcgtcgcaggccagcagattgcggtcgagcacggcgatgtcggccagcttgcccgcttccagcgtgcccagctcgctgcgacgtcctgccgacgcggcgctgccctgcgtataggcgcgcagggcttcagccatgccgatgcgctcgtcgtgcagccatccgcctgtcggctcgtgggtgcccgggtcctgccgcgttaccgcgctgtacagcacgtccatcgagttcacacctaccacgggcgagtccgtgccgaacgccagcaccgtgttgtcgtccagcagcgtgcggaagggccacatgtacggaacgcgttcgggccccaggtcgcgctcggggccgccgggatccagcgtcatgtgaggaggctgcacggcggccaccacctgcagatcggccagccgcttcatatccccgggcaggaagttctccaggtgctccaggcagtttcgccgcccctccggcagcggtccgaatttcgcgcgcgcctcttcgaagatgtcgagcgccgcatggatggccgcatcgccgatggcgtggatgcgcacggggaagccctgctcggctgcggcaagcacgtagcgtcgcatgatctcgggatccaccgtgggtcggccgcaatcgccttcgacgtgcgcgttcgcgtacggttcggtcacccaggcggtatgctggctcgacacgccgtcgaagaactgcttgaaaccgggtgcctgcaggcacggacccgtgtagcgcgcacgcatgtcctcgaagcggctcatgtcgtcgagcaaggtggggaagaggtgcacgcgcgcggtcagctcgccgcgctccagcagggatgcgtgcacgtcgtcccggatgaagtcgagccccggatgggccatgagcgacatgtcgcatacgctggtcacgccgttctcggccagccgcgcgaagaagccgcggtaagcgtcggccacctcctcgtcggtgaacgaccccatgatctgcggcatcaactccatggcggccgcctcgcgcacgatgccggtcagctcgcctgtctcgtcgcggtcgtaggagccgcctgccggcggcacgctgtcgcgcgtgagccccagctcgtcgagcgcggccgagttcagccacagcgtgtgcgcgtctcccgagtacagcgccacgggacgcgtggggaacgcttcgtccagcgagcgcttcgacggcagcactggcgggttccagcggtattcgcgccatccttgtgctagaagccagccgttcggccggtctttcgcgaacgcttgcatgcgcgccacgcagtcggtctcgctttcgcccagaaacatggtcgccaagggcgaggaatacacggccgaatggaagaagtgcaggtgcgagtcgtgaaatcccggaaccacgagcgcgtccccgaagtcgcgcacctcgggcgcgcccccgcctgcgttcgcctcgagcgcgaaggcgcgcacgtcctcgcgcgatccgacggcgacgatacgatcgcccgcgacggcgatggccgcaggtcgggcgacgtcgccgactcctgtgaacacgtttcggctctcgatgatcagatcgatgcgcatgtgatgctcccttctaacgcggctgcggcgctacggcagctcgaaacggtactcgtcgccgcagatggtttgcttgatcttgccttcgcacacgaggtgcacgaggtgggccatcgtctcgcccatcgagaagaacttctggtcgagcggccattcgttccaattctcgtagcgccacttggcatgcgacgatatcgatacgatgtcgtcgtggccggcggccacgaggtcgtacagttcctggaggcgctccccatgatgcgctatcaggaacatgacgcgttcgcgcagtccggtgtagggcgttccgtgagccggaagcaccagatcgacgtcgtacgagtacatcttccccaagctctccaagaactcctcgagggcgttgtacgcggggaaccacgacgaaaccgacggcgttatgcgctccagcacgtggtcgccgatgatcatgagcttgcggtcgggctcgtacaggcagatatgccacggatcgtgtcctggcgtttcgatcacctcgaacgagaaacttccggcgcgcagcacgtcgccctcgtgcaggtagatgagatcgggcttgcacgtcagcggcagcagctcggccgatatgtgcaggcgatgcttgcccttgcggaacacgagtccgctttgctgcggcgtcgccgccttgcgcagcagggggccgaacacgttcgcttgcatctgcatgagattctccacctctttgaacgagtggaggttcgcatacacgcgcataccgtcgcggtagatccgatcgagattgcccgtatggtcgggatgagaatgcgtcaggacgatctcgacggtgtcccaggttcgcccgagggattccaacgccttgtcaagcgccttctcgcatgccgggtggttgaagccaacgtcgatgatcgtagtcgtctcgtcaccaaggacgatgtaggagttcagcgcctgcagggggttatggggaagcggcacgcgcacgcggtagagcccggggcagatcagcaggggctcgccgaacggcagttccgcaggggcgccagctggcggggtctcgggtgcgcggttctgttcttgctccatgaggtttccttttctcttcgttcgccgccattgtacgacagcatgcgcggccggcggtagaaggctttaggcgagaagggcgtaaggcaccgtaattccgcaagatggcacattttggcacacgaaagacgatcgaaaagaaaaaggccaggagcttgtgcgcttctggcctacaatttattggtagctccgaccggattcgaaccggcgacctccgccttgagagggcggcgtcctaaaccgctagacgacggagccacatagtgcgctgtgcagtataccgtaaaaatggctggggtggaaggagtcgaaccctcacatacggtaccagaaaccgctgtcctgccattagacgacaccccatcggctaaccgatgtgctcctgttgttttaaacaacagtcgcaagcgcgagttggtatattacggggtatgcggcgcttcgtcaagccttatcggcaaattattttggaaaagttgacgaattggatggtcggacaggacgcaagcgtgcgattttccggcgtttaccaggtgtttatccgttcaaaccgtcttcgtagcccacggtcacgtgcatggcgtcgcagaagggcttgttgcgcgacgcgccgcagcggcacagcgcatagcggttgcgcagctcgtactcggtgccgtccgcgccgacgagcgggatgccgccgcgcacgtacaaagggccgctcacgccttcctcggggtcttcgagcagggcgatggaggggccgagctccggctcgtacatcgctccggtctccgaatcgacgtgcacgagccttccggctgggcagtcggtggactcctggacagcctcgcgcttcaggcgctcgtcgccggacagctcggtgagcgtccatacgtcgccgtcctcgcggtggcagaagcgggcgaacgcgcaacggttgtcatcgtacagcgtcaccccggggccagggtagatgtcggcgcgctcctcgaacgacgcgcgcgacgcggtttccgcgccgtggaagccggcggcaacgtgcgagccgtcgcagaacggcggtgtgctcgtctgcccgcagcggcacagcgcgtaggtttcctggtggggaaaggcgcgcgccgtgcggtactcgcgatggccgccgacgggggtgatgacctcctgggtcaagggcacccctccgtttacgagatacggtccgttgagggatatcgtgatgctcatgcgatcgacgggggcgtcgacggcggcttccggctgcgactgggcggttgcggagggtgtggtcatgaggtgcctcgctttccagagatgatcgtgatgcgcgtatgtcagtatagaaagcgaacgcgtgcagcgatcggcatgcgggaagccgtcaccgggcggtggctcggccgttatagagggcctcgatcttcatgctcggcacgccatccctctatgaaagcgcgcaaagcgcacgcctcgttgtcgatgcgctcgtccatgacggcgtcgagcgcatccgacaaggcgaggccgacgaggggaccctgcggcacgccgagctcgatgacgtcgcgaccgtcgatggctagcttcttcagcgagaacgcctcgtcggcggcgaggatctcggacaggatgcgctccagctcgtcggcatcggacacgcggtcgatgcagcgaggcgcctggccgcgcgcgtccccgcgtttaaggtcgcacagggcggcgaacagctcgacgttgccgcccaggcgcgaaagcgcgcgcttcacggctttcggcgtgcgatcgatcacgtcgtcgtggcgttcgaccagcgtcagcacctgtgcggcgaacgccgacgacagcgcgagtcggtccatgatgccgcgcgccagcatcacgcttatggcggcgtgcccgtagaagtgccccgtcccgtcttcgtcggtgaagaacgccgcgggcttgcccatgtcgtggaacagcgctgcccagcggacaagcgggtaaggcggcacgccgtccagcacgcgcgctgtgtgttcgagcacgtcgtatatatggtacggcgtgcgttgctcgaagcctttcatggccacgagctcaggaagtacggcagccagcacgtcgaccgtggccgtgagcgcgcgtccggcatgctctccaagcaacaggcgctgcaactcgtgggtgatgcgctgggtggagatgcggggcagcagccccttgttcgccagcatgccttcgaaggtgttcggatcgatggcgaagcccagctccgcggcgaaccggcaggcgcgcagcatgcgcagggcgtcttcggagaagcgccgatcggggtcgcctacggctcggatgatccgcgcctccaaatcggcgtgtccgccgtaggggtcgaacaggccgcgcgcagggtgataggctagggcgttcatcgtgaaatcacggcgcgcgagatcttcggcgatggtgcgcacgaacgatacctggttcggatgacgcgcgtcggcataagcgccgtcgctgcggtacgtggtgacttccagcgcctgttcgtcgacgatcacggtgagcgtgccgtgcgcggttccggtctcgtgggtgcgatagccttgcccttcgaaaacgcgctgcacgtcctgccagtgagcctgcgtggcgatgtcgatatcggaggaaggccgcccgagcagcgcgtcgcggacgtatccgcccactatccacgtctcgaagccggcgttttcgagcgcatcgagggcggcaagcgtgcgctgcggcaaagggatgacgacggtcggatcgaggtcgggctggttcggcatggcgcaagctcctttcattcgcttcctatactaatataagcgagcgttcgtcctaaccgtaaaaccatgcggtcacgacttcgtcggcccgacggcacgaagcccttgtccgaaaaaaaaacgaaatgcccccttgcgcccggggctggaagcgggtaacatgctcgggctgccttctccgcgggag

SEQ ID NO: 9156 - DNA, 411 bp, Unknown
  gut microbiota DNA sequence
gaagacgatagcggcccatagggcggcgctcgccgcagccgcgtaggagtccagaaaaacgtccgtgccccctggctaccgtttttcgcccaacacgctgcccgacgacggtcgagccggggtggccggtcgcgacggacgcgcaaccatgacccagctaccaagcgaatgggtcgatgtcgcgaaaatccccccgtcgcggtaaaaacgagtcggtttggtaatcatactatgttgcttacatttctgattcgaacacccgacctgggaggacgcgcttgagaaggttcagcagcccaagaaggtggcggtcgggcgcccttcaggattacccaaccgttccgtttttaccgcggaagcccgaacgtcccgtcaagcggcccgccggccacgcgcagaagggcatcggga

SEQ ID NO: 9157 - DNA, 8365 bp, Unknown
  gut microbiota DNA sequence
ctatcgtcgcgcacaggctgaaggcgatgtcgaacacccgcttgacgaagcggtaccccagccgcccttccgccggagccgggacgggcaccgggccctcggcctccgacaccagttcgggcgccaggaacgccacgtcggaggcggccatcgactcggaggcgcatctggctcctgccgccgcgcgggatccttcgactcgcttcgctcgctcgggatgacaacccgaggagtcgctccgctcaggatgacaaaccccgatgctcccgcttaggtttccataaccgcgcttatcgagcaatgttgccgacaacacctcgattgggcggttagctaacctcttgattcttacggggtcaccatgaccccgcaaacaacgtacaggcttcttcgcgacggcgcacaacgcttgcagcatgtaccactatcagtacagcgttaccccgcactactcccccgcgcgctccaccaggtcgatcaactcctgctgggaatgcacatccaacttcgcgtagatatgtttgacatggctcttcaccgtgttgcgcgacaccacgtagtgttccatgacgaactgcccgttgcgcccgcgggccaacatggcgaagatctccgtctcgcgctcggtcaagccgtgctgcgcacccagctcaacgcaccgctcctcgatgctgagctgccgcaccgtctcgccagcgccgccaaacctcacctcgccgactgcctcggcagcagcagccccaaccggcccagcctcgcgctcacccacgttcaccacgcctcggatcgtgtcggcgaaactgaacttcctgaatcccaaccacagaaacgcgacgaacgcgaacaaaacgacctcggcgatgagcatggctgcatcgtcattcgtacccacgatatcgttcgtggtatgcccggcaatcgcgcccacgtcggttccaaccgcgctcatgaaacgcacaagcgcgaacgtcggcaacaaagccaacaggttttgccgccccactgccaacaccacaagccacaccagcatgtcaaagctgcgcacgccgatgcgcaaaagcgcgttcgccgagggcagatccgtcaaaaatgtgaacggcgcgatgatgaagccggccaccaccagcagcatcgcgaacgagaacagcatgtcctccttgctctcgctgcgcgacagcagcatccatgcggccacccccaccagcacgaccgccgaaacatcgacgctgataggagcatgggacacttcgttgagcgtgagtccgtaacccgtcgcaacgctgaacaatcctacgcataaaaacagtgcgtgagcaggccgcaagaacgattccggattggacagttcgaggctggccggggacgcttcgcgcgcgatcgcgtccagctgtcgcccgcctcgatgatacagcatcacgatgatcagcgcgtacgagcacgtcgcctcgacaatgcccagctcgaacgaaaccggaggatgcgccacgcgcaccacttcgcccaacgccatgccgcacaccacccccgcaagcgccgccttcgacgaacgcaacgacgagaacgcggaaaccatcatgatcgacgcccacgcggaggccgtgttgtagaacaggaagcccgccaccgtcagcggaccgttcgccatctgcagagcgaactccagcacgaacgccgccgtgatcgcacagcccagcgccaccacggttaataagcgccgatcgagcagcgaaggcttgcgcgtggcgatcagaaacaagatcaagaacagaaagcccgacgtcatcgtggaaatctcccgagcgatgccgtagtattcggccacgcgagaatacacgctcgcgttcagaatgccgccgacacagcccatgatcgcaaaggcgatcacgcacaccactatagccgcgctttcgccgtgcttcgaatcgcgcatacgttccaccatcgcttgcaaggctccctccccctcatcgcttgctcccattgtaagcgaaacctgcgccatccgatcacggcaccccgcatccaccacgttcatcagccttatcgccctcaaatcaccctcgcagggggagcgcgccaactcgcctttcgccagccgaaacacccccgacggggtggtttcaagcctcgccgaacgccgtagagtgcacgtcgagggaagcggctcctcatccggagccgcaaaacaaatcgcaccattaggaggatcatcatgggaacgaacgtaacgaacgaaggcggcatctcccgccgcagcttcctgggcggcgtcgcaggcgtcggcgcgcttgccgccatgggcctggccggctgctcgcccaaggccgcgggtacaaccggagccgagagcgcttccagctctgccagcgcagccacgggcgtggccgacaacaacgcggtggccgtggacgacggcagcgccgccatcacggtcgactggctgggcgccccgccggagatcggcgacatcaccgagacgaaggacaccgacctgctcatcgtgggcgcaggcaacggcggcatgatcgccggcgcgtacgcatccgaccagaagatggacttcatcctatgcgagaagggcaccgaggtgggcgccacgcgccactggttcaacgccgtcgacaccaagcccttcaccgaccagggctaccacaccgaccgcgcccgcctgcacggcgagtgggctcgctattccagcggcacgtgcgaccacaacctcatcaacatgtggatgaacgagagcaacgacatgttcgagtacgtcgacaagtacatgagcgaagccggcgccgtggtcatcgccgacgagttcgagatgccgggcggcatgggcgccacccccttctacaccccctgcggcgagcaccactacggcaacgccgagggcggccgcgacggcgtccccgtgcgcaacgagctgttcgagaaggtcatgaacgacaacggctacgagatctcctacaagcacgagctggtgaagctggtcaccgaggattccggcaaggttaccggcgccatcttcaagactgacaacggctacacgcagatcaacgccaagaagggcgtgctgctgaccacgggcggctactccgcgaaccccgccatgctctcgtcgctgtcccccatcaccaccgcgtcggtgaccgcgctgggctacaaccagaacaacacgggcgacggcatcaaggcggcgctgtgggcaggcgcggtgaaagacatcaccagcgccacgatgatcttcgaccgcggcctcgtcgcgcccggcaccaccgcgggctacaccgaggagtccgtcaaggccggcaatccgcagtggccgggcaacggccagttcaaccccggcacgcagcccttcctcaaggtgaacctgcgcggcgagcgcttcgccctcgagtccgccgactacgactacttgccccatgcggccgcgcagcagcccggcggcgtgtacatcagcgtctgggacggcaacttcggcgacgacgtgcagcgcttccacaccctcggctgctcggccggcacccgcacgggcgtgctgggcgtgaagaaggaagacggcacgtacgacctggacaagtacttcgagaaggagctggccgacggtcgcctgcagaaggccgacacgctcgacgagcttgccgacaagcttggcttcgacgccgacgccaagaagacgttcctcgccacctgcgagcgctacaacgagctgtacgacaaccaggaagacgtcgacttcggcaaggagccctaccgcctctccgagctgcgcaccccgccgttcttcggcgccacgctgggcggcacgctgctcaccaccatcgacggcgtccgcatcaacgccgactgccaggcgctcaacaccgacttcgagcccatcgagggcctgtactgcgccggcgactgctcggggtcgctcttcagcggcaactaccccgaccagatgcacggcgtcgcctgcggccgcacgatgaccgaggccctgcacgtggtcaagctcgtggccgccaagtaacgcgttcccctcataagctgcgcgccctcccctcccgcgcgcagcatcctacccgcgccccgacctccccggggcgcggcattatttcggggtatgccactcgcacgggtcgggtgccgccaagccacgcacacccatgatgatcatctccacgccgttcgcgaacgactcttccgagtacgccgaatccacgatgcgctgccacacgggcatgtcgcgcgtcgcgccacccgccgcctcgtctgccagccgtcgcttctgggcggcgatcgcgcttccgttgaacccggtgagaaaggcgtccaccatggcccacgccttcgtgagcacgggctcgggcataccctggtcgagatgcagcgacacgatcttctcggtgtgggccgccaaacccgcgtaagagatgttcggatcgaggtcgatatcgttcatgtgcggatgcgcgcagtactcccgatggatggaggtcatcgtgcgccgcagcgtgtcgtcccaccgctctcccggcaccggatcggtgtcgagcgtttccatgaagcgcgtgagcaccgccaccagcacctcctcgcgcgaggaaaagtgcgcgtagaacgccatggccgacacgcccagctccgcgccgagggcacgcatcgtgaatgcgcccatgccgtcgcgatcgatcatgcgatacgcggtatccacgatgacgtcccgggtcagcccgctcttccgcttcttttcggtttccgcatccacgccgcgtccctcctgccagcacctcgtttcgcccagcatagcatgagcatgcccggccgcgagccctcccgcctccttcgcatgcgaaaaccaagaggagccgaagcgcgctcgctccggctcctcttccgaacaggccgatcggcgttacgccgcgggattatgcggccaatcgtggcagtgcatgcactggttgtcggtgatctccttgtcgcgcgcatggcagttcacgcaggagttgtaccctccgtggagggagtcgtgcgggttgctctgctcgtaggacgaagtggtctcggccagcgcctcgtacgagcctccatggcagctcaagcactgctcgtcggacacatacgcaccggtgccgtcgccggcagcggtctgcgtcgtcttggccgacgagccgtccgcatcggcgccgggttctgatgtctgcggcgcacatgccgccaaccccaaggtcaggcaaaggacaagcgcaaccgtcgacaacgcgcctaccgtggatcgtttgacgttcaacatggctttacgctcctttcaccgcatgctcggcggcaacgtagccgaacgtgacggcgcgtccgatggacgttccagggatatgacgggggtagttgccggcgaagaagttgcccgacgcgttgcccacggcgtacagcccctcgatcacccggtcgtcggtatcgagcacgcggcacgaaccgtcgatggtgagcccgcccaccgtggcgagcacgcagctgttcgtggtcagcgcgaagaagcgcgtgcccgtgaacgggatggttcccgccaggtcgcgtccgaagtcctcgtccacgccggcctcgaaaaacccgttgtaccgcgcgatggtgtcggcgaggccctgcgggtcgacgccgcaggcggcggccagctcttcgggcgttgatccctcgaacagccagcccttctgcttgaactcctcaaccgcgtcctccatgccctcgaacatggtatcgtcgaacacctgccagcagctcttcccgaagtcgggctgggcgttctgcgcgttcgacacgctttggaagggcagatcctcgcgcacgaagcgcttgccgtcgccgttcaccatgagggcgaagtacacggcgttccacgtgcgcgcgtcgtagaacgaatcgggattgccccagcggaagttcatcaccggctgagggcacggatccatctgcgcgcctgctttgatgcccatgagatgcccgtcgcccgtggtgccccaaccggggttccaccaactcgacgaggcataatcctccggacgcgtccacgcttccatgagctcagggttcgcatcgtagccgcccgtggccaggatcacgccttttccggcgttgatctgcacgtactcgtcgccgctcttggcgatgacgccgcccacgcgtcccgaaccgtcgcgcaccagctgcacgcccggcgtgctgaagcgcaggtcgaggttgtcgtaggccttcgccacctcttgcatctcgaggcacacgtagatgcccgaatagccggagcgcactccggcgtcgggcggcagcgaggggctgtcgtagaagcccagctccgtgtcgatgagcggggtcagcgccggcatgccgcaggtggagggagcctgctccaccttcgagatgacgaagccgttctgtcccttgtcgagttcggcctgccagaaatcggtagcctcgcccgaacggtcgacgtaggtgcgtatgggttcggggcgcacgcgccagtacgcgctgcggtacatctcgtccaacagcgccaccttgtcgatctcggtgccctcctggcacttcgcccccacggcgccgaagcactcgaagcagccgcggcccttcgtcatcttctcgatgcagatgactttcgcgccctcttcggctgccttgaggctggccatgagcccggcgatacccgcgcccaccaccacgatgtcgcaatcctcggtcgaagcgatgtcgctcgcggcgatgtcgcggtcttcgaagccgaccggcccgcgcggccccgggcatgccgccttcttcaccggcacaagcgccgtctcgcacgcaagctgccgatacgcgtccaccgattcggcgacgggcgcatcgtcggcgaaggcgatgcccgtcgcgcccagcgtccccagcgtaccagcagaaaggcccgccaagccgatccccttcaggaacgagcgacgcgatacgtcgtactctcccatagtccctccttgttcgtttttctttacaacgtaaagtgaatggtaacgtgttttatttacgttgtaaagtaagagcttgcgaatacgccgcgtcgagcagcagagcgcgaaaagggatcccgcaggatcccttttacgaacagatgtttcacgtgaaacatccgcgttacggaggcgccgcgcgaagcggcgggcgggcggcgtagcgctacttcctcacaccggacatggtttgctcgacgatgctgtccatcatgtcgggggtcagcatgccgctgatatagccgaagatgttgccgtccttgtcgatcatgaacgtcgtggggaacgacctgatgcggtagccgctgaacatctcgcccgtcgtgtccatgagcacgggatacgcaatgccccgctcgtcgatgaacgccttcacgtccgcttcggacacgtcgctgttgttgggacggctgtcggttttcggattcgccacgcccagcaccacgaggtcgccctcgttctcgccacgatcccggtacagcttctcgatgtcggggatctcgcgctggcacggcccgcaccaggtggcccagaagttgaggaacaccgtcttgccgcggtactcgtccagcgagtgctcctcgccgttctggtcgaccagcttgaggtcggccagcggcgccgcctgcgcatcggccttgctcgcagcgccatcgcccgagccggcgtccttgcccgcatcggaagcatcggacgaaccgccgttcgccccgtcgcccttcgcctcatccgcgccctggtcggccggctgctcctgcgcagcgggcgcgccgccgaacgacgacagatagctggtcacgccgttcatccacccggtcgcggtcatcacgcccatgacgatgagcagcgcgccgcccaccttcaccgtatacttcaccacgttgccgtgcgtacggaaaaagcgcagcacctcgcccgtgaacagacccaccgccaaaaacggcagcacgaagccgatcgtgtacacggccaccagcccgaagcctgccgcggccgaagcgctcgacgacgccatcagcagcacgctggccagcaccggacccacgcacggcgtccacgcgaagctgaacgtgaagcccagcaccagcgccaccagcgggttcatcgcgaaccgattcagccgaaacggcagacgacgctccttctccaccgccttcgtcttgccgaacgcacccagcatgtacaggccgaacgccgccatgacgacgccggcgacgatcgagaacacgcgctggttgccggtgaagaactggccgagcgccgtgaacccgaagcccagcaaaaagaacgcgaagctcacgcccacgacgaagaacagcgtgttcacgaacaccttcttacgcgggtactcgacg

SEQ ID NO: 9158 - DNA, 368 bp, Unknown
  gut microbiota DNA sequence
tattcagccgaaacggcagacgacgctccttctccaccgccttcgtcttgccgaacgcgcccagcatgtacaggccgaacgccgccatgatgacgccggcgacgatcgagaacacgcgctggtttccggtgaagaactggccgagcgcagtgaacccgaagcctaacaggaagaacgcgaagctcacgcccacgacgaagaacagcgtgttcacgaacaccttcttacgcgggtactcgacggtcccgtcatcgttcgcaacgcctgcgccgcctgccagatagcccacgtacagcggaatcagaggcagcacgcacggcgagaagaagctcagcaggccttgcacgaacacggtgagcacgggaatg

SEQ ID NO: 9159 - DNA, 787 bp, Unknown
  gut microbiota DNA sequence
tccgtcatcgttcgtcttcgccgcgccgcctgccagatagcccacgtacagaggaatcagaggcagcacgcacggcgagaagaagctcagcaggccttgcacgaacacggtgagcacgggaatgctcgtttcgagggagaagcccatgatctcctcctagccctctgcgccggacgatgccggccgaccatcgaaaggcacgacgccgtcggagccgaatatgcggtcgtcgatgtcggcgatcgatatctgcgcaagccgttcacggcaacgctcgtctaaatcgaggaatatgtcgtccatgatgcccgccataccggatgccacaaggcatttcatgtccatatcgccgctatgccaaccggattgcacaaatctgatgttgagcgcatcggccaccatgtgcaggtcgaccgccgaagcgtcccctgcaaaacggtagccgcccacgttgccttcgcgcgtggtcacgaacccggcgcgcttgagcggagccatcaccttgcgcacacgcgccgcgttcgtacagatattcttggccaaagcctcgctggaaacgatgtccgccttatggttcagatacaccagcgcgtgcaccgcaacaatgaaatcgctgttcatgatgctgctccgtctacgacaaatcaactgtttcacttctttatacagtaacttttgtacaaaagaaagatacagttgagaaatcgagccgaaaaacccgtagagagcaggcgagggcgaatcatcggcccgaaaacacgcttccgagccgaattccgtgtctttg

SEQ ID NO: 9160 - DNA, 202 bp, Unknown
  gut microbiota DNA sequence
cgaggacgactgggaaagccccacgctgggcgcctgggggctgggctgggaagtgtggatcgacggcatggaggtgacgcagttcacctacttccagcaggtgggcggcttcgagtgcaaccccgtgcccgtggagatcgcctacggcctggagcgcctgacgatgtacatccagggcgtggacagcatgttcgacatcgtg

SEQ ID NO: 9161 - DNA, 427 bp, Unknown
  gut microbiota DNA sequence
cggctcgttcgtctacgtgccgaagggcgtgaagctggacttccccctgcaaagctacttccgcctgaacgcaaagggcgcggggcagttcgagcacacgctgatcatcgtggaggacgacgccagcctgcacttcatcgagggctgctcggcaccgaagtacaacgtggcgaacctgcacgccggcgccgtggagctgttcgtgggcaagcgcgcgtccctgcgctactccacgatcgagaactggtcgaagaacatgtacaacctcaacacgaagcgcgccgtggtgcaggagggcggcgccgtcgagtggatcagcgggtcgttcggcagccacgtgggctacctctaccccatgtccatcctggccgggcgcaagtcgaccagcagcttcaccggcatcacgttcgccggcgcagggcagaac

SEQ ID NO: 9162 - DNA, 221 bp, Unknown
  gut microbiota DNA sequence
cgggatctacgactggatcgttgaaaatatcgcatacgacgaggacaaagccgctcggcttgccgatgcgacaggctaccttcccaaccccgattcgtgcatcgccgacggctcgggcatctgcttcgactacgcatcgttggcggcctccatgctgcgcagccaagggatcccctgcaagataatcaccgggtacgtatcgcccgataatatataccacg

SEQ ID NO: 9163 - DNA, 424 bp, Unknown
  gut microbiota DNA sequence
ctgggacggcctcgaggagacgctcatcctggccgacgtcgggggcgccgcggccgccgagatcgtggagggcttgcgcgaccaggccacgcgcaaggcgctgcccgacgcctacgccgtgctcgacctgctgaacgatagaatcgcctccacgttcacggaaggcggcgaggacgtgctgggcggccagcccgcgctcgtgctgttcgtgggcatcaacggcaccggcaagaccaccacggtgggcaagctggcgaaggaggcgaccgacgcgggccgcacggtcatcctcggcagcgccgacacgttccgcgcggcggccatcgagcagctggaggtgtgggcgaagcgggcgaacgtcgaggtggtcacccgcgagcgcggcagcgatccggccagcgtgtgctacgacaccatcgagcgc

SEQ ID NO: 9164 - DNA, 202 bp, Unknown
  gut microbiota DNA sequence
tcccggctattcttcggcccagtgcattcccgccgaagtcagcctgaagacgccgctcgtgaagttcaagcgcggcgaagagcccgccatctcgttgaacatccccatggtgtccgccatcatgcaggctgtgtccgacgacggcatggccatcgcgcttgctaccgaaggcggcctgtcgttcgtgtacggctcccagacc

SEQ ID NO: 9165 - DNA, 3730 bp, Unknown
  gut microbiota DNA sequence
gatgcccaccgccgaggcgcgcacctcggtgggaaacagctcgttggggtacagccattgcaggatgcccggaccgccgctgaagaacgcgtataggccgaatcccaggatgatcacgtagatgggggcgtccgggaacacgcccaggatgaccaggcccaccgccatgagggcgagcgagcggatgagcagcggacggcggcccatcgagttcagccagaacatggccgggatggaaccgatcaggaagaacaggctgaccacgctctcgcccaggatggcctcgtggccctcccccagcccgaaggccgtcatgatctcggggccgaacgtgtagatggcgtacatcggcaccacctggcacagcgtcaggatgcccaagaacacgatgcgcttggcgtagccgcccgcgaacaccttgcgcaggctggtcttctcgcccggatcctccagctcgagctccacgccttcgccgaacacgcgccgcatgacggcgtcggcctcctcggtgcggcctttctgagccagccacatgggcgactcggggatgtcgtgccgcccgaccagcaggatgatgcaggggatgacggccgagccgagcatccactgccatccgttgggcacgctgtacaggaagtaccccacgaacgccgccaccgtggcgccgaggtaccaggcggccgacaccatgcccatggagatggagcggtgctgcttgggcgtgaactcggcgatgagcgaggtggctatcgggtagtcggcgcctacgaacacgccgatgaagaagcgcgccgccacgagctggagcgggtcggcgcagaacacgctcaggatggagaaggttccgatggccacgatgtcgacgatgaacatcttcttgcgcccgatgcggtcggtgaggtagccgcccgcgatcgtgcccacgaagatgcccagcaaaaccgacgccccgatggccgcgctccacgcctcgtcgaggttgaacagcggtgtgatctgcgtgagcgccacgccgatgagcgagagcacgtacccgtccaaaaacgagccgccgctcgagaagaacgtgatcttgcgcaagaagggcgtcatggccacgtcgtccatggtcttcttggccgacttcttcaccttgtggaccacgtccccgccgatctgcttggcgccgtcggcgacctcgcccatgggagggctcgttacctgggtcatatgctttacgttgctcatgctctcatctccttctgtgctatgcgttcctcttgcgatacatcctgagcggagcgaaagctcctcttaccgtcaccccgagcgagcgcaagcgagtcgaaggtcccggcggcaccagccgtgacgtttcccgcttgcgccgcacgggatccttcgactccggcctgcgaccggcgctcaggatggcaacctgcggcttactcccactcgcagatgccgaagttcaggtgcggcttggcgccggtctcgtcggcgtcggcatcgaccagctggaagcggatctcgttgtcgcccaccttccacatgcgggtctgcagcgtggtgcccggcagcaccggcgaggtgatgcgggtcttgaaccgcttcatgcgctccggctcgcccgggaagaacgagctgatgatgtggcgcatcgtgaagccgcccaagctcacgccgtgggcgatgggacgagcaagccccgtctgctcggtgtaggcgaagtcgatgtgctgctggtgccagtcgcccatgagacggtagatcagcggcatgttgagcggcatcgtctcctccaccacggcgtcgggcgcgcggtcgggcatctccacgatgtccttcggaggcttggggcctccccagccgccgtcgtagatgcacacgtcccaggtctcggtctcgcacagaagcgtgccgtcggaggagtaggagcgtccggtctgcttcgacaggcacccgcgaccctcgccgcgatcgtacagcgcgtcctgggtgacgaaggtctcgatgcggtcgttcatcttgaacggagcatgcaacttgatctcgaagccgtagtgcagcgagccgtcgtagtcgtagccgtagtccagcgtgcgcgtcatctcctcgtgcacggtcagcggcacgccgaagatgggcagcaccttgagatcggggttcgcggcgtccccctcgttcacgtactcgaggtccgtcttcccgtcgtagcccgcgttgcagcccagcgcgcagatctccaggtccttgaacgtgtactccctcacgaacggcccgaactccttgcccacgatctcagtgctgatagccataatccctctccttcggtcgcttgttactgcagcagcttcttctcgattttcatggagcacgtgcgggggaagctgtcgacgatctccacgtacgaggggaccttgaaccccgccatgtgctcctcgcagtacgcgagcacctcctcctcggtgatccgcgcgcctgcggccggcagcacgaaggccttcacggcctggtcgcggataggatcgggcacgccgataaccgcggcctcggcgatgcgcgggtggcctgccagcacgttctccagctcggtggtggagatgttctcccccgcccgcttgatcatgttcaccttgcggtcgacgaagaagaaccagccgtcctcgtccacgtaccccttgtcgccggtcttcagccagccgtcctcggtgaacgtgcgcgccgtggcctcggggtcgttgaagtactccttcatgatggtgcggccgcgcacgcccctcacctggatttcgcctacctcgcccgggtcggcctgcgtgccgtcctcgcgcgtgatgcgcacctcgtagccaagtcccgcgcgtcccacggaaggccaccggcgcgcgccggtgggcgggtcggtgagcacccagccgatggactcggtggagccgtacgtgttcatgagcgacacgccgaagcgctgctcgaacgcctccttctcggcgtcggacaccggcaggaagtagaggatctcgcgcagctcgtggttgcggtcgtcgggcgaggcgggctgcagcatgagcgtgcgcagcatcatggccacgcactgcgtgacggttgccttgagctcgcggatctgcgaccagaagcggctggcgctgtacttctccaccacgatgagcgtggcgcccacggtgagcaccggcatgagcgcggccagctggaagttggaatggcaggcgggcatggtggtgagcaggcggtcgttcttcgtcagcgcgacctcccagtcgccatacaagccgctgaacaggatgttcgcatgcgtgagcaccacgcccttcgggcgcgaggtggtgccggacgtgaagatgatctcggccgggtcgtcggcgctcagcgggcgcacctcgtcgagctcggccgccgcctcggcgcgcagccgcgagaagtcgtgcagggacccgtcgcgctcgagggcggcgcgcgcttcttcgacgccctcgaccttgtcgtcgtgcgtgcgcgccaccagcacgcccttggggcaatacgggccgctgtcgcgcacggcgcggtacaggccgaggaacttcggctcaaccaccgcgcacgaggcctcggtacgctcgagcacgaacgcggcttcctccaccagatactgctcgttcatgggcaccatgacggcgccgatcttcgccaacccgaacaggcacatcatgaactcggggcacgtgcacagctgcacggccacgcgctcgcc

SEQ ID NO: 9166 - DNA, 7056 bp, Unknown
  gut microbiota DNA sequence
aggccgtcccacaggctgcgcaccgtttcgtttcccacgatgtcggtcaatcgtctcaccttttccatccgtcgatcccctggtaatccgcacgatgccgtcgtcgagggccctcgcccgcaagggcggcatcgtgcggatgcgcggcgagttctgccggccgcgcatccgacgtggcgcccgggaagcgattcccggacgcgaggtaccgcgttagccgatcttcacgacgccggccgcggccagctcgtcgatctgctcctgcgtgtagcccagcttcgtcatgacgtcgacggtgtcgccgccctggtgcggcatcggacgccagatctggcccgggttgttcttgaacttcgggaacacgccgaggccgtggaaggtctcgccgtcgaccgtctcccagtcgacccacgtgttgcgcagcttcaggtgctcttcttccacgaggtcttccatgtcgttgaccacctgcacggcaatgcggtgcgcggcgaagtcctcttcgatgtcgtacttcgagttggccaggcagtactcttcgaacgccttctggatctcgtcggcgtgcgggttggacagccacaggccgctcgtgtcctcggggatgtcctcggtgccccagagatgccccaggccgatggtctcgaggaagtacttgttctggtcgacgccgtacaggcacacgcccaggaagccgtccttgcacttgaactcgccgatgccgcagaggttctggttgcgggcgcccggacgaggccacttgatgccctcgttaaggtagtcgaccaggtagtactggccgatggccagaagcgtctcgtacatggccaaatcgatgctctcgcccttgccggacttctcggccttgtacagggccgccagcgccgaggaggcgatcatcagcgtgttgaagtagtcgcccgcgtagggtccggggagcatgggctgctcctccgtgccgttctgcatgatgatgccggagtaggccatcaccgtcaggtcgtaggcggcgcgcttcaccatcttggggtcgccctcctggccgaagccggagacgtgtacgatgaccatcttggggttgagctcccacagcacgtcgtcggtgatgcccttgcgagcccacgtgccgcccttggaggcctccatgaagatgtcggcgtccttcacgaggtcgaagaacaccttcttgccctcttcggagaagtagttcagggccacggagcgctggttgcggcgctcggcctgcttcacgtacgcggtgtcgcggatagtgtcgcccgcgcccgtgttctcgagccagacgacgtcggcaccccagtcggccatgaggtcggcggccttcgggcaggccagctccactgccgcgtacacgaccttgacgccgtcgagcgggccgtacgagggcttttcggtaggaattgccatagttgaatcctccttgaatggtgacggcttgccgtggcggccggctagcggttcagaacccgaagtcattcggacacggccgataggccgcttacctcattgacctcggaaccttcaccgctatccgactcgccacgacagccctgtccaatactgactaaacggagctcctgcttacttctgcttgtacttgatggaggcgcccttggaggtggcgaggatcatcatctcgtcggtgccgccggagacgcggtcgacgcgcaggtcgcgccagatgcggttgatgcgatgctcagaagccacggcgatgccgcccatgatctgcatggcgtcatcggtcacttcgaaggaggcgttggcgcagtagtacttgcacatggcggcagcggccgggtcgaagttgccgtcgttgttgtcggcgttccaggcggcctcatacagcatgttcttcatgttcgtcagcttgatgcacatatcggtgatcttgatctggttgagctggaagcggctgatgggcttcccgaaggcgatgcggctgttcgcgtgcgccatagcatcctcgaaggcgcagatggcggtgccgtagtcgcaggcgcccacgagccagcgctcgaagttgaagtcggacacgccgcgcatgaagccgttgccctctttgccgaagatgtccttctcctcaagctccacgttgtccatgtagacctcgcagcagctgtccatgcgcaggcccagcttggtcagcggggacagcttcacgcccggcttggacatatcgaggaagaactcggtgaacatggtcgggtcgtcggcgttcttcgccatgatgacgaggtacttcacaccggccgaggaggtgatgaaggtcttggtgccgttgaggtagatcttgccgttctcgcgcttgtaggtggtggccagcgcgcccacgtcggaaccggcgcccggctcggtgcaggccgagttccagatctgctcgccggagcccagcgtgctcatgacggcctcgatctgctcttcggtgccctcgcggatgatggtctcgaagccgggcagctggtacagcacgtaggtgggggcgccgtacttgcccaggatctcgtacacggccatcagcgtcacgcagggctgctccaggcccaggccgccgtggctctcggggagcatgatctggtcgaagcccagctcgcagaggcccttcacccagcgcagcgggtactcgtgcttctcgtcgcactcgtggaagtaagtctcccaattctcgctctccatgtactcgcggtagctatcgacgataagctcctgctcgtccgtcaacttgaaatccatgacgatcctccttttagtgtttgtgcaacggggctgatcccccgctgtagccttgattggtcttccggccgcggcgcctacagccccagctgctcgcggtagaaggtcgcgccgtgctcgagggcgtcgtttgccgcatcgagcatcttggtgtagtgcagaaacgcgtggatgacgccttcgaacacctcgtagcggacgggcgtgccgtactgctcgcagatggctgccagcgtggcgctgtcgtcgcgcagcgggtcgtactcggccgccgcgatgtagcaggccggcatgtcgcgctccaggtcgttcaggaacaggttcgcgtaggggctggccgccagctcggcggggtcgttcgcgtacatctgcatgtagaactgccagtcggcctcggtaagcccgtcccacggaccgcccagaaggcgcatcgaagacgagtcggtcaggccgaaccagccgtagtacagaaggcagcacttcacgaagtcgcttgcgcccttctcctcgcgcaggtacatcgtggccgcaaggcccagatgcgcgccgccggagtctccggcgaaggacaggcgctcgccgtcgatgccgtgacgggcgccctgctcgtgcaggtaggaggccacggcggccacctcctccaccgcgctggggaacttggcctcgggcgacagacggtagtcgacggccaccaccggcacgccggcatggcttgccaggacgcggcacacgcggtcgtgcgtgtcgaggttgcccagcacgaacccgccgccgtgcacgtacacgatggccggcatggcgggcttccctgccgcacggccagcagcggctgcagccgtgggatagtagtagcgcaccggaatggcgccgtaggggccgtccacctcggcatcgagcttctcggccatgaccggtccgccctcgcaccagaacgcgcggccggccacgtagttctcgcgcattttctcgaagcccacgctggtatcgttcgcgtcgcccgccagctcgtcctctttggcgagcacggccttcatctgcgggttgatcttcgagagcacgtcgagcttgttcattgcaaccttctttcgcgaaccgatcgatgcgggatggtggatccggtggaacaacgggatcgagacgcggggacgctgcttgcagcggcgcgcccccgcgctcgctggcggcgcgttacgccttggcggactcgccgtcctctgcggccgcgaccgcgtcggaggcgccgaagtgcttcttgatggagcggagcagcatgaccagcgcgatgcagccgatgacgccgaacatgatctcgaagccgaagatgctggagaacgctgccgtaccctgggcgtcgatcatgccgccgtaccaggtgtggatgaacacgtcaggcaggaagccgatgacggacagcaggccggaggcggtgccgaagatggccatggggatcttgacctcggacagcggcgaggagccgatggagaaggcgccgtaggtggtgaagccgaacacgaccacgaggatggaggcgaccatggcgccggagggatcctgcgggaacaggatgaagccgacgagtaccgcgatggacaggatgaagccgcccaggatggtcttcgaggggctcttgatcttcgtggcgatgaagccgacaatggggccggcgatgaggccgatgccgtaggtgcggatgaggccgacgatgttcacgaggttgccgtcggcgttgaagcactgcgtgaggtacggcgtggtgtaggtagcgccctggtacacggcgtagcaggcgaagtacgcgacgcaggcccagatgacgccggggtgcttgatggcctggatggcctccttgacgctgaacagcttggcgtccttgttgatctcgcccttgaagtcggggatgatgaagaaggagacgacgcccaggacggcgatgacgacgcccaggaagatgagcatggcctgcacgcccgcggagccggagatggccgcgatgatgccggcgttgatgaggccgatgacgaggccggtgacgccgtagatggagtagctgatgccgatcttggaggcgtactcgttctcctcgcagcacaggcggatgaccttgaagcgcgtgccccaccacacgaggatggaggtaacgcccatgagcacgaacaggatcaggcagatctgcacggaaggcagcatggcgtacacgaacacgagcacggcggtggcgatgaagccgacccatgccagcgtgcgcatgcggaacttgtcggccacgatgccggagggcaggtagcagatcatggcggcgatgccgtaggccgacaccatgaggccgaggtcggcgttggtggcgccgagcgcctgcatcagtggatcgtagaagacgttcttcagatacatcggcgcgtagatgatcgacgagcccatggagatgagcacgacgagcgcccacttgtgcagggtggagagctccttgtaggtaacctctcccttgctcttggcaagcaatgacatccttacttcctttctccttgtctgcgcccggtctctcagtcggtcgccggcacgttcatggcggcgaccggcggcgaaccgagccgttgggtgcattctgttcgcagactgtggttttgccatcgcaaaatccccactaattggcctaatacttactttcttgcgaggcgttaccgaagaattagtgatagattctcgccgtgatgaataaggcggaggcattgggagccaccctgcgaaagggcagctcaacggcatcatcatccatcgctaacgggagataggaagggtggtcggctttatgacgctccaatcggcagcaccgtcggaccggaaaacgggaaaagaggggtacttgacggatcttgcgactcgtcctgcgctgaaatacgtgggattcgcgttgcttttagcatggcactacgctctatggttcgtcccgcacatgttcacgcagaccgaactgctggacgagcgcgtcaccatctcctggctggtgaacttgggcgccaccgtggtctcgctgctgctcatcgcgttcatgctggggcgcaaacgtcacctttcggcctaccgttggctctacgtggccgcgccggcgctcacctgccttgcaacgttggcgatatgcctgattcctcaagtgttcacggtgcccggcctcgcctacgcgctgtccttctttctcggcatcaccgaatcggtcatgtggatcctctggggcgagcgctacgcctgcgtgaaggcgaacttcaccctccgccacatcggcacaacgttcggcctgacgctgctcggaaccatcatcctggcgtgggtgctgccctcgtacgtgacgacggcgttcgtctcactgctgcccatcgcctccggcatgctgctggtggccgctcgccgcgacggctcgcgggcgtttccggtgctgttgccgaagagcgcggcccagggcggtctcaagaacatggtcgcagtgagcatcatcaccttcctggccagcgtcgcgtgctacttcctcgtggccatcatcccctgggaggtgctgcccaccggagacgtcagcttcacgttgggcatcctcggaggggcggccatcatgctgggcatcgccggcatcagcatcgcgtcgaaggacaaggccagcatattcaagatgttcccctggctgctggtgctgctgatcgcggcgttcgcgctgttcctggccgacgaggtggcgttcttccccgccttcatcatggcgaccggcatctcgtcgctgctggaaatcctgctcatcatgtacttcggcatcctcacctcgaaaggctacgtgacgccggccgtagcgttcgccttctccggcgcgttcgtgcgcgcgggcatcgccgtaggcaatacgtgggccgtaggctacgagcacgcccccgagctggccttcgccatcacgcccgagacgtgcctggggctcatgtgcgtgctggccgtgctgctggtgccgctggtgcgccaggagttcaacatcgtggcactgacggccgcgccgcccacgaaggccgagatcgacgagatctgctccgaggtggccaaggagttcagcctgtcggggcgcgaggccgagatcctcgtgctcatcgcgcgcggctacaccacgaacaacatggccgagaagctggtgatatcgccgtacaccgtgaacacccacgtgcggcacatctacgagaagatgcagatccacaagcgcagcgagctgctgaactacctcaacatgcagcgaagcgatttctagaaggctctgcatgcagaagcgccccgatcggggcg

SEQ ID NO: 9167 - DNA, 211 bp, Unknown
  gut microbiota DNA sequence
ctacgccaaaatcgccttcaagtcctcctccggcgtggtgatggggcggacgtcgaactcgcgcaccagcacatccaacacgccgggcgacacgaatgcgggcagagtcggacccaggtagattccgcgaatccccagatgcaacagcgtcagcaggatggacacggccttctgctcgtaccacgacagcaccagcgtcagcggcaggtcg

SEQ ID NO: 9168 - DNA, 1250 bp, Unknown
  gut microbiota DNA sequence
ccatgcccaagtctttccacattgcctgatagtcagccatgaaggcccccttcgataccagtcgatagcaaggttgcgatgttattcggttgtcgttgcagaaatgacggtgcagcgtcgccggatgcgcgcatgcgcatgcgggacgcgatgaggtgcgcgatgatgaagcgtcgccttgcatgcagaaatggcacccgcgcagaatcgtgccaatgcgaggcgacgaggtaatgataccgtatcgcagccgcccgccgcaatcgcggggcagcttatcggcgaaaggccggcggaaaagctcctaccgatcgacgtccttcttccggtacacgaaccagtacgccatgccgacagcgacgccgccggcgacgttgcccagcgtggcggccgacaggttcgtcgcgatgccggccagcgtcaccgcgtcgggcgcacccacccccatcgagttgagcaacagccccatggggaggaagaacatgttcgccacgcagtgctcgaacccgcacgcaacgaacgcagagatgggcagcaggatgccgagcaccttgtcggcgacggtgcgcgccgagaacccgatccacacggccaggcacacgaggatgttgcacatgacgcccttgaagaacagcgtcgtccaatcgggcgccaccttgcccgcggccacgctgacgaaggcctcgcccaccgcgcctccgttcatggcggcgacgttcgcaaagtggacgagcgcgagcgcgacgagcgcgccggcgaggttgccgagccacacgagcagccagttgccgaacagggacctccagccgatacggcccgacgctttcgcgcacaccagaagcacgttgccggtgaacagctccgcgccgcagcacagcacgagcaccagcccgaggcagaagcagagtccgcccaccgcgcgctgcaccgcgaacggcatggaggggtcgcccaggaacacgcagaagtacagcgccccgaacgcgatgaacgccccggccagcatcgcggacgcgaagcacttcgccttcggcatggccgccttggcctcgccgaccttctcggccttctccgcgatttcagccggcgacagcgcatccggcctgagcgtttggatctcgtcctgcatcatgatcgcatctggttccttccttgcctggtcgcggcttcttcgcgcgtcccctgcgaagccgcacggtatggtaccgcaactcgcgggcgcagggagaaacaaaagcgttttcctcgac

SEQ ID NO: 9169 - DNA, 264 bp, Unknown
  gut microbiota DNA sequence
cagatcgctcatgtgaaggtacgtgccgtcctccttcaccaagaacggagacaccgtgctgcttcgcatgaactcttcgtccatcaagccgttctcgataatgtgattggccatggccagcatgagcgcgccgtcggtgcccggccggacgggaacgtagacgtcggagtgcatggccgacgcggtgaactgcgggtcgatggtgatgagctttgcgcccttctcgcgcgcatcgcacacgaactgccacgcatgcacgtacgc

SEQ ID NO: 9170 - DNA, 181 bp, Unknown
  gut microbiota DNA sequence
tggctctcgccttgatccttcgcgccgtccttggacgcgtcgctttcctcgggcgaggaagatcccgtcgaatcgtccttgccgttggaagccgccggggcgtcgtcggccggctggctgcgcgacggcaggataggctcggttttcgcgcccacgccctggccggccgacacgaagtcga

SEQ ID NO: 9171 - DNA, 280 bp, Unknown
  gut microbiota DNA sequence
ctacggcgacgagggcgagcgcgccggcgagttcgacgcccgctggcccatgcagtaccacttcgtgggcaaagacatcacgcgttttcactgcgtcatctggcccgccatgctgatggcggccgggctgcccatcacgcacacggtgttcggccacggcttcctgctcaccaagggcgagaagatgtcgaagtcgaagggcaacgcgctgaagcccgcggacctctgcaaggtgttcggcgtggacgcgtaccgctactacttcatgagcgacgtgcag

SEQ ID NO: 9172 - DNA, 833 bp, Unknown
  gut microbiota DNA sequence
gctcgttgaccaccatgtcgcccatcgcgttcgccacgcccataaccgcttccatgccccgctccttaccgcattcgccgtttggtcttatatgttattgtaatagtatcattaatgaagggcgcgcgccagattagagagagaacaaacctgcaacatggtcggccggtcggggagcggctgcgctcggcgttcaagcacgggtcgcatcccccctctcgtcccgtgcattcaacggcgttccgcatggcgaaaagatatcgaattcggaagttacgccgtgagccgcggacacgttgaaaggcagcttcccgcataacacctggacactgaaagtcgctttcacgcttctgcgccctgtgcgcacctgaatcgcatgagtctttccgaattcgaagttttttcgccaccgcgagtccgttgcgctgcatgaagaagaggccgagggacgggatggcaggcaggtttgtcgccagataggtacgtacaaatgtttcacgagaaacatttcggctgggggctggagcggaattggacgcgaggcgatggacggggggcgttacagcttcggtagacgcatcatcggcccaaagacgcggttttcgcggaaattccgtgtctttgggccgatgatgcgctccgctgcctgcggagcgtcgcccgcggcagacgggggcggtgtcggacgaggaacgcggcgcactacccatggggggggcgggtacgacctgctgcatacaggcgccttcatgcaaagcggagccgccctttcggacggccccgccgaggtgcgcgattgcgcggctacgcggatcgcgtcaaccttacagctt

SEQ ID NO: 9173 - DNA, 10128 bp, Unknown
  gut microbiota DNA sequence
gcggctccccctctcctactacagctgctcgacgatgcccgtgatcaggcgcgagaaatcgccctcgcgcgtcttcgccacgtccagcacctcgagtcccgtggggcttgcgccctcgatgccgcagcccatgttcgacaccagcgagatgcccagcacgcgcatccccacgtgccgcgcggcgatgacttcctcgcacacgctcatcgccaccgtatcggcgccccacgaacggaacatgcggatctcggccggcgtctcgaagctgggtccgagcgcgcccaggtacacgccctctcgcacccgcacgccgcgctcggccgccacgtcgtgggcgatggcgcgcagctcggggtcgaacgcgtccagcatggagaagaagcggtccgacaagttcgccgggtcgggcgcggcgatgggattgcgccccgtgaaattgatctgatcggccatgatacagaaatcgcccacctcgtagttcgggttgagcgcaccggccgcgttcgtggtgataagcgtgcgcacgcccaggcgctccatgagccacaccgggtaggccacctcctgggcgctgttcccctcgtaggcgtgcagacgaccctgcatggccagcacgcacttgccgcccagcgtgccgcagacgaagcggcccacatggctttcggccgtactcgtcttcatgcgcggcacctccgcgtaggggatgctcgccgcatcggcgatctcgttcgccagcggattcaggcccgaacccagcacgaggccgatcgtcggttcgcgaccttccagccgctggcgcagcacgtaggccgaaagcgtcaggttgtcgtcgaggatgttgcgttcaagcatggaagccctccgttcgtaggtttcgtcctattatagccgtccacgcgcgagcgtccgggacggacggacgctcgcagcagcgatctcggcgggttcggcgcgggttcggcagttccggcgggttccacgagcgccgattttgcgcggaggcggcgccgacgggcctcgcgcaccgtttcgctggggtcacgtgcagcaaaatcgaggttttggcaccgacgacccgcccggacaccgcgttttgcagggatcgcgaaccgcgacctggggtttcgcttcggcatccttcgaagaaggagctgggaaccggccgatgactgccaaaacctcgtttttgccgcacatccgagggcgaaaccgtgcaaccggcagcgcataagcctgtcctgcccgcgcgggacgccgcgtcctgccggaagcgccggggctcgcacggaaaccgcgccgccccgaagatccgtctacacggcgcgctttcgggcggtgaggacgcgggggcgcccggcgagatcggccgtgacgcgaacatcggagaagccggcctcttcggcaaggcgggcggcctcgtccaggcaggtctcgtgcagctcgaaggcgaagccgccgccctccttgagggcgcggcggcaccagggaagcaggcggcgcagcacgtcaagcccgtcggcgccgccgtcgagcgcgagcgcaggctcgaattcggccacctcgcgggggatatcgtccatgacggccgtgggcacgtacggcgggttggacaccacgaggtcgaacgcgcccatgagcgtaggatcgacgccctcgcccagatcgcacgacagcacctcgacgcggtcgcccagctcgagggcagccacgttgtcgcgagcgagcgcgacggcctcgggcacgatgtcggtcgccaccacgcgcgcgagcggatgctcgtaggcgacggagcaggcgatgcagccggaaccggtgcagaggtcggccacgagcagctcggggggctcgggagcgggttcacccgaggcgacggccggcgtcgattcatcctcggcgacgccctggtcggccgttcgctcggggcgttgctccccggcttcgccttccggccaagggacagggggaaggtcgtcttccggccatgcatgctgcgccacccgcttcggcgccgccggcagcagcgccaaggcttcactgaccagcacctcggtctcggggcgcgggatcagcacgccggggcgaaccttcaccgtgatatggcgaaatccgacctcgcccgtgatgtactgcagaggctcgcccttgccgcggcgcgtgacgtaggcgcgcagcacatcgcgctcctccatcgacagcggctgctcgaaattcgcgtacagctcgatgcgggaaaggccggtcgcttcggacagcagccactgcgcggacagccgcgggttctcgtcgcccttgcgctcgaggtagcccaccgtccaatcaagggcggcctgaatggtccagatgtcgttcaatctagaccgcggcttccagcttctgcgcgcggtcggcggcctgcagagcggtgatcacgtctcccaggccgtcgcccagaagcacgccgttgtacgtgccgttgaagccgatgcggtggtcggtcacgcggtcctgcgggccgttgtacgtgcggatcttctcggagcggtcgcccgatccgatctgcgcgaggcgcttcgcgccctcggcggcctgctgctcggccaacatcttctcgtacagacgggcgcgcagcacggccatggccgcgatcttgttctgcagctgcgacttctgatcctgcgactgcaccacgaggcccgaaggcaggtgcgtgatgcgcacggccgagtcggtggtgttcacgcactggccgcccgggccgccggcgcggtacacgtcgatgcgcagatcgttctcgttgatctcgacctccacctcgtcggcctcgggcagcacggccacggtggccgtggaggtgtggatgcggccctggctctcggtcttcggaacgcgttgcacgcggtgcacgccgctctcgaacttcatgaccgagtacacgtggtcgcctttgaccttgaactggatctccttgaagccgccggcttcggaggccgacatgtccatcgtctcggtcttccagccttgcgcgctcgcgaaccgctcgtacatcttgtacagctcgcccgcgaagatggccgcctcgtcgccgccggcagctgcgcggatctctacgatgatgtccttgtcgtcggccgggtcggccgggatcagcatgaacttgatatcctcttcgagcgccggcagcttcgcctcgatgccggcgatttcctccaacgcgaattccttcatgtccggatcggccagcatctccctggcttcggccagatcgtcggccgcctgcacgtactcgcgcgccttcttcgccagaggaccctggttggcgtactctttggccaggcggttgtattccttctgatctgcgaggactgccggatcgcccatcttcgcctgcacatcctcgtaggcttcgatgatcttcgtcagcttctcgcgcatatcgttatcctgcatgatgggtgctgtccttttcgacgtggttcccgtgctcgcgcgccccgcgcgccaagaacgcccgctccaagcatgcggagcgggcgcctatgctgtaactggtttatgatagcagatcgaccgtcgatccgcatcttatcctagatcgccagatactctgcggcctcttcggcgcagacggcgccgtcggacacggcggtcaccacctggtgcaggaacttcgtgcgcacgtcgcccgcggcgaacacgccgggcacctcggtcgcgcacgactcatcggccacgatgtatcccgtttcgtcgcactgcagcgcgccgcccagaaactcggtgttgggctcggtgccaacggccacgaacaggccgtccacggcgatgtcgcgctcctcgcccgtctcgagcatctcgaggcgcacgccggccagcttgccctcgtcggccacgagcttgcggggcacggcgttccacacgaactcgaggttcggcaggtcctccaggcgcttgtggtagatggccgtggcgcgcagcttgtcgcgccggtgcacgaggtacactttcttgcaaatgcgcgacagatagatggcgtcgcccgcggccgtgttgccgccgcccaccaccatgacctccttgtcgcggaagaagttgccgtcgcacgtggcgcagtacgacacgccgcgcccttgcaggtcctcctccagctcgagtcccagcttgcgcgggcgcgcgcccgtggcgatgatcacgctcttggcgcggtactcgttgaacgcggtggtcagaaccttcgggttctgggtgaagtcgaccgacaccacctcttcgccgacgttgctcgcgccgaaacgatcggcctgctgcttcatggcgaaggccagttcgaagcctcccgttccctcgggaaagcccgggtagttctccatgtgctcggtctgagcaagctgtccgcccggcgagatgcgctcgaacagcaccacgttcaagcctgcgcgcgcggcgtacagtcccgccgtgagcccggccggaccggctccgatgacggcgacgtcgatgacgtcgttcgtcgatgccgccttgcacgcggcagatgtttcgttgctcgcggtttcctcggtcatgcatgcctcctggtttcgcgggtatccgtgttttccgagtgtaagtataaggtacgtcgcctaaatgtcacaaacttggcaccaatatgcgctaaaacggcaggaacggagcgcgaccggcaacgcatgcgtgacggattccagcatgcgccccgcgtccgccccctccgcactaccatgaatgcgatcgctatcgaaaggaccgggcatgaatcacgcgagcaacatgacgaacgcggattcggcagggagcgaaacccccgccgagctacgcaccctgtatcttgccggaggatgcttctgggggctcgaagcctatctgaaacgactgccgggcgttcgcggaaccgtcgtcggctacgcgaacggttccaccgagaaccccagctatcacgacgtatgtcgctggaacacgggtcacgccgaaaccgtggccgtaacctacgacccgcgcgtgctgcccaccgacgtgctgctggacgccttcttcgaggccatcgaccccacgtcggtcgaccgtcagggaaacgaccgcggcacccagtaccgctcgggcatctattggaccgacgaggccgacctgcccgccatcgaggcgtcgctgctgcgccagcaggcgcgctatacgagccccatcgtcaccgaggtggagccgctcgacggcttctaccccgccgaggagtaccaccagaactacctcgagaagaacccgggcggctactgccacatcgacgttcgcagcgccgacgcgttcgccgagcgcatgggactcgaggaaggccgggcctgcgtgcaggtggacgggctgtgcgaaccgctcgcgttgggcgagggcgccgcgacggcgggcgcggtcgagcgcgaggacatccccgcgccgtccgtgtcgcgtcgcgcagacgggccgcgcaacgaagacggccttgcagatgcggacgtggacgcgctcatccgcgaggcgggctacgccgccccctccgacgacgagctgcgccgcatgctgtcggccgaccagtaccgcgttacgcgcatgaacgctaccgagccgcccttccgcaacgcctacgaccgcacgttcgaaccgggcatctacgtggacgtgaccagcggcgagccgctgttcgcctcgtccgacaagttcgatgccggatgcggctggcccgccttctcgcgccccatcgcgcgcgaggtggtcaccgagcgcctcgaccggacgctgggcacctatcgaaccgaggtccgcagccgtgcgggcgatgctcatctcggccacgtgttcaccgacggcccggccgagacgggcgggttgcgctactgcatcaacagcgcagcgctgcgcttcgtgccctacgcgcgcatggacgccgaaggctacggctacctcaagcccctcgtcgagcaagagctcgaccccgcatcatcctgagcgaagcagcggaagccgcgaagtcgaaggatcccgtgcggcgccagcggggaatctcacggctggcgccgcacgggatccttcgcgtccccgctgcgcggggcctccctgcgctcgctcaggatgacagggcgcccgctagcaggcctcgcttgccgcgggctctgccgcgcgatcgggccgacgcgcgcgatgacggtagcgcagcagagcggcggccgccacggacagcaccatctgcacggcggtcaccgacagccagatgccgtcgagcccgaacaggcgcgccgcgccgaacacgatgaggacgaccagcagcgcctcgccgtacacgatggcgctcgacgccttcgcgtcgtccaccgcgtagaaatacgaagtggacgcatgggtgaacccgtagaacacgtacgcggtggagaagacgggcagcgcgtacgcgatgagccctgccgtctcgtcggacgccccgaacagcagcggcacctgattccgcagcaggtacatggccgccaaccccaacacgcccaggctgatggtgatcaggtagttcgtgttgcggaagcggcgcacgccgtcggcgtcgcccgcgccgtagtgcttggagatgagcggctgcgagccgtcgcccacgccctggatgagcatctggatgacgcaggcggtgtacgacaccactgcgtaggccgccagcgcctgctcgccgccgtacatcgacaggttcacgttgatggccaccaccgtggcctcgggcaaaagggtcagcccgaacggcgccagccccaaccgcagcgcatgcagcgcgatatgccggtcgggacgcaagtcggccacggcgatgcggttctcccttttcaggaaaaagcccagcaccagcagaaacgccgaaacctgcgagaccacggtggccgccgccgcaccggcggtgcccatgcccagcaagatgacgaacacgtagtcaagcgccacgttcatcaagccggcgaacacctgcacggccatcgcgtaggccactttcccctggttgcggataagcggcgtgcagccggtcacgaggatctggaacgggacgccccaggcgatgacgcccgtgtacgccgccgcctgcgccagcgtctcgccccggcctcctaaaagctcgcaaatgggcgtcgccagcgtgaacagcagcgccatgatgggcacggcggacagcgcgagcatcgtgagcgtggtgcccatggcgcgccgcgccttcgcctcgtttccggcgccgcgcgcgatggacgagatcacgccgccgcccatgccgacgcccgtgcccacggccatgatgaacgccaccagcgggaaggctacgttgatgccggccaggcccgcgtctcctaccgcgtgtcccacgaacacgccgtcgatgatgctgtacacgccgcccagcgtgaacgtgatcatcgtggggacgatgtatttcaaatactctttgagcatgcctctagtaatcatgtcatgtcgctccgatatgcaatttgctgagattttttccgcatggtactctaaaccttaaagctgctttaaggtaaagcccgcaatgtgcgggattcgccgaatcttcagaccatcgataaggaacgcgcccatgaccttgccccgcctctacgacatcaaagaagcagcccgctacctgggcgtcgcctcctccacgctgcgctattgggaaagcgagggcctcgtgcaagccggacggggcgaagcgaacggctaccgccagtattcgctgcacgatctcatcgaggccagcgagatcgcgttctaccgcaaactgggcgtgccggtcaaggagctgcgggggtaccgagcgctttcggcgcgcagcctggacgaggccctcgcgcgcaccgaggacggcgtcgagcagcgcatcgccgagctggaagccacgaaggcgcgcctcgcccgccagcgcgcgctcaacgcgaaagccgaggagctgcgacgggcgggcatgcagcccggctccccggccatcggcagcctgagcgccatcgactacgatgccgcggctccctggaagctgctcgtggaggagccctggcgctacggggtggtcgtctttgcggacaagcctgacgaggtttacgagtcggccgtggacgcaggcgcgcaggacggtgccgtgctttggcgccgatcgagcgctcacgacgagacgacctgccgggagtgcctgctcaaagtgtcccccactgccgacgccagcaacgccgccgcgctgttcgccgaagcctcccgccaaggcatcgagcctcaggcggtggtgggaaactaccttctgacggcatcggacgaaacaggacgctgggactgccatcgcgcctgggtggtgggggaaacgccgcgcgatcccgcagacgaccggtaagcccgggcgacatccggcatgcgggcgcaaaaaagccccctccgagcggagagggcttcgccgcctcaggccgaggaagaagctagccgatcatcgagaggatgttctgcttgggctgcacgcccacggcctggttcttcacctggccgttttcgaacaccatgagagtgggcacgctcatgacgccgtacttctgcgcgatgtcggggctctggtcgatgtcgagcttgtagacggctgccttgccggccgtctcggcggcaacctcgtcgagcgtgggcgcgagcatcttgcacggaccgcaccacgtggcgaagaagtccacgagaacgggaccctgcgcatcaagcaccttggactggaaatcggaagaagaaacgacctcgctcatgttaaagcctcctttgtaggggccgcgcgcatctctcacccgcggcaattcttgttcgcatcgtattgtaaacgcgtttgctcaactgtgcatcaaattgttacggttcggagcatgaatctcgacattcccgacattttcgcccggtgaacggtcgtcgaggacggtctcctccatcgttgctccacagacggcggccttgttgcacgtcttgcctgcgaatgctcgaggggcgggcgcgctgagatataatcggagacgacccacagaaaggaacccgcatgagcgaaacgaccgagcacgccttcgcagcacccgcctcctcgcccgcatcgtcgcacgtgcccgcttggcgcggacacggcaccgtcccggtgaacctcgtgctggaaggcggcgccatgcgcggccagttcacggccggcgtgctggacttcttcatggatcagaagctgttctgcgagcgcgtcatcggcgtgtcggcgggtgcgctgtgcggctacaactacgtggccggcgaagacggccgcacgtgctacctcaacacgaagtactgcgacgactggcgttatctgtccatgaagagcttcgtgcgcaccggcaacgcctgcgggcgcgagttcgccttcgacgagatccccaaccgcctggagccgttcgactacgccgggttcgaccagtcgcccatgcagctgatcgccgtttccagcgacctcgtcaccggcgaggcggactaccaccccttcgccgactcgctggccgacctgccctacctcatcgcgtcgtcgtccatgccgctggtcagccagaccgtggacgtcgacggcaagctgctgctggacggcggcacctgcgacagcgtgcccattatgtactcgatgctgacgggcgcgcgcaagcacatcgtggtgctcacgcaggcggccgactacgtgaaaggaccgaacaagctcatggccatcctgcgccagcgctatggactgtacccccactacctcgagcgcctgcagcaccgccactacgagtacaaccgcacgtaccgcgcgctgcctcgcctgcacgatgccggaaagctgttcctcatcaggcctcccgagccggttaccgtgggcagcatggagcgcgacgccgacaagctgttcgcgctctacgagcagggctacgccgaagcggcccgtcgctggcccgcgctccaggcgtacctggaggcgtaaaggccggctcagcgcacccgcatcgcaaggcgtcccgttcgcacgaacggcctgcgcatgtggccctcttcccgcgcagttgtccggcgcacagcggcgcgcccgcgccgaagccgcaggacgtcgcgccacgctctcgcccgcatcgaagccgcagg

SEQ ID NO: 9174 - DNA, 4053 bp, Unknown
  gut microbiota DNA sequence
cacggatgcgcagaaccggcggagcccgcgcgggcgacgcgatccggctccgacccctcctcgcctcgaggcaccctgatgcgctcaaatgtttcacgtaaaacaatctggtgcttgagaacagatgtttcacgtgaaacattcggatccttcgccgtttctagcggttcgccaagggcggctcgatcccggtgccccctctttcgcggcatgcgggggcgggactcgcgggcggagcgcgaggcgcgcgggacgggcaggcaaagcgcagggcgcgcgggactcgcgggcggagcgcggggcgcgcggggcgggagggcaagccgtcgcgtccgacgcgaatgggctcgcttcagcatcggcctgacgacgggctggcaagcgggatggcagagattgcacgctatgcacgattatttgggtccgtcgtcaaaggcgtaggaagaaaacccaggtcggaagaaacggcgatggcggcgaatcgtgcatagcgtgcaatctctgccatgcagaggcatgcagaggcgacgcgagcgggggcacgggcgacccgccgtagagcctatgccaacacgggctccaccctgcaccccgcttcgacgcgcccgattatttcacgtgaagcaatcgggcgcttgagagcaaatgtttcacgcgaagcatcttggccgcgcgcaggtgccgcgtgccgaaaaatcacacgcggacggaccaggcgcgcggggaccaggcgcgcgggtgcggcgctccagagggcctgacgggaacgcaggctccctaggcgtcgcggtccgcttccccgccttcggccggcccgccttccgcagcgcgctcgtcgaagcctccttgcaacgcgtcggcatcgagccggtcgcgcgcatcctgagcccggaactcggacacgaacccagctgagaagatgccggccggaatggccaccacgccgattgacaggagcatcgtgcagaagccgacgaggcgcccggcggccgtgacgggcacgaggtcgccgtagcccgtggtggtgatggtggtcatcgcccagtacatgcccgtgaacacgctgtcgaacttctcgggctgcacgggatgctcgatttcgtacatgagcacgctggccgttacggtgagcagggcgagcaccatgaatgccgccacgatctccgggcggcgctttcggaacacgcacgcgatggagcgcagaccgcgcatgtagcgcgacagcttgataaggcgcacgaggcggacgatgcgagccgcgttcagcatgggggacgacacgggcacgaacagcacgagcaaaccgggcgcgaaggccagcaggtcgatgatccccatcggcgacagcgcgtagcgcatgcgtgcgcgagcgggcgatgcgtcgggatggacgaggtcggcagtccacaggcgcgcagcgtactccaagccgaagcacacgctggacgccagcccgaaggccagaagcgccgccgacaccccggccgggatgccgggctgcgtctcggcgaacacgaggatcgcgttcgcgacgatgagcgcgaacagcgcgatgcccacgatgcgcgcgacggcgttgccgcgccgcacgtcctcgagcgcaaagtacgcctgccgcttgaacgccgagggggcgcggcggggcgcgcgcttcgcatcccgcgcaccccccgcgtgccctgcgtttcgcctcgctgcgcccatcgcgtcggccccttacgcctgctcgagggtcacggcggtgccggaggcggtcaccataagcatgttgccttgacccagcacctcgtaatccatgtccacgcccaccacggcgtgcgcgcccatggaggccgcacgctgctccagctcctgcagagcctcgttgcgggtctgcagaagctcctgctcgtagccctcgctgcggccgcccacgatgttgcggatgcccgcgccgaaatcgcgcaggaagttgatgccggtgataacctcgccgaacacgatgccgtagtagccggtgatgcggtagccttcgacggagggggtagtggtcacgatcatgggcgttcctttcaacggacgagcgaaccgatgcgctttgcgtgtccgttagcataccacgatcagcgcggagccgagggtgtacaatagcaacgtttacctgcacctatgccaaacatgcacgaaaggcaacctatgaccgtcgacctcgtttcgctcgccatcatcgcgctcgtcgcggcagcctgcccgatcgtcgccaaactcatccccaacaagctggttcccgagacggtgttcctgctcatcgccggagcgttgctggggccgaacatgacgggcgccatcgtgctcaccgacgcggtagggctgctgtccgacctcggcctggcgtttttgttcctgctagccggctacgagatcaatccgaagagcctcaccgggagccagggcaagcgcgggctggcaacctggtgcgtatccatcgtcctggcgttcctcttcgtgcatttcgccagcggcctgttttccaacgagctcgagtcggttgccatcgccatcgcgttgaccacgacggcgttgggcacgctcatgcccatcctgaaggagcgcgggctcatgggaacgcaggtgggcgaatccgtcctcgcttacggcacctggggcgagctgggcccggtgctggccatggcgctgctcttgtccacgcgcgcggaatggaagaccgttctcatcctgctcgcgttcgtcgccttgtgcgtggtggcggccgtcgttcccgcgaaggcgaagaaggccgggcacaagctgttcaacttcctcaccgagaacgcggaaggcacctcccagaccatgatgcgcgtcaccgtgctgctgctggtggggctggtggcgctctccgcggcgttcgacctcgacatcgtgctgggcgcgttcgccgccgggttcgtgctgcgctacatcattcccgagggcgatcacgcgctggagcataagctggacggcgtggcgtacggcttcctcattcccgtgttcttcgtcgcctcgggcgcgaagatcgacctcatggccgtgttccaacagcctgtggtgctggtcgggttcatcgtgctgctcctgctcatccgcaccgtgcccatattcgtcgcactcgccaccggcaaggacacgcgcagcatctccacgcacaaccgcttgaccatcgccctgtactgcaccacggcgctgcccatcatcgtggcggtgacctcggtagccgtgagcgcaaacgccatgtcgcaggagacggccagcgtgctggtggccgccggagccatcaccgtgttcctcatgccgctgatgggcatgctcacttatcgcgtggccgacgcgaagcccatcgaggccgtgaaggagatcagccgcaacccgcgcgacatcggcgacatcctgcgcgagcactgggagctggagcgcatgctggcacgcaaggaggcgctcgagcggctggcggcacggcgcgaggagcgcggccgagacggcgagtcctgggaggagcaagcggcgctgctgcaacgtcgctcggcccgcaagcgcgccatcgacgaggcgctcgacctggccgcgcaggagatagcgcgtcgcgagctggcacccgatgcccgtcccgacggagacgacccgctgctggcgcaggctctgcagcatcgcgaagagcggcggcgtcgcatggccgagcgcgttgtgcgcgagtaccgtcggcgcatggacgagatgggtcgtgcggcagagcggatgggactgagcgaagacgacgtcaggcagatgttcgaggacgcgcgacaacgtcgcgacgagcaccccgacgaacgcgacggccggcggcgctagcccgcgcggcgggccgaggacccgttcgcagcctccgcgccgctgtcgcaatcagggaagaacacctccatgcggctggccggcgcctgcttgccggccagcgagcctgcgaccatgcacacgccagccacgacgatgcctatgacgatctgatgcagatcggccactttgaagccgagcgccatcgttgcgcaatacgccagc

SEQ ID NO: 9175 - DNA, 3130 bp, Unknown
  gut microbiota DNA sequence
tccatatgacgtcgggcggcacgacggccagcacgaacaccaccgcgcccagccccagcgtaaccgcctggctcgacacggacagcgcacgctcccccatgcggcggccgcgcgcttcggcgtaatgcatccacacgtccttgaccagcgccgaggatgacgagataagcagcgaggacacggtggagatggaggcggccaccggccctatgatggcgatgcccgccagcaccggcggcaacgtccgcgagatggccagcgggatgatgttgtccacgctgccgccgtaggccgccagatcctcggtgagcacgccggcggccaacacgccgagcgccgtgacgccgatcatcatggcgccgatgatgacggtgcccacgatcatggcgcggtggagcgatttcacgtccttgtaccccatcgtgcgcaccaccgactgcggcaggacgaacgtgaacacgcccacgagtagccactgggtaaggtacagcgacggcggcatgttgccgccggacgtgggctccagcatctcggggtgattctgcgcgatcgagcccatgatggcctcgtagccgccgccggcgtccaggatgcccgcggccaggaccacgatgcccacgagcatggcgatgccgcagagcgcatcggtcagcgccacgccgcggaagccgccgatggtggtgaacaggatcacggcaacgccgaagagcacgaggccgaacacgtaggagtagccggtcacggcctcgaacagcttcgcaccgcccacgaactgcgcgatcatggtggcgccgaagaacacgacgacgatggcggccgacaagttcgcgagcgcgttcgatccgtagcgagcccggatgacgtcggccaccgtgatcgcatcgagcttgcgcgcgatgagcgccatcttcttgcccacgatgccgtacagcagaacgagcgccgtcacctgcaccacggccatgtacacccagccgaagccgatgctccacgcctggcccggaccgcccacgaacgagctcaccgacccgtacgtggcgatggtggtcatggccagcacgaagccgcccaggccgcggttgccgatgaagtactccttcacgaagccgccgccgtccgacgcgctctgcgtgcggtggcgcacgaccacgctgagccctacggcgaacgcgaggaacagcgcgacggggacgagcgcggcgaggttacccatcgaggccctcctcgtcgtccagcgggaagtcggcgaacacgaaccgcgccagcacgatggcggcgatgaccgcggcgacccatgtgcccatgcaccccgcgattatccacaaaggcgtgccgaacagctggacgtcgaagcctgcgagcccgaacccgcccacgagccacaccgccacgatgacggccagcgctgccgccgtggccttcgcctccctgttcgtctgagcgagcttatcccgatagctcgcaagttccctctgcgccatgcgcgcacctccccgccgtcgccgcgccgtttcgtccaacgtatggtacaccaagcgcagccgtcccgcgcgccccagttggggctagatggccgatgacaccttttccagcaaatcggctttgccgttgacgcccatcttcgcgtagatgcggcgcacgtggctcttcaccgtgttgagcgacaccaccaactcgtcggcggcctcggcgaacgtgcggccctccatgagcaggcgcagcacgtcctcctcgcggcgcgtcaggtcgtaggagcgcgcgaggcgcgcgcaagtggcgtcgaggccggtgccccattccgaccccggtgcggcagccggcgttgcaggtcggggagccggccgatggagctgcagataagccacggcagcggccatgtcgcggttgcgccagcggcgctcgagcagcaggcacgacgggaacgacaagagacacgcgcaggcggcgaacgtcgcggccgcatcgacgccccgcgtatcgagcgccataagcgatccgacaagggtcacgccgaagcaggcagcccacgcgcccgccgcccgatacgccgtgcggttgacgcgcgtgcggaaaaacgcccgcaccaccgccgcgcagaacgcggcgtacacgacgcacgtcagcgccagcaccgccaccgtcaaccacgaaaccatcgccgccccttcccttttgccgcttggatcgtcccagcatagcgcaagccgcccggcgcggccggcagaaccggtgatgaaaaacttcatcattgccgcatcgccgagggtcgtgctaggttggatgcagaagaacacgaagaaggagagccttatgagcgcagcacgcagcagaatcgcacggaccctgatcggcgccgcctgcatcggggcggccacctgcgcgttcgtctggttcgccttccagttcgcccccggcgagccgcgcgagctgaccgtcggagacgagagctacgcgtcgtccatcgaagccagcggaaacagccgatacgtcgcagaagggattgtcgacatccccttcgggcaaacttacaaaaccgatggattgacctggggtaaatggttcagcgtcagcgaggatgaacggagctcctggtccgacgaggagcgcgagcaacgcctcgcgtctgaatcgtacctctacgactccagcggcatcgagttcgccgcacagggactcaagacggtctcgctggaggctttcgcggagtggtaccctcattatgcggagacgacgggctacaccgaggcacgcaagcacgcatgcaaggtactgctcgtcgatatcgcgatgacgaacacaagcgatcatgcccaaacgctcccccgtttcgttctatggagcgaggacgccaacggagcgaacgacacgctggaaaatgggatgggcagcgacaaatacctgttcgaagaaatgtacggcgaatcctccgaccgcggcctcgtggaaaagcacctacccgatggctggaacgtgctcgagcccggagaaacgcgcagttggaccgtaccgtccctcatctacgagaacacgttccgcgatccggcggcctacgagaacatcgacccgtcccgcttctgcgtagctttggccgactacgacccgcccaccatctatcgcctctggctgggct

SEQ ID NO: 9176 - DNA, 8360 bp, Unknown
  gut microbiota DNA sequence
ccccacgcttcctataacgatctcaatgtgatatcatattcgtatcacctcgctgaggtggcgggcgagcgcatggggcgcggagcctgagagagaaagggatcatcatgtccgtcgagaagaccgttcatgcaaggagcggctggccgatgctggcgcttctgctcgccgtcgtcgcgctgtgcgtcgcgttgatcgtgacgggggcgaccatggctccgcccgatgatgcgcctatcacgaccgcgacgcaaacgctcggcattgcgctgctggtggcgggcatcgtcgccgtatgcgtggcgcccgtcctgctgctgatgggcttcttcaccatccagccgaaccaggcgcgcgtgctcatcctgttcggcgactacaagggcaccgtgcgcgacgaaggtttccactgggccaacccgttctactcccgcaacgccggctccacggtcgacgtggccacgggcaagcccatcgcgaagtccacgaaggtctcgctgcgcgcccgcacgtacaacggcgagcacctcaaggtgaacgacaagtgcggcaaccccatcgagatcgccgacgtcatcgtgtggcgcgtcgagaacacggcgaaagcgctgttcgacgtggacgactacaacacctacgtgcatacgcaaagcgagacggcgctgcgtcatgtggccaccacgtacgcctatgaccagatgcccggcgagcccgaagacgagatcacgctgcgcagcaacatcgaggaggtgtccgaggcgctcaaggaagagttggcggtgcgcctggagaaggccggcgtggtcatcgacgacgcgcgcctcacgcacctggcgtacgcgccggagatcgcccaggcgatgctgcgccgccagcaggccgaagccgtcatcgccgcccgcgagaagatcgtgcagggcgcggtgagcatggtggacatggcgctggccgagctgtcggcgaagaacgtggtagacttggacgacgagcgcaaggccgccatggtgtcgaacctcatggtggtgctctgcggcgagtccgacgcgcagcccgtgctgaacacgggaacgctgtaccagtaggaaggaacgctgcggcgcggcgccacgcgccgtgccgcagcttcggtggcaagctatggcgaagcgaaaacagtatcccctgcgcatcgattcggaggtgtgggccggcatcgaacggtgggccgccgacgatttgcgcagcgtgaacgcccaggtggagttcatcctgcgccgggcgctcaaggacgcggggcgcctcaaggacgaaggcggccggcagcccgggcatccgggacgcacgggagacgaagaagcgcccgcggagtgattccgcgggcgcttccgttcgttcgggcaggaaaggggagggcggttacgccagcacctcttcgcgctcgacgacttcttccagcttctcgcgcgccggagcgcgggaggagtcgtgctcggagccctgcacgcggccgagcttcgtgttgtcctccttgcggttgcgcagcgcgcgcaccgggctgggctggtcctcgatgcggtagtcctcgccgtccttcttctgcgcctcgcggatgacgcggtggctgggcacgttctgaatgcggccgttcacctggtcgttccagccgaagaagcggtagtcgccgggcagctcgtccagttcgacgaactcctcttccttcgcggtgagggtcgcctgctcgtccagcacctcgcgcacgtagtccttcgtggggtggaagtccagaagctcggggaactcgccgtcggggatgagcgactgccattccatgttctcgtgcttgtacagcaggtcggcggccttgtgcaggtgcccgacttcctgctcgaagtgctgctcccagatcttcttcacgtacgggtcgacctcggtctcgtagaacgaatagtacaggtacgtctccatgtactcgcgcagaagcaggttctgcagccaggtggccgaagggtcgagcagcgcgccgtagtgcgtgacgtgctcttcctcgaccatgccgatttccaggtagaggtcgcgcgcgatgccttcgggctgcgtgttgcccaggttcatgtagaagttcatggtctgctgctcgccggccgtcaggatgagcgcgccgaggatcgtgcggatgtcggcggtcttggcgttgcgcggggcgcggaccgagtcgaacggatggcgatggtgcgcgacggtgggacggcccggcgtgatctcgatggtgtcgagcacgagctcgtgggcgggcaggtcctcgtcgaccttgagcaggttcgcgtagcggtacaggtggtcgaagtcctcgagcagggcgaagtccatgcaggatttcgcgtacgcgtcgggctcgtgcatggcgagccaggccgtgaggtcgacggccagctgctcgtagccgatggtggtctcaagcggcgtctcgtcggagggcgacagccagttcacgtgcttctgctgaccggcctcgatgcggcgcatgagggcgaggtcgcggcgcaggtcgttgtcctcgcagttgcggttgaagttgtggccgaacatcacggcctccacctcgataccgttcatgaggatgatgcgcgccttggtgtacggatcggtttccagcttcttgtaagggcggggcgaaagatccttccagtccagcatcatgtcctcaagggatttcgtcggtttctggtcaaacgggttcatagagcctcctgttcgtttgctgacggttgcccttgccatgctagaggcggcgctcgcgcgcgttgccgcccgccgcggaggcgtttcggggtcgtgggagggatgtaacggcctcggaagccggggcggcagtgctatactgggcgacggcaaacaacggcgtacaaggcaaggtgcgaacgcgtatgatcatcaggaagtccccggccgagatcgaggccatgaaggaagcgggccgcgtgtcggccaaggtgctgcgcgaagtaggcgcgcaggtgcggcccggcgtgtccacgctcgagctggacgagctggccgaggcgctcatccgggcggaaggcggcgtgcccgcgttcaagggctacggcgggttccccggctccatctgcgcatcggtgaacgagcagatcgtgcacggcatcccttcgcgcagcgtggtgctcaaggagggcgacatcatctccatcgacacgggcgccatcgtggacggctgggtgggcgacaacgcgtggacgtacgcggtggggaagatctcgccggagaagaagcgcctgctggacgtgaccgagcggtgcatgtgggccgggctcgacgccgcgcgaccgggcaaccggctgggcgacatcggccacgccgtgcagagcgtggccgaggaagcgggctacggcgtggtgcgcgagtacgtggggcacggcatcgggcgcgacatgcacgaggatcccaacgtgccgaacttcggccgcaagcacaccggcgtgaagctggaggagggcatggtgctggccatcgagccgatgatcaacctgggcacgtacaagacgcgccagatgcccgacgggtggctcgtgtgcacgcgcgacggcctgccgtcggcgcacttcgagaagacggtggccatcaccgaggacggccccgtgatcctgaccaccgaagaggggcataggcgaccggtgtagaaaaatgtccccattgggaacgggcgccttttgggcatttacacaccggttgccatccagaggatgaagacgagctgccagacgttcatgagggagagggcgaacacgagcaggacgcgtccgctgtgcgcgtcgctttgatatttcgcggccagcttgtccatgaacgcgtagaggatagtggccagcacgccgaaacccaccaagaaggaacttatctcgaacgcgccgaatttcgagcccacgcgatcgacgccgcctgcgcctgcgtgaagcgggatggtgtcgggcagcacgaacaggacggcgagcccggtcatgacgagcgggagcagcgtgagcgcgatcatcgcgatcaaccctgaacgtttcatccttgctccttcttcacgcaaatgttccaaatgaggaccgtccccttatgggctgttcgctacttcagctgcttgccgtcggtgtcccagtagaagcgcttgaacttggggatctggttcacgtgcatcaccttcgcccagacgttgtgcatgaacgagtcgggcgcgtagtgcaacgggtagggctcgggggtgcggcgcagcgtctcgagggcctgctgcaggcgcgcgcggttctccatgctgcgatccagcacgtagcgcggcacgcagctgtagacgaacggatcgtacgcctcccggtagtcgatggtctcgcccagcaggaactcgcgcacgatgagctcgacgaagttctggccgcccaggctcatgtagtacgtgttgcggccgcagcgcgtgttcacctcgaagaagcggaacgagccgtcgcgctcgtccagcttgatgtcgaagttcgcgaagccgcggtagcccgtgcgcttgaggaagcgcttggcgcacgcgatgatctcgggctctcgctcgcccatgatgcacagcgggttgccgagtgctgtggggtcgtggtcctgcaggcatacgacgccgcccgacaccacgcgcacctcgcccgaggcgtccgagaatgtggtgagcgtgcggatggcgtcgtcgccgccggggatgaagtcctgcagcaccagctcgttgtcgtaatcggaggtgcggatgtcgcgccacacctgagccagctcctcggcgctttcgatctcgtagatcttgcgcttgcgggggatgtcggcgtcttggaactgcgccgagttcgacggcttcgcgatcagcgggtaggggaagtcctgcaccggcagctcggctgggccgctctcgccgcagtcgaagtaccaggtgcgggggtaggggatgtccagttcgtcgcacagctcgtagaagcggcgcttctgcgtgatgtcgtcgagcaggtcgaagtcgatgtagggaaccgtgtagccggccgcttccaagcgcggctttcccgacgacagcatgcgcgcgtggcagtcgtcgcagcccagcaccagcagcacgcggtcggggtcctcggcgcgcacttgggcggccacgcgctcgagcgcgtcgtagaggccttccggctcgtggatgagcggctccaggcggtagtcggtgaagcggctcgacgacagcatcttgatgtcctgcgtggccagcacgatggtgcgctcgacgccgtaggcgcggtgcagctcgcggacgtagctgtaggccaggatgtcgccgcctacgacgacgggctgcaatcggcgcgcgacgtcggcggtagatgcgatgcggggtgaagcgggcatgtcgggttctccttatgtacggtataccgcagcattatcccatagctcgctttcggcgtggcgcgggaagcgaatctccgtgaagagccgagaaacgcggggcggcgatccgttggccgcgggctgggggctgcgtctggatatggggtttccatcgccgcccttggggattgcgcggcggtggcgtatcataccgaaggatatgaacgcacccgccgcgcgagaagcgcaggcgcgcacgcaggaggagccgatcatatgtgcggattcgtgggattcaccgcggtcgattacgataccgataccaacaaggccgttgtcaaggacatggccgatcgcatcgcccatcgcgggcccgacgacgagggcttcttcgtggacgacgacatcgccatgggcttccgccgcttgagcatcatcgacctcgagggctcgcgccagcccatgcagaacgccgacggcacggtgaccgtcacgttcaacggcgagatctacaacttccaggagctgcgcgccgagcttgaggcgctgggctacgagttcgtcacgaacggcgacaccgagaccatcgtccacggctacgaggcgtggggcaccgacgtgttcgagaagctgcgcggcatgttcgccatcgccatctgggacgcgccgaagaagcgcctcgtgtgcgcgcgcgacctgttcggcatcaagccgttctactaccagcacgacggcaaccgtctgatctacggcagcgagatcaaggcgtttctggcgcacccggcgttcaagaaggaactcaaccgcgagatgctgccgcagtacctgtgcttcgagtacatgaacgactcgcagaccatgtttaaggacgtgcacaagctgttgcccggccacttcatggtgttcgagggcggcaagctgaacgtcgagtgctactaccatatcacgtacaagatcgacgagtcgaagggtctggacgagtgggccgacgagatcaaccgcgtgttcgacgagtcggtggcggcgcatgagatcgccgacgtggagatcggcagcttcctgtcgggcggcatcgacagctcgctggccgcgtactgcatgggccagcacgcgcccgacatcaagacgttctcggtgggctacgatatcggctgcgaggacaagctggccgagatcaacgcgctgcccgacttcgacatcaagctgaacgagctggacgacgccaccgccttcgccgagtgggcgaagctgccgaactggcaggtaaaggtagacgcgcaggagttccttgacatcgtgcccaccgagcagtaccacatggacgagccgctgggcgcacccagcgccatcccgctgttcttcgtcagcaagctggcgcgcgaacaggtgaaggtggtgcagtcgggcgagggcgccgacgagctgttcggcggctactggatctaccacgaccagttcgagttcgacaagtacttcaaggtgccgcgccctttgcgcgccgccgcgggcgcggtggccgagaagctgccgtccttccacgggcgccgcttcgccatgcgcggctcgggtgggccggagaagagctaccagcgcgcgagcatgaactacatgtgggacgagatccccaacgtgctgaaagactacgacggcccctgcaagccgtgggagtggtgcaagccgcacttcgacgaggccgcgaagcagaacctggacatcatcacgcagacgcagtacgtggacatggtcagctacatgccgttcgacatctgcctgaaggccgacaagatgtccatgtcgcagtcgcttgagctgcgcgtgccgttcttggacaagaaggtgctcgacgtggcgctgcagctgcccacggcatgtcgcgtggacgacgaccacgcgaagtacgcgctgcgcgtggccgccagcaagctgggcttccagaagaaggtggcgaacatgccaaagcagccgttcatcacgcctttgaccgtgtggctgcagaccgacctgtactacgaccgcatcaagcaagcgttcacgggcgaggccgcgcacgagttcttcaacgtggactacctcgtgcagatgctcgacgaccacaagtcggccgacttcagcacggtcgagggtcgcggcaagctcaagatgatgcgcatctggaacatctactgcttcctgtgctggtacgaggtgttcttcgggaaatcgagcgagcagctgaagccgaagacgcaggtggcgtaaagcgactgtgttggagtgtgcgcgcccggccgaccagccgggcgcgttgcgtttcgggggagggccgtccggcgcgcgcgaggaagatcggtgtcctgagcggggtgcgttcgaaattttggcaagatcacgtccatatgcgagcctttgcgcgccttcggtcggccatgtccgccggtgcgattgtgaaaccgcaggtcggacgacttccggactgctatattcttgagtgaggatagccatatcggcctgatcataccaggattccgcggcggccatgtgcgcgctgcttgccgtatcgggcggcttgtcatcggccgaatttgcacaaaaagcgtcgacgttcgatgttgtgaacgctcgcgcttcttcttgcccgcttgttcgtcggcgttttccctgcacgttgattgcgggggaggctttggctggggcgatggtcgagcaaagcatccaacgtcggcgatttttgttcaggagacgcccttttcgttgcagtcatgatgacggcagggccttctttgcgaaaagcggcggcggaggatgctgcaaattcgactgagtgcgaatcaaaggcgaacatgatcgatgcgggaggttcgcacccgatgcgggatcgattcgatcgtcgaggttgagacagtgcggttggctgcttgcacggaatgcaggatattgtgctcgattccttctctatgccatgatcgttgcggtcgcatcctcatgcagggcgcggggattgaaat

SEQ ID NO: 9177 - DNA, 33441 bp, Unknown
  gut microbiota DNA sequence
gcacccccatgcagggcgcgtggatcgaagtctctacgggatcgagccggtcaaggcgtccggcggtcgcaccctcatgcagggcgcgtggattgaaattggtatcgaagtcactgcgccacagccatgccgacggtcgcaccctcatgaaaggtgcggggattgaaatcggtttcgggccactccgctccgccccttccgctcttcgtgtgcagcaaaaacgaggttttggcagtcttgaccgcttgggacgacgtgttttcgaggtcgggtgccgtgtttccggggcgcggtcgagtgtcatctggggttttgccgcggtgccgtctcgggtgcgaggactcctcgtgccaaaacctcgtttttgctgcacatcgccttgtgaaaacgtgcggcggggcatttttcaggcagctgtgggggcgggttgggcgcgaaacggctcccatgacaatcgcaaggcggcttcgacctgctttgacgcgccttatcgcctcatgcggtcgtatgatcccaggtgacgaaatccacgtgcgaccgtcgatacccgactcgaccgccgaaactgtcataggagccgtttcgcgtccaacccgccaaccgcccgccaacccgccaacccgtcgacgcagcgcctccccgccatccctcgcgcagctgcgacagcgctcccttgcgacaacgagaagttgccgggccgtcaatgcatgcatgacgggggaggcgaccgccccatgatacgcttgcagcgttgaaacacgtgttgaacgaaacatcgcctcgagggacatcagcgacgatgcctgggccttgcacggctttggcaccgcatacattcgagtgaccggagggatcacgtggatacgtctgcaacaaccaatcatggggaatcgaacaacgcgaacggcggcttctcgcgcaggacgttcgtcaagggcggcttggccgccggcgtcgctgcgctgggcggaatggcgctgacgggatgcgccgcagcaccggcttcatcgaagcaggcggctgccgccgacgccgccgctccgaccgacgagatcaccgcgcgcctggtggagcgcgtgcacgacgccaacctgcccgacgcggcgcccatcctgccggtggagccgccggcgtcgtgggacgacgaggccgacgtggtcatcgtcggtgtgggcggcggcggtatcgtggccacggcgtttctcgcccagcaggggctcaaggtcatcggcatcgagaaagagggccaggtgggcggtgcgagccgccatgcctgcacgttcgccaacgtgttcggcggctcgaaggaccagaacgcgctggagttcagcgtgcccacgttcccgcccgacgtgaaggcgttcacccgcatgtacgaggagcagaacgcctactccatcgacgagaagttcctcatgaaccagctgctcatgtccggtcccgcgtgcgactggatcatggagcaagacggcatgaacatggaatgcttcgggcccatctggcacgacgccgacgtccacgccggcaagcagagcgtggtgctgggcatgaacaaccccacgaacgccatggaagccgttgcgctggcagcgggcgccgacatccgcctgtccacgaagtgcgagaagctcgtggctgacggcggtcgcgtggtgggcgtcgtggccaaggggccggatggcaaggagcgctacgtcaaggccgagaagggcgtcatcctgtgcgcgggcggcttcggcatgaaccgcgacctgatccgcgcctacctgccgagcgcctacgagggcaccgtgcaaggcggtcccatgccgtcgcatacgggcgaagccttccgcatgggtctgggcatgggcgccgacttctccggcttcgattcgtggagctgttgggaaggcgccatcgacgaggagacggccggcggcgacggccagttctggcactatttctggcacggcgagcgccagctgttccacaacccgtggctcatcatcgacaagcggggcaaccgccagccgtacttcgcagccacgcaggagctgttcgcgaacccgggcgggcagatgggcgacctgagcaactgcgcggcctggatgtcggcggtgggacatcatgtgtactccatctgcgactccgacttcccgaccaccgtgttcgagaagaacgtgctcaccgacgagggcaccgaccgcaaccgcattcccatcaccgacccgagcacgctgatcgacacgaagggcctcgtgtcggcagactggctggccgaggtcgacgaggcggtggagcgcggcgccgtgaagaaggccgacaccatcgaggagctggccgatatgctgctgctcgaccgcgacgtgctggtgcgcgcggtgaaagagtacaacgagctgtgcgagaagggcgtggatgacgagatgtccacgccgtacgacccctcgtggctgcatcccgtggtgaagccgccgttctacggggccatcatcggcagccagatggcgaagacgatgtgcggcctgcgcaccgacgagcatctgcaggtcatgcgcgaggacggctcgctcatcgagggtttgtacgccaacgccaccacggcgggcggcctgtcgggcgaggcgaactacggctgcttctggaactcgacggtgttcggcggggtgggcaccagttggatcaccgggtggatcgcggcgaagtcgctgttggacgcccagtagggttgcgtcggcgcgtcggatcggcttccggcgcgccgcgctcagcgccgcatgccgttgcggatgaagccgaccagcttgagcgccagcggcttcgcaagcgtctcgcgataggcgaggcacaggggcagctcgatccggtcgctcggatggaacggcaggaagaccgactgcgggtaggccttctccatgcgcggatcgaaaggctgcagatgcaccccgcctccgctgcagaacgcgtcgatggcctcgtcgttcaacggcacttcgcgaaagctcggatcgaagccgtgctcgtggcaggcggtaatgaaggcgttggtgaacagatcgaagtcgaaggggcttctgatgggaaccccttcgaggtcggcgatgcggacggacgcccgcctgccgaaggggttggacctcagcgtgatcacgcgcgtctccacggggccgagcggcacgagcctgatgccggggcgcttgtaggttccgtgcacgaagccgaggtcgatggcttcttcctccagggcgttcaggatggcggtatcggacatcttgaacgtggagacggagcacccaggcgtgcggtagacgaactcgtcgatgagcgccaccgcttcgtgacccttgttgaaaaataggtaatcgagcgggaacgacttgaacgcgatggccagcgattccgtctgccgcgcgcccgcgccctgcgcttgcacgtacaagtcgatctcgtccagctcgcgcagcaccgcttcggcgtgaacgaggatctcgcggccgttttcggtaaggcgcatcccgtcgtcgcggtcgaacagctcgaaccccgtctcgtgctcgagcgagcggatggccttggagacggcctgcttggagacgtacaactcctcggcggccttcgccgcgcttccgcaatgcgccacggctgacaggtatctcaactgatgaagctccacgcagcacctcccctgtgctcgcttgcgcccgcgcaggcgctatccgcgtcccagcttgcccttcaccttgcccacgatggagccgacgaaggcggcttcgggcacgcgcagcttgatggacaggccgaacgtcaccacaagcgccacgatgccaccggccagcacgtaggcgagggcctgcgggatggaaccggacagcggcgcgacgaacatctgcagcgcgaacagcacgccgccgcccgcagcggcgcccaggccgccgaacagaaggccgcgcgcgcacgctttcgccaccgaccgcaggccgaacggcccgagacgacggcgcaggtaggcgaacaggcatacgtcggcaacaacgtagaagagcacctcggctaccgcgatgatctcgatggggaagcgctccacgttggccgcgccgaacatcgtgagcgcgatctgcgccgcgccggccacgaagttgaacgccgcgaacacgcccatcttccgcaagctggagaagatcttctgcaagtacgtgttcacgccgtacacgggcagggcgaaggccaacacggtcatgtacgtggcgatggagttgacgttgtccatggtgaacgcgcctgcatggtacagggtgaccagcggcagcgcgaacaccataaggtacagcgcgaaggggatcatgaagaacaggatctggttcgtgccgccgatgatgccgcgcttcacgccttcggtatcgccttcggcctgcatgtcggcgagttcggtgaacatggcggtggtgatgggcaccgcgaggaacgcgtaggggagcgtgaaccattggcgtgcgtacaacaggatggacgggccgttgtcggagaacccgtaagccgccgccgtctgcactgaaaccacgatggtggagcacagcatgacgaacagcgcggggatgcccagccccagcgtctcgcgtagcgcggggtctcggaaatcaacgcggggccgtatgcggatgccgttcttcttgagcgccggcagctggatggccagctgcacgaacacgcccagcgggttgccgatggcgatgatatacagtgccatctcctggttctgcggcgccacgacggcgtacaggatgaacgtggcgatgacgatgacgttgttcgccacgggcgcgatggacgaccacagatagtcgcgattcgcgttgagcaggcccgacacgatagcgcacgctccgtagaacacgatctgaatggcgaaaaactggaagaagaacaccgactgggccatctcggtttgatcggagtagaagctttgcgtgtagatggccaccgacgggaacgcgatgcacagcgcggagatgatgccgaggaacagcaccacgagcgtgagcaggttcgacgcgtactggttgccggcctgctgccccagcttcttcttcaccgacaggtacacgggcagaaacgccgtcacgaggatgccgcccaccaccatctcgtacagcatgttcggcagcccgttcgccacctggtacgagctggacagcagcgtcgatcccagcgcgaacgccatgatccacgtgcgagcgaagccggtgatgcgcgagatcatcacgcacacgctgatgagcgctgccgacgacccgacagcggcggcggtgtcttccggctcgtgctctggctgtggggcgcgggccagcgtgcgatcggcgcccgcgtgcttgctgatgatgggaagctccgaggtcgatccgggaaacgccgcccgctcggcgcgcgagctgggcgccgagcggcgggcggcttcgcgcggatcgggggtcgagggctcgaaggggtctcgaggcggcgtagtgcggtcgtggccggcgtggcggccgccgatgcggatctccgaggtttctccgggagcggccgcgcgcagacgcgctttcgcgctcgtcggatcgaggcgaggctgcggtttgggaacgacctgctgggccacggccgccgcgatgacggtgcggtcgagcccggcgtggcggccgcccaccctgatctccgacgtcgaaccggggtcggcagcgcgcacgtgcgtgcgctgggggcgtcgaggcgcttcggcgggctgctcgagtgccggttcggcaacgcgcgtgtgttgagctcgtgcgagcttgtcggacatggacgaacgcttcctcatgcttcggatataatgaccccatcatagcaaacccggaaagaagaccctcatgcgcatcctcatcgtacgcaataattccaactcgcaagccgtggacgcatcgctgctgctcgcaacgtatttggccacgcagggcctggactacacgctggtcgattcgtccgatctgtcgtgccgctgcgaccatgaggagctgaacggagcgctggcgtcgggcgtcgagatggcggttgtgctgggaggcgacggcaccatcctgcgcacggctcgccagatcgggacctcgggcgtgcccattctcggcatcaatttcggacggctgggctttctggcgaacacgggcgatgagggcgtgatcgccgtggtcgcgtcggcgctggcgggcgacgtggtggccgagcagcgcacgaacctgcgcatcgacgtggtgtgcgagggcgagcccgacccgtggggcgacgacgatgaggcggcggcgcacgacgtggacgatccggcgcgcacgttcttcgcgctcaacgagctggccgtgacgcgcggcgccaacgggcgcatcatcgacttctcgctgggcatctcgggcgcgcacatcgccgacatgcgcggcgacgggctggtggtggcaacggccaccggatcgacggcttacgcgctgtcggcgggcgggccgctggtggctcccggcttcaacggcctggtggccgtgccgctggcgccgcacaccctgcattcgcgcgctatcgtgacggcggccaacgacgtggtggagatggacctgtcgctcaaccgcgatccccgtgaggccgcgctgttcgcagacggcgagctgctttcgttcgacgcgccggtgaagcgcgtctacgtcagccgcggagccgttcccaccacgctgctgcgctaccggcatgacggattctacgagcacgccgccaaggtgttcttctaagaggttggcaatgcccctgcggcagtcgaaacccatcatcgcccgaaaaacacgctccagcggctgaggcgtgtttttcgggcgatgatgcgttgcggcccgggagggaggagggcgcctacagccaaagacggtaggcggtactgcttgagaaatcgaccatctggatgcagaagtcggagggatcgagctcgtcgaacgagttttggtctttcaaggcgttcttgttgactttgaacggcaggatcagcgtctgtgactctcctggctcgattcggagcaattcgtcacggttgtagttttcgttcgcgaacacgaatgcgtcgtcaagcaccactccggcccctaagctgtcgtctatatagtcgaggttttcgctccatagcgtaacatgctcaaggggcagcttgtaccattgctgtataaggttgtcggaggcgttggttatggttacggtgaccgctataagctcgctgtcgtcgtataccgggcggtacgtccctgcgtattcgggataccattcagcgaagcccttggtcgtgatggttttgatttcggacacggataggtcgatgtcggggcattcgtactcccattcgccgttctctttgtagaagtctaccaattcggaaggggtgcgttccacctcgtccggatgcctgacgtaacgttggccttgcgtgatgttccttagcttcatcgttgatcccggatcgaaatcgacgatcttagataacccgtatccggtttcagaatagagcccgtcgccgatgcggggctcgggctcgcggggatcccctgggatgtagcgtcccacgaaccagcccatcacgagggctacgacgatcaagcagacggttcctgcggctatgcggacggttcgcgtgttcttcatgacggcctcctccggtcggcggcgatcgggtcggttcccgattcgattcgagccgaacctaccattgcgcaaggcgaagctgcaacggtgatttaattcacccctgctttgatctgggtctcatgctattgtaggatccaagttggggacggcggaacgcgcatggcttcgagaaggatatcggtatgacggacataatagcaacggcggtgatccttgtctgcgtcggcgcgacgttttgcgccacgtgctatgccatcgcgcgtttcgcgtacttcgatcggcgtgcgcgagcggatttgctcctcgcgttctactgcgttgtcgtgttcgccggtgcggtggtcgggtgcctcgcgttcaccgacgcgtacggaaacgtcgcgtctgccgttttcgcagcccttctgtgcggatgctcggcagcggtaggcgcgcttctgcggaaaacgtgggctcagactgatgagctggagcggcggcgcgttgaggatttgcgggggctcgtcgatcgctaccgcacggaggagggctcgatcgagtcgcggtgcgcgcatgcggcgcggacgttcgatctgacgcggcgcgaggaggaggttctggcgctgctgctcaagggctgcacccgttccgagatcgcgcgagagctgttcgtatcgggcgatacggtgaagactcacatccgcaatctgtaccgcaaaacgggcgtaacgggaaaggacgagctcgttcaggcgatagggggaaggggccttgtttagggcttcctcgctcttggcatctcattgcagaataatgcataccgcctgatcgtattggctgaatcgtcatcgtttgaataattttttagtggctccaaatattccttcaaacgccattgacttgccatcgcccgtggcgtatcttagctaactaagttttcgtgtttacgacagggggactgtcgaataaggggtacagtacgtatgagcgagcaagacacgacgagcacgcagagccttccagtagatgatgccaaaccaaatgccactcaacgccagacgggcggcgacaacgctgccggcgatgtcgcgcagggcaatggtttcggcgcgacttctgatccggcatctgtcgacaacgcttccgatgccggggcttcaaacgcttcgcatcccatttccaacatagctgccgacgccgccaagaataccggcaagatcctcggcatgtccaagcatgtattcgccgcgctggtggccgttgtcgccgtgggcgctgccgtaggggttggcgtcgtgctgacgcagcagcctgcgctggaagactggtacgactcgaacgccgcgcaaggccagttcgagggcaagtcgaaggaagagatccaggcggcgcttaacgaggaagtggcgaagggcatgatgaacatctccatcgcggcctccatcacgttccccgacggcgcatccgagggggaggcgcgcatcgagaacatcgcggcgaacccgatggaccagaaagtggtcatcacgctgaaagattcgggcgagacggtgtacgagtcggctgccatagcgcccgaccagcatattcaaacgatcaagctgacgaaggatcttgatcccggacagtacgccgccgtggccacgttcaccggctacgatcgcgagacgcacaagcagaccggccaggcggccgctgaaattgttttgaacgtcgaaggctaaggggccttctgcgaagaggatacgtagagcacatctggcaacgtaagggcacatcgggaaagggaaagatcatgagtaagatgacgaatttgaaaaagggcgtcgtaggcgtttgcgcagcaacgatgctgacagggctatgcgcggttcctgcgttcgcagagaatgcagttagcgcgaccaatggaggcgctctctctaatgatggaaaggggacgacacaggtcagcattcaaagtcaaaatgatcagatttccgccactgttccttctgagatcaagttggttgttagctctgataagagttttgttgcaccgacgaccgcgaaaatcatcaatacgggaactttggtttccgttaaggtatctagcgtgcaggttactactaccggtggttcgcttgtaactgaagctgctatttcgaccgctgctgaagatgctgccgttttgaaggtttccaaaggtggatcgagttttgtagatgcgggatcgattgatctttccacggcgacaacggatcccctctctttgactgattggacgattatgcccggtgctgatctggctgtgcattttggaggaaaggtaaataaactctcctcgcttaacgcgatatcgcttgcgaacgttgtttggacgatcgcttaaagttccaagctcttactcgagaggacgcggtttctcgtatggcaaagctgcgagagagtatcgtaggtatgaggcaggtcacatctaggattggtgcggcctgctcgctttgtgcgctactggtgctcggattgttgtggccggtgccggtttcgtttgcggctgagaaggacgcggctgcctccgaagcggccgcggacgctgcggctccgaaggcaccggttgacgacgtcggcaacgtcatggttgaagcgccctcggaggctcctgctccgagcgggccgcagttgcaacccgaatccgagccaattgcccccgatactcccatcgttcccgaatacgagcgcgcatggcctatcggtgcggacgatgcctcggcggtgttggctgagctgtggcccgacgggacgttcgtggtcgacggggcggggaagacagtcgcgttcgataaggtcgaggacgtcccttggctggctgcgggcgaggccggcgacatcaagcgcgtgatcttcgccgacaaggtggaagcgacgagcttggctcattggttcgagggatgctcgaacctgagcgagatcgcgaacgtgcccgccagcgtcgaagatctgacgcgcgcgttctacgattgcccgaagctcgtcgagcttcccgacgaattcgcattcgccgacgaggcggtcgcggatgaatgcttcggcttcgaggagccggctgaaacgctgctggccacggtgtatcgaggcgcggacgagaacgtgctggggtacgcatggaatctcgacgggcgcgagcttgtgaatcccgatgcgccggagccgccgacggttgaagagccggatgattccgcggagcccaaggatcccgtcgaatctgaaacgcccgaagactccgagggcgtcgaggatcccgacgattcgagggacctcgatgcttccgcggacgaatctgtagagcagccggcggacgagcttaccgacaagctcgcgaacgcgcccgccgaagaggcgcccgcccccgaaccgcctgccgagccggaatccgaacctgcgctcgcaccccaagaggaagcccaggtcaacatcaccgtcccttcgtcggtttccatggttctgaacgccgaaggcgacaacaccgctctcatccccgttgcggcggcgaaccgctcggaacgcaacgtggccatcgtgggcgttcgtctcaagcgcgccgaccaggacttgccggggggctcgtggtcgctcaccaccgaaagcggctccacgacattcgtgcaggacgcgcgcttcacaccgctgggacttgaagcgacgttcgaccggccggtgctgctagctgcaggcgatgagaacacgatgctcgtgtggcacggaacgttcaccgactacggtatgaagacgctgctcaacgccacgatcgacgcggacggcaacagcttcgcctacggctcgatgatctggatcgtcgccgccgcgtaacgacgacgggagcatcttcgcccgaaaaacacgcctcagacgttggagcgtgtttttcgggcgaagatgagccgctgcgggggcaatcgtctcgggctacatcgaatcgcggcgcaagcgctccgcttctgcgagcagctcggcaggaacgctggctgagctgcgaatctcgtcagatgagcgcataaggcgcccttgctcgttgttgtcgcccacaagcagcccgttcgcgaagaatacgctcgatccatccagaaccaggttgtatacctcgaaatcgtgcgaaacgcacccgatggcttttccgagcgtcagattgctcgtcgcgggctcgtgcggagcgagctcgatgctttcgatggcgacgcagccgccctccgtgcgaagccgatcgtccacgacgacctcgctgcatcgcttgacgcccttgtcggtgaacagggggtggttccccgtcgcgacgaggttgccgccttgcgcgagcccgatgcgaaccagctcgggctcgcgccctttgatgatgtcgcgtatatgcgcggttcctgtttcggttcttaccaaatcgccgatacgcaggtcgcgaatggggcgctggctgccatcggccatgagcacgagggttgacgcttcgacgcaacaacaaccgttcatcttgcaccgccttacttgtgattactatttgtgatagtacctatgctgctcgtacttcggctcgcagcagacgttgatgccgagggtgcggtacagcttctcgtcggtggccgacaggatcacgctgaagaacgcgtcgcagccgtataggtcgttcacgtggtcgatcagcttcttcgccagcggatcggtggccgagctgatggacagcgcgatgagcgtctcatcggagtgtaggcgggggttgcggctgttcagctgctcggttttcaggcggcagatgggcgtgatggcctcgtcgctgatcacgtcgatgtcgtcgtccacgccggccaggcccttgagcgcgttcatcagcagcgacgatgccgcgcccagcagcgacgacgtcttgcccgtcaccaccgagccgtcgggcagtaccatcgctccagccgggccgccggtggtctcctccttcagcagcgccgccgagcgcgcgggagacaagctcgcgttcacgcctgcctggttcatcagcagctccaggcgttccatgcgctcctggcccacgcccgagcgcttcacttccaccgcggtttggaagtagcggcgcacgatctccatcttcgcggcgtcgcgcacggcctcgtcgtccacgatggcgttgccggccatgttcacgcccatgtcggtgggcgactggtacgggctggtgcccgagatacgctccatcatggccttcagcacggggaatatctccacgtcgcggttgtagttgaccgtggtgatgccgtaggcttccagatggaagggatcgatggtgttcgcgtcgtcgaggtccaccgtggccgcctcgtaggcgatgttcaccgggtgcttcagcggcaggttccacacggggaacgtctcgtacttggcgtagccggccgcgatgccgcgctcatgctcgtggtacagctgcgacaggcacgtggccatcttgcccgagccggggccgggcgccgtcaccaccacgagggggcgcgtcgtttccacgtattcgttcttgccgtagccctcttcgctgacgatgcggtcgatgtcgtacggatagccggcgatagggtagtgcaggtagcttttgatgcccaggctttccaggcggcggcggaacgcgccggccgagggttggttcgcgtagtgggtgatcaccacaccgctggtggcgaagcccatggagcggaagatgtccatgaggcgcagcacgtcctcgtcgtaggtgatgcccaagtctccgcggaccttgctcttctcgatgtcgttggcgttgatggcgatgatgatctccacctcgtcggccaggctcttgagcatgcggatcttggagtcgggctcgaacccgggcagcacgcgcgcggcatggtagtcgtcgaacagctttccgccgaattccagatagagcttgccgccgaactgattgatgcggttgcggatatgctcggcctgaagcgcgatgtacttgtcgttgtcgaacccgatgcgcatggaatccctcttcttcttcgaaccgttctgctcttgcactaatgtaacagcataccacgatagcgggcgaacccgcgtcaaaccatcagctgtacagagccgcgtaggggtgcgaggcgcgggctgtcatttcatgccgttgaccagcgacagcagctcttctcgcgagctgacgtccagtttgcggtaaatattgcggatgtgggtgcgcgcggtgttgtcggagatgaacagcgttttggagatgtataccgacccgtatcccaggctcaggtactgcagtatctcgcgttcgcgcttcgtgagggcgtacccgttcgctagcgtcacgatgcgttcgtgctgcaatgcatgcagcgtatcggtttcaccttcgttccgcatgcctgcatcctgcaaagcgtcgggatcgtccgtcgagcaagcctgctgccatgcgacgaagccgaggtgcaccaccacgatgcagaagtatgaggaaagcacgacccacaggtacggccctaaattcacatccggcggcacgttcgcctgcaccgtcatgcccaaaagcgatgccgcacagctgagcaggaaggccgccgagaacacgaagggcagagggaattctcccgcctcggccatggcgaccagcgatgagagcgcgaagagcgatagcagggcgagaggcgcgtatacgagcatcgctcccgccacgaacagcgtcgtccccgtcgggaagctgcccagcacgatgctcaccgcgacgcacgccggaacagccaagcggtcgatcagcataacgaacgggcttttcaaccgcattgcgcaaagcgccacgacgacggccgatgcaacgatggcgcccgtgtactcgcttcgtcccgctcccacgtcggcgtcgaacgaataagcggccatcatgaacgagcagacgagaaagcccagcagcggcacccatatgatcgataggaatgtcctgagagaagatgcaagccctgtcagcgtgttcgacgggctttccgcgtcaggggagccggtgaagccgcccccgccgttttcgatgccggagacgctctgtgcgtcctcatccgtctcgtgcgtgcatttctcgattccgaacaacagggggagaaccgatcccgttatggcgagaacgccttccgcggctaccgcgaacgggtcggacaaaagcgaaacgatccaggcgacagccgacgagctggcgcacgcgatggcaccgtagaacatcacgctgcgaaaatccattagatacagacgcacccaccgcatgatcaccggcgccatgcatgccccggccgtgacgccgagcgctgcgaacaagacgacgttacggtatccggctgcgagcagaatccagatcgccaccaagactgcggcgtacgtccaagcgcagcctgtggcgatcgggcgccctttgcgcgtttcgaagccaggccagctggggcgttgcgccgagaagagcaggatggcgagggctgtcgcaaagcaagagagcagcatggcgaaaagaaagtcgccagcgggcgagacgttcggtgcgaaacgcagcataaggtaggagttgggcggatagaggggcgccgaggcaaggaaagccgctaacagcaaaaggcgggggcggaaacggatgggaggttgggcggctagcctgttcaagtacgtgccgtttgccatgcgaaagcccccctttggcttctccgatgtttcctgcccattgtactccagccgagtcgtccttcggactcgcgttctccgaaagccggtcgcctcgatgtcttttcagtccgatcatctggtaaaacgaaaaaatactgcaacgcggtgatgcgcttcacgcactgcggttattctccctgttccacgtgcgtcctatggttgcgtcgttgcaagggcggcgcatggagcgctgctcgattcaccctgaaggagggagatcatgaacaacgaaaagcaaaagaaagagctggccgacggcctcacgcgtcgcgggttcctcacgctaggaggcgtggcggcgctgggagcgggagcagcgttggcgggatgttcgccgcaggcgtcttcggcaagctcggcgggcgatgctgcgacggctgcgagcgcggccgacgccgccgaaggacttgccccgtcgccgtggggagactattatccttggcccgccaatcctcctgagatcaccgacgatatggtggaggaagagcttgactgcgacgtggcggtcgtgggtctgggcgtctcgggcgtcgcggcgttccgtgcggcgtccgagggcggcgccaaggtcgtcggcatcgagaagggttccatgccgcagcagcgctccagccagtactgctacttgaacggcaagctgaccgacaccttcggcctgccccacctcgaccttgaggccatcatcaaggaagagttccaggagtgcgccagcatcacgaattacaatatcgtccgcaagttcgtcttgggcgacgcggaggctatggactggtggatcgagggcgcggattgcgagatcctcgagaattacgagatgtcgatggatcccagcgcggacgttcccaacggcgtcagctgcatgagcgatccgaccatcgactgggagagcgagccgcaggccgctttccccgaatgcctgaacttcaccgaccatcaggccgtgctcgacaacaatttccagaagggcctcgatgccggcacgggctccgaagcgtatttcggccatttcgccgaagcgctcatccaaaacgatgaaggtcgcgtggtgggcgtgtacgcgcgcaacgccgataccggcaagtacaagaagatcaacgctgaaaacggcgtgtgcctggcatcgggctgctgtcgatccaacgaggacatggtgcgctacttcgcaccgaacctcatctggaacggcaacggcaacccatggccgaacatggacgtcgagggcaaccgcaccaatacgggcgacggctacaagctggggtactgggcgggtgcttccatccagcagtaccagtgctcgcagatgcacgtgatggggggtccgggcgacaccgattcgcagaacgattccatgggcttcaccggaccgctgttgcgcatcaactacaacggcgagcggttcatgaacgaggacacctgcgccgccgatgccgagtatcccatcgagctgcagcccaagcacaagtgcttcatgatcaccgacagccacttcgaagagaatgctgcgaagtgcgtgaacacgttcgcggccacgctcgccgagtgggacgagcgggtgggcgacggcaccatcttcaagggccagacgctgcgcgagttgttcgagagcatcgacggcatggacgtcgatgcagcgctggccacggtcgagcgctacaacgagctgtgcgagaagggcgtcgacgaggactacgccaagcaggcgaagtacctgatgcccgtgaccgacgacggcccgtactacgcgcagcgcatgggcgtgggcctgtgcctggtcatgatgggcggcttggaatccaaccagaacgcccaggtgctcgacctcgagcgccaggtgatccccggcttgtatgcgtccggcaacatccagggcagccgcttcgctatcaagtaccccttccgtctgagcggccacagccacgcgatggccatgttctacggcaaggtggccggcgagaacgccgcagccggtttgtagacaactaacctgatcattcgacggtgccgtcctttgccggatgtgcgcacccctccctctccggtgcaagggccgggcacgcgctctcgatgcgcggcgcccggcccttgcgctgtctgcgcctcttgcatctggctcgcgcatcggctgccgtgccgtgggtgttacggctttgttaattgcgccgggcaatgcggctccgacctcgtgcatgccgtagaatgaaaagacgtttggaggcaggatccgctgtgctcttcgggcgtatttcgtgcgcggccaggcgccgtctccgaatcatatgaagcacgcatagcatgataggagaatcatggccaagcacatcttcgttaccgggggcgtcgtctcgtcgctgggcaagggcattacggccgcgtcgctggggcacttgctcaaggcgcgcgggtaccaagtgaccatgcagaagatggatccgtacctcaacgtggatccgggaaccatgtcgccgttccagcacggcgaagtgttcgtcaccgaggacgggcacgaaggcgatctcgacctggggcactacgagcgcttcatcgacgagaacctcacgcgcgagtccaacttcacgcagggatccatctaccagagcctcatcgcgcgcgagcggcgcggcgactacctgggcggcaccgtgcaggtgattccgcacgtcaccgaggccatcaaggcgcgcctgcggcgcatcgccgaccaaaccggcgccgacatcgtcatatccgagatcggcggcaccgtcggcgacatcgagtcgctgccgttcatcgaggccgcgcgccagttcaagaaggagctgccgtacggcgacgtgctgttcgttcacgtgacgctggtgccttatatagccgcagcgcacgaggtgaagacgaagcccacgcagcattcggtgaaggagctgcgctccatcggcgtgcagcccgacttcatcgtgtgccgctcggaccacgagatcgaggacggcgtgcgcgagaagatcgcgctgttctgcgacgtgcggcccgaggaggtgctggtctgcaccgacgcgccgtccatctacgaggtgccgctgggcttgcacgagcagcgcttcgacgagatggtgctcgaccggttgtgcctcgagcggcgttcggccgacttggcgcccctgcgctcgttcttggccgcggcggacgcttgcgatgaggaggtggacgtggccgtggtgggcaagtacgtgagcctgcccgacgcgtatctgtcggtgatcgaggcgctcgggcatgcgggggtgcgctgcggatgccgcgtgaacgtgcacctcgtggacggcgaggagctgtcggacgcgaacgcgggggcggtgctgggcggcatggacggcatcctcgtgccgggcggtttcggccagcgcgccttcgagggcaagatcgccgcggctcgctacgcgcgcaagcagggcattccctacttgggcatctgcctggggctgcaggctgccgtatgcatgttcgcgcgcgacgcggccggcatgtccggggccacgtcggccgagttcgatgccgaggcggcctttcccgtggtggacctcatgcccgagcaggaggatgtggagggcaagggcggaaccatgcgcctgggagcttatccgtgcaaggtggagccgggcacgaaggcgttcgaggcttacggcgaatctattatatatgagcgtcaccgtcatcgttatgaggtgaacaacgccttccgcgagcgcttggtcgaagcggggctttcggtgtcgggcgcgtcgccggacgggcggctcgtggagatggtggagctgcccggccatccgtggttcgtcgccagccagggccatcccgagttcaagagccgccccacgcggccccatccgctgttctgcggtttcgtgagcgccgccgccgtgcgtcgcgcctagggaggacggtggcgcgcttcctgcggacgcgcagcgtcctcatcgccgcgaaggcgtgctatcctgtgaactatatcatgcaggcggttcgacgggcggagcgcggatgtttcacgtgaaacatccgttcgaagttttgcggtggcgcggcgacgacgaaggtggcggatggacgagctgtatcgagagtacctggcgtatctgcgcgtcgagcgaggcagctctccgttgaccgtgtccgcgtacgccgccgacctcaaggactacgcgcagtttctcgagaaacgcggggtcgagtcgctggacgacgtcgatcgcgaggtcatcgtagcttacgagtcggatctgttcggccgcgggtatgcggcctcgacggtggaccgccatgtgtccgtgctcaaggggttccaccgcttcctcgtgcgagaaggctacgcgcgccgcaatccggccgacactatccagcttcccaaggcgcccgaccgtcttcccgacgtgctttcggtggcgcaggtggacgccatgctgtcgcgcccgctggacgaaggccctctggcccttcgcaaccgggccatcctcgaggtcctgtacggttgcgggctgcgcgtgagcgagtgcacggggctcgatttgggcgacgccatcttggaggaaggttatcttcatatcctgggcaaggggaataaggaacgcatcgcccccatctcgggcgccgcgctgcgcgcgctgcgcgactacctcgagcgcggacgccccgagctcgtccgctcgtacgcgaaatccacctcggccgtgttcctcaacgcgcgcggcgggcggctgacgcgccagagcgtgcactccctcgtcgccgaggccggccgcttcatcggcgtggcgaaccttcatccgcacacgctgcgccattccttcgccacccacatgctcgccggcggcgccgatctgcgcgtcatccaagagatcctggggcattcggacatctccaccacccagatctacacccatgtgaaccgcacccatatccgcgaggagtatctgagcgcccatccccgcgcgaagtagggaggcgctcttcgtctcccactttgccccctgctaactcaatttcaaacatccgttcgctgttttgtgcctgatgggagggggcggcgaactgaaattcaggttgaagatccatcctgccacagattccgcataactccccacttcgtcccaccgcgggggcgggcggcctacatgttgtgcccgcccaagcgcgtccgttctacatgtggtcgtgtcgtttttcggttggcaggggagcggttaacgggaaagagtccggtgggtttcaggatgggcaaaaagggggtcaagtcgcatattttgttgcgaagtggggcgaagtgggatagaattccatacatcgaaagagccgtgggacggcggcggaaaggaaggcatggcggaagagggcaacaaggttgtcgatctcaacagcgcgtaccgccataaggtggacgccaaaggccgcatgtcgcttcccgcatcgtttcgcaaggttctctcgacggatctggtggtaacccgcaacccgaaggacgagtgcctctacgtgttcgagcccgatgcgttcaacgcatgggtggccggcgtgttcgaggacaagttcgagaagttcgaccgcaccaacgatctccatgttcgcctgcgccgcaagctgaagtcgcgtgcagccgatgtgtccatcgacgcagccggccgcatcatgatctcggccgagcagcgcgaagccgtgggaatcgacaaggaggtcgtcgtcgtgggcaacacgggctacttcgagatctgggacgcaaagcgctacgacgcggtggacgacgagaccgacctcggtctgttgttcgactgatcgaaaggcgtgagcgatatgacaagcgaatatcggcatacacccgttctgctcgccgagtgcctcgaatactcgaacctcaaaccacagcatacattcgtggacgcaacactcggcggtgcagggcattccttcgaagcggccaagctcatcgggagcgggggcacgctcatcggcatcgatcaagacgaggtggcgctggccgctgcccgtcgcaaactcgggacgttgcctgacgacgtgcgcccgcgcctggaactcgtgcgcggcaacttcggaaatatggatgaagcgctcctcagcacggaggtgcccggcgtcgatgcggttctgttcgacctcggagtgtcttcggtgcagatcgacacgccgtctcgaggcttctccttcaaggagaacggccctcttgatatgcggatggatccgggtaaacaaacccttaccgcagcagagatcatcaacacctacaccgcagcagatctcactcggatcatccgtacctactcggacgagaagtgggccagccgtatcgcggacttcgcggtgcgggcgcggcaaactgctcccatcgagacgagcgagcagctggtcgacatcatcaaagccgccatccccgcctcggcgcgccgtgccggggggcacccggcgaagcgcacgttccaagcgctgcgcatcgaggtgaacggcgagctcgatgtgctgagaagcggcctcgatgcggccatccgctggctcaaccccggcggccgcctggtggtcatcagctaccactcgcttgaggaccgcatcgtcaaggaaacgttcgccaagttcgcgaaccgatgcacgtgccctccggatctgccggtgtgcatgtgcgggaagcagccgatactcgacatcgtcaccaggaagccggttctgccgacggccgaagaaatcgagcgcaacgctcgcgcacgcagcgccaagcttcgcgtagcgcagaaacgataagcaaaaacgtcccgctgacgcaagcgggagccatatgcaccgcacgcgacctttacatgcagtcgaaacacagaaagggggtcggacatgggcgcagcaccagcgtattcgtactatcccgagcgcgcacccgaacgcagcccgcgcgagcgcatcagcgtcgttccgggccgcggcacccgcacgcagacccccacgcttccgtcgaacgtcgtgttcttggcgaaggcggcggcggtcgtgttgctggtggtgtcgcttgtgggattcgcgcgcatcgggctcatgtccgcgacgatctccacgacgatgcagtcgagccagctgaccagccagatcagcgacgcccgctcttcgggtgccgcgctggaagtgtcccagagcacgctgtccaatccgacgaaggtgaagcagcaggcgggcaagctgggcatggccgctcccgagaccacgggggtcatcactctggataaggacgtcgtcgcaaccgacgagtccggcgccctgtccctttcgaagagcgttgccatagcggctggctccgaggcgtaaagccgatgtccgatagaccgcacacgccgcgaggcgagcgccctgctcgcggtcgcggaagctcccgctcgtccgcacgcccctcgcgtccgccgcgcgcggcgcgtccggtgcgcgcctccggccgcccggctgcggcggtcgacttcaactcgaattcgaaccgggtgttccttcccattctcgccttcgccgtcatcgcgtcgctgttcgtgctgcgcttggcgtacctgcaggtgatagccgcccctgccatggcttcggaagccgagaacgcgcgtatgagctacgactggatcgagccgcgccgcggcaccatctacgatcgcaacggcgtggtgctggccacctccgtggagtcgaccaccatctacatcgacccggtggaagtcgacgacgcggacgcgacggctcaggtgctcgtcgacgtgctgggcggccagaagtccgactacctggaagccatcaccgctccgaacacgcggtacgcggtggtgaaggagaaggccgacgtggcggtgggggacgctctcaaggagcgcgtgcgcgagctctcggcttcgggtgggtcgcgcgaaggcatggacttcggcatccgctataagacgctgtggaagcgcgagtatccgaacgctcaggtgggaggccaggtcatcggcgcatgcacgctggaaaccgatgccgagaacaaccgcgagtactacaagggggtatcgggcctcgagctgtactacgacgacgtgctgtcaggcgaggcgggctacacgcgcgaggagcgcagccccgacggcacgcccattcccggcggcacgcgcgactccaaggcggccgtggacggcgaggacatcatcatatccatcgacatagagctgcagcaatccgtcgaggagcgcctgacggccgatgccaagggcatcacggccaacggcggcagcgccatcgtgatggacggcggcacgggagagatctacgccgcggcgtcactgccgctgctcaatccggccgaccggacgaatatggaagcggatgcgccgaagctcaaatgcgtgaccgacctgttcgagccaggctccatcttcaaatcggtgtcggccatggccatcctggaagctggcaccatgacgcccgacaccgagctgttctgcccgtcttccatcgaggccgacggctacgtcattggggatgcgcacgagcgcggcgatgccacgtacacgctgcggcagatcatggaccagtcgtcgaacgtcggcatctcgctggccaccgagaacgcgacggtgggcgacgtgtcggggttccggaacctctacaacaagatcaacgagtacaacctgcacacgaaaacgggcgtggactatccgggcgagggcgaagccggcaccgagtacctggggaacctgcttcccttcgacgattggagtaaggtcaccgcctacaacgtcagcttcgggcagggcctgtcgctcacgccgttgcagatcacccgcttctacggagcgctcgtgaacgacggcgtggagtgcacgccgcacttcctcctgtcgaagccccaaagcggcgagacggccgagtacggaagtgacaccgtcatcaaggacaagaaagccatcgacgatctgaccagcatgctgaagaccgtcgtcaccgagggcacgggcaaggccgccgccatcgacggcttcaacgtggcgggcaagacgtccacggcggagatctacgacgagaagaacggcggctaccgaaaaggggtgtacaacctggccttcaccggtttcctggccgattcttccagccaattggtttgttttgtgggtgccaacgaggttcccaccgacggtgtggtcacgccgatttttaaggatataatgacaacagccatcgaccgattcaacatttatccggagtgaggaagccatgggcaagacctgtaccgaactgttcgcaggtatcgactgcaccatcctcggcaacgccgacgacgaggtgaacggtatcgcctaccgcagcgaccgggtgcaacccggcgacgcgttcttctgcgtggtaggcatgacgacggatgggcactcgttcgcccaggacgccatcgatcggggcgcgaaagtgctcgtggtcgagcgcaaggtgtacctggccgacgctacggacgtcacggagatcgtggtgaaggatacgcgcaaggccatggcggccgcggcggcgaacttctacgaccatccttccaaggacattgcgctggtgggcatcaccggcaccaacggcaagaccaccacgacctacctggtagagcacatcgcgcgggtagcggggaagcgcacgggcgtcatcggaaccgtgggcatccgcatcggcgacgaggccgagaaatcggctcataccacgccggaatcgcccgatttgcagcagctgttcgcccgcatgcgcgatgcgcgctgcgacgtcgtggccatggaggtgagctctcatgcgctcgacctcgatcgcacgtgggacgccgcattcgccgttacggcgttctccaacttgacgcaggatcacctggactaccatcacacgttcgaggcctacttcgaggcgaaggcgcgcctgttctcgaaagattatccggccaagcgcgtgatctgcatcgacgacaagtggggcaaagagctgctgcggcgttgctcggttgccgaagacagcgtggtcacgacgggcttcgatccttccgcgcagatacatcccgtggacgtgcagtatgctcctacccacaccaccgtcacgctcgacgtgcgcggcagcttgcatacattcgactacccgctcgtgggcaagttcaacgtggagaacgtcatgtgcgccttcggcatcgggctgcagctgggcttcccggccgagaccatcgtcgaagcgctcgaggaggcgccgcagatcccgggtcgtttggagcgcgtgagcgcgccgaacacgggcggcgtgtcggtgttcgtggactacgcccacacgcccgacgcgctggagaaggcgctcgcgtccatcatggcgctcacgcccggccgcaccgtctgcgtgttcggctgcggcggcgaccgcgatgccagcaagcgtcccatcatgggcaaggccgccctggcggccgaccatgcggtggtgacgtcggacaacccgcgcaccgaagatccgcaggccatcatcgaggacatcgtgagcggaatgagctcgggagccggccgcttcgaagtggaggccgaccgtcgcgccgccatcgcgcgcgccatcgcacaggcgaagccgggcgactcgattctcatcgcgggcaagggccacgaggactatcagctcgtgggcgaccaagtgctctcgttcgacgatcgcatcgtggccgccgaggagctcgcgcgtgcgttcggcgacgaacccgcaggcgaggatcgatagcatgcgtttgaaccacaagcagatcgccgcatgcacgggaggctcgttcatggtggagccgcttgatccgcgcgcgctggccacggggctcacctgggactcgcgcgacgcgaagccgggcgacgtgtacgtcgcgctgccgggcgagcgcgtggacggccacgacttcgtcggtgcggccctctcgggcggtgccgtgtgtgcgcttgtgatgcagccgctggacgaggccgtgcgcatgttggccgccgagctgggcgcaagcgttatcgaggtgcccgacacggcccacgccgtggcggacatcgcgcgcgaatggcgctctcacctgcacggtcgcgtgatcgcgctgacgggttccaccggcaagaccaccacgaagaaccttgtgcgcgacgtgctggcaagcacgctgtccacggtggcgacggccggcaaccagaacaacgagctgggcgttcccaagacgctgctcgccgccgagcaggacacgcaggcggtggtggtggagatgggcatgcgcggcgcgggccagctggccgacctatgcgactacgtgcgccccgattggggcctcgtggtgaacgtgggcgagagccatatcgagcttctgggcagccgcgagaacatcgcgcgcgccaaggccgagcttctgtgcgcgctgccggagggcacgggccgggcgttcgtgaacgccgacgacgactacgccgatttcgtgcgcgagcatgcgcgcctcgacgcgcgccgcgtggagaccgtgctgttcgacggctccgccgccgcagccgagcgccgcgcccaggccgatgccgccgaagcggcgcgtcccgccgtgtgggccgagcaggtggagctcgacgagcagggtcgcccgcgctttcggctgcacgccgtcggcttcgcggacgcccctgaggaggagacggcgcgctgcgcgctcacgctgcgcggcctgcacaacgtgtcgaacgcatgcgccgcgaccgcggtcggccgcgcctgcggcatcccgctggccgtctgcgccgatgccctcgcgcatgccgagccggaagccggccgccaggaagtgctccgtgcgcgcggcgggttcaccgtggtgaacgacgcctacaacgccaaccccgactccatgcgcgcctcgcttgcgacgttctgcgcgctggacgtgccgggcaagcacgtggccgtgctcggcgacatgggcgagctgggaagctacgccccggcctgccatgcgggcatcggggagttcgccgccacgctgccgctcgaccggctcgtgtgcgtgggcgagctgtccctgcacatagccgacgccgctgagcgcgccggcatggatccccagcgcatcgtgcgcgcgggctctctttctgaagtgttcggagatttggacgcctgcgtcgagcccggagacgccgtgctggtgaaggcgtctcatttcatgggtctgactcgcgtagtcgaaggactggtcaattagctatgtttacggtattcaaccaatatccgacgtttctcgtgttccttgccgtcgtgttcgccatggtggtgaccatggtgctcacgccgctgtggatcaagttcctcaagtcgagccatatcggccagcaggtgcgcgccgacggccccgagagccacctcgtgaagcagggcacgcccaccatgggcggcgtcatcatgctgatcgcggtcatcgcggtggcgctgttcgtcggcatgcccacgcccgagacgttcgtgctgctggcggctaccgtgctcacgggtctgctgggtctcgtcgacgacgcgtcgaaagtggtgaaggagcgctcgctcggtctcaccccgaaggcgaagatcgtggggcaggtggccattgccacggcgttcgtgctcgtggccgtgaactggctgggcatacagcccaccgtggagattcccttcgtcgtgacgctcgatttcggcatcctgaccacggtggttcccgtcggcgacggcatcgccatcccctggctgtacctgctgttcatgaacatcctgctggtgggcatgtgcaacgccgtgaacctcaccgacggcctggatggtttggcggcgggcacggtcatgatcgtgatgatcgtgatggcggccatcgcgtaccgttccgatctgttggaacccgccatcttcgccgccgcgctcgcgggcgcgtgcatcgggttcctctggttcaactcgtttccggccgacatctttatgggcgacaccggatcgctcgcgctgggcatggcgctgggctgcctggccgtgctcacgaagaccgagttcgtgtcgctcatcatcggaggcctgttcgtggccgaggccctgtccgtcatgatccaggtgttctactacaagaagacgaagaagcgcatcttcctcatggcgccgttgcaccaccacttcgagaagaagggctggagcgagacgaaggtggtcgtgcgcttctggatcatctccggcgtgctggccgcgacgggcttctcgctgtacttcgccgagaccctcatggcggtggcgtagtccatggcttcgcgggagctcatagcgaatcgcaagcacgcgccgcaccatctggggcgcgtgctcgttttgggtctgggcaagagcggccgcgcggcggtcgcgtacctgctgccgcttctggacggtcgcgtggaagcgctggccgtggcggccggggcgcgcagcgcggcctccgaggaattcgcggccgaggcacgcgcggctggcgcgctcgtcgcgttcgaggacgaggcggtgggcgtgctggcggccgaggcgggcgggtcgttcgacctgtgcatcgcgagccccggcatctcgcagttctcggccttctacgaggcagccgcggccgtatcggccgaggtgatcagcgaggtggagttcgcctggcgcgagagcgccgcggacagccgctgggtggcggtgacgggcacgaacggcaagaccacggcctgcgcgctggccgcgcacgtgctggcgggggcgggccttgccgcggccgccgtgggcaacatcggcgatccgtgcatcgaggccgtggccgcggggcgtacggacgtgtacgtggccgaggtgtcgtcgtatcagctggcttccacggcgcgcttcgcgccgaacgtggccgtgctgctgaacatcacgcccgaccacctgcattggcaccgcagcttcgaggcgtaccgcgacgcgaagctcaagctgctggcgaacctgcccggcgtgccgggcgccgtggcggtgctcgacgcgacgaacgacgtggtgcgcgccgaggtgcgccgcctgcgcgcgctggacgcgggcgagcggggcttctcgtacgtgccgctgggcacggccgcggggctaaccggtgacatgcgcgccgcgtgcggcagcgacaacgccgcgttcctggacgccgacggcacgctgcgcgtggcgctgaacggtgcggagcacgctgcggcgcgcgtcgaagaactgcagatcaaaggcgagcacaacgcctcgaacgcgctggccgtggcggcagccgcgctcgcgctgggcgtgcacgagagcgacgtggccgaggggttgcgcacgttcgcgccgctcgagcaccgcatcgagccgtgcggctcggtggccggcgtgcgctgctacaacgactccaaggcgacgaacgtcgacgccacgctcaaggccctcgccgcgtttcccgaggcgcgccccgtcgtgctgttgggaggcgacgacaagggcaccgaccttgcgccgctcgtggaggccgcccacgcccatgcgggcgcggtcgtgtgcttcggcgatgcgggcgagcgattcgctgccgcgttcgaggcggcggacgcgcaggctcctgccggtttcgccgcggcgcgtgctgcgcacctcgccgacgcgttcgacgcggctctcgcgctagcttcggcgggagatgtcgtgctgctgtccccggcttgcgcctccttcgacgagttctgctcgttcgaggagcggggagccgcattcaaaacgctcgtagccgacgcggcttccgcgttgggcgcctaggcccgccatggctattcaacgtgacaagcgaggcgcgcctgcgcatatcatgggacctcggatcatcctcctgctgtcggtgctcgccctcatgctcatcggcttcgtgatgatctactcgacctcggcggtcatcactttggcgaaagccggcaccgaggttgcggtcgatccgatggccgagacgctcaaccagatcaagttcgccgtcgcgggcgtgatccttgctttgatcatctggaagttcgttcccgtctcgctctggcgcagcaatgcggtatgggttatctgggccgtggcgttcgcgctgctcgtgatcacggcggtggcgggcgtgggcgatgaggaatggggcgcccgccgatggctcatgatcggttcggccagcctgcaggcttcggagttcgcgaagatcgcgctcgtgctggtggcggcgcgtctgttcacggacttccgcgaggggcagtacaccgtgttggtgttcttcgcgctcgtgggcctgctcgtcctggctccggtgctcatcatcctgggcccccagtccgacctgggcacggccatgatctgcgtcgtgggcatcctcgcggtcatgtggctgggcgaggtgccgctgcgcacgatgctcatcgtgatcggcgtcgtggtcgccctcggcctcgtgggcatcttcggctcgtcataccgccgcgaccggctcatggtgttcatgaacccgtggaacgacggcgaaggcggcttcggcacgggcttccagctcatccactcgctgtacgcgctgtccggcggcggcctgttcggggtggggctgggaaactcgcacgagaagtatctgtacctcacccaagcggacaccgacttcatcttcgccatcatcggcgaggagctgggtttggtgggcgccgcggtggtcatcgcgctgttcttgctgttcctgtacgcgggcacccgcatcgcgcagtcgtcgcccgataacttcggcaccatggtggcgggcggctgcaccatcatgatcgcgttccaggcgttcctcaacatcgccatggtcatcgggtggttccctgtggtgggcaagcccttgccgttcatatcgtcgggcggatcgtcgctggtggccatgctcatcatggtgggcatcatcctatcggtatcgcgaggcgccgaggcgccgaccatctacgatcgccgacgcgccgatctgcgcgtcgtgcgcgcgacgaacggtgcgccgccgccctcacgcggcgggcgctcgtcgtcgagcaggggcaggaggtagcgaacatgctgatcgttctttccggcggcggaaccgccggccacatcaacccggcgctcgccttggcggacgtgctgaagcagcgcggctgcgaggtacgcttcgccggcacgcccacgggcgtggaggcgcggctcgtgcgggaggcgggcatcccgttcacgccgttcgaggcccagggtttcaaccgcaaccacccgctcacgctgccgaaggccgtgctcaccattcagaagagcacgacgctcgcgcgccggtggttcgacgagatacagcccgacgcggtggtgggcttcggcggctacgtgtgcatccccgtggcgcgcgccgccgagcagcgcggcatccccgtggtggtgcacgagcagaactcggtcatgggcatggccaacaagtacctcgccaagcgcgctgccgccgtgtgcctcacctacgagcacgcggccgaggcgctggccgacaagagccgcgtccgggtgaccggcaaccccgtgcgcgaaagcgtgttctcggccacgcgcgagcagggccgcgcgcgcttcggcgtgccggagggcgcgcgcatgctgctggtgacgggcggcagcctgggcgcgcggcacctcaaccaggccgtcgccgcgctcaaagacgggcttctggcctacggcgacctgcatatcgtgcaggtgaccggccccaaggagctcgacgccgtgcgcgagcagctggcgctttcgcccgagcagcaggctcgttggcagctgctgggctataccgaccatatgggcgacgccatggccgcggccgacatcgtcgtctcgcgcgccggcgccacgtcgctcgccgagatatcggcccgcgcgcttccggcactgctcgtgccgttcccgttcgccacagaggaccatcagaccatgaacgcgcaggcatgcgtggaggcgggcgccgcctacctcgtggccgacgccgacgtggaggggcccgagttcgcccgcaagctgcgcgagctcatcgaggacgaggacgtgcgcgcccgcatggccgccgcggcccgcgcgcagaagacgcgcgacgccgcgggcctgctggccgacgcggtcatggaagcggctcgcgcacagcgttgagcggtcgcgcgatagggtacaatagcggtttgcagtacatcagagagaccgaggacgcactatggacaccatgcacatcgaccaggtacatttcatcggcgttggaggcgtcggcatgagcggcatcgctcgcgtcgcgttcgaccagggcatgcgcgtgagcggcaccgacctcaaggagagccgctacaccaagcagctgcgcgaggcgggcatcgaggtgcacatcggccacgatccggcgaacatccccgagggaaaccccgtgatcgtcgtgtccaccgccatcctcgacaacaaccccgaactcgccgccgccaaggcgcgcggcctgaccatctggcatcgcgcccagatgctcgcctatctgggacgcgcgctccagacgctcgcggtggccggcacgcacggcaaaaccaccacgtcgtccatgctggccagcgtactggacggcatgggggaggatccgacgttcctcataggcggcatcgtgcgtgcctacggcacgaacgcgcactcgggaacgggcgcccattacgtggtggaggcagacgagagcgacaagtcgttcatgcatctgtcgccgcgcgccgtgctggtgacgaacatcgaggccgaccacctcgaccactaccgcgacctcgacgagatctacgagaagttcgcctcgttcatcgggtcggtgcccgacgacggcggcatggtggtggcctgcggcgaggacgaggcgctcgtgcgcgtggctcgcgcctccggaaagcgcctgttcacctacggcttctctgatgcgtgcgacgtgcgcatcgcctcgtacgagccgaacggcgtgggcagcgacttcacgctcgaactgcccgacggaagcgtcgtgagcgcgcacgtcaagcagaatccggg

SEQ ID NO: 9178 - DNA, 22490 bp, Unknown
  gut microbiota DNA sequence
gtgggcgaagcgggcggggtcaccgtggtcgacgactacgcgcatcatcccaccgagatcgccgctaccatcgaggccgcgtcccatctgggcttcgcgcatgtgcacgtgctgttccagccgcaccgctactcgcgcgcgccgctgttcaccgaggtgctgaaggacgatttcggtcgggcgttcgatgcggccgacgccgtcacgttcatggacgtgtacccggcgggcgaagcgcccgtccccggcgtgtcgggcaagacgttcctgaacgtggtgctcgatcatgcgggccatcccgaggccgcctacgtgccgcgccgtatcgaggtggtgccctatctcgccggcaagctgggcgagggcgacctgttgatcaccatgggcgcgggagacgtgaccgccatcggcccgcagctcgtcgacgcgctttcgcaggcggacggcgtcgccgcgcgacggcaggcgtgatgcggcgatgaccgcccgccatacctcgccgctcgaggcgctgctcgtcgacgacgcgttcgacggcgacgtgtacccttcggagcccatggctcggcataccatgtaccgcatcggcggacccgcgcgtttctacgtgcaggtggcctccgtcggagcgctcaagcgcctggtcacggtatgcgaggagagccgggtgccgtgggtggccatcggccggggcagcaacctgctcgtcgccgacgaggggtatcccggcgtggtgatcacgctcggccgcgacttccgcatctgccgctacgacgaggacgcgcacagcttctgcgtgggcgcgggcgtgccgctgtcgtcggtggtgcaggaggcgttccgtcgatcgctggcgggattcgagttcgccgtgggaacgccgggcaccgtgggcggcgcgctgcgcatgaacgcgggctcgcgcgacgagtggatcggctcgcgcgtggtgtcggtgaccacgctgtcgcccgggaaggggctggttcggcgcgacggcgaccagatcgcgtggggctaccgttccagctcgttcgcttcagacgaggtgatcgtggaatgcgaactttccgtagagcctgccgacccgttcttcatccgcggtaagatggaagcgtcgcacgcgcggcgcaagaagacgcagccgctgtcgttgccgtcgtgcggaagcgtgttccgcaatcccgaaggcgctccggtgggcgcgctcatcgaggaagccgggctcaagggtctgcgcatcggcggggcgcaggtgtcggaggtgcacgcgaacttcatcgtgaacacgggcgacgccacggcgcgcgacgtgctggaactgatcaacctggtcaagacgaaggtgtacgagacgtatggcatcgaattacaaccggaagtccgtttcctcgggttcgcgtaaggcgagcccgcgcaacagccgcgcttccgggcaggccggcaggggcgtgcgtcccgccggcggcgcgccgcgccaatccgcgcgcggcggcatgccgcgaacttcgtcgcgtgcttcgacgcccggaacctatcgcgccattcccggcggccagctgccgcagcgtcgtgcgaaccaggttcgcccgccgttgtcgtcggtgcgcgtgggggatctcgaccgcgccgagcgctcttctcgcgcgcagaaaacctaccgtcgctacctggtgcgcatcggcatcgtggccgcgctcgtgctggcgctcgtaggcggcggcctggccgtgtactactccaacctgttcaccatcgagaacgtctcggtcaccggtgtggagcatctcacggccaccgacatgtccgagcttgccagcgtgcccgccggaaccacgcttctgcgcgtcgacgccgccggcatccgcgagcgcctgctcaaagacgcctgggtggacgacgtgtcggtgaaccgcgtgttcccgaacaccctggagctggccgtcaccgagcgcaccatcacggcggtggtggacgtgcccactgagaacgccgagtcggtgcagccgtgggccatcgcctcggacggcatgtggctcatgcccatccccgaccagaattccgaggccggcaagaggaccagcccgaaggtgtacgaggacgcggccaaggtgctgcacatcaccgacgtgccctacggcacgcgccccgaggtgggcgcctactgctcggacgccaacgtgaacaacgcgctggccatcgtggacggcatgaccaccgagctggcggggcaggtgaagaaggtggcggccaccgagaccgagtccaccacgctgacgctggaaagcggcgtggagatcgtgttcggcacggccgagaacatccgcgacaaagagcgcgtctgcctcgagatcatgaaggagcatcccgacgggctggcgtacatcaacgtgcgggtggtggatcggcccacctggagggctctctagggacctgcgcgccgctgcgccttgcgggcgggcgggacgccccagtcgctcagacagtcctcgcttcgctgcgaaactcgcttggtggggcgccccgcccgcccgcaaggcgcagcggcttgagcttcctgttcgctgggagggttcgacctgggggtttgtgctcgttgtcatcctgagcgagcgtagcgagtcgaaggatcccgtgcggcggttcgggggtttccggcaggcgggaacccccgaaccgtctgtttcacagcatgcgcgatgttgccagggctacggcttcgttgcgggacgactccacggcttctaggaggcggtcgatgtcgtgcatggtggtgtaggcggctatgctggcgcggcagacggcttccgcgccgatgtggcgcaggaggggctgggcgcagtgggcgccggcgcgcactgccactccgcggcggtccagcacgtgggcgacctcggctgcgcccacgcccttcacgttgaacgagacgatgccgccgcgcggcgtctcggcgttcggcccggggccgtagagcctgacggaggggatggagtccaggccgctcaccagggcgcgggtcagctcgcgctcgtgcgcgcgcacggcgtcgaagccgatgcggtcgagatagcgcacggcttctgccagccccacggctcctgccacgttctgcgtgcccgcttcgaagcgccccggcgttccgtcgaacgaggacgcgcgctcgaacaccgcctccaccatgcccccgcctcgcagcaagggcggcgtttcctcgaggaggcgccgcttgccgtacagcacgccgatgcccatagggccgtacagcttgtggcccgagaacgcggcgaagtcgacgtcgaggtcgtgcacgtcgaggggctcgtgcgcgatgctctgcgcgcagtcgagcacggcgacggcgccgcaggcgtgcgccgcttcgatgatgcgcttgacgggcggcacggttcccagcacgttcgacatgccggtgaacgccaccacgcgggtgcgcgtgccgattgcccggtcgatctcgtcgtctgagacgaccccgtcgcggtcgggcacgatgaaggagagcctcgccccggaaagccgcgccgcggtctgccacggcacgaggttgctgtgatgctccagcagcgtgagcgcgatctcgtcgcccggctccagccgctcggcgcaataacagagcgccacggtgttcagggcgtgcgtggccccgctcgtgaacgccgtctcctccggcgacgcgccgatgaagcgcgcgaccgtcgagcgcgcgtcctcgtaggtccgggtggccgcagcggccagcgcgtgcgcggaacggtgcgggtttccgcatgccgtgcggtagaaatcatccatggcgtcgaggacgcacgacggcttctgcgtggttgccgcgttgtcgaggtaggcgagcggagggccgcccgcggcgtgcgcggcgaggagggggaagtcctccagcggcgcgcacgcccgtccgtccgccatcgtcaagctccctcgtcctgctcggcgtcggccgcgttcatcgcgtcgctcgcggcaccgtactggaccatgcgcagcgcgagcagccgctgcacgttctccaggcggtcgcggtaggggtcgtcggccggacattcccgcgcgatcgcgtccgccagcgccgcgtcgcccaccgtgtcgcgcagccaggcgacgaaggcgtctacgtcgatgagcttgatgatctggtcggcgcccttgcccacgcgcgcttcgtctcggtcgagcaggaacacggctgcgctgtgcaggttgtacaggtacaggtccgacccgcccttggagggcaccatgcgcccggcaacgaagtgctcgccccaggagagctcgcgcagcgcatgggccgcctcgtcgggcgagggcaaggggaagcgccggcacgcctcggccatgccgggtatgccttcggatccgctccccgcctcctcgccccatgcaggggaggtgaggccgccgcacgcagcggcctcccgggatgtggcggcggccgtctcgtcgagagctgccatgtccatcacgctcccagctttccggccgcttccagcttgtcggcggcgaagccgaggtcaagcgcctcgagcccggagcgcgtcgggcgacccgtggactcctcgaacccttcgtgggcgtagaagcgcgtcttgaagtcctcgaacttgtcgcggtcgagcgtgcggccctggcacagcgagtagctccacttcccgtcctcgaacaccacgagggggaagggcttggtggtcttcacgtcgtacacgtagttcgtgaacacctcctggtcgcgatggcgtccctccagcgcccagatggcgcggtcgagcacccagaacttgtgccccagctcgatgctttcctcgtaggagaggtcgcgcccggtgacggcctggaagaacttcacctcgtactcgggcgtggccccgtacgtcgagcccgtctcggcggtgtgcttgcggctgatgaagttcggccacacccagtcgcacatgcccagcgactgcagccagaagcgcccgtaggcgcggttccagtggatctcgcgcacgcgcgcatcggaatagatgccctcctcgctccagtcgaagcacagcgggtcgcccagcccggactgatcggccagctgcttggccatgttctcggccgagacgggcggctcggcgccggtgagcaccgccatgatggaggtgttgtacaccgcgttgtgtacgccgtgctcgttgatgtctcgctcgctgaagatgcttccgtagctccattccacctcggcgcgcggctcgttgtgctcgcagtagccccagttcgggcgcgccagcaggcccgacgacgtgtcctcgtcccaacgcccccacttctgcgccgcgcgcgcgatgccctcggccaggtcgtcgccgatctcgcggcggtaggcgatgcgcatcagcagctcctcgatgaacgcgtaggtgccgtactgctcgaagggcagatcggtgtcgatgtccttgcccttgcccatgacgcccctcttgtagaggttgtgcaggtacacgggcatgtcgatctcgtagccgttcagccccagcttcgacagcaggctgtaggcggccagctgctcgtcgatcttgcccgagtcggtgaagtacaggccggccgagcaggtcagctcgttgcccacgccgccggggtacaggttacggcagttcttgaagcagccgcggcatccttctgcgcgcgacaccgtggggctcgtgtccagcacggtggatgcggcgcccgggctgcccggcgcgcccggaaccttgccggcgtcgatgtcgtagccgaacttctcctgcacttccaaccgcagcctcacgagcgcggcggggtcggcgatgggtatgctcttcgagccgatgaagctcatcgccttgaggttcttggcgccgaacaccgcgccgaagccgctctgtcccgtcacgtggccggcatcgtgcacgatgcacgacacgcgcgccaggttctcgccggcaggtccgatgcagatgacggacggtcgctgcgtggtgcggcctccgtcgcgccccttcgtcagctcgtaccacgagccgggggcggtgccgtgcgtcacctcgtcccagatcctctcctggcactcgaaggtatcgagtccccaaaggtcggtcgcgtcgttgaacgtcacttggtcgttcaccacgctgatccacacgggcgcttccgctttcccgcgcaccacgcaggcgtcgtagcccgcttccttcatcatgccggccaaacggccgcccatgctggagcggttgtaccattcgggcagcgagaacgggctgatgcccgtgaactcgcagcgcgccgaggcggccggcaccacggcgcccgagaacggcgtggcggcgaacaccagcacgtttcccggatcgaccgcctccacggtcttgtcctcgcagtagtcccagaacagcttcgaggccatcccgtggccgcccacccattcgatgtaaggttcggtgtcgatggtctgggaggtgcggtcggtcaggttcacgatgagtatcttgccggcgtagccgtaatgttcggtcatgaggtcctcctattatttgtcgttcgagccggctgccgcctgggctgccgtgccgcctgcgccgtatccgagccgcgcgggagggatgcgcgcctcgtcgtcgctgggcaggccgatttccagatagtggtcgttgcgcaggttcgccgtgtagccttcgtcggtttggacgggcagcacgttggtgaacgcgatggccttcatggggcagatctcgacgcacagctgcttgccggacgggccgccctcttcatcccagaagggcgtgttcttgcacaggtcgcacttctgggcgtgcttgtcctcgaagttccactgcacgcgcgacggcgtgaaggggcacgcctccacgcagcgctcgcagccgatgcacttgccctcgtccacgaggcgcacgcccgtctcggggtcggcgtgcatggcgcccacggggcaggcttccacgcaggaagggtaggggcattggcggcactggttctgcatgacgtcgtcggaggggaagcttcccagcgcgttcttcatcacctggatgcgcgaaagcgaggtgttgatacggcccagatgcgcgagcgagcacgagatgacgcacgtctcgcagccggcgcacttcttcgcatccaccagcaggtagccttggctcgcctcgatggcgtacacgtcgtcgggcaacagcagcgccgtgatgccgcttcccagcacggcgccgattcccaatccgccgatcccggcgatgaactggcgcctggagaggccgcctttatgctgcgcgtcggtcgcgcgctgattcgtctcggtcatatcgctcatctcccttgcgtgccgtcggcggctgctgcgcgcgcggcggctcccgtcgtctcttgcgcggccgcgcgctctccggcgccgagtgcggactcgtccatgccgcgctcgggctgctcgcgctccagccgctccatccaacctgcatgttccttttcggcctcgccgcgcggcatccatccgatcagcatggacgggaaggtcttccacgagaacggcgcgatcacggcgaagaacacgtgcgccgccaagaacagcagcatgagcacggccgcgatgtcgtgcacccagaacatgacgttcatgaggccgtcgggcagcgtgagcaccacgtgggccaatgccttgaccaggcctgtcaccaccagcaacgcggccgtgaccacggccatcacgtaggcggccttctcgctttcgaagtacttgtcctcgggcggcatcgtgaacttcttgatgcccacgagcaggccgtagtggcgcaccgtgtaggcgaccacgttcttcgtgggaaggtgctcgcgcaagcgccatttcgagatgatcgtgttgcccaggtagtagaacgtcccgaacaggaacacgatcgcggccgcgaaatggacgttctgccataggatggcggccgggccgtcctccacgaacgccggggtgaacctcagtcccagcacgatgcccgacgcgaggcacacggcggtgccgatgccatgggtccagtgggacaggcgcgcgggggcgtcgtggcggtacacccggtcgcctgcgataaaggggtctgttcgtttcgcgaatgcggaaaggaacagaccgaaaaacggcgccagggcgacgagccagggcgcttgatcgaaccagggcatgggggtcttcctttcggtacaagcttcgcccgacctcgcaagaggacgcgacgataagcgtattggtttgaggagggggatgttcgcgcgccgaatcgacgcgcgagctttctatactttgaaggcggtgagtacgagcggagccatgggggactcccttccggtcgcggacgttcgttttcggtcagccggtcgacgcgatgctgctcttatacgatatagcctcgcctgcatgttcggccagcagccgccttgcgagcggcgctgcgcggttttgcgaacgggcgagtcctttcgccagcggttgcctgtcgaccatgagcggcgacgtcgatggccgcgccggcgcgccacggcggcatccatcgtttccgcttacccggctcatccgctatatctgtggacgtgcgcatttcattaccgcagcgtaatttgcaaatggttgagcatcgtgtacaataaccgcacgtgaactgtgccctgacgggaaacgcagcatttgaaaacgcagcaggtgtggaggatacaatgccaaacaagataggttccgagcatttggcggtcatcaaggtcgtcggcgtcggtggcggcggcacgaatgccgtgaaccgcatggtcgaagcgggcgtgcgaggagtcgagttcatcgccgtgaacacggatcgacaggctctgctcatgtcggacgccgacaagacgatccacatcggcgaagagctcacgcgcggcctgggcgccggcgcgaaccccgaagtgggctgccaggcggccgaggaaagccgcgcggagatccgcgaggcgctcgccgaggcggacatggtgttcgtcacggccggcgagggcggcggaaccggaacgggcgcggcgcccatcatcgccgagatcgcccgcgaggagatcggcgcgctgacggtgggcatcgtcaccaagccgttctcgttcgagggtcgcacccgccgcaaccaggccgatcagggcatcgacctcctgtcccagaaagtcgacacgctcatcgtcatcccgaacgaccgcctgctggagatcgtggacaagaagacgagcatgctcgacgcgttccgcatcgccgacgacacgctgcgccagggtatccagggcgtcacggacctcatcaccatcccgggcctcatcaacctcgacttcgcggacatccgcacggtcatgaaagacgccggcacggccatgatgggcatcggcctcgcctccggcgagaaccgcgccctcgacgcggcgcagcaggccacgaactccaacctgctggaagcctccatcgcgggcgcgtcgcgcgtgctgttctccatcgccggcggccccgacctcacgctcaccgaggtcgacgcggcggcgcgcacggtggaagcttgcgccgacgagagcgccaacatcatctacggccagatcatcgacgaaggcatgcaggatcaggtgcgcatcacggtgatcgccacgggttttaagatgggttcttcgcagcagtcctccatggacttctcgcgcaaggacctgttcgcctccacgacggcgcccgacccgatgccgtccgctcctcctgtgacgttctccacgacgtcgcgcgacggccgtttcgccgacgaggactacatccccgacttcctgaagcgccagcggtaaggagcggtcgcttgatggtcgcgaccggacaactgcccatccctcagataaccgcgcgccgatttggcgcgcgttgtcttcctgcgcttaccgacgatgccctgtacgagcgcacgggcgtgcgcgtcgcgttcaccggacgcgcgggcggggtgagcgaaggcccgtattcctcgctcaacttgggtaatcacgtgggcgacgaccctgcgtcggtcgagcgcaaccgagcgctcgtgctggaagcgctcgatgcggccgacgttccgctcgtggtgcccagccaggtgcacggggaagtcgtggtggagctcgacgacgcgtcgcccgaggcgctcgatgccgcgcgcgaagcggcacgcgcgggcgccgacgctcttgtcgccaccgttcccgggatcgcggcgctgctgtgcttcgccgactgcgtccccgtgatcgtcgtgtcgccgacgggccgattcgcggtggcgcacgccggatggcgcggcgtggagaacggcgtggccgcgaaggccgtccgcgcgctcgcgcgggccgatgccgccgagctgggggaggatgcggcgagcggctacaacgtgtacgtggggccgcacatccacgcgtcctgcttcgagacgggcgccgacgtgcgcaagcgcttcgaagaccgcttcggttcctcctgcattcccgacgaacgccatgtcgacctgctggaggcgttgacggtcgggctcgaagaggcaggcatcgatcgcgcgcgcgtggctgatgcgggcgtgtgcacggtatgctcgtgcgacgaattcttctcgtaccgcgccgcgggcggcatctgcgggcgccatggcgcggtggcgtttcgaaaggctgggtgagcggcatgggattcaaagagcgctacgagcgcacggtcgcagaggcggccgcctgttgcgaggcgtgcgggcgcgatccgaagagcgtggtcgtagtggcggtgtcgaagacggtgggtgccgacgaagtggccgaggccatcgaggccggcgcgcacgacttcggcgagaaccgcccggactccctcgaggggaagcgcgctcgctttccgcagcagacctggcacttcatcggcaacatccaatcgcgccgcattcccgacatcgtgcgggatgccgcgctcgtgcactcgctgtaccaacagcgtcacgtgccgaagttcgacgccgcagctgcggcgtcgggcaaggtgcaagacgtgctgctcgaggtgaacgtgtcgggggaggcgagcaagagcggtctcgcgccgagcgaggtggccggcatgctggagtactgcgcgggctttccgcacgtgcgcgtgcgcgggcttatgacgatggcgccgcagggcgatgcgcaacgggctcgcgcatgcttcgccgatctggcgcgtttgcgcgacgaagtgcggcttgggctcgacggggaacaggccgccgtattcgatgagctttctatgggcatgagcgaagactggcatgaggcgatagccgagggcgctaccatagtgcgcatcgggcgagccctgttcgacgacgctttcgagggccccgcgcacgcgtgagagcgcggcgcggccatgacgctgaacgcagcggcggctggaccgccggataagaaacgaagcaggtgaacggtatggagctgccaaagatcaagaaatcggagcacggaatgctcgagggaatcaaatcgaaactgggtttcgcagacgccaacccgcattacgacgacggctactacgacgaggggttcgacgactacagcgaggagtacggcgagtacggtcccgactacaacgaggacgatttccccgccgacgatgctcccggttcgcgttatgagccctatgcgcccgtgacttcgcgtcctgcgcgcgcctcgcacgcgcgctcctcggcgcgcagctcgtccgtgggatccgcgaagctcgtgtccatcgacgacgtgcgcgcgcacacccaggtgcccgagagcctcaaccgcgatccgttgccgcctcgccgcgtgacgtcgccttcaagcggctcctaccgcggcgatcgcaccatggtggaagcggcgcagcccgccccggcgaacacgcctatcgcgcgtgcggccgccgcagcgaaccgcgagcgctccgagagcctgaactcgctgttcacctccacgtccgacgatgcgccgagcgtttctgggccttctggctcgggcgtcgcggtgcaaacggcaaccaccgcttcgggcgctaccgtggcaaccgccacggcgacgactgcggcgttcgatccgttcgacgcctacgcgggcgccggggcggtcaagcacaacccctcccgctcggtcaccgtgctcaagccggccagctacgccgaggtcgagcgcatcgcgaaggctctcaaggcgggggatgtggtggtgctcgcgctgcgcaacacgcccgacaatctgtcgaagcgcatcctcgacttctcgttcggcgtgtcgagcgctctcgacgccagcgtggactgcgtggccgacaaggtgttcgtcatctcgcgcggtgctgcgctcaccgatgccgagcgcatgagcctgcgcgggcagggcgtgctgtgatcccgtattcgattcttcgccggcgcggctgccgccgcccgacgttctaaggagtagaacgcatgttgagcatcaaatacctcatcgtgtcgcttgccgatgcgtacagtatggtgctgttcgtctacgtgctcatgtcgtggtttcccaccgaccgtggcatcttggcggacatcaaccgggtactggccaaagtgtgcgacccgtatctcaacctcttcaggaagctgatacccccgcttggaggtatggtggacgttacgcccatcatcgccctgcttgtattacaatttggagtacgtttactgataaacttgttttaatgcgtagaatcgtgttcgcgtgcgaacaagacgaagggactacagatggctatcacctcggctgagatacacaaccagagcttctcgatcgatcgcaaaggctacgacgtcgacgaagtcgatgtgttcctcgagcatgtcgccgacgagatcgacggcatgaacgcccagatcgcccaactcgagaaccagctggacgatcgtaagttcgaaggcttcgacacgccggctcgcgtcgaagctcccgtcgtcgtgacggacgatgccgcgctggccgagaaggacgcgcgcatcgccgatttggagcgccagctcgaggccaaaaaggccgacgacaacgccatcgcgcaggctctcatcatcgcgcagcgttctgcagacgagatcatcgcgaacgcgaatgcccaggcagcggccaccatcaaagatgccgaggacgagggcacgcgcatcgtggacaaggcggaagccgagcgtcagaaggtgctcgacgccatcaagaagctcgaggacgaccgcgaggacgtgcgcgaggactaccgggacctgctcaccgacttcatcggtgacgctacgcgcaagctggccgagatcggcggcgagatgcccgcttccctgccggtcagcgcccatgcgcgcacgatcgacgtggtcgagaccaccgctacgggccgtgtgacggctccggcgcaggctcccatcaaccgcgacggcgcgggcgcgtactccgtgccccaggcgacgggcgccgtggtggcgccggccacgccgactccttctggcgtcgagaaggatctgtccgggttcggcgatgccgacgatgctttcgagttcgaggaaatcgactaaaccgcgcgtatcatcacgctcgcagcatggacgacgaaacgcgctcccgcccgggagcgcgttttttttcgccgacaggaaacgcttagggttttccctgattttgtcgccatcttttggagatcgttgacggtgacgttacgtcatcgcgtatgctcgattgcagttcgagcgcgcgggggacgcgcggcaaggcgagaggaaaggcggcggccgagcttcggtcgcctcggaggagcatccatgaccgatcagaactacctgactatcggcgagctggcgcgacgcgtcggcgtgacggtgcgtaccatccagtactacgaccagcaggggctgctgtcgccatcggcgaagggtccgcagaaccagcgcctgtacaccgacgacaacgtgaaagacctgtatcgcattctgaccttgaagtacctcgggctgtcgctggcccagatcaaatccgatgcagctctttaccgagagccggcagcattgcaggagttggcagacgagcagatggatgctatcgaagagcagttccaatcgctgttcaagcgcatgaccacgctgcgctccctgcatgacgagtcgctcgacgatgcgtctgtgaactgggaggccatggccgacactatcggacgctgccaaggcgagagccagttcttctggcgcctcacttgcatccgcgacgacgctccggcttcggaggaggccgccgagaaccaagtggcgcgcggtgaatccgtgtcgaagtggcacgagctgatcgccgacaccatccgcctcatgcctgccggcgagcccgtggacagcgaacgaaaccgcgagttggccaagcgctacctcgagttggatatggaacaggacacggcgcgcgctgagcagaacttcatcctcatggagaacattgcccctcatgccggcggcgacggatcgttcgacgagctgcgtcaagcggtgttcgaccatctggaagccatcgtcgcctcctaccgttcccgccccgatccggccgaataggctgcgatctcggcgccgtgcgggtgccgcaaaacctcatctctcctacctccctttgcggcccccgcacggcacgtcataccctcgttcggtttcagcaagcatggcgccgccaaaaggcgaagccgcaaccaagaaaggatacgcctatgctcgtgtcgtggatgacgacgaacaagtgcaacctcaagtgcgtccattgctaccaggacgccgaggaggccactgacaaagagctctcctgcgaggagggcaagaagatgatcgacgagatcgcccgcgccggcttcaaggtgatgatcttctcgggcggcgagcctctcatgcgccccgatatctacgagctggtggcgcacgccgcctcgcgcgggctgcgccccgtgttcggctcgaacggcacgctcatcacgccggaggtcgccgtgcggctgaaggaggccggagcctgcgccatgggcatctcggtggacagcctcgatgccgtcaagcacgacaggttccgcgggctcgagcatgcctacgacctcaccatggcgggcatcgaggcctgcaagcaggcgggcctgccgttccagctgcacaccaccgtcgtggattggaaccgcgacgaggtgtgcgacatcaccgacttcgccgtggagatcggcgctatggcgcactacgtgttcttcctcatccccgtggggcgcggcaagttcatccaggagacatcgctcgaggtgctggagaacgagcagctgctcaaggacatcatgacgaaggcctcgcaggtgcccatcgacgtgaagcccacgtgcgctccccagttcacgcgcgtggcgaagcagctgggcgtggacacgcgcttcgagcggggctgcttggccggcctcacgtactgcgtcatcggcagcgagggcatcgtgcgtccctgcgcctacatgaccgaggaggcgggcgacgtgcgcgagactcccttcgatgaaatctgggcgtcgagccccgtgttcgagaagctgcgcacgcaggcgtactccggctcgtgcggcacctgcgactacgcgcaaggctgcggcggctgtcgcgcccgcgccgcctactaccacgacggcgacatcctcgctcaagacgactactgcgcccacggcaacgctttggttgcggccgccgtctaaaccgtcgacatcgaaaggaccactcatgaccactatctccgaacgcatcattccttctgccgtcgccgcgtcccttgctgcgacgatgatgcttgccggctgctcggctgctcagccgaacgccgatgctgacgcaagcgctccgcaaacagaagccccggccgcctctcaggccggagcggtcacgttcaccgatgacacgggcgccgaggtgaccgtcgacaatccgcagcgcgtggtcgcctgcatgggcagtttcgccagcatatgggagcttgcgggcggcacgctcgtgggcgcatccgatgatgcgttcacgttgtccgactacgatctgaagtccgaaaacgtgcagaaggtgggcgacttctcgaacccgaacctcgagtccatcatcgcgctggagcccgacttcgtgatcatgacgagcggctcgggcggccgcggaggcgactcgaaccaggccgacctcaaggcggcgctcgcagcgtcgaacatcccggtggcgtgctttcaggtgacgacgttcgcagattacgagcgcatgctgcgcacctgctgcgacatcacgggacgcgacgatctctacgaacagaacgcccaggccgtgtccgagcgcatcaaggcgatcacggccaaggtgcctgcgggcgaggcgcccacggcgctggtgctgaccacattctcgggcggcacccgcgtgcaggcgtcctcgacgatgacgggtgccatgctggccgatctgggcgtcaagaatctggcagacgagaatcccagcctgctcaaggatttcagcctggaatcgatcatcgagatgaaccccgactacatcttcgtggtgcccatgggcaatgacgacgcagccgccatgaaggcgctcgaggatcaaacggctgccaatcccgcctggtcgacgctcgatgcggttcagaacggccgttacgtcacgctcgacccgcatctgttccagtacaagccgaacgagcgctgggatcagagctaccaggtgctgttcgacgctctgtacgcgtaaagcgaaggccgtccggtgacttcgttcaaccgtgaaaaggccgcaccgctcgcaatcgccgtatccgcctccgtcctggcggcggtgacggcggcggccttcctcgtggggtcgtcgtcggtgagcctgggcgatcttgtcgcctgggccacgggcggcgacgtgagcgcgtcggcgaagagcatcctcgtgaacgtgcgcctgccgcgcgtgctggcggcgcttctggcaggaggcgcgctggccgtggcgggcgccatcatccaggccgtgctggacaacccgctggcaagccccaacatcatcggcatcaactcgggcgccgggctgttcgtgctgatcgccgccagcgtgtttcccagcgcgctctggctgccgccgctcgcggcatttgcgggcgcgttggccacggcgctcatcatcttcggcatctcgctgggcgccagcacgtcgaggctcaccgtggtgctggcgggcatcgccatcacgtcggtgttcggtgcgggcatgaacaccatcctcatcgtgaaccccgacgcctacatcggctcgtcggcgttcctcgtgggcggtttggccggcgtgctcatggacgacctgtggtggcccgccgtttacatcgtggcaggcctcgccgcggctctgcttgcggcgggcaagctgaacatcatggcgctcggcgacgacacggcccatgcgctgggcatgaacgtgggcgcgtgccggctggccatgctgggcctcgccgccgtgctggcgggcgcggccgtcagcttcgcgggcctgctggggttcgtagggctcatcatcccgcacctcgtgcggttcttcgtcgggcacgacaaccgcatcgtgctgccgttgtcggccgtgtcgggcgcggcgttcgtcgtcgtgtgcgacctgctggcgcgcgtgctgttcgcaccctacgaggtgccggtgggcatcctcatggcgttcctcggcggccccttcttcatctacctcatcttgaagaacaggaggggaagccttgaataatgcgcctgcatcctgcggggccgagggccgagaggtccggcgctcaaacagtcctgctcgcacgaacagcccgctgggctgttcggctcgtcgcggcaccgcgaagcaagtcccctcggggaaactcgcggcggacctctcggccctcggctcctcgaccgcagaggtcgcgcagccctgtgttcctgccatcgagcttcgcgaggtgtcgttctcctacggcaaggaaccgttcatcggggggctttccgcgatgttttcgcatggggcggtgaccagcatcgtcggcccgaacggctgcgggaagtccacgatggtcaaactcgtcgacggcttgctgcggccgcaggcgggggaggtgcgcgtcggcggggtgcccacgctgtcgctcaaggcgaaggcgcgcgcccgtcgcgtggccgtgctggcccaggccagccgcccgccggcgatgacggtggaggcgctcgtagcatgcgggcgctatccgtaccaggcgcatcaggggaagctctcgcgcgaggatcgcgagcacgtggagcgcgccctcgagcttgcgggcatcgcgcggttccggacgcaggagctgaggcggctgtcgggcggcgagcgccagcgagcgttcatcgccatgacgttggcgcaggacaccgacctcatcgtgctcgacgagcccaccacctacctcgacatccgcgcctgccacgagacgatggagctgatccgccgcttgaacgaggaggcgggcaagaccatcgtcatggtcatccacgatctcgacctggcgctgcgctactcagaccgtttgctggtcatggaacgcgggcgcgccgcggcggccggcacggtggaagaggtgctcgcaaccggcgccatcgagcgggccttcggcgtgagcatccgtccgcacgaggccgccgagggacgggcctacacgctgttcccggcgtagggttctgcgatgcggctccgcaggcctggcatcgcgaaccgtccggtaaacgttgggcgcgaattgcaccctatggcagaaaacgcggggcattggtcgcagattcctcgtatgcggaatctgcgaccaggccttatgtgcccgcgcaataccgaaccatccgcgaagcctcgactgcctttgccatggctatcgttttgcgcccaatcgaacgggatgcgacggggccgggccgcaaaccgccctagcgcgtcggcatcgcgaagccttccagcgcctcgttcaggtactcgttgaacgtcttcatggctgcgaagctgtccagcagcgcgcggcggcaggcctcgtcgtcggcgacgacggcatcgtcgaagtgctcttccaccgcccagcacttgcacttcaggtactcggcggccgggctctgcgggtcgtagcccttcggcacgttcttcagcggcatgccgacgaaccggaagcgctcggcgaaccccggcgcctcgacgatgtcgaggaaggcttgcgggtcggccgcgatgcggtcgcgcaccatgcgcgtggcgtccttgaagtgcggcgcgaacaggccccctcccgcgaacgacccgcccggcgtcacgctgacgaagtaccccacgggcaccggcatgcgcccggcgggggagatgtgcgcacggaacgtcggattgtacggcgacttgtcgtcgctgaaccgcgtgtcgcggttgatgcggaacgcgaggtccttggcatcgagcgccgccaagcacggctccgtttccgcgaggtcggctatgcagccctgcacgagctccagaaacgcgttctgcgcctccttcttccgcttctcgtgggcgtgcatccagtcgagggaattgttctcgcgcaggtcggccaggaaatccagcatgaggacgttaggcatgggaggcctccttgccggcgttcaccacggcgtcgaagctggcggtgcccatgcacgcttccagcagctccttggcgcgcggcgtggggcggtaggagggaagccggtcgaacaggctggcgtagccgtccatctcgtccatggcgtcgacgaaggcgtcctgcgcgcgctcctcctcggtgagctcgaggtactccaggttgtgcggggccagccgatgcgtggcgatggcgaagttcacgcgccgctcgcacgagcacgtctccgcgccgccgtgctggcagtacgcgcccaaaaactcggcgaccgtcttgcgggcgcgcgacaggcgctggcggtacgcctcgggcgtgatgcccagcacgtcggccgcggtggagctgtccaccttgaacatggtgcccagcacgtaggcgcagcggctgtcggcgtcgaggcattgcagcatcacgttcgtgcacgacagcttcagctcacgcgccagcatgccgcggtcgaccccttcggacaggtcggggacgtccttcgcgcgctcgtcgacgatgtcggccccgtacatctcgaagctgaacggggcgttcgcgaactgatgcgtgcggcagtccttgaggtggttcacggcgatgcggtacacccatgtggagaacgcgctctccttgcgaaacgtcgagagccgggtcatgatcttgaccgcgatctcctggctcgcgtcctcggcgtcgtggacggtgcccaggaacctgagcgcaaggttgaacacgagcccgctcgtggaccgcagcagttcctccaacgcctggccgtcgcctacgatggccttgtccaccaggtcgagctgcgcttctttcgataattcttcgcgatgcatggtgccgccttccgcgaaaggcccgccgggcgcttccgctcgtctcgtcgtcggccgggcgctctgcgatgcgcccgatgccttccttcgataggttagacggtcgaatgtcggaagtgtgacggaaaacgtggaaaaaaagaatgcgagcgggccggtaagccgggttctgtcgttggacgaccatttatctcgaacgcctgtcgccagacgcctctagcacgcaacccgaacgtacggcgggcaaccgtgtcgcgttcctatttgcgcttgctccagatggggttttccaagccgcgccgttgccggcgcgctggtgcgctcttaccgcaccgtttcagcttttctcccgtttctgcgcgccgaagcgcgtgttcgcgggggagtcttcttttctgtggcactttccgtcgggtcgccccgcccagccgttagctggcatcttgccctatggagcccggactttcctcacgccgaagcgcgcgatcgtctggcccgctcgcgtatggtattctatcacgatcggtacggctcgaaggtaaggaaagtgtggaacatggctacgtgcgcgctcgtgggggcggtcgatttcaacgcggaggacttcaaggcccgccaggcggccggggagttcgactatgtcatcgcggtggacgcgggcttcgcgcacctcgaggccattggtgcggtgcccgacatggctgtgggcgacttcgactcgctcggctatgtgccgaagtgccgccgcgtgtcgcgccacccggtcaagaaggacaagagcgacatggagctggccatggagaaggcgttgtcctggggccacgacgagctgatcgtctacggcgcgctgggagcgcggctcgaccacacgctggcgaacctgcagctgttcgcgaagttctccgagcgcgacgtgtacgtgaccgccgtcgccgacacgtacgccgtgcggctgctcaccggtcccgacgtgttcgaactgccggcgcttggcgggggaaccgtgtcggtgttctcggccaacgacatggcgcgcggcgtcatcgagcgcggcatggagtactccatcgacgacgagccgctgtcgaaccgcacctcgcgcgggctgtcgaacgaactgaccggcgaggaggccacggtagccgtcgaggagggcacgctgtacgtgttctacccgctggcgtatactggttaaacgctccgtcgcatgcgcgacggcttgacataccggggagcttgcagccgcatcgcggccggacaggctgagaggaagcgccgattcacgcttcgacccgaggaacctgacatgggtaatgccaacgaagggagttctatgacgcagatcgacgcggcacgcgccggcaccatcacccgcgaaatggccatcgtggccgagaaggaggggcgcgaccccgagttcatccgcgagggggttgcggccgggcgcatcgccatccccgccaacatccaccataccagcttgtcgcccgaaggcgtgggcggcggcctgcgcacgaaggtgaacgtgaacctgggcatttcgggcgacgtcgccgacgaggccgaggaatggaagaaggtggacgtggcgctggagctgggcgccgaggccatcatggacttgtcgaacaccggcaagacgcacgcgttccgcagcgcgctcatcgagaagtcgccggccatgatcggcaccgtgcccatgtacgacgccatcggctatctggagaagccgctgatcaccatcacggtggaggacttcctcgacgtggtccgcgcgcatgcagaggacggcgtggacttcgtcaccatccacgcgggcatgaatcggcgcaccatcgagtcgtttcgcgagacgggccgcctcacgaacatcgtgagccgcggcgggtcgctcatcttcgc

SEQ ID NO: 9179 - DNA, 499 bp, Unknown
  gut microbiota DNA sequence
cgagaagttgcaggcgatgacgagcgggtgttctcccgcgtccagctgctcccggatacgggcgcagacgaggcgaaatacctgcaagtccaagtcgacgaccaggccggtgcgctcgaacaggggaatgaactcgtcgggcggcacgaggccgcgttcaggcgattcccaacgaacgagcgcttcgaagcccacgaggcggttcgtcgctatttccaccttcggctggtaataggccgtgaactccccgcgctcgagcgcgtcgtgcgcggcggctaccagcgcgcgttcggcgatgtcgcgatccttcatgctcgccgagtacaatgctgcggtgctgcgcgaggcctccccgatgctgtcccgggcgtagcgtgcggcgtccacgaactcgatgatggtttgcacgtcgatgcgtggcgtttcggcgctgcgctcgatgatgcagacgccggcctgcagcatgagccggtgcgatagctcggtaagcgtttcggtg

SEQ ID NO: 9180 - DNA, 871 bp, Unknown
  gut microbiota DNA sequence
tcgcccgcgtagaggtgctcgcccacgtacccgaacagaagcggcgccgcgaacggcgacggcaccgacgtctgcgcctccaccaagcgcaccgatcccgcctgcacctgctccatcagctcgtgcagcgccctcatgtcgtacacgtcctgcaagcactcgcgcgccgtttccaccaggatggggaactcgcgctcgcgccgggcagcctccagcagctggccggccttgaggcgctgctgccacagcggggcgcgcttgcccggcgcgatgggcgacatcagcagggcgcgcgcggcgcattcgcggaaccgcgccgagaacagcgacgtggagcccacgcgatcgcgcgcgatgcggtcgagctcgtcggggtcgaacgcgaacagctcgatgccggggaggcgggtctcggtcatggggatgcgcaggacgatgccgtcgtcggccgccatggcctgcgcgtcgtagccgtagatcgccatgatgcgatcggacaccgccatcgcccagggctcgtgcacgcggcggccgtacggcgaatgcagcagcacgcgccagtcgccctgctcgtcctcgcagcgttccaccacgagcgtcttgtcgtcggggatgatgcccgtcgccgcgcgctgcgagcggatcagctcgacgaggttgcgctgcgcatcgtcgtcgaggccatccgcggccaagcgctcgctcaccgcacaggacacgccgaagcccccctcctccgcctccgcatcgtcgccttcgatgcccgcggccaccgcgcgcaagaacgcgccgcgcatgcgccccgtctcggcgggccgccccacgccttcgccatgccagaacggcagacgggccgagcgcccgggcgcgg

SEQ ID NO: 9181 - DNA, 832 bp, Unknown
  gut microbiota DNA sequence
cgcgccgtcgccttccggcaacaccaccgagaacatcccgcggtcggggatggtgcccgccgacatgacggcctggcgctgcgtgccgggacgcgccagcagccgcccgcgctcgcgatcccacacgatgcgcggcgagaactcggccaaatcggccgtcgcatagcggccggccagcatgcccagcaccgaatcgaaggcccgtcgcggaagctcggaatacgaggccgcgcgccgcaccgtgtcgaaccagtcgtccgccgccagctcgtccatggccacggcggccaccgtctgctgggccagcacgtccagcgcgttcttcacgaacgctgtctgctcgatgcggccctcgtacatgccttcggccgccacggccgcgtcgatgatctcggtgcgggtgcgcgggaagatggaccccgtcgagcggccgcccacctggtggttcgcgcgcccgatgcgctgcagggcgctggccaccgacggcggggccgccacctgcagcacgagatcgatggatcccatgtcgatgcccagttccagcgacgaggtggccaccacgcacggcagctcgcccgctttcagctcgcgctccacctgcaggcgcttctccttcgacaccgatccgtggtgcgccttcgcgatgacggccggcgcgcccgtggacatgtccgccgtggagcccagatccgagcggatgggcgccgccgcggcgtccatatcgacgccgcgcgcgatgcccatgcgcttcgcgtacagatcgttcaggcgcgccgtcagcttctcgcacagcccgcgcgagttcacgaacacgatggtggtgcggtgcgcc

SEQ ID NO: 9182 - DNA, 2389 bp, Unknown
  gut microbiota DNA sequence
agagcccagatccgagcggatgggcgccgccggggcgtccgcatcgacgccgcgcgcgatgcccatgcgcttcgcgtacaggtcgttcaggcgcgccgtcagcttctcgcacagcccgcgcgagttcacgaacacgatggtggtgcggtgcgccagcacctcgtcgaggatggaggcttcgatgtagggccagatggaagacgagccgagacggctgtcgggactcgtcgtgctcgccgggagcgaagacttcgccatggcggcgcgcagggcgcgatcggacttccacgcttcctccgcaggcgcgaggcgcggccctcccccgcgctttcccgcgccgccccccgtcaggtcgcttcccccgaacgtcggcacggcggtcatgtcgcgcacgggcacgcgcacgcgcacgtccatgtcgggccgcccctcggaggcgacgacgcgcacgggatggggcccgcccaggaagcgcgcgatctcgtcgcgcggacgcacggtggccgacagcccgatgcgctgcgccggcttttccagcaggtcgtcgaggcgctcgaggctcaaagccaggtgcgcgccgcgcttgcttcccgccaacgcgtgcacttcgtcgacgatgacggtttccacggtgcgcagcgtctcgcgcgcctgcgacgtgagcatgaggtacagcgactcgggcgtggtgatgaggatgtcgggcgggttgcgctgcaggctacggcgctgatcgggcgtggtgtcgcccgtgcgcatgcccgtgcgcacttcgggcatcgcgccgcctgcggccgccatgcgcgccgcgatgccggcgagcggcgcctgcaagttgcgctccacgtccgccccgagcgccttcagcggcgagatgtacagcacgcgcacgcccttgccgggacgctccttcttcggcaaacccgccgtcgccgccttctcgcgcataagctcgtcgatggcgaacaggaacgccgcgagcgtcttgcccgagccggtgggtgcgatgaccagcgcgttctcgccgccctcgataacgtcccaggcacgctcctgcaacggcgtgggctcgggaaaggcatcgaggaaccagccgcgcacctcgtcggagaatcgcgtcagggcatgaggggtgggctcgcgtgcttcgtccatggcgtgcgtcggctccttctgaaatcgggtgcccccatggtagcgcatgagcacccgcccgtcttgcgcaatgggcggctgaaacccgcccgttcgcatgacggcccgaagctctgcgcatcgcggtgcggatagacgcactgggcacgaatcgcaattggcttcaccccgaaggggaagccgaccacgtttcactcatatgcgtccgatcacgcatctcgctagatgaccacctcttcgtagtccaatccgaagtccttgcgcatccagacgaagaattcgtcgcagtccaccactttgatcaccgatgactcgaaatctttctgattgcgcgtgacgattgcatcggcgcgcatctccaatgccgattcaaagataagcgaatcttccggatccttccacgaggctgccagcatccgatcgacctcccgatcgctgacggcatgcacgttcacgaacgtccgcatccctcgcagctgctcaagcacatgcgacaacagcgagcgcttcccgccctccgagaggatgtagataagatcggtcacctgcgacgaggtgatccagagactgaattcccccacacggcccgccgtcatgagcaagcgcgccttttcgtaatatggctcgcgctcatgcagataatcgataacgacattggtgtccaacaggagcttcatgcgagccatatcacatcatgcccctcgaacgcaggcgctccatcctcacctctgccttagtcatatcgtcgaaacgagaagcgcgcttcgaggatagagaatcgacgaagcgagaagcagcggcccacttcgcctcatcgccgatacggctcgaatcggctcgaaggaaacccgcctccccctcctcgatcattttgtcgtacatgaggttgatcgcttgagaagcgctgagaccctctcgcgcaaggatgcgagcgcctttgcgcttcttttcatccagcatgcgtgccgtaaccatagaatcgtccatgccgactcctttcgtgtgctcaattgtacaaccattttcgtacaacatcaacgaagaacaactctcggacgcaaaaagcccccgacgctcgttcgcgtcgggggctttcgttcatcgtgttccttgaaaacggcttacgcttcggcgtagacgtccttgagcttgagcaggtgctcgtagcggtccatggccgccttctcgttgcgctcgaacagctcgctggcgcgctcagggaactcgcgggtca

SEQ ID NO: 9183 - DNA, 1851 bp, Unknown
  gut microbiota DNA sequence
ccgcagtcgacggccttcttcatctcgtcctggcagttcgccatgccgcccttgatggagtgcatctcgcacggcgagtagccgatgatcagcgacggtccgggataggcctcggcctcggcgatggccttgatggtctgggccggcttggcgcccatggcaacctgcgccacgtacacgtagccgtacgccatcgcgatctcggtgaggctcttcttcttgacatccttgcccgcggccgcgaactgggcgacctggccgatgttggttgccttcgaagcctgaccgccggtgttggagtacacctcggtgtcgaacacgaacacgttcacgtcctcgccggatgccagcacgtggtcgaggccgccgtaaccgatgtcgtaggcccagccgtcgccgccgaagatccagacggacttcttgttcaggtactctttgttctgcaggatctcgggcgcctccgggcaaccgttctcggcagcagcctcgagcgcgggaacgagcgcctcgacggccttggcgttcgcctcgccatcggccatggtgtcgaggtacgccgcgataagatccttggtctcagccggcgtcttgtcgttagctgccatggcttccaacttgccgaccaggcggtcacgcaccgcctcgtgacccagcaacatgcccaggccgtgctcggcgttgtcctcgaacagggagttcgaccacgcaggcccgcgaccctcggcgttcaccgtatacggcgacgtagcggccggaccgccccagatggacgagcaacccgtggcgttcgcgacgtacatgcgatcgccgaacagctgggtgaccagcttggcgtacgccgtctcggcgcaaccggcgcaggcgccggagaactccagcagcggctgcttgaactggctgcccttgaccgtggcatcctcgagcgcaggcttctcggacacgttgtcaacgcagtagtcgaacacgtcctgctgcgccagctggctttccgtgggcaccatcgtcagcgagtcggaggggcacacgttcacgcacacgccgcagcccatgcagtcgagcggggacacggccagcgtgtactgcaggccggcagcggccttgcccttcgccggcaccatgacggtggcggcgggagcggcggcggcttcttcctcggtgagggcgaacgggcggatggtggcatgcgggcacacgaacgcgcactggttgcactggatgcaggaagcggcatcccacgcgggcacgctcacagcgacgccgcgcttctcgtaggcggccgcgccctgctcgaactggccgtcggcatggtcgaggaacgcggacaccggcaggcggtcgccgtccatgcggccgaccggctccatgatgtcgcgcaccatcttcaccacttcggagcggccctcgagcacgggagcctcgccctcgtccacggcgtttgcccagcttgcaggcacttccacctgtacgaacgccgtagcacccgcatcgatggcgcggtggttcatgtcgacgacgtcctggcccttcttcaggtaggacttcgtggcggcgtccttcatgtactggagcgcctcgtcctgcgggatcacgttcgccagcgtgaagaacgccgactgcaggatggtgttcgtgcgcttgcccatgccgatctcggcggcgaggtcgatggcgttgatagtgtacagcttgatgtcgttgttggcgatgtagcgcttcgcctcggcgttgaggtggtgctcaagctcctccggcgtccactggcagttgatcatgaacgcgccgcccggcttcacgtcgttcaccatgcggaagcccttggtgacgtaggaggggttgtggcaagccacgaag

SEQ ID NO: 9184 - DNA, 15997 bp, Unknown
  gut microbiota DNA sequence
cggttgcccaacaaagccaggatacccagcgcgaacgcgatgtcggtggcggtggggacgccccagccttgcacggtttcgggattcgtcgcgttgaacaccaggtagatgccgatgggggccagcacgccgccgatggcagccatgatgggcagcagcgcctggcggatgttcgtcagctcgcccaccgtcagctcgtatttcacttccaagcccaccagcaggaagaacacagccatgaagatgtcgttgatcacgtgcgccagcgacatgcccgcgaacgcgtcgccgaagaagaagcccgcctcggtgtgccagaactccaagaacgcctcgtacgcgcccgtgttcgccacgatgagcgccacgacggccgccagcagcatgacgccggccgccttcgtcgacgagtgggtgaattggatgagtttcctgtatcgtgcctgatgacgctgcacttcgttgatgaaaatgcgctgcgttccgtcttgattctgttcggtcatgtcgccctttcggcttcgtcgtttgccgtattatcccccaattacctggtgcgtccgttcgattgttacccgtttttagatcgatttcacaacaaagtaaaatgcccggccaaaatatcatgaattgcgctattctgtactcatcagcttaggcgttaggagtcggcttgggattcgcgtggagggcatatcacccattcgctcgtatgaccaggtgcgatgacaacgaccgagctgtttttttattcgcaacgaggtaagaggtgatcgctatgagcattaccgtcaccggacgcaaaatgcctgtaaccgacgcgctgcgcgagtacgccgaggagaagatcggcaattccatgaaggtcatggacatcgatccgctcgtagccgaaatcgtgctgttcgttgagaagaaccccgccaatcctcgccctgccgtctgcgaagtcacgctgcgcacgaagggccacatcattcgcgtcgaagaacacgaagaggatatgtacgccgccatcgacgtggccgccgccaaggtcgtccgccagctgcgcaagtacaagacgaaggtggtcgaccgcaagctgcgcgccgccgacgagaccatccgcatcgagccttccgccgccggcgagctggacgttgacgggctcatgcaggaactgtccgacgacgaagtggtgcgcgtgaagacgatcgagttcgagccgctgaccgaagaggaagcgctcgtgaagatcgacctcttgggccacgacttcttcgcctacaccgaccgcgacagcggcctcgtgaacgtgctgtaccgtcgcgacgacggcggctacggcctcctcaagcaggcggaggagtaagcggtttcgcctccccaacctcgcacgaacgaacgccggcggattccacatcgccggcgttttcctttgccgtgcgcgcagccctcagtcggcgaacaggtcgatgagctcctgcttcgaatgcacgccgagcttcgcgtagatgttcttcatgtgcgtgcgcaccgtggcgggcgagcacaccagctcgtcggcgatgaacgcggccgagcggccccgcgcaagctgcagcatgatctccgactcgcgcgccgtgatgcggtattcggccgccagctcttcggcgcgcgccgcgaaacgatcctccccggtgaccacgatcacgcgcttctcgtcggtcgacggtcgccgccgcgtcaggtacagcagcagcatggaaagcccgtacaccgccgcgatggtgacgatccagtacaaaccctcggcctcgctgcccgacgcctctcccagccaatagcccgccatgccgaacagcagctgcgacaggcggatgcacgccgtggcgaacgcgaacagcacgtacgtcttgagcttcttccgctgtatctggcacaggatgaagtacagcgcgctgaacgagatgaactcgtacacgagcaccagcaggccctggagcgcttgcgaagcccagcttcccagcgtgagcggcagcagcaccaccagcgccagcagtatcgggaacagatagcggtacagccgctccacgtccaccgcgcgggcgacgacgaccacgacgaagcagaacacgagcgccgccgaaatggccccgacggcggagatgatgcccgacccgtcggtggcgacgccgaggaagaacccgttgaggatgctcaccgtcgcctcgaggacgatcgagaccaccaacgcgtcggcgattcccatcgcaccctggcgatatgccttgaacgtcgcgggcgccgcgtcgtcttcggaggaatcgagccacgcgcggcccctcgcgcgcagcagcaacgcgaccgcgccgacgagcagcacgcccaccgcgacgacgaacggcacgcccatgaggctgccgcacgccaacgtgatcacgcttttcaccagcatgcccagcgccaggatgcccgcgatccgcgccggcgtctgatgggccaccacctcgagccacgagaggttcaagcacgtcgatgcaacgccgtacgtcagcgccaggagcacgaacacccccgatgagccgggggcgatccaaggagccacggcgggagcggcaaccaggagcagcagcagcgccggcagcaccacgggcaggcggaagccggggatgaggcccttccacgcaagcgccatcaccgtgagcgcgcacagcagcgacgacagtgcggttgtcatggagaacgacatgtcggcgatgaacagcgtggacgtgggaaccgaagcgagcgccgaggagtacagcagggaattggcaccccggaacagcccgtatcccagcgcaagcgccagcgtccgaccgttgacgaagaaccggcggtagtctgctgcctgcgttgcgtagcggctgtcttgcatgatcccctctcgcgtcaagtacctccgtattctaaccgttgaacggccccgatgccccgcacacctcgcgcctcaaacggccaaaacgaaaaataccgcaaaacagggcagaggcgaaacggggcgaaataccgcaaaaggcggcacggtgaaccgccgtcttcgaggcagaatccagaaagcaagggaacggggcgagcggatgcgcgcccctctgtcagaagggatgaaccatggaagaacaatctcagggcaagcagctcaaccgacgctcgttcattcaaggtatcgcggcgacgggcgctctcggcatcatggcgggcgcgggcctgtcgggatgcgcgccgcagcagcaaagcgccgccgccgaagcgccgcagcaagaggcgggtgcgagcgcaggcgaagtgcacgagtgggtcgacgcggtatcctccgcaagcttggccacgaacaagtacaccaccttcaccgaaacgcagctgcaagacgccgtcatggcgtaccagaccgaatgcgtcgtctccacatcgaacgaggacggcacgccgaacatcgccatcttcgtgcccgcggccatgatcgacggaacgtacgtcgcgttcgcctgggccgaaaaccagacgaaggcgaacttcgagcgggcgaagatcggcatgatcgccttcgacgtgccgaacccgacggccgagacgaaggagctgcgccaccagggctcggtggtgaaagcgaccctcgtggaagacgaatccgtcatcgggaagctgaaggacgccgacgagcagcttgccgtgtgcacctttgtggagattaccgaactcctgcccgtcggttaactcttcgcgcgttgtccgatacaatgggtgccaccgaaactagacgataggagcggcatggcaaccatcgacaccatcaagaccatcctcgaggagaacctcgacatcgacccgagcaccgtcgaggagagctcgacgttcgactcgctgggcatcgactcgctcgacatggtggagctgatctgcgacctcgaagaggcctgcgacgtggacttcggcgagcccgagggcctcgacaccgtgggcagcctcgtggagtacatcgactcgctgtaagcgcgacagcgcacgcagtaccatccagcagcaccgcgaaggcccgccgatcggcgggccttcgcttgtccagggagaatcgggccagcggaaaaccttacgcgagcgccgccttggccgcgttggcgcccgagaagcgaccggaggtgtaggaccagttcagaccgcacccgcccgccgggtagtcgtcgtagatgaacgtgccgcagcacacttcgccggccgcgtacaggtgcgggatgggctgaccgtcggtgtcgagcacctggaactcggtgttcacgcgatagccgccgaagctgccgtgcgtgcacacgcccatcgtcagcacgtagaagggagcctccgcgagcgggacgaggttctcggccttcttcttgaactgggtatcctcgccggacgcggccagctcgttgtacgcgtcgagcgccgtctgcgccgcagcgccgtcgatgccgagcgctgccgccgcctcggccaccgtgtcggccttcgcgaacatgccctgctccaagccgaagtcgagcttgctgcgcagatcctcgtcaagcgcgtccaccatggcctggtcgtacaccgcgaagaacttctgatcgtcgaagtgcgccacgtcgtagtagatgtcgtgcgtctggccggcctcgttggcgaagcgctcgcccttggagttgatccacagcgccttgttgctgatgagcttcgactggcccggctccacgggacaggcgaggatgccgttcgtgccgccgtggcccacgtagtccgcgccgatgtcgaggcccatctgcagcccctcgcccgtgcagccgacgcccacctcggtgtacacgcccgagtagtcggggcagtacccatcgatcatctcgacgttgcggcagaacccgcccgtggacacgatcacgttcttcgcgttgtagagcaccgtcgagccgttcccgcgctttgcgagcacgccggccgccgcgccgccgtcatcgaccacgagcgattccaccgtggtgccgaagtggaactcggcgccgtgctcctgagcgtacgccgtgacggcgctcaacgcgtccatggcgttgttgacgcagttatggccgcgcggcaccgggtccttgcccttcttcgacacggtctccttgaagggcacgcccagctcgcccgtcagccagtcgatggtttcgccgaagtgctcggcgcagaacttctgcacgtcgtagtccagcttgtcgccgccgcgcgacaggaagtagtcgagcagccccgacggatcgtcctcgatgcccgcggctttctgcagctgcgtgcccgcgccgtagaacgtgccgagggccagcgagctggaaccggccagccacgccatcttctccagcagcacggtcttcgcgccggccgccgcagcctggcccgccgccgtcacgccggcaccgccgccgcccagaaccaccacgtcgaagtccaccgtctcgtacgcctcggcggccgcggcctgctgcggcgcgcagccgaacaggctgcccagcgccatggtggccaaaccgcccgtcagcgcctgggcgaactgccggcgcgtcagcggcatggaagccatcgtcgtctcggtggcagcagtggcggtgcgtcccgtcttgattcccgtcatgattgatcctttcctccctagggtgatgcttcatgccctgcactctacgcacgatgcgcgcacctcagaagccaccttccgggtgaaaaacacccgatgccgccgggtttcacccggaaggtgtgaggcgtgctctacgcgtagtgcacgcgctcgggcgtgctcgtatatactggttgccgtacttcgtccccctgcaagaatcgaggatcgatgccgcacgcgagcgcaaccgctcgaacgaatcagatgcgcgccctcatgggcggcgccttcctgccgtcgtttctggggctggcggccacgcgcgtctggctgcaggtgaacctgttcgcgtcgtacacgcaaagcgacgacgggctgttcacggtggtcaacaacctcgcgtacggcctggtgatggtcatcggcgcggccatcgcgctgcgcaagccgttctcaaagggcaaccgcacggcggtggcgtggctcggcttcgccgtcatgacgttctccaccgtgctcatcctggcgggcaaggaaaccggtgccgtcgatatcttggcggtggccagcgtgtgcgccggcatcggcggcgcgctgggcggcggcatgtggacggcggcgtacgtgcggctgggattgcgccagtcggtgctgtacgggttcttgtcgctggccctcggatcgctcggcggcctggcgctcagcttcctgcccgaggcgctcagctacacggtgagcatgttcatgccgaccatcgccctcttgtgctaccagcgcgccatgaagaccgacgtgggaccgcagcccgcgcccgagccgatctacgacaaagagccgcgcagcaccatgctgttcatcttcggcggcctggccgtgttcgggctggcgctgggcatctcgcgcggcttccccgccggcgagcccgtgcccatggacgcgttgcaacgcgtcgtccaccagatgggcgtcgtggtgatcagcctgttcatcatctggtggttcatcgtgaagcgcaagcggctgagcttctcgttcctctggcgcatcgagatcatgctggtggccgcgggcatgctgatcctgtcggtgttccccgggcacttcacggggctggccatcgctaccgtcaacatcgccgacacgctcatgctgggcgtgctgtggatcacgctgcaggacgtggcgcgccacaccaccaccgacgtgtacgccgtgtatgggttcgcctgggcgtcgcgcgtgctgtcgcgcgacgcgggccgcgtgctgatcatggtgctgggcgcgatgggggcctcgtcgtacgcggtgaccgccgtcatcggcatcgtggtgttcgcgctggccgccagcatggcgctgctgctgtcggacggcattttgaagctgcggccgctgttcaccgaagacgtggcggctcccgcccggcgaagcgcggtgagcgcggcgcgcgaggcgaggcgagcggagatggaaggggcgggagcctcgacgccggcccccgcggcgatgccgagcgcgcaggcccagccggacccgcaggagtggttccgcgacgcgttcgacctctcggagcgcgagacggaagtggcgctgctcatcgcccagggacgcagcaagtcctacatcgccgaggcgctgtgcctgtcggagaacacggtgcgcacgcacgccaagaacgtctacacgaaactcgacgtgcattcgaagcaagaattgatcgacctgctgcagaatagggagtagaggcctaccctcttccccagcgcggcggaagcttcgggatgagcgcgtcttgctccgcgccgatcgcatgccgctttcttgccgaatcggcgcgacgtgcggtcgctaggccgcagacgccctttcgcgccatggggaagggctgtccccaacgcacgcattccgaccccccccgcagcgtccgggcagaaggcgtctacccctccagctgttctttcagcgcgcctaccgagtacagactgccgaacgcgcagatgaggccgtcggcccccgccagctcgcgcgccttcgccagcgcgtcggccatgtcgcgcgcgacgagaggccgcatgtgcgccgagcaccccagcacgtcctgccccgtccagcggatggcgcgcgccagcctgtcggcggaaagcgcgcgcgggttgtcgggcgtcaccgccacgaaccccccgacgagcggcatcacggtttccagcatggccgggtagtccttgtcctccagcacccccatgatgaacacaggcttgcgaccggggaacacgtcggccagcgaatccacgagcgcgcgggcgccctggggattgtgcccgccgtccacgacgacggtcggctcgccctcccccgcgcgcacgatctcgaagcgccccggccaggcggcgcctgcgacgccctgacgcaccgcgtcgtcgtcgacggcccatccgcgcgtgcgcagcgcttcggtcacctcgatggccagcgccgcgttcgccggctggtacgatcccagcagcttcgtgcgcaggtcggcgaagcgcccgtacgagaacgagcgcgcgggcgcgccggaagcgccccaatccaccgggcccacgttcaagcacgcgaaatcgggcacggtgagcgtatcgcccgccgccgcgaccgcctgctcgaccacggccatcgcttcggcgtcctgcggccacgacaccacggcggaccccggcttcacgatgccggccttctcgcccgcaatggcggccagcgtggtgccgagcagcttcgtgtggtcgaggccgatgcgcgcgatgacggccgcctcgggcgcgtcgatggcgttcgtcgaatcgaggcgcccgccgaggcccacttcgagcaccacgatatcgcagcctcggcgcacgaagtgcacgagcgccaccgccgtcatcagctcgaactcggtgggatggtcggccatagcctcggcctgccccttcacgagcagcgtcgcctcggtcagctcgtcgagcgtgatgttggcgccatccacgcggatgcgctcttcgaacgtgatgaggtacgggctggtgaacagccccgtgcgcagccccgctgcctggaggatggaggccaggtacgcgcaggtcgagcccttcccgttcgtgcccgccacgtggacgaacttgagacgatcctgcggccggcccagccggtcgagcagctcgcgaatgcggtcgagccccagccgcgactccaaccagcgcggctcgttgatgtaggcgataggatcgaacgacatagggacctcctgatgagatggggatcgaggcgaatgtttcacgtgaaacattcgttcgcgcacaagcgcgaaacgcgcgggagcgaagcgacccgtgcctcgcgcgcagcgcgagaacaaccgcgcgggtggtcgggcgggagcgaagcgacccgcccatgcgcccgcagggcgcataatgggcgcgcgggttggcgcagtaagtcagcgaggggcgctgtggtgcccgagatcgtggggagggcgagggcgaagcgtacttcggtacgcgagtcctcggcctcgccgcgagatcgggtgccacagcgccccgcagcgtcggcgggttccgaaggccgtcaggccttcggaaccagatactccgcaatgcccgccgccgcgcgcttgccggcgcccatggcgaggatgacggttgccgcgccgatgacggcgtcgccgccggcgaacacgcccggcttcgacgtggctcctgtgcgctcgtcggccacgatcaggctgcgcggcgtcacctcgagccccggggtggtcttcgcgatcagcgggttggtcttcgagcccgccgcaaccaccagcatgtcgatgtcgatgacgaactcgctgccttcgaccgccgtcggacggcgccgcccgctcgcatcgggctcgcccaactccatgcggacacactcgacgcccgacgcccagccgttctcgtcgcccaggatgcgcgtcgggttcgtcaacagctggaagtgaatgccctcctgctcggcatggtgcacttcctcggcacgcgccggcatctcgtcgcggccgcggcggtacaccacggtcacgtcggcgcccaggcgcttcgccgtgcgcgcggcgtccatggccacgttgccgccgcccaccaccacgcacttcttgccggcgtacaccggcgtctcgtactcggggaacagatacgccttcatgaggttcacgcgggtcagcagctcgcttgccaccgacacgccgttgaggccctcgccctcgatgcccaggtagctgggcaggcccgcgcccgtgcccacgaacacggcgtcgaagccgcggtcctccatgagctcatcgatgtcgtacagcttgcccaccagcgcgttcacctcgaacgacacgcccttgtcgcccagcttcgacacctcgcgctgcacgaggtccttcggcaggcggaactcggggatgccgtaggtcagcacgccgcccaccttgtgtagcgcctcgaacacggtgatgtcgcacccgcgcttcgccagctcgcctgcgcaggtcagcgatgccgggcccgagccgatgaccgcgacgcgcttgccggccaagtccttcgacacggcgccttccgcgctgcgccaaatgccgcaggcaacctcgtcgcccgcggcgcattcgtcgcgaagcccgtccatggccgcagccgcctcttcgggatgctcgaacgcccagtcggacgtgaagcgctccaagcgcccgatggccacaggctcgccgttcctgccgcgcgtgcacacgccctcgcactgcgtctcctgcgggcacacgcggccgcagatggcgggcagcgagttcgcgcttttcacgatggcgtacgcgcaggcgaagttgccctcggccacctgcgcgatgaactgcgggatgggaacgcccacggggcatccgctcacgcacggcgtgttcgggcactggatgcagcggcgcgcctcggccattgcctcctcttcggagtagcccagcgccacctcctcgaacgtctgcgcacgctcgacgggatcgagctccggcatggggacgcgcgtcttctgcttgttggcttcgtagttcatccgcgccatgctaggcccccttccgctcggtcgaatgtcccaaatggggactgtccccatttgggacactggtgcaatcgcggccttcgcgcgccgcgctctcgaagctgcggtacatgacgccgcggcgcatggcgtcgtcgaaatccaccagatggccgtcgaagtcgggcccgtccacgcatgcgtgcaggtactcgtcgcccaccttcacgcggcagccgccgcacatgcccgtgccgtcgatcatgagcgggttcatgctgacatacgttttgatgccgtagggcttcgtggtggcggccacgaacttcatcatgatgacgggccccacagccagaacgaggtcgtagtccgcgccctcgtcgatgcgctgctgcagcgcctgcgtcaccaggcccttgtttccgttcgaaccatcgtcggtcatgatgatctggcgcgtggaatgccggtcgatctcgtcttccagcagcacgaggtccttgttgcggaagccggtgataacatccacctcgcagccatggtcgtacagccacttggcctgaggaaacgcgatggctgttcccaaaccgccgccgatgacgcacgcgcgcttcgcgccttccagctcggtggggttgcccaacggcccggcgaagtcctgcagcgcgtcgcccgctttcatctgggcgaggcgtatcgtggtggcgccaaccgcctggaagatgatcgtaatcgtgcccgcctccgggtcgcagtcgttcatggtcaacgggatgcgctcgccctgctcgtcgatgcgcagcatgatgaactgacccggcttgatcttcttcgcgatctcgggcgcgcgcaccaccatgcgcgtcacctcgggattgagcgcctctacctgttcgatgggatacacgtcactgcccttctcgtctcagatacaaaagcagcaccgaaagcggtgccgtctcgtagatgtggccgtcagtatagcaaaggcgctgccgcacctatgttacgagcatgtttccacccggccagtggaggaaatcgcgccggaagggtttctcaatgttctggcgtgcgtcaacaatcccccaacggagcaaccggagagcatgcagggaggctcctgcatggtaagctggggaatcgtccggtccgcgggcaagacgcccggggtttcgtttgggagaacgcgatggctcacctctactttctgcacaaccgcctgcaagccgccccggcaggcacgcccatcgacgccgatcagccggtggtcgaagtgctcaactcgctggaaattggcgaggcctgcttcctcagctccgagacgcgggagtcgctgcgctccatatacacggtcgagaacacctacctcgatgtgttcccccactgcctcatcggatcgttcgccgtgcccaacaagaaccacatcctgttcgacccgctctgcttcgcgttctacttcgacgccacgcatctggtgttcctcgacgacggcaccacctgcgcgcgcgttctcgaggaaatcgcctcgcaaggcgttttgaagcagcccaccgtcggtcactgcctgttcgagttcatgaagatgctcatgaagaacgacctctccttcctggccgatctggaggatcgcatggaggacgtggaggagtccatcatcgatcgcggcaagaacgccaacagccgcaccatgctgacgttccggcgcaagctgctgcgcatcgacacgtactaccagcagctggtggacatggccagcggcatagccgaaaacgagaacgggctgctcagcaaggaggaaagccgcctattcctggtagcggaacgtcaggccgaacgcctgttgaagcgctcgctcaccctcaaggagtacagcttgcagttgcgcgaactgtaccagacgcaaatcgacctgcagcagaacaacacgatgcagttcttcacggttatcaccacgttgttcgcgccgctgacgctgctgaccagctggttcggcatgaatttcacgaacatgcccggccttgactggcgctggggctacgaagccatcatcgccgtatcggtaatcatcgtcgtgatcgaaatcatcatcttcaagcgcaagaagtggctgtagtgcctcaccccctcccgcgcatccaacgaaggcccagatggcaaaaaagcatcgaattcggaagttgccgcctgggatcgactgcgagccgaccgtgctccggataaccaccccgcataatgcctgattgcgaagagcacttcttctggtgccgcgcacggcgcttgctcaaggcttgcgatgcattccgaattcgatgcttttttgccatttcggcctcgatccgctgcacgagcgccaaaggggcaatctcgaaccgaagggggctgcgcactaagccagccgctaacgaaagaaatcagctgttttttcgttacgctgcgaaaaggccccgctatcgaaagaaacctttcgttaacggggctgtatgaggcaaggggacggacggcgcttgcgtcgagccgttacagcagcggcggttgctcgacgtgcgggggttcggcggctttggcggcggcctccgcggcccgttcggcttcgcttgcgcgcaacagctcgcccagcgtggcgaagtcgttctccagcgcctcgcgcttggaaccgtcgtacagcgcggccgccgggtggaagatggggaacaccttgaacttgccggcgcgctgcacggtgccgtgcaggcgcgtgatgccgatatccgtcttcaggatgaacttcgtggagaagttccccagcgtcaccaggaactcgggatcgatggtgcgcgtctgctcgcgcaggtacggcgtgcacagctcgatctcctcgggacgcgggtcgcggtttccgggcgggcggcacttcagcacgttcgcgatgaacacgtcctcgcggacgagcccggcgacggccagcagctcgttgaggtacttgcccgccgcgcccacgaagggctcgccttgcaggtcttcgttcttgcccggcgcctcgccgatgatcatgacgcgtgcttcgggattgcccacgccgaacaccgtctgcgtgcggccgtcggccaaggggcacttgcggcacccttccacctgcgcgcgtatctcgtcgagcggaatatgcggcttggtcatgcgaatcccctttcctacacgtacacgcgcggcatgcgcaagctgaacccgcaggccagctcgtagttgatggtgcccagcgtgttcgccatgtcgtcgagggtgatcacggaatcgccctcgcgtcccaccagcagcacctcgtcgccaatcatcggatcgagccggcgccggctgccgtacacccgcagatccacctcgaacatgcactggtccatgcagatgttgcccacctgatggcagcgctgccccttgaggatcacgtcggtgcgccccgacaggccgcgacgcaggccgtcggcgtaccccacgggcacggtgcatatcttcacgctgccgggactgcggtagttcatgccgtagctcacgccctcgctcatgggcacggtgcgcacgtcggtgatgcgcgcgtgcacgctcatggcggggtgcaggtcgatcatcgggcgcgtgacgcccgacggatgcaggccgtacatggctatgcccaggcgcaccatgtcgaactgcacgtcaggatagcggatggccgcggccgagttcgccgcatgcacgatgccggggttgacgcctgccgtgcgcagcgccgtgaccgcctcgatgaaccgcttcacctggatctggaagtccaacgtctccgcggagtcggccgtggcgaagtgcgtgaacgtgcccacgaggtcgagcgcgcgatggaagctcacctgccccatgaactcgaccacttcgtcgtggcgcacgccgatgcggttcatacccgtgttcaccgccaggtggtacggagcgcgcacgccgtacgcgtcggcggcctcggcgtactggatggcgaactcggaggtatagacgctcggcatgaccttgtaagccagaagcagcgggatggccgtctcgggcggctgcgaaagaacgaggatgggcgcgtttaccagcgcctcgcgcagctcgatggcttcgttcaccgtggccacgcccaggtagtcggcgccggagttgagcgcggtcttggcacagcgcaccgcgccgtgaccgtatccgtcggccttcaccacggccatgaggcgcacgccgttgtcgatgcgctgcttgacggcgctcgtgttatgacggatggcgttgaggtcgatctcggtccacgaccagcggcggtcgacgtcgggaatgaggcgcagcttgtcggggtcgaattgggccggctcgccgtcgggccgcgcgtggtcgcgcgcgtactggaacgcgccctccgctccgctgctgaacgccgccgtggccgcctcgtacgcgcccttgttggccgcgttgcccgccggaggctgctcgcctacgtatcgcggcgtacccatcgccgcgctcgccgacacgaagccgttgggcctgcgttgcgagaaaccggtgaacccgttgggaagatcctgtgccatgctctacgcctttcagtcgatcgggcatcagtatagcacttgggatcgtggcgaagcccgccctcattcatgcagcatgtccaacagctcttgacgacggtggatgtcgagcttcgtgtaaatgtgcttcgcgtgcgtgcgcacggtgttctcgctgatgaccaggcgctcggcgatggcggccatgctgttcccgcgcgcgataagctccatgacctccgtttcgcgcgtcgacaacccgtgcgcctcctgcagcacgagacattgcttcgacgtgcgatcgcggatgacgcccgcgtcctcggatgccgaagggcgattccgtcggcgctttgccgcaggtttcgccgccttctgctgccgcggttcctccggcgcgccgaccgccaggaactcgatgggatcggccgtcaccgtgcccttcgccgccagcgatttgaacagcgtgcccgtggccgccagcagcgtgaggcccagcacgtagctcgacaccatggccacgatgaacaaccactcgcgaccgccgatccacatgaagtcgctcacccagcccagcaagaagccggcgctctgcatgatgtaggccacgccgccgaagaacccgtagatgaacaccgggttgatgccgcggtcgcgcgagatctgcgcgcactgcatcatcatgagcatctgcactagcgagaacaccatgtacgtaagcgccgcgaacaggttgagataggtcgcacccaaaaacggcagcagcaag

SEQ ID NO: 9185 - DNA, 452 bp, Unknown
  gut microbiota DNA sequence
acggtcgcgcgagatctgcgcgcactgcatcatcatgagcatctggacgagcgagaacaccatgtacgtaagcgccgcgaacaggttgagataggtcgcacccaaaaacggcagcagcaagaaccccgtgatgatgagcggatacaccacacggaacaccgaggtcagcccgaaccggaagctcatgcggtaccacagcaccaacagcaccaccgccgacaccaacgagcccagcatcgacgcgctgttcaccactgcgccgatatcctcgtgcagaagcgcgatgccgcggatgacgccgctggcgaacgcgagcgaccccacgcacagcgcgctgcgccaatagtcggccaccacctgccgatacacgcgcggatgccgctgcggcacgtcctcgaacataggctggtccacgtgcatctcgcgcaccgaaagcgcgatgcaaaggccgc

SEQ ID NO: 9186 - DNA, 14359 bp, Unknown
  gut microbiota DNA sequence
actgcgccaatagtcggccaccacctgccgatacacgcgcggatgctgctgcggcacgtcctcgaacataggctggtccacgtgcatctcgcgcaccgaaagcgcgatgcaaaggccgcacaagggcacgaacacgagcggtatgaggaaagccgtcagcgcgatgggcacgaggtacagcgcaaagtagatgagcggcgcgatggccgtgcccacgatgagccgcaagttgccctcggccgacggcagcgacgcgaagtagcgctgccatagcatgaacatgcccgcgcacccgatgcccagcaacacgccaccggcgaacaccagcgggagcgtggccgcctgcacgtacatggccgcgataaggcaggccgacccggcgaacaccaacagcgcgctcagcgacaccagcatcacacgcgcgccgcgcggaaagtagtacgatccgagcatgctggctacgaacgcgccgccgaacgcgagcgcctgggctaggaagaacgtgagggtgatctccgccgtctggaattcgagcggcagaaacgggaagacaccgccccaaatggacgtggcgttcaccgtgagaaaacatgcgtagccccaactggacacatgcatgcgcgatgagctttgctccacgacccctcctatcccagcttgcacgacgcttcgcatggtagcatagccgtcggctccgaaacgggggattcagagaatagtgatgactcctacctggggttttgttcttaaatcacatgacgagtgtgattcccccgccagctgtttccggtactttggaacaggcgagaggaacaatcgaagcaagaggagggaaccatgaccatgaacgaatcgagcgtatcgcgccgcacgttcgtcaagggatcgctggccggcctggcgcttgccggcgctgccggatcgaccgcgctgtacggctgcgcgccgaaggacgagaagggcgccgcaagcgagggcgcgggcgcatcgaccgaccagatctcgtggagccagtgcaacgtcaactgcggcggcaactgcgtcttccagtggcactcccaggacggcaagatcgtctacatggagtccgacaacaccggcgacgtcgatctgcaggcacgcgcctgcctgcgcggccgctccatgcgtcgctggatcaacagccccgaccgcctgacgaagcccatgaagcgcgtcggcaagcgtggcgagggcaagttcgaggagatcagctgggacgaggccatcgacaccatcgccagcgagctgaagcgcgtcatcgacacgtacggcaacgaggccatctacgtgaactacgccaccggcatgtactccaccaccggcaagcagccgggcctgcgtctgttgggcctgctgggcggctacatcaaccaggcgtacgactactccacccacatgctgcaggtcgccctgcccttcatgtacggcagcaagtgcagcccgtacgacaacgtgcacgcctcctcgttctccgaggccgagcgcgcctccgacctcgtggtgatgttcggcaacagcccggcggaaacccgcatgggcggcgcgaacgccgtgtgggacttcgcgaaggtgcgcgagtccgtcaccggccgcggcggcaagatcgtgaacatcgactaccgcatgaacgagtcgtgctcggggcatccggacgagtggctgcccatccgtcccggcaccgacgccgcgctggcgtccgccatcgcgcacgagtggatcgcgaacgaccaggtggacaagggcttcctggacgagtactgcgtcggctacgacgagggcaccatgcccgagagcgccaagggccagaacaagtcctacaaggactacatcatgggcaccggctacgacatggtagagaagaccgccgagtgggccgcccccatcaccggcatcccggccgagcgcatcaagcagctggcagccgacatcgccgccgccgaggcgccgttcatctgccaaggctggggcccgcagcgccacacgaacggcgaggacacgtcgcgcgccatctgcatgctgcccgtgctcatcggcaagatcggcctgcccggcacgaacaccggccagcgcgaggccgaaccgcccacctatctcgtgggaagcctgccgttcgagaatcccatcaagacggccatcccggtgtaccagtggatcaacgccgtggaccacggcaaggagatgacggccaccaacgccggcatcgtgggcgccgacaagctgaacaacgacatcaagttcctgtggaactacgcgggcaactgcatcacgaaccagcacggcgacatcaactacacgcacgacgttttggcagacgagagcaagctggagttcatcctggtgtgggacaccgtgatgaccgactccgccaagtacgccgacattctgctgcccgacgccatgcgctccgagcagctgaacatgcagacgcagggctactccgaatactacaccgccgtcgtcgtgggcgggcccgcgcaggaagcgccgggcgagtgccgctccagctacgacgtgtgcgccgacatcgccgacaagttcggcaagaaggacgcgttcaccgagggcaagacgcaggaagactggatcaaggagctctacgaggccggcgcgaaagccgacggcaacatgcccacctgggacgagatcaaggcccaaggcgtgtacaagcgtccgctggagccggccatcggcctggtggacttccgcaccgacccggtgaagaacccgctgtccacgccgtcgggcaagatcgagatctactccgagcagctggccgagatcgccgccacgtgggagctcgaagagggcgacgtcatcaaccccatccccgtgttcacgcccggcttccagggctacggctcggtgaccgacgagtacccgctgtactgcacgggcttccatcacaagagccgcacccactcctccttcggcttcatccccgagctggagcaggtggcgcgccaacagctgtggatcaaccccgccgacgccgagtcgcgcggcatcgccagcggcgacacggtggccgtgaagagccccgccggcgagatccgcatcgaggctttggtcacgccgcgcatcatcccgggcaccatcggcatcccgcagggcgcgtggcacaaggccgacatgaacggcgaccgcgtggacgagggcgcgtgcgtcaacacgctgaccacgtaccgcccgacgccgcttgccaagggcaacggcccggcgcactccatcatcgcccagatcacgaaagcctaacggggggaggaccacatgactcagtacggatttttcttcgacagcacgcgctgcacgggttgccgcacctgcgagatggcgtgcaaggactacaaggacctgtccgccaccatcgcattccgcaaggtgtacgactacgagggcggcgcctggagcgacgcgggcgacggcaccttcacgtccgacgcgttcacctaccacgtgtcgctgggctgccagcactgcgcgatgccggcctgcatggccaagtgcccgcagggcgccatcgagaaggataccaagacgggcctggtgcacatcaaccaggaaaaatgcacgggcgtgggcgcctgcgtggagacgtgcccctacaacgtgcccatcgtggacaaggccctgggcaagggtgtgaaatgcgacggctgcgccgaccgcgtggccgagggcaagagccccatctgcgtggaggcctgcccgttgcgcgcgctggagttcggcgacatcgaggagctgagggcgaagcacgaaggaacggtggcaggcattgcgccgatgccgtcgcccgacgagacgacgccctccatcgcaatcctgccgtgcccggcggcgaaggagcccggcgacaccactggcgccatcgccaatgagaaggaagtgacgggcgtggcctaaccgccatccgctactcgaaggggcgccgcaggggcgccccttcgcatcttcgaacgaaggctcccttccccaaggacggggcttccccgcgcacggcgccgcccgaacggactccggggaatcgacgggccttcgtggtagaatcgtcttcgtcttccatcgtttccgaccgaaagcggcattatgccacggggcttcttttacgacaatacgcgctgcaccgggtgcagaacctgcgtcatagcgtgcaaggactaccatgaccacggaccggacatggccttccgcatggtcatcgactacgaaggcggctcctggcaacccgatgtcgacgggacgttctcgcaggacgcgttcgcctaccacgtgtccatctcgtgcaaccactgcaacaaccccgtgtgcacccgcgtatgccccaccggcgccatgcataaagacgagctcgggctggtctggcccgatgccaccaagtgcatcggctgcggctactgcaccatggcctgcccctaccacgcaccgcatatcgacgcgcgcctgaaacgcagcagcaagtgcgacggctgccgcgaccgcctcgtcgacggcgggcagcctgtctgcgtggaagcctgcccgctgcgcgcgctggagttcgggctgacgtccgagctgaccgaccgccaccccgacgcggtgcgctccatcctgccgctaccggacgaatcggccacgcgccccaacctcctcatcctgccgtcgcctgcggccgaacgagccgaaaagcagggaggcagcatcgtgaaccgaacggagcttcatctatgaccagcggattcgacgccttctcgctgggcctgttcacctcgctcgcaccggcgggcgtcgttgcgttcctggcactcgcgctcgtgcggctctggtcgcgcgaccgcacggcctcagtgcgcatcgaccgtatgatcgcgctgccgttcagcgtggttctgatcgggttcatcgcctcggccacgcacctcggaacgcccgcgaacgcgctgcacgtgttctcgggcgtcggccgctcgccgctgtccaacgaggttctgagcgctgtcgcgttcctgttcctggtaggttcgtactggatgatggcgttcaaggagcgctttcccgatgccgtggcgaagccatggctggcgttggcctgtctggcaggaatcgcgcttatcgcgtgcacgtccatggcgtacaacgtggacacggttcctacctgggataccgcattcacgccggcgaacctcgtgttggcagcgttgctggcaggccctgtgttggggctcctgttcctggagctggcgcaggtgcggccgcgcgcgctcgagcgcgcgctcgtcgtactggcggcgcccgcgctcgtggcggggaccgtcgtgctcgcactgcaccaggagagcctttccgccatcgcgaacaacgagttcgcagccagcacgctcgcgccttcctatcctgctgtcatcggcgcgcatctcatcgtaggcgcgatcgcactcgcaatagccggcctgtcgatgaagcgcgtccaatcccgccgcacgacactcgcactgagagccaccgccagcctgctcgcgctcgcagccgtcttcgtcacccgcatcgtgttctaccacctgcacatgaccgtgggattctgatcgaacagttctcccgtgtggcaacacagcggtcgttcgccgacttccctgattttggcaaaaatttcgaggtaagaagatgttagccaaggaatacttgcactataggatgccttgcccagctcgtttcgacaataatcccaggtcatgtttttccatacagcctgagccgtagagttagatgcagatgacatcttcctacctcgaaatttttgccaaaatccgactcgctaccgatactatcgctgcccgcgcaaacaaaaaccgactcccctgcgtacgaagaaacccttacgataggaaagttcagtcgcatacgtcaaacaccgcggggaagcggttcctaatgcccgccgccggccatcatcttcacggcgtgcggcagggctttcaccacgccgtcccagttctcgcgggcagccttctcgctgccgggcaggttgatcaccaggtgacggccgcgctgcatgcacagcgcgcgggacagcatggcgtacggcgtgatggccagcgaatgcgcgcgcatggcttcggctatgccgggcacgttgcgatcgcacgcgtccatcgtggcctcgggcgtcacgtcgcgcagcgagagcccgctgcctccgcaggtcagcaccacgtccacgtcctgctcgtcgcaggcgcgcacaatggccgacgcgatgaacggtcgctcgtcgggcaccaccacgtggctcttgcactcccaaccgttttcggcgatcagcgtctccagcgctgcgccggccgtatcctccttcatgccgcgcgtatccgagcacgtgataatggcgaaggtgatgttctgttccatcttacaaactcacttcctcggaaacgtcgagcaggacgcactgcacaagcgagccggcagtgcgagagtcgaggccttccggcaggatggccatgcagttgctgcgctggatgactccgaacaggcccgagctctggttcttggcgggcgccaccacgtattcgccctcatcgttcttgtacagcgtgccgcgcaggaagatgcggcgcgggtccttcttcttcacgtcgcgcgatagcttcgccatcaccgacgggcgctcgaaatgcgcatacccttgcatcttgcgcagcgcggggcggatgatcatctcgaagcccacgtacgccgccgccgggttgccgggcaggccgaacacgggcgtaccgcgcacgatgccgaacgtctgggccttgccgggacgaatgttcaccgtggtcatcagcagctcgcccaactcggacaccacgggcttgatgaagtcgaagtcgccgttcgacgccccgccgctggtcacgacgaagtcgtacgcgtccgccgccgcggacaccgccgccgcaagcgcctccttcgtatcctccacgatgggcaggatgacgggtaccgcacccgctgcttgcgcgcaggcggcaagcgcgtagctgttcgagttgcggatcttgccgggcgtgggcacgactgtgggatccaccagctcggagccgatggagatgacggccacgcgcggacgccgatgcgtcggcacctccacgatgccgcatcccgcgaggaacccgacgccggccgagccgatgacctcgcccttcgacaccaccgtctcgcccgccttcgcctcttccccggcctcgcgcacgttggagcgcacggcggtgggggcggagaacgccacgcggctgccgggcttgccgtcgccggtcaccacgtcgacgatctcgtatttcaccacggagtctgcgtcgtcgggcatgggcgcgccggtcatgatgcgcacgcactgcccggcctcgatagagccttcaaacacgtcgcccgccgcgatctcggccacgacgtccagttcgaccggcgcttcctgcgacgcctcggcaagctcggcggcccgaaccgcgaacccgtccatcgccgaatgggcgaacggcgagatgtcgatatcgctcttcaaatcggcggcggccacgcggccgaccgcttccaacacgggcacggtttccaccggcaggggcgccgcatgggacaacacgagcgcacgggcctcttcaagtgagatcatttctggcatggttgcacatccttttccttcgtgcggctcattatagcgcttgcagtatagtgttgcgcaggaagtttggcagcatcggcagtcgtacgcgggcttcaagggggggcgctccacccaatcgccatgatctgacgatagcccctcgcccccaggttcgcgataatggaaggacaccgaaccctcgcacacaaggagacgcccatgacctcagaagaaacgcccctgtaccaccgcgtgaaagcccatcccaccgcccgcatcgcgccgtcggctggcatcgtgggcgacgtgaccatcggccgcgacgccagcgtgttcgccggcgtgcagatccgcggcgacgacgcgcccgtcgtcatcggcgacgagtccaacttgcaggagaacacggtcgtccacgtggatttcgacgtgccctgcatcgtggggccgcattgcaccgtaggccacggcaccatcctgcacgggtgcgagctgggcgaaaacgtgctggtgggcatgggctccatcgtgatgaaccgcgcgaagatcggcgcgaacagcctgatcggggcaggatcgctggtgacagagggcaaggagttcccgccgggcagcctcatcatgggcacgccggcgcgcgtgaagcgcgcgctgaccgacgaggagattgcgtccatgtgcaccttccccgccgacgactacgtgcgccaaagcggcgaaatgctggagcagggagtgctggagcaccccgcccccgacatggacatgcaccggggagcgtagggcaaagccttttcccgctcatgaagaagggctgcccaaaggcagcccttctcgtttcgcgaagctaaagagccgtcaagctctcgcaaccgttagcggttgatattgtaaaaggcgttcatgccggcgtactgggcggcggtgtccaactcttcctcgatgcggagcagctggttgtacttcgccacgcggtcgctgcggcagggcgcgcccgtcttgatctggccggtgttgcaagcgacggccaggtcggcgatggtggtgtcctcggtctcgccggagcggtggctcatgacgcatgcatagccggcctgcttcgccatctcaatggcctccagcgtctcggtcaggctgccgatctggttcaccttgatgaggatggcgttcgcgcagcccagctcgatacccttggccaggcgcttggagttggtgacgaacaggtcgtcgcccaccagctgcacgcggtcgccgatgcggtcggtcagctctttccagccgtcccaatcctcttcggccataccgtcctcgatggagacgatggggtacttgttcacgagcgcttcccaatagtccaccatctcggcgctggtcagctcgcggccctcgcccgccagcacgtacttcttcttatcggcgtcgtagaactcggtggatgccgggtccatggcgaacatgatgtccacgccgggcttgtaaccggcagcttcgcacgccttcgtcacgtactcgagcggctcttcgttcgtcttgaagttgggggcgaagccaccctcgtcacccacgccgccgccgaggcccgcgtcatgcagcaccttcttcagcgtgtggtagatctcggcgcaccagcgcagcgcctcggcaaacgtgctcgcgcccaccggcatgatcatgaactcctggaagtccacgttgttgtcagcatgcacgccgccgttgaggatgttcatcatgggcgtgggcagcaggtgcgcgttcgcgccgccgacgtacttgtacagcggcagctcagccgactcagcagcagccttggcgcaggccagcgacgcgccgaggatggcgttcgcgcccaaggcacccttgttgtcggtgccgtccacctgcagcatgatgtcgtcgatgaagcgctgatcgtcggcctcgatgccgatgagcgcctcggcgatctcctcgttcacgtgggcgacagcatccagtgtgcccttgccgagatagcggcccttgtcgcagtcgcgcagctcgacggcctcgaacgcgcccgtcgaagcgcccgacggcaccgcggcacggccgaacgcgccgtcttccagcaccacttcaacttccacggtcgggttgccgcgcgagtccagaatctcgcgaccgaacacatcgatgatgacgctcatgcatgcctcctagtaggttttcccgctttgccgcatcgccacggcaaagatgcacttcgcggtaatcatagcacgtcggaagcgcagcgttcgtccctttggccgttttcccgccattgtcgacaagcggtcgagagggcgaaacgcgagccctaccccaacgctatatcgtcgccatcgtccacaagatgttcacgctcggctacgattcgatcgatgagttcttgttgagagtgcacatccaacttgcgatagatggcgcgtacgtgggttttcaccgtatcgggcgacacggtgagttcttcgcagatggcacgccgcgtcttcccctgagcaagcagcagcatcacctcggtctctcgctgcgtcaccgcacgctcggtagccacgaaccgcacgatccctgcgagatcgccagcttcaagaccgccttcgcccggcagcaccgtgccccaaccgtacttcaaattgcgaccgctcgacaggaacagcgcacaggcgaacaggaagcacgcggcgaagctggcgaggatagccgcttccccgtagggacgtccgcccaacaccacgtaagccaccgcgccgcccacgagaacgccggaaaacagcgccgcacccggacagctggcaacccacgtggctggaagccccatgttcttcatgaggcaggcgcccaagctccacagcaccaaatcgaggtagcagaacccggcgaccaacgtcacgaaacccagctgcggcaaccctggcgccatcgcagccagcaagaaccccacagctacgaacgaaaacgccaccttgtagatgaaccggttgaaatcgagcctcaggaacacgagcgtggcgaacaacagcaccacagctgcgagctgcccgatcgccatatgcgaggagccggaagcagggacaccgaacaggaacaggctggcgtagaacacgccggcggcgatgccctgcaccgccgaggtggccacgaacttggcaggaaacggcaggggcacgtcgcgtccatgctggaaataacgcactcgcggaaagccgtgcacgacacggcgcagaagcagaaacgccgcgaacggtaacgcgagcgcgacgccgtacagcacaagcggcgcttgagtcgcttcggccaagcaggagaagcacgccgtcatcagcacgagggccgccagcgttcccaacatgccctgatacagcgtctgctgcgtgcctatccatccgaacacgcgatcgatctccacgcggaacagagcagccccgacgcctgtcagcgcgctcatcaccgcatacaaagcggcatcggcggcaccgggcagcgaccggtcgagcgcccacaccaagtgaagcgccgccgcaagcgtcatgatcgaagcgatcgccaccaaccacgacggactgtccggcacgctgcgcgtgcgtttgaaccagatggcaatcaccgcacttgccatggccatccccagcagcgaacccgcccatgccggcatagccaccatcgctccgccgcccaacggcatcgtcacctcgggacccatgcagcacgcaaccatccaaaccatatagcatgcgctcgtcagcgcaatgcgccctcgacccgccgcagactgaagcacgcccgcgacgacgccgcgccgttcgctcggtgcgttaaaaagattgcgaacatgttcgttcggcatatccctccccttttctccctaaaaccaggataccgcgtcgcacctcacccctcggggtgaaaacccgcgatgcggcttttttccctgcggcgggcgacgaaagcgctgtccggcgcatgatacggtacggtcatcgcccggtgcggagggcacgggcaggcggcatcggtattgcgcgggccgccgatcgtcaagggaggaagggatcgacatgacgcaggaaagcattcccagcatggatcgacgcagtttcttgaaaggagccttcgccacaagcgccgtggctaccgccgccgtcgctggcgtaggtacgctagcaggatgcgccgcgcaaccgaaggagggcacggcgggcgcctccaaagccagcgcgaagggcacggcaggtacgtacgaattcgaaaccgcacccgagcctatcgccgacagcgatatcaaagagacggtcgatgccgacgtcgtaatcgtcggcgcgggcttctcaggcctatgttgcgcgttgtctgccgcggagaacggcttgaacgtcgtgatgctcgagcgcatggatcatgtggtgggacgcggcggttccatctacgccatgaactcaaagctgacgaaggagaagggctacgagtgctcagtggaagagatcgctcgacgctacaagcgcatgatgggataccactcctaccgggtggatggccgcaagtggatgctgcacttcaaccgttcaggagaagccatggactggctcatcgaccgcatgaccacggcaagctccgtgggcggcagcgacctcacccctgtcatggagcactggtacgaggacccggaggagatcaacggcgaattccccggtacgcacgaatttttggacggcccgaacggcaaaggtcccgacgacaacccgcaacaggacgtatgcgacaacatggcggcgtactgcgcaaaggaaggcgtagacatccgctaccagaccgaggcgaagcagctggtgaaggacggcgacaaggtcgtgggcgtcgtggcgaaaaccggcgacggctacacccgcttcaatgccaagaaaggcgtagtcatggctacgggcgacttcggccaagacaaggacatgctggaaaagttcatcccctgggcagcgcaccaaacagacttcggcggcatctgggacggctcaggccacaagatggcgtactgggccggcgcggccgtggacaagaacgagacgcccacgcccatgatcttctgcttccaatggcgctccatcacccgccaggtgcgcgcgttccaaggcctcatggtgaactccgacggccgccgctacgataacgaggacaacgttatatcgcacggagccctagcgttaacccacgagaagggccactacgcatatgccatctgggacgatgattatgcgaacgagccgcagtggcagaaccaccgctacgtggacggccccaaagtgttcgagacgcccgacgacgtgcgcgcctactggcagaccaccatcgacggtcctggaaccatcaacatgaacggctcgggcgacatcgaggtgaagatgatcaaagccgacaccatcgagaagctggtagaggagttgggtctgccgaaggaggagacgctcaaaaccattgaggcttacaacggatactgcgacaagggagtcgacgaagagttcggcaagcgcaaagaattgctgctccctgtcaagaacggcccgttctacggaatcaaatgcacgccttggttcctcacaactaccggcggcatccgctgcaacgacgacatgcaggtgatggacgaggacaacgaggtcatcgagggtctgtactgcctcggatccaccgtcggcgacatgtactgcaactgctactccacgcacttccccggccataacctgggcggcacgtgcctcaccttcggctacgttaccggccgcaagctggctggcgccgaatagcttcgccttttcccgtcgcagcccggacgccctccctccgcgtccgggctgcacgttgtttcggcgcgttaggaccggaagacggcgccccccatcgaagccgccggacgtctctacgccgtcaagcctcctgagctccgggcaggcacgcgcggatgagcgatgcgatcagacaaccacgcataccgtgaaaattccccgatcttcaacatgacgccctccctcttcaacgcgctagcccgatcacgaagcccagagaaggtgcgcggcgtacccgtacgagatgatgccccccacctccgtctcgcgccagcctcgctcgccatgggagaactcggataacgccgacgttgaagcgaagccgttggcgaacgagcataccgcgtcgagcaggctcaggtcggatgcagaaaaacagatgggatcctccgcgcgtcccgcaacgatcacctggccgtcgccctgttcgcgcaatgcgagcgcctcgtcgtcgacgagaccggcaaccagcagctcgaaccggtcgggaaccggaccgaacggcgccttcgcatagcgcagacccgtgaacccctccccgctgtcgcggtaggcggcgaaatccaggtagaacagcaccttgttcagcttcgtacgatacagatcgcgaacatgccgggcaaggtagaccacggtctcgcgcatgcgatccgaatcgaacgcgcgcatgcccgtatccagcgtcttttccttcgcgatctcgtccagcacgttgagccgaaccaccgcgtagtcgacccgggagagaccgcgcttccgcaccgtatcgcacgctttggcgcgctcttcgtcagaaagcttacgtgctccccgttccaggcacttcagcaagaagcgcggatcgcgcgcgttggctagcagctgcgcatgggaatcggaa

SEQ ID NO: 9187 - DNA, 16842 bp, Unknown
  gut microbiota DNA sequence
tcccgctttcgtatcgttgcaagctcgcaattccgatatcgagagcagcggcaaacacccgctgcgaaaacccgtacttcttacgcaaggccacgatttcctcgggctgcatgatgcccatcttttcgcgatacgctcgatacagtttgtcgaaaccttcatcgacgagaggagcccatccgatggaatttccgcatttcggacatatcaaatgctcgatatccacctcaaccgtcacgcctcggacatcctcaacatgatgccgagtctcatatgtcgcatcgacctcttcccagcattcttcgcacaacagccgtttcacggtcatccggatcaactcgctttcctatagggatagacgagcggccattcagcctcatggaacgagacgcagactgcctgcacatcgtccgctttaagatatgcagttagttttatatatacttcgtattcttcaaggtatctgccaaacacccacagatcacgcggccgtcctttgtcgtcttgcaaggggccgcttgaatagtcagcgacttcaagatctcgaacagctcgatgcacatcagcttcacgatagccaatggccttcataaaagcacgcgtcttatttctcggatctccagaccctacaacacgaaagcattcaaagcgcgctcgccgcaccagcgccagcaccgcttcgatcttccagcgttctgcaaccgtccccatcgctcaccccgcatcacatcatttgatgtgatcagtataccatgaaagcatgccgaatgacatcaaatgatgtgatagcactactacagccacacggccagaccgatgcacgccagcaagcccaccgccagcacgaggccgctgcgccccgagaacgcgcgcggcgcaagcgaggtgcgttcgacatcaggggcgccgtagcagcgcgcgtccatggcgacagccagcgaatcggcacgccggaacaacccgacaaacaggggaatcagcaccgtctgccacgcgcgcagccgttcccacaggctgccctcggcaaacgaagcacctcgcgcccattgggcgtcgtgcacgcgaccgaactcctcggccgtcaccggaatgaaccgcagcgccaacgagaacaccatggcgatgtcgtcggtgggaacgcccaaacgcttgagcggcctcaggaagaagcccagcgcgtcggtcagctcggtggaagtcgtcgtgtacgtgaccgcaaggctggccaccaccagcagcacgatgcgcaccgcgaagaaaaggccgcgcgcaagccctgccggcaccagcccgaacgacccgatcagcgccaccggctcccatgcggcgagcactcccgccgacacatcgcccaaggccagcggagccgcgctcgcagcctgccccacgtcaagcgagaacccgttgaacagcacggtgaacgccacgatcacgtacaccggcacgagcaaaccgaagaaccgtcgcgccggaatgcgcgacgccgtcgccaccgtgacgaacagcaaagcgcacagccccaagcccatccaagaacgcaccaaaaacagcgtgacggaatacgccgcaagcagcacgattttcacgcgtgcgtcgcacgcgtgcacagcagaggttccggggatgtacgaactgacgttgatacgcatgctggcagtatgccacaacggcgtttcccgcgcgacgaccagggtgacaattccgcgcgatcagcgcgccggctcccccttcgcctgcccgggccgcggcctgtcttcccggtagagcgcaagcagcgccaaccccacgagcgagcaaatccccaccagcagaaacgcaccgcgaaagccttcgtcgaccgtgctctggaacgtgctttctatgtcgcctgcccgatcgtcgatggcggcgaggtactgttgctccgccgcgtcgacggcttcggccggcatgcccgccgaagcagcttcctgttcgatctcggtttttgccagcgtcttcacgttcgcgacgatcgtggtcacatccgaccccttcatcagctgttgaagatcgtcgggcaacccagcgccatcgcctccctgcgcttgcccgctcgctagctgcgcaatcgattgcccgcccggcgcatcgggcagaacgcccatgatgcgatcgggaatggccatgcccgcatgcgcgatgaacgcaaccagcacggcaggcgcgaccgccgtgcccaccgagcgcaccagcgacagcgtcgccagcgccgagttcgcctcgcgctccttcgtcttcgccagcatcatgtagttgagcggcgttccaatcgtgaagcccatcccgatgccgatggccacgaggctgatgatgagcgtcgccatattcgcgaactgcgtggccaccagcgccaggaacatcgctcccgcagccgaagccgccagcccgaacgcgagcaccgccttcacgccgaagcgatcgatgagcttgcccgacaccggcgctcccaccccggcgaacgccgccagcacgatgactacgtagccgccgctgcccgagggcagtttcagcacgttctcggcgaactgcgggatgaagatgatgcccatcaggatgacgccggtgatcaccgacagcaccaacgtgatcacgatgtcgcggtcgcggaagtacgacaggttgagcaccgggtcggccgcgcggcgctcgatcagcacgaacaccggaagcagcacgacgaacgcgagcaagaacggccacacgtcagacgaggtcgcagatgctcccagatcgaagaaatcgaggttcttcagtccgtacagcagcgacaacaccatcgccaccagcactgcaatgccccacccgtcgatgggcttcacctgctcggctcgcgtgttcggcagcacgaacagccccgccaccacgatgaaggcgcagatgggaacgttcacgtagaagatgaactgccagttggcctgcccgaacaccgataggatcaggctgccggccgacgctccgaagatgttggcaatgccgtacacgccgcctaccagacccaacgccagcccgcgcttctcgggaggaaacgtcgtgccgaactcggccgtggcaacaggcacgatgccgcctccgcccaccgcctgcacggcgcgcgcggctaacagcatccaaaagctccccacgtcctgcgccaacccgcatagaagcgacccgacaccgaacagcaggatgctcgcaaggtacacgtacttgcgtcccgaacggtccgccagcttgcccatcaccggaatggcggccgcgtaggcaagcgtatagatggtgatgatccacacgcccatctgctcgccgatgcccagatcgctctggatgaccgtgcgggcaggcgtgacgatgccggtatcgagcgccccgatgaacaggcccagcagatacacggccgcaacaagcgcgaaccccttgccgcgtccgcgcgaggcggacgaagcagatgaggaagaagacggagccatggcacgacctttcaagagtgaatcaaccggcaagaaaaagcccgcggcgctggccacgggcttcggaggatgccgggcgcgctcgtttccaagtgcgcccggggcgaggacgaaagcagcgtaagagcgctttcgccctcgccgctgacggtcgagcgcgtgagcgcctagcggccttcgcgaatgttctcgacaccctgctttacgttgtccttggcatcgacggcggcatctttgatagcctcgccggccttgccgatggactctttgacggactccatgaatccttcgcccttctcatccttgcgctgctcgtgctgctgcgcgcgcatagcggccgcggggtcgcccgtgcgctgcgcttcctcgtgctcgcgcttcgcggcggcatcctcggccttgcgctcgttcatgccggccttggcctcgtggtaggcatccttcatgttgttcttcacgtcgtggcccatatccttcgcgccgttcttcatatcgacggacgcgtcgcccgtcttgtaagcccgatcaaccatgatagttcctttcagatagaggtatcgttttcgtgctacgcttcgtcggcttcgccggtggtcttgataagcagctcttccgtctcggcttcggcgcgatcgaaatcgaacgccgtagccgccgcctccacggattccttctcgttgccatcgccgtcgacggcctcgacgtactgctcggcctcgcgcttcacttcgttttcgatgcgctcgaggtcttcggccgcctcccgattgagctcgtcggcatcatccttgtcgatgcggacgtcttccttcgtggtcgtgccatccatgtcggctcctttccatttgcacggcgcgaagcaccgcgctttgcgtgctgagttcataccccgattgtactgaggaagccctgcgcgcacgaccaccgcagcgctacggtactgaaacggctgcgcgacagcgcatggatgagacattaaccctgtccctttgtctcattttcatcctctgaaaagcagaacggggacccgcaggtccccgttcggaaaagcaatctgaaaagaaaaggctacttagcagcctcttcctccttggcatcggccgtctcgacctcggcggcttccgcgttctcggcggcagcctcttcggccttctcggcaacctcgacggcggcttcctcggccttggcctcggcggcctcctccttcggagcctcctccgcagcctcgaccttcttcggagcggccttcttcgtcgccttcttggcagcgggcttcggctcttccttcttcttcacgggctcggtcacgagctccatgataaccatgggagcgttgtcgcccttgcggttgcccagcttcatgatgcgggtgtagccgccctggcggtcggcgaacatgccctgctcgaccttctcgaagatctcgcgcacgagttctttgtcgcccagagccgcgatggccagacgacgggaatgcaggtcgcccttcttggcccacgtgatgatcttatccacgttcggacggatctccttggcgcgggactcgaccgtcttgatacggtcgttcaggaacagggcgttcaccaagctcttcttcatggccttggtgtggctgaagtcggtgcccagcttgcggcccttgtagttgtgtcgcatgattcgtatctcctatagcttcaaattgaggtccatggaaatgagcttgtccttcacttcttcaatggacttcgcaccaaagtttctgatgttcagcaggtcgttttcggagaactcaacgagctggcgcaccgagtggattccggcacgcttcaggcagttgtacgagcggacggacaggtcgagatcctcgatctgcttgtccagctcggcgttggactcctggccctccggcgcgaagatggacgggatttcgccctcctcctcgtcgacaacgtcggacaggctcaaaaacgcgcccatgtactggttgatgatgttggacgcgcggcacacggcctcggtgggcgtgatgctgccgtcagtctcaacttccagcacgagcttgtcgtagtcggtgcgctgacccacgcgggtgtcggtgacgttgagcgtgcagcggcgaaccggcgagaacagcgagtccacatggatgaccccgatgggatcctccgtgcgcttgttgcgctcggccgacacgtaaccgcggcccacgccgatgcgaaccgtcatgtccagctgaccgccgtcggcgaccgtagcgatgacgtgctccgggttgaccagcgtgaactcggtgggaatgtcgagatcggcacccgtcaccgtgcaaggaccctccgccgacacatgcgccgtggcttcctcgatatcatcgttcagtgcggagaacacaagacccttgacattcaggacgatatcggtgatatcctcgatgacgccttcggccgtcgtgaactcatgctgcacaccctcgatctggatggcggtggctttcgcaccatccagcgaggagagcagaacgcggcgcatgcagttgcccagcgtgtagccgtagccacgctcgagcggctcgactatgaaacgtgcgacagtgtcgttgacttcttccgttgttaccgtaggcctcatgaactctgtcatgtgggataagcctccttactatgccgcgattatttcgagtaaagttcgacgatgagctgctcgcgaatgtccagatcgatttgatcgcgctgcggaagagcaagtacactaccctgaagtttctcgatgtccacctcgagccatgcgggcacctgaacacgctcgttggagatgagcgcgctcttgatgaccagcaggtcggcagccttcggagcgacggccacgaggtcgcccggcttgacgcggaacgacgggatgtcgacgcgacggccgttcacggtgatatggccgtgacgcacctgctgacgagcctcggcgcgagacttcgcgaaaccgagacggtacacgacgttgtcgagacggctctccaggatacgcagcaggttctcgcccgtcacgcccttctggcggttagccatatcgtagtaatgacggaactgcttctccaggacgccgtagatgcgcttggtcttctgcttctcgcgcagctggttgcgatattcgctttccttgatgcgcttcttgccggcctcgcccggcgcgtagttgcggcgctcgatcgcgcacttctccgtgtagcagcgatcgcccttaaggaaaagcttcgccccttcacgacggcacagacggcagtccgctccagtataacgagccataattcttagatcctttcagttacacgcgacgacgcttgcgcggacggcaaccgttgtgcggaatgggtgtgcaatcctggatgctggcgatctcgaggccggcggcctgcagagagcggatggccgtttcgcgacccgagcccgggcccttcacgaacacggaaaccttgcgcaggccatgctccatagccgtcttcgcagcggcctcggcggccatctgcgcagcgaacggcgtggacttgcgcgaacccttgaaaccgaccgtgccggcggactgccaggagatcacattgccctgaggatcagtgatgctcacgatcgtgttgttgaacgtagacttaatatgcgcagcgccgacggcgatgttcttacgctcggagcgcttgatgcgcgtgcgcacgtttttcttagctgccacttgagactacctcactttttctttccgccgatttgcttacgaggacccttgcgcgtgcgcgcattcgtgtgcgtgcgctgtccgcgaacgggcaggccgcgacgatgacggagtccacgatagcagccgatctccatgaggcgcttgacgttctgggaaacctcgcggtgcaggtcgccctccaccttgatgttcgcctgaatgtagtcgcgcagcttggtaaggtcatcctccgtgaggtccttcacgcggacgctgggatcgacgccggtttcagcgaggatcttcttggaggtcgtcagaccgatgccgtagatgtaggtcaagccgacttcaatgcgcttgtcgcgaggaaggtcgacaccaacaagacgtgccataggttatatctcctctttcttcctagccctgacgctgcttatggcgggggttctcgcaaatgacgagcaccttgccatggcgtcggatgattttgcacttgtcgcacattttcttgaccgaaggacgtaccttcataatcatttcctttcggttaatgcgttctcgtatctatatgtcacacccagccgctggtgatagctttcctctttttgctgcttgcgcaaggcgcgcaagcccctcttcgcacacaaattctgcacaggttgacacgacctgcacgcttttacggtgctatttgaaccggtacgtgatgcgtccgcggttcaagtcgtagacggacagctcgaccgtcaccttgtctcccggcaggatcttgatgtaatgcatacgcatcttgccagaaatatgggccaatatcttgtgcccgttttcgagctccaccctaaacatagcgtttggcagcgcttcgaggacggtcccctcgagctcgataacatcttctttggtcaaaagtgctcctttaagcatatcgtcgttaagcagcaaccatagatgataccaaaagtattcggttatgtacacgagaatttgaggacgcagaattccaacaaaccttctggtccgaatgctacctgcttgccaggcgtgcggtcgtgccgcgcagcccgcgtctcagaaacggggccgccaggtattcgcgcgaagcgcagccgccttgtcggcttcgacgcagatcgtgcgcactgaggcgcccgcgtcttcggtatcgttctattctaggctattacgccgaagggtcaagagcgattttggtcggagttggaaaggttgccttcctgttcctccagcaacgaagccagcttgcggtacgatacgatggctacgacggagttcgccagcgccttgaccacgttgaacggcagcaatgccggcaacaccagcgaagcaacctgttcgtaggtggcgcccatgtacagcggcgtgaccacgaagttcaggcaaatggaaaccgccgaggacaccaccacgccggcagcgcatcccagcacggcgtgcatcaggcacggtttccgacggtacacggtccccaccacaaggataagcgacacggtggccataatgttcatgaacgcgccgagcggatcggtgacgaggtgcggtatccatgacgtcacggccacggccacgccgatccaagatccgtacaagatcgtagccagcagcgagacgatgcccgatggatcgtacttcaaccattcggccccgggcaccaccggcagctcgacgaagctgagcaccatagccatgaggatgagcagcacgatggcggcgacttgcttcggcgaacgctcctgccatccgtagggcaaactctccgcgaccataacacctccttagttcgcacattatacgctgcgagccactttgcgaccttgcggtcaagcgacaaaacgagccggctggaaaacaaccggctcgcttggggacaaatacgataggcgaaacgctcgcctacgccgtcttagcagccgcaacggcggtgtcgacgtagccggcggtatcgacgagcgtggcgcccgaaaccgcgtccgggcccttcgccttcacgtcggcgatcttctgtccggccacaaaggactcgatagccgacatggattcgatccacggcgtagtggactgggccttttccttcatgctggcgctgtacatatcggagttcaccgacttggacatgagcgccttgccctcggcgtacccttcggcgaaggcggcgtccgaattgggcacgggcaccaggccggcagacgaagcgtcggcgaactggaactcgtcgatgctcgaagcaaccaacacgtccccctgcacaagggaaacggcttccgcgaacgccttgtcaccgtgagcagccgcggtggcgcatcccatcttgaggtcggaaccgtcgccggcatacgcacccgtcgtggtgatgtcgtcgctcccggcgacctcggacacgagcttcagatagttgggcgcgtccacgagggtggctcccgtcacggcatcgaggctcgtcttcgtcagatcggaggccttcttgcccacgcagtacgcctctatcgccttcatcgacgtcaaccacggcgtggtggactgggctttctccttcatgctggccgaataggcatcgttgttcaccgtcttcgacatgagcaccttgccctcggcgtacccgtccgcaaatccagcgtcggagttcggcacgggcgtgatgcccgccgaatcagcaggcatgaactgatagtcatccacgctggcggcgaggatggtaccgtcttgggccgtggcgacaaccacgctcgtaaagcacttgtctccgtgagcggcgccgtagccgcgatgcaaggtcgcagttttggcagcggtgtcgggcgcggttgcaactgcagaatcagctttcgctgcagcatcgccgcctgcgcacgagctgagcgtagcagcaccggccgcgcccaatgcgaccacgatgcttcccttaagaaaatcacgccgcgagacgttcgtttccataatggcctcccttgaattccctctagacaacggggcaaaccatacggatcaacacgaagcaaatccatcgtcaaaacgcaggaaattgcattccgtccgagattgcgcttctaaacgaaaagggggagaagccctaaacgcccttgtcgggcccgtcgccttcatcatcgagcaacttgaacagctcctcgcgcgacgagaccccgagcttgcggtagatgttcttgcggtggcttcgcaccgtggattccgccaccgtcaactcatcggcgacgaagcttgacgtgtggccgcgacccagcagaagcagtatttcggcctcgcgcgcagtcaggcggtactcgtcggacagatcggcgcaacgacggttgtagccctcctgagctccgagcgcgttcgactctacggcatcgatgccctcgagcataacgcgccacaatcgcgagctgggagtgaccatgagcgcgatcgccatcaccacgaacagcacgatcagcacctggtactggcatgcagctagcacgcccgtgttcatgttggcgtccgacagcaggcacaccaggcacccgacgatgatcatgatgcctccggccggcagagcgagcgagcgcatgcgacccgccatcgctaccagcatcgccgacatcacgagcgcatagatggcgcagaacgagagagagccaaccgccatcaccgagcgttgcaacggaggttcgacgaacgccgtggccgcgaacaccgcgaaggccaccagcggcaggaagaaacggtacgagaagttgatgagcgcctgatcggtcttcatgcgaatgaggggcaccatgaccgccacggccagcacgcccgccaaagccagcggagcgacaccccaatccatggttcgcaccaggctattgtcagccacgaacagcaacagcatggcgaacggcataacggcgaagaacagcgcgcgagcgagtggggttttgaaatcacccgtcccctccaccaccgacacatcgaggtgcccgaacacgtcccgccagttcacccctgcctgcgccgaacgctcgtcctctccctctgagcggaagaacaaccgcgcgcaccctacgacggacagcgccgccgccacggtgagcaccgtccgggcaggcgtcgcgcccagcatgggcagcagcgacgcgcttgcgaacaggacgcagccggcgacccacgccacaacgagcgcgcgcctgaactcgagcacatgcagccggctcatccacaccaggcacatcacggcagcgccgaaacccatcatgagaccgctgcccgcttccacgacggagccgtcgagcgcgccgaagctccacaggtcaagcaggccgtagccgatcgcatagcacgccaacgccagcagcatgatagtgcggctcacacgcgcatgcgccgttttcagcaggcagatgaacaaaaacgcgagcgccgtgaacatggccgccagcgacaacgcggccgaaaacgacaccgaaggcagaaacgaccaggaaacggcaaccgacgacgtcatgccgcgccactgctccagcacggggaggaacaacggcacgctcatgcagaatgcgaaaaaggaaagcgtgtcaagcaggtcgaaccgtttgataatgcctcgtttttcgagtcgtatcatgttccttctctccaccgtccgcacgtcccgatcgcccgctgcgccgctcatgcacactgccctccctcaaacgcccgtagaaagtatactgtcttagtagcgtatttgcgaatgtaatgtacttggaggcaatggcatggtttctcggaatttcttccgcttcaacaccacgaacatcatcagcgcagaaaccgacaacgaggacatcctcgacgaagcggtggaatggtgcgaccgctacgagctgctgttctcgcgcgtagaccctgcaagcgagctgttccggctgaacagcgccgaggggcgccccaccgcggtggatgccgagctagccgcgttcatcgagacggcgctgtcgtactgccgcgaagtcgacgggttattcgacgtgactatgggaagcgccacgcagctgtggaacttcaaggattgcatgattcccgcgcgcgatgacgtggccgcggcgctgcggcacgtggattatcgcggcgtcatcgtgaacgatgccgtcgtgacgctgcgcgacccgctggcctgcgtcgatttgggcggcatcgcgaaaggctacatcgccgacggcatcctcgcgctgctgcgcgaacgcggcgtggaacacgcgctggtcaacctcggcggcaacgtggccgtcatgggcggcaagcccgatggagcaccgtggcgcgtgggcgtccgccgtccccttccctccagctcgatgccgctgcttgattcgttcgccgtcctggccctgcgcgatggctcggccgtgacaagcggcatctacgagcgcgccttcgagcaggacgggaaactgtaccaccatatccttgacccgcgcacgggcttccccgccgaaaccgacctgctgagcgccacggtggtcgcgcagagctcgctcgatgccgacgggtacaccaccgcgcttatcatgatgggagccgatcgcgcacttgcgttcgccgagcagcatccggcgctcgaagccgtgctagtcaccaccgagggcgatgtgctggccacctccggcatcggtgatcgcgtactgttcgagctgctgggatagcaaaacacggcacgcatgcgaaaagcgcgcaaagtggctgggccaccaggattcgaacctggatagctggtaccaaaaaccagagtcctgccgttggacgatggcccagtctgaaacagaagcgcccgcgatgcggcgcgctaagaacaatcgcatgccgagcaaacaaaaatggtgggccgtgagggagtcgaacccgcgaccttgggattaaaagtcccctgctctaccagctgagctaacggcccacgttcgcagcaatgcgcgagtactcattttagctgggcgggcaaggcgggtcaatgattatgttgacgaacaccagtcatacatctaaccgcacgcaataccgtctatccattgccaccataccgttattcaaaccgaaacaattcgtactacaatcgaagaggaaccgaacgcccacccctctgtagaaaggccgtgatgcctcatgtggtgctccaaggtcctggttgcctacgacggctccgctccctccgccaaagcgctccatctagcgcgttccatcggcgcgcaggacgagagcgtcgagctcgtgttcgcccatgtggtgaagctgtacggcctgggcaccggcgccgaaaccgtgctgctcgacgaggcgaagaaggtgctggtcgaaatggagcagcttgcagacgaagtgccgaacaaggcgcacgcccacctgctgaagggcagctcgccggccgatctcctgctgaaatgcgcgcaagacgagggctgcgacctcatcgtcatgggcagccgcggacagggcggcgtcaaaggtttccttggcagcgtcagctacgccgtggtgcagggatcgcctatagccgtgctcatcgcgaaggacgctcccgccgcagcgacgaaagccggggcgaccgattagcatgcccgcaattgcacgagaaaagctctggacgagagatttcgtattcggaaccgccgtgaacttcctgatcatggtgaactactacgggctcatggtggtcgtagccgactacgccatgaaaacctacgatgcgcccgcagccaccgccggcctcgcggccagtatcttcgtcatcggcgcgctgatagcccgcctcttcagcgggcgcatcatggatcgcgtcggtcgcaagcgcttgcttatcatcggtgccgtgctcgaagtggcgttctcggcgctttaccttaccggcctgggattatggctgctgttcgcgctgcgcctgctgcacggcatcgcgttcggcacgtgttctaccgccatcggcaccatcgtcacggctctcgtgccggacaaccgcaaaggcgagggcgtgggctactatatgctgtccgtcaccctcggcgcggcaatcgggccgtttctgggcatgtttctcacgcagaacgccggattccaaacgttgttcctcgtagccgccgccgtagctctggcttgcttgctagccgccacgcagctgcgcgtgccgaaaaaccctgtatcggccgaaaccgtggcccggaaggcgagcgacatcgcccgcgacgaacgcatcgagcaggcgggcgggttccgcgtgcctcgtccgagcctgacgaactacctggaatccagcgtgatccccatcggcgccgtatgcgcgctgctgttcttctgctattccagcctgcttgcgttcctcacgccgttcgcggccgaaaacgggctcgaaacgcccgcgagcttcttcttcgtcgtatacgccatcgccacgttcgtcacgcggccgttcaccggcaagctgttcgaccgcaaaggcgaccgcgtggtcatggtgcccgcgttcatcgccttcatcgtcggcatgggactgctggccaccgtgtaccagccgacggccatgctgatcgcggcggcgttgctgggcttcggcgtagggacggttcaggcaagcggcctggctctggcggtgcgcctcgcccccgacgatcgactgagcttggcgaactccacgttctacatcttgctggacatcggcgtgggcgtgggcccgctgcttttaggcatcgtgcagccgctgtggggctatcgcggcctgttcgaggccatgtcgctagtcgccatcgtggcgctggcagcctaccttctggtcagccgcaagaaaggcaccatgcgccgcaagctcgaagaagcggagaaacggtagggcgacggatcgttcagcggccatttcaacgagcgaccgtccgccacgatcgcccctccaagctcttccgagccccttcaaaccacggaggctccgtcgcacacgacggagcctccgtttgcatttggaatctggagaggattacccctcggcaggctggaacgtatctttatcgggcgcgaaggactgcatggcctcgatggtgcgggcgaacagctcgtccagctcccagcccagcatttcggcgccggagcggatgacgtcgcggctgacaccggcggcgaagcgcttgtccttgaacttcttcttcagcgacttcacctcgaaatccatgacgctcttcgaggggcgcatcactaccgccgcgccgatgagaccggtcagttcttcggaggcgaacaggatcttctccatctgcagctcgggcttcggcagctccgggttgaagtcggaggtgtggctctggatggcgcggatcagctcgggcgaaccgccggccgcctcgatgagcggcgccgcgtagatggtgtgcagctcgggctcgtcgtcgtgctcttcccagtcgagatcgtgcagcagcccgacgataccccagaactcctcgttctcaggatcgaactcgcgcgcgaaataacgcatggtctgctcaaccgtctcgccgtgctcgatgtggaacggatccttgttgtgctcctgcaaaagcgcgaacgcttcgtcgcgcgtcaggccggcctcgagtgtcgccatgatgctctccttctcgtcttcgattggatgctcttcgctatgctaccccatagggcgcgcgaagtcagcatggcaatccgttcgaacgcacgcctagaacacgatgccgagcgcgttcgccaacaaaccccagatgacgcccatcgcgtacagcgccacgatgatggcgatattctctttcagatggcggttcgtgcgaaccaacaccagcaggcccacgcccgccgacacgagcaaaccggccaacatggcgcccaagcccagcacgccttccacgtacagctgcgcgatgacgatgctggccgcgcagttcggcacgagaccaaccaacgccgagccgaacaccgacagcgccgggttcgcgccgaggaactcggccagcacgtcctcgcccactacggcaagcaggccgttcagcgctagcgtgatgaggaagatgaacagggtcacctgcaacgtatgtttgagcgcgcttctcaggattccgccttcgccgtcgtggcaatggcaatgctcctgctcacataagtcgtgaatatgcagcggcatgtcgatgcggcgcgcgatgcgaaggccggcatccacgaggaagcccatgatcatgccgatgatgatcttcgcgccgatgattttgaaaatgacgtcgggcggcacctgctcggcgatgaagatgggcagcatctcgtccgacgtagagaggaacaccgcgaacagcgttcccaacgtgatgacgcgcccagcccacagcgtcgcggcagccgcggagaagccgcactggggcactacgcccacgacggcaccgatgaacggccctgccgcgccggcgcgctgaatggcagcctcggccttcccacccgtcttatgctcaagccactccatggccagatacgtgacgaacagaaacggaatgatgtaaagcgtgtccttgatcgcgtctgccagcacgtcaaacgctatatgcatgatttcttccataacaacgtattgtaatccaatcaaggttctgtaacagcatcgtcgccgaacggtcaccaagagacccacgcccccagaacgcgcgaaggccccgcctcccgaggggggcggggccttcgcatgccgaaacgccctccgcga

SEQ ID NO: 9188 - DNA, 1155 bp, Unknown
  gut microbiota DNA sequence
gcagaggaatgcttcacgtgaaacattcttgcattggatttcccctgtcgaaaatactagtttttaatatagtattttatgcaaattgcaaatcgtataaaatactatacaagaatatagtattaacgatagcacggaggcgacgatgttcaacttgacggtcgaagatgcttccaagcgccttggcgtggggcgcgcacgcgtcaaccagctcatccgcagcggcatgctggctgccgagaaagtgggcgggatatggctcatcgacgagcagagcgtggaagcgcgtcgcaacgccgctccgaaggcggggcgtcctcctgcaagttccagcaaaggggatgtggggcgctacgtgctgatgaatcgcacgcacgaggtgctttcgtttcgctacgatgaggcggccggtgcgttcgtcgacgcaggggacatcgtcgatcctgcgcgagccccgctgggcatgatctccccccgaggtcgaaaagtctcgaaagacgcgctgtcgttctggtggaagcatcgctgcatccccggaactagagaaggcatcgacgcgaagctggccgagctgggcgtcgattcacctgcgaggattcccttcaagagccttgggctgtctttgtcggatcagtattggattcgtcccgaaaactgtgagatcgcctgggaggacgtgaactatttcgacaacgatttctgcgagatgcgaagcggcagaggctggctcgacggggtggggctcgactccccggacaacacctcggaaggcgaactcccgaaaaaatgggtatgcgacggcgcgaagcgcttgctggtgaagggcggatcggttctcaaccaggagccgttcaacgaggcggcagcgagcgctctatactcacggctgcttgccccggacgagtatgtgaaatatcgcttggagagccgggcgggcggtgccgtctgcatctgcgaaaatttcgtcggctccaccgaagagtacatcccgtcctactatgttcgccagactatgcgtcagccgaaccatcgcaacgattaccaacactacctggaatgctgctcggcgcttgatgcggagcacgtcgagatcgcgttgtccaagatgatcgtgtgcgacgacatcttgggaaactccgatcggcattggcgaaa

SEQ ID NO: 9189 - DNA, 636 bp, Unknown
  gut microbiota DNA sequence
gaatttcgtcggctccaccgaagagtacatcccggcctactatgttcgccagactatgcgtcagccgaaccatcgcaacgattaccaacactacctggaatgctgttcggcgcttgatgcggagcgcgtcgagatcgcgttgtccaagatgatcgtgtgcgacgacatcttgggaaactccgatcggcattggcgaaacttcgggcttgtgcgagacgtggaaacgctgcgctaccgtatcgcgccgctgttcgatacgggcggcagcctctggtgctcgtcgacgctcgaaagcctgcgagcgcacgatttctcgttcacgaccaagccgttctacgaagacgccaaccgtcagcttcggttggtgaacgactactcgtggttcgatccggctgcgctcgaagggtttgcagacgagctttcggccatcctttcggacaatcccgcgttggtcgagcgcgtggactatatctgctgcgccgtccaaaagcgcatcgatcgcattgtaaggatgctgtagtcgggtccgtgaggggtgtttcacgtgaagcatttgtacgacagcctctttccggcgcatcttcgctccaaaaacacgcctcagcgccgggagcgtgttttccgagcgaagatgct

SEQ ID NO: 9190 - DNA, 6754 bp, Unknown
  gut microbiota DNA sequence
gctgggcgcctcggaggccgtggtgcaggtgcagggcaccgaccagatcctcgtgcagatccccggcctcacgaacaccgaggacgcgctgaacaccatcggcaaaaccggcaagctcgagttcgcgcgcctcgactcgttcaccgacgaggacgcgaagaccaagatcgagaacggccagtacggcaacgagggcacggtttccgacgacctgggcgtgctgacgctgcccacgggcgagacgcagcacctcaaggtggaggacggcatgtacacgcccatcgttaccggcgcggacatcacgaaggtggacatcggcaagccctccgagacgtccaccgactacgccgtgaacatcacgctcgacgcggaaggcgccaaggcgttcgcggacgccacgaaggagcttgcgcccacgaagggcaagatcgtcatcatcctggacaacgaggtgcagtctgctcccgccgtccagtccgagatccccgacggcaacgtgcagatcacgggcgggtactcgctcgacgaggccaaggcgatgcagaccgtgctggaaagcggttcgctgcccgtcagcttcgaatacgcccagagccagaccgtgggcccgacgctcggccaagatgcgctggcgtccggcgtgctggtggcgctcatcggccttgcggtggtcatgctgtacctgctgttcttctaccgcggcctgggcctcatcaccgcggcggcgatgatcgtgttcgcggtgctgtacctgggcatcctggccacgttgtcgtcgttcggcctgttcagcctttcgctcgcgggcatcgcgggcatcgtgctgaccatcggcatggcggccgactcgtccattctcactatggaacgcttccgcgaggagatccgcatgggccgcagcgtgcgcgccgcgtccgtgactggcgtgaggcacgccatcgtgacctccatcgatgccgacctcgtcacgctcgtgtcggcgctgtcgctgttcttcctggccagcgcgtcggtcaagggcttcggcctgacgctggcgttgggcatcgcgtgcgacatcgccatgatgctgctgttcaaggcgccgctcatccgtctgctggcgccgaaggtcattgctcgccatccgggcttctggggcatcaaggacagcctggccgcatcggaggactacgcggcgctcgccgccgccgagggaacgagcacggctgcggccgaagcgggcgaggccatcaacgccgccgaatccgaagaggccgcccagcgcgccgagggcgccgcgggcgaggccgctgcgcgtgccgcgcgcaagccgcagggcaagttcatcaagcacgacatcaacttcttgggccaccgccgcgtgttcttgggcgtggccgcggtgctggtgtgcgtgtcgctggccatcgtgggcgtgaaggggctgaacttcggcatcgagttcgtaggcggcacgtcggtgtcgttccataacacgggcgacgtgagcaccgagcagatgcgcaccgcgttcgacgacgccggcgagcccgacgccgtggtgcagacgaccaccgcagacggcgaccagggcttcctcgtgcgcaccaccaccacgagcgccgaagaggccacgcagcgcgcgaaccaggtggcggacaagctggggctgtccaccgacagcttcgaggtgaccaccatcggacccgactggggcgccagcgtcatccagtcgtcgctcatcgcgttcctcgtgtccatcgtgctcatcatcatctacatcgccatccgcttcgagtacaagatgggcgtcaccgccatcgtggcgctgctgcacgacctggtgctggtcatgggcgtgtacgcgctggtgggccgcgaggtgaacccgaacaccatcgccgcgctgctcaccatcctggggtactcgctgtacgacacggtggtcgtgttccaccgcatcaacgacaacatgcagtccgacgacatcaagtgcacgttcatgacgatggcgaaccactccatcaaccaggtgctggtgcgcaccgtcaacacgacgctcacctcgctgatccccgtgctggccatgctgctgttcggcggcgagacgctgaaggacttcgcgttcgccatggtgatcggcctggtgtgcggttcgtactcgtccatcgcggtggcatcgcccctgtacgcgatgtggaagacgcgcgagccccgctaccagaagctggtgaagaagttcgggcccgaggtcggccgcttcgagttcggcaacccgaacgcgatggcggcggcgctttccggcaagaaggccgtgaaggccacggccgcggctgcgtccgccgcgccggcgcccgagaagccccaggccgaagagccgcacggcgccaccgccgcgaaggccgcgccgaagcccccgaaggccaagcgcaagaagcgccccgaaaagaagtagcgccgagcggtcccggatatccgggaccgtttttttgcccgatcggtctagttcgaaacggagatgcggcgtgctttcgtccagcttgctttcaggtcgtgctcggtgacgagcgagcggaggagctgttcccgttcgcgaggattccatcctcgttcgtccctgatgcgcacgttcagcatggctccaacctgatgagcgatgcggctgagcttcccggcatccatgacctgctcgcgcgtggcggtgatcgtcgtgatgcccaaggcggtcagatcgttgcgccgttgggcgtcttcggcgatgcgggcggatccggtgtgctccaaatcgctgtcgtactcgatggccacattcgcctcgggccagaacaagtcgcacaggtagtagcgcttgtccgatgtgccccgactgccgcgtcgagcttcgatgcggtagttcatgcgcggaagcggaagcccgtagcctccgaggcgaagggggaggcaaagaacgatggcgagggccgtttccatgggcgagccggaagcgaccgcgatgtaccgaagcgctttgctggcgaccgagcagccggccattccctcgcatcggcgcaggtaggcttcgagcgctcggacggtggtgggcggcaggacgcgctcgtagcctgctcgaccgtcgggttgcagcgtgtagagcgcgcacagctcgtgacccagtttcaccagctggagaaacgaaacgcggctcgccatttggagaaagcacagctccggcgagcagaggagcaagccgtcgctcacgcgaacgaaggagccgccgggcagcgcgtcggagcgcacatggcacgaggcggatcggatggtggctgcggcgcgcttaccgggtactagcagatgcgtcggatcggacgtaaagacgatagcgcctgttcgcagctcccggacttcgcgtgcgctcggcttgcacgcgagcgcttcgccttctcggacgctgccgaacgcgagcgcctcgcggtacgtgacgtccaggcgatccatcgccaggatcgatgcggtgtcctcaacctggatcgaccctgccggtcgatgccgtttggaaatcgaaggcccgccgagcagcgcgtcgaatcgtcccgatcgccagcattccgtcgcggtggtatgtgaaaggaagatcggcatggtcgcatcctagtgtacgcggaggctcggattgatgccgcttattatacaagcaaaaaggtcatggacaaaactaggggcttttccgtagtttttcgtccgataaccgaatacggggaaatcggagatcggataatgcctgatgaggggatcgagcgtgaggttatacctgataaagtataaagaatagtccccatttttgtccatgatgaaaacactcatataaataagggcggcttcgaggaggcgcggggcgcatgaagacgcggtcgatgccggaatgcgagtcgtcgcgaagggggagtgcggctgctcgacggcggccgccgggtcgtgggcggccacgtcgatcctcgtcatggcctcggttgagaggaccagcccgtcgcatctgccaaaagccgggcgtgcatacgcagcaggaactcatcgatctggtggggaacgggcgcggcttcgtctaacgcttctctgtcgtcggagcctttggatacgcgcggcgtggcgcttgtggtaccctaacgccaacgaccatgcgagaggtaaggagcacacgatgcgcgaaggaagcgcccccaatttctgcccgccgaccgaggagggcatcaccctcgtgttcgaggatgagagcggtgatcggacggagctcgagtttctcggcctcatcttgcataacgatcgcagctacggcttcttcttcccggtaacagaggacgagcccgtgggctcgtccggagaagtggtgttgcttgaagtgaccgagctcgacgaagacggtcagccttcggccttcgagatcgtcgaggatgaagccgtggcggccgaagtctacgaggacttccgcaccgccacgaaggatctctacgatttctcggcgtaggctgcgcgcatcgctatcggccgagcgggtcccagccgctggggggcttgacccgctcggattgggcgatggctgccacgtacatgatctcgtggttgatcgcctgctccaggcggcatacttcctcttctgtctcggcgtattcgaaaatgcgcgccgccgttcgtctgatcgtgtccatcagttcttcatactcggttccgctcatgtgcgacctccggcgatcttgctctcaagcaatgaccctctcgataaactcatagcacaaacctcttgttttattgacggtctgtaaactatagtttacgacttttcctcccgccgggactagcctttaaccggcatggagaacacttcactaaaaactcagctcggaaccaatatcgcgaggctccgcgcgagcgcgaacgtgtcgcaaacgtccttcgctctcatggtgggcgtcagccgcaaatacctcatcgatatcgaaagcggaaaagcgaatccgacggtcgacatgctcgagcgcatcgcgggcggcttggacaccaccgtgggccagctgttcgagggtctgtgaggggtcgccgctacagctcgacggggttccagcttccgtcgatgtcgcacagccatgcttcgggatcgcgcacggtgaagaacgtgagcgtcttgtcgtccggcccctcgtagctctcgccgagccccgtcatgtgctcgtaccccgcacgacgaacctcatcgttcgcccgatcttcgagaacagcttccccccgcatgataacccagccgctgcccggtttccaggcggtcaattcaaactttgggttgagctccagctcgcggtacacgtccttcgtggtggcggtgcagaaccagatccggccgtcctgcacggcggcgaagctgaaggggcgcacgtgcggctgatcgccctcgcaggtggccaggtaccaggccgggacgctcgtgaggtagtcgacgatggtgttcgttccgttcatgggggttcctttcggttgggatagggcggcttcggagcggtcctaccaggggatgaagttggtggccacgacgcaggccagcatggcgacgatgacgacgacgccgttgcggtcgagcgcggtgaacgcgaggggatgcaggcgcgtgcggccgacgccgccgtggtagcagcgggcctccatggccgacgacagcgtttccgcgtggcggaacgcgctggtgaacagcggcaccatgagggaggcgagcatgcgcagccgccctttggagaacgtggcgccgcggctgatctgcgcgcggtacacggtttgcagctcgaaggtgaactggggcaggaagcgcagggcgatgcccatcatcatggacagctcgtgcgccggcacgccgatgcggctgaaggggtgcagcaggtactcgaacgcatcggtgatgtcgagcgtggcggtggtcagggtgagcaggctcatccccagcagcaacagcagcaggcggcaggcgatgaaggccgcctgccacaggcccgcctcgctgatgcggatgatccaccactcgaacagcaccgtgccgccctgcacgaagaacacgttgagcagggcggtgaccaccacgatgaacgcgagcggcgcgatggacttgaacgccgagcggatggggatgcccgccagcctgaagaagccgaacacgaacgccgcgcacaccgcgagcccgagaaacgactgcgcgacgaacaccaccgccatgagcgcgagcgccagcagcagcttcgcgcgcgcgtccatgcgatgcagcgggctcgtgcccggccagtagcgtccgatgaccgcgatgtcaggcatgaggggcctccgaggcttcgacggccgcgcggtaggcgcccgccagctcgtccgccagcgctttcacgtcgtacagcttcgacggcagctccacgcccgctacgcgcagctcgtcggccagcttctggggggcgggcacgtccaagccgatggcgcgcagcccctcgccgtgcgcgaacacctcggacggcgtgccgaacgcgaactgccggccctcgttcagcacgagcacgcggtcggacaggcgggcgaggtcgtccatgctgtgcgacaccatgaccacggtgagcccgctgccgtgcagctgggcgatgaggtcgaggaactcctcgcgcgccacgggatcgaggccggccaccggctcgtccagcacgaggacgcgcggctccatggccagcacgcccgcgaacgccacgcggcgctgctggccgcccgacagctcgaaggggct

SEQ ID NO: 9191 - DNA, 638 bp, Unknown
  gut microbiota DNA sequence
aacgcgatggtcaccacgttcgccagcagcgaggtcacccacagcggctccaacgcgatggtcgaaagccctgcggccgcgccggcggatcccgacgagttgagcagcgtcccctcggcgtagaacagcgagctccagaacatgcaccagatccaagtccagtgcgccgcgaaccccagcaaatcgggcgtgcgccacagctccttgcgcaacgatggtgtcatccgcatcctcccctgcatgcatcggccgcctctgccgcgcgatgcgcgggcgggcggtttcggcagctttccccgccagagattatacgcgcaggcgtcaccctttcagcatcgcttgcgcgaaaaggcatcccccaggtagggggaaatcgggcgggggaggcgaagttcccccggccaacgggatgatgacctgcaaggtcgggcgtacagtcggggcaacgcggcgacaaggggccgcgggtaggcaacggaggagggaatacacatggaggaagagaagaagcagggtctttcgcgtcgtgcgttcttgggtctgggcggcaccgcgctcgcgggcgcggcggttgccgggctggcggggtgcgctccgcaaagcggcggcgatgcggccaaggcgacgacggagggtgc

SEQ ID NO: 9192 - DNA, 2246 bp, Unknown
  gut microbiota DNA sequence
gatcgcgaacaccgaggactgcgacgtgctcgtcatcggcgcgggtctgggcggctgctgcgccaccatcgccgcgttggaagaaggcgcgaagaaggtcatcaccatcgacaagaaccccgagacggtggtcgcgcgcggcgtgcacatcgccggtttccacaccaaggtgcagcagggcctggtggaccagggtctgctggaggagccgaactacaacaacgtcgtgcgacgttggatcaactgggcgcagggccgcgtgaaggagccgctgctgtgggagttcgcgcgcaagagcggtgcgtgcttcgactggctgtacgacctggccaccaagaaaaacctcgaagcgcttctgtgggacggctactacaagggccccgattacaccgagtacccggtcacgcacatcttctaccaggccgacaagtacgaggaaaccatcaacttcacgttctaccagggctcgggcgtgggcgacgtgtacggcaacgcggtgctcgtgccggcgctgtacgagacgatcgccgatatgggcggcgagatccgctggagcacgaagagcgagcgtttggttcgcgacggcaacggcccggtgaccggcgccatcgtttccactggcaaggacgagtacatgcagatcaacgcgaaatcggttgtcattgcttcgggcgactacgcagccgacgacgagatgttccagtactactcgcccatgaccgcctacgccatggacgggcgcttctacaatccgcccgactgcgacaccggcgacatgcacaagcaggccatctgggcgggtgccgccatgcagaagtccgagccgcacgcggccgtcatgcacctcgacttcggcgcggccagctacggtttcctgcacgtgaactgggaaggcaagcgcttcaagaacgaggacgtgaacacccagtcgaagagcgtcacgaaggcgctgcagacgcagaaggacgcctggaccatctacgactcgcacggcttggagcaggtgaagacgcagatggacgccggcctcggcggcggcttgcagtggggccagctcacgcagcccgtgggcggcgagtacaacctggaagcccagcagatcgtgctcgaaggcgagatcgagaagggccagaccgtgaaggccgactcgctgaaagagctcgcgcagaagatggacgtgcctcccgagaacctcgaagccacggtcgcccgctacaacgagctgtgcgatctgggcaaggatctcgacttcggcaagcgccccgaagtcatgggcaaggtgcaggacccgccgttttacgccggcaagctggtggccagcctgctcaccatgtgcggcggcttgcgcaccaacgtggatgcccaggtgctcgacgccgaggaccagccgatcgagggcctgtacgtgtgcggctcggctgccggcgagttcttcggcgcgggcgactatcccacgtacgtgccgggcatcggccacggccgctgcgtgaccttcggccgcatcgccggcatcaacgctgccggtggtgacgccgaggccaagatccccagcctcgacatctaagcgttcccctcgcaggtgccgccatcccgcggcgcctgcatcccctgaagtcgccgcccctccctcccggagcggcggctttttcgcgttctgagctttggcgcgcgttcttcgaccccccccctcgctcttcgaaagcggaatcggaaggcgtttctgcatctttttcgactttgtggcaagagtggtcttgcgagagaccttctcatcaggtcttttgctgctgccagaaagcgcgttcgtgaagggcgataggcggatgcagcaaagcccctggtggcgctacgtctgttttgccacgaagtcgaaaaagatgcagaaacgcatgcaagttctgctccggaggccttctccctaaaaccggtttctaggtcgcaacggttgcgcaacgcgcgcgcgatgcgtggtgcgcgcacggcggcatgggcgacaatgcgctggtagtgaacattccgccgaagcgcttcggccgcctcgggcgcgccgacgttcggcttgcgtcgaaaggaacctccatgtccgcatccatccaccctcccgtacaactgcatatcgtcctcgacgaggacagctaccagggcggcgacagcgtcgagatggcgcgccgcttcacggccgtcgctcccaccgaggtggtgcgcgccgcgaagggctcgcagcgcgcgaacgtgctgcggttcga

SEQ ID NO: 9193 - DNA, 1716 bp, Unknown
  gut microbiota DNA sequence
ctccatcccgcccgaggctgccggcttcgtcgcccgtgcgcgccagctgcttgcgggcggcgcgttcggcgcggatgccatcgccgccatccgcattcccgcgtgcgcgagcatcgaggcgcaggtagccgacgcgcatcgtaccaactatctggaatcgcagctgtacgaggcggcgcaccgtcccgaaacgcaggaagtcgaccgatattccgaagaggtggaccttgcgacgggcgaggggtggaccgacgagctgcagggctcgcagtcgaagcgcgatgcgcccacggacagcgagcttgccgaagccgtggccgaagcggaggctgcgctgcgccagggcgttgatccctcggacatcgccgccgaggagcgcgcggcggacgccgatgccggcgatgtcgcagcgagcgtgacggaggtcgaggccgttggtcgtgcgaagggcgatgtcgatacgtcgggcgaatcctgcgcgctcgaagcgggcggcgtacccgagcatctcgactaccgcgtgtggaacgtagcctacgccgacggtacgtcggtgcgcttcgactcggttttgggcgaagcgctgctggactagcgcggcgcgccctaccagaacagctccggctccttccgctcgaggcatttcgattccagcatggctatcaccgcgtcggtggattcgctcgagaagtatttcgcgtcttcggggcagcttttcacgcaggcgcagcaatggaggcagccctcgccgatgagcgcgggatcgtcttcgtcgatgatgccgagcgggcagcgcaccgcgcagatgccgcagctcgtgcacgcgtcggtggtgatggggcgcacgtcggcgccgggcttgagctctttgtaggggcggtttcccttgatggcgggttggggcagacggcttccgcgcgccaggcgctcgcccagctctcggccgaagcgctgcgctgcggctacgtccgcgtcgtcggggcggccggttcccacgcgggccgtcaacgagtgctcgccgatgaacgcgcccgccgccaccacgtcgaacccgcgctcgcctagcaggtcggcggcttccagcagcgcgtcgtcgaagtcgcggttgccgtacagccccacgatcacggcgggcgtatcttggccgatcaggtgtgcgaactcgtcgcgcagcagcgcgggcacgcgcccggcgtacaccgggaagccgaacaccagcacgtcgtcggcgccgcacgagacgtcggccggacgatgccccggcaacgtgagatcgacgatctcgacggaagcgccaagcggcgcagccagcgcgccggccacctcttccgcgacggttttggtggtatgcgtggggctgaaatacgcgacgcgaacgatcgacggcatagcggttcctctcttctccaacaacctcacgatgatactccttttcgtgtagatgcgcggtcggggtcgttcccgcctcgctcttcggcaaaatacgatgctccatctgatgcaagggatcggggcgcgggtatcatgggagacgcacaaggttcgacatacacaaggaggcatttcatgggacgcatcgttctgtccgtatacaccccgcactatattcccaacggcaatgaggttgccgtcatcgagacgtctcgcggcacgatccgcgtacaactggccggcaaggacgcgcccgtgaccgcgggcaacttcatcgagctcgcc

SEQ ID NO: 9194 - DNA, 334 bp, Unknown
  gut microbiota DNA sequence
cgccaagcgctacgtgacgagccacgcgaagaaggcgctcggcaacatcgacagcaagcgcggcgagttcgctgagaacagcatgttcgccgaggagctgcgctgctacttccgcggccagcgcgagttcgtcgacctgtccgtccaggtggccgagttcatcgctggcgagctggggcgcatggagaagaccgaatcggccgacctgctggtggtggacttcgaggacgatcccgacaacacggtgcgggagatgaccgatgacgaggccgaggcggcgtatcgcggcgagggcaagcgctacttcgcgttcatgctgctggaggccaagcag

SEQ ID NO: 9195 - DNA, 672 bp, Unknown
  gut microbiota DNA sequence
gcgccgttgcccgatgctcgctcgcttcaggcgcgctcctccacgccgtgctggatcatgctcatcagcagctcggacatctcggcgggggattgcggcgtgcccttcttcagccagtgcgacagcatgccaagagcgcccgatacggcgaacaggtacatgtactccagatcgtcggcgtccaccgccgcatcctggtcggacatttgcaggtccaccagatgcgccagctccatgatctgccgctggaagccgccctcgctttcgtccagcagcatgaggaacacgtcggcgttctccttggcgtattccaggatcttctccacgttgcgcgtgcgcggctcgccgtcggccaggaggcgcgccttgagatcttcgagcgcctcggcttcgatgtacgccagcaggtcgtattggttgcggaaatgggcgtagaacgtactgcggttcacgtcggcggcggcgcacagcgccttcacggatatcttcgagatgtggttctcgcgcatgaggtcgatgagggcgctcgtgaggacgcgcttcgtgtactgcacgcggcgatcggtctttccggtttccatggacgcctccttcggctctatcgttccagtataggacatgcgggacgcatcggcgccggccggtagccgttgcttgtcgaagcgcgcgggg

SEQ ID NO: 9196 - DNA, 1792 bp, Unknown
  gut microbiota DNA sequence
gcgcgcttcgtgtactgcacgcggcgatcggtctttccggtttccatggacgcctccttcgactcgatcgttccagtataggacatgcgggacgcatcggcgccggccggtagccgttgcttgtcgaagcgcgcggggagggccggcgagttgcgcagacggcgatgcgcgaggttcgaacgcgcagcctttttggaacgccggtatcggggggatttgtccgccgcttcgccgcagccaaacgcatcgaaggacgaccgcataaaagtcggcatgaccgatgtcgtgaaatcccacttcgcaggcgtatgcaaccgccggttgcgtaaaatgataaccagacatgctggtgcaacgtgccgggcaaccgtaggctggtaatcgagaaggagcggacgccatgtccccaacgtcgaagaagggatcgttcatgaacgtcgagattgcccagcgcttagcagccatgcgacgcgagcaaggatacagccaggaggagctggccgaacggctcggcctgtcgcggcaggcggtgtcgaagtgggagcgcgccgagtcgtcgcccgatacgggaaacctcatcgcgctcgcgaagctgtacggcgtgtccatcgacgacttgctgcgcatcgacgacgatgtggcggacgacgtggcgttcgaggagaaggacaaggacgccaccgccgaggcgcaggcgcaggaggccgccgtgcgcgccaacgaggccgccgttcgcgcggcgcaggcggccgtggccgcggcgcaggcccgagcgacggccgaacaggcgcaccaggcccctccggcgcagccccaaccgcagccccagcctcagcccgtgcagcagccctgctacagcgcggcccccatgccccagcagcctgcgcaacccgcgcagccgcaagcgccttacgccccgcaagccccgcaagcccccgagtcctacgacgcccagtcgcgccgcccgcgcggcccctggtcgacgttcccgtatcccgtgctctgcgtgctcgtgttcctgggaggcggcttcctcttcgggtggtggcatcccggctggttcgtcttcctcaccatcccgttgtactactggatcgcccacatcatcgaaaacgacccgaactatcgggcgaaccgacgctagcggaagggccgcatcatgacgaaactcacgacggcgtcgtacgtcaaaatcacgctcatcatcgcgctcagcttgctcatcctggggtccatcggattcggcggatgctcggccatgcgcttcggaatgctgggaggaacggaaatgggatcggcgaacgtggacgcggccagcgtcaagaacctcagcgttaagtgggcctccggcgcggtgagcatcgacgtcgtggacgagggcgacgccatcgagcttgtcgagacggcgccgcgcggcatgacgaaggcgcagcagatgcgctggtccgtgaacggcgacacactgtccatcgactacggcacctggttctcgtgcttcgcgctgggccgcaaggacctgcaggtgcgcatcccgaaaagctgcgcccagaacctgggcgccgtcgagatcgacggcgcgtcgggcgactacgacgtgaacggcctgggctgcgaaacgctcaagctcaagctggcctcgggcgatgtggacgggcagcacctgcaagccgacgagctgcgcgtcgacgtggccagtgggcagctcgacgtcgagggccgcttcgccgaccgcgtggacgtgcgcaccgcgtcgggccagacgcgcatcgtgtgccgggaggcgtgtccgaaa

SEQ ID NO: 9197 - DNA, 145 bp, Unknown
  gut microbiota DNA sequence
gattcccaccagcccggccgcccacacgaggaacaccgtgtacacgaagccgacggtgccgaacacgcgggctttcttcacctgctcgggcgtcaggtgctcgcgcttccaggcgatcttcatgtagtaggccgccgagcacacg

SEQ ID NO: 9198 - DNA, 354 bp, Unknown
  gut microbiota DNA sequence
aacgtgacggtggggttcggtcaggccacgttcgagatgcgcgagttgctgcgtgaagcggggcttgaagtgcggaacgtcaacaaccagtacgaagaccacctgggcatcgagctcttgtacctctcgtcgctgtgcgcccgcgcagacgtggacgccgccgatgcccccgtgctcgaatccgtggcggacttcatcgagaagcatccgctcagctgggtcgacgcgttccgcgcgagcatcgccgaggcggcacccgacggctacttcgtctcgcttgcggggttggctcgagctctgctcgcctggcatgccgaagcgctgcgcgtgtaggaggctcgcatggattacctt

SEQ ID NO: 9199 - DNA, 310 bp, Unknown
  gut microbiota DNA sequence
cgagaggttgtcgccgaacatggcgccgcccatgacgctggccacgcacagcggcaggctgaagccggacgcggacgacaccgccacggcgatgggcgtgatcagcgtgatggtacccaccgacgtgcccatcgacagcgacacgaagcagctcaccacgaacagcaccgctacggcgaactgcacgggaacgacggaaagcagcaggtaggccacgctttcggcgctgtcgcggcctacggtgcccacgaagatgccggccaccatgaagatgagcaccatggtgacgatggtcttgtctcccatgccg

SEQ ID NO: 9200 - DNA, 276 bp, Unknown
  gut microbiota DNA sequence
cgcatggcggcagaagatcgcctacgtgctgctgcgcggacgagaggccaaggcggccgccgcgccggtcgttgagcatcggggcaacgcggcagaggaggagggcgaaggaaagcctgcaacggacggagacgacgcgcaaacctcgaatgcgacgtctgcgcaggaaggtcccgcatggaacaagaccgaccacgaatttccccccgcttcggtgctcgaacgctatcggcgccttctgggcgacgcgctgctggagaggggtttcgtggagcc

SEQ ID NO: 9201 - DNA, 317 bp, Unknown
  gut microbiota DNA sequence
cgggctgtcggtgttcatgcacctgcagcattgggagcgcatcttcaacggcttcggccacatcacctcgggcatcacgctggagttcatcggctgcatcgtgttcgcggtggtgctggtgctgtacttcctgatgatgcgccgtgccgaagacggcatggcgccgaaatggtgcggcgtgctggccatcgtcgtgggcctggcgctgccggtgatcacgggcatgagctacctcatggcgtcgttgccgtcgtggaacaccccgctgctgccggtgtactacttggcgaacaccgtgttcatgggcggcttgacgg

SEQ ID NO: 9202 - DNA, 473 bp, Unknown
  gut microbiota DNA sequence
gtagcaaaagagatggcgctgcagtacagcatccatcaagaggcgcttgagaagcgcttcgaaacagaaggcctgtagagccgcatcgcgcttcgaccagcaacgacaacgccccgcagcttgtaacgagctgcggggcgttttcttgcttggacgagacgccgggtgagacactagggacggggttggtgtcttacacgagatcgacacgagacggcatctccgttcctttgtctcattccctttgtctcattttcgattacgcttgcttcagggcgttggccactttgcgggcggcggcggtgatggacaggtcgttcacgtcgacggtgacttcggcgtactgctcgtacagcggcagacgctcgtcgtacagctcgcgcaggctcatgccgatgcctcccttcagcaccacgccgcgctcctgcaggtcgctcagacggctgaccagctggtcgtacgtgatcttcaga

SEQ ID NO: 9203 - DNA, 448 bp, Unknown
  gut microbiota DNA sequence
gaacggcttgcattgcgttcggcgtcggcttcgtagctttgttgccgctcgaacgattgcggccggcttgttttccatttgtgtatactgatcacgaacaatgcgctgaagcgtgtcggatggttcgagcggccgcgcgtgtcgagcgcgatcgggtgagcatggtcggggagcgaggattatctatggacgagatcgggaagctgggcttcgggttcatgaggctgcccgtcgtcgagggcgacggcggcaaggagatcgacatcgagcaggtcaagcatatggtagacctgttcatggacgcgggcttcacctatttcgacacggcgcgcggctaccataacggccggtcggaggcggcgctgcgcgaggccgtcgtcgagcgctatccgcgcgaatcgttccaggttgccacgaagctgccggcgtggctggcgaaaaacgccga

SEQ ID NO: 9204 - DNA, 720 bp, Unknown
  gut microbiota DNA sequence
ctgcacgagaagaaggaggcgggtctgatccgcaacctgggcttctccatccacgacaaggctgccgtgttggaagaggtgctggaggcgcatcccgaggtggacttcgtgcagctgcagatcaattacgccgactgggagagcgaaaccgtcgaatcgcgcaagtgctacgaggctgcgcgcgcccacgggctgcctgtcgtggtgatggagcccgttaagggcggctcgctcgtgcatctgcccgaggaggcggcggacgtgctgcgcgccgtgaaccaggacgagtcgctgccctcgtgggcgctgcggttcgccgcgtcgctgccgggcgtgctcaccgtgctgtccggcatgtccacgcccgatcaggtgagcgagaacacgcagatcatgcgctcgttccatccgctgacgcacgaggaggacgaggcgctggcgcgcgtgcgggccatcctcgacggcgtgcccaccgtgccgtgcaccgactgccgctactgtttgaagaactgcccgaagggcgtgcgcatcccggcggccctcgcgtcgctcaacatcctagagctgttccacgacatgcatcgggcgcaggagaactacgattggaacgcgtcgagcggccccgcgtccacgtgcgtcgggtgcggcgcgtgcgaaagcgtgtgcccgcagcatatcgagatcgtgaaggagctgggtcgcgccgccgagctgttcgag

SEQ ID NO: 9205 - DNA, 277 bp, Unknown
  gut microbiota DNA sequence
tccggacgagtcgctgccctcgtgggcgctgcggttcgccgcgtcgctgccgggcgtgctcaccgtgctgtcgggtatgtccacacccgatcaggtgcgcgataacacgcagatcatgcgttcgttccatccgctggcgcacgaggaggacgaggcgctggcgcgcgtgcgggccatcctcgacggcgtgcctaccgtgccgtgtaccgactgccgctactgtttgaagaactgcccgaagggcgtgcgcatcccggcggccctcgcgtcgctcaac

SEQ ID NO: 9206 - DNA, 1657 bp, Unknown
  gut microbiota DNA sequence
ggtcgagctggtggacaagcgcacgctggtggccgacaccgacaacggcgcggtgctcaagcagcagatagccgacttggaagagctcctggaagcctaccgcaacggcatcgtggcggaaaaggagtaggaaagctcgtctctcagggttcgggaacgtaacgacgctgctacggctcaaggtttcgagaagacaggttggcctcatctgttaaaatttctcaaaaatggtagtgtattccagatttgagaagatatgaggttgtcatgtacatcgaacgagcgctcgaacctttggtgagacgctattccgagaacttcaaaatagtcgccgtgaccggaccgaggcaggtcggcaagacgactatgctcaagcatctgatggaggaagaggccgagagcggtgtcgaccgagtttacgtaacgcttgacaacacggcgattctgcagacggcgaaggaagatccggcgcttttcctgcagcgctatcgtccgcctgttctgattgacgagatacagaaggcccccgagcttcttccgtatatcaagatgatcgtcgacgagcgcgatgattgcggatccgtgtggattaccggttcccagccgctgcacttgatgaaagccgtgtccgagtctctggccggccgcgtcggcatcgtggaaatgctcggactttcgcattccgaggtggctggcaccccctcggaaccgtatctgcccagcgcagactacttcatgcggcgcgtggatatggcgaagcccttcggggtgtcggaagcgtatcggcagatatgcgcgggttcgctgcccggcatccgtgccctgcccgacgatttgcgcgcgggcggttacgagtcgtatctggatacgtatatcatgcgcgacatccgggatctcgcacaggtgggcgacgagctcaaattcagacggttcatggcggcatgcgctgccctcacgtcgaggccggtggtgtacgccgaactcgccaggcttgcggacatcgatcagaagactgcgaagacgtggctttcgttgctggtaagttcctacctggtgaaggtggtcgagccgtactctaacaacatcctaaaacgattgagcaagcagcccgtcatgcatttcctcgacaccggtcttgcggcgtatctttccgggtggagcagtcccgaggcgttggaggtcggtgccatgagcgggcagattttcgaaacgtacgcattcggcgaggtctacaagagcttcctcaatgcgggcaggcgagctccgctgcatttcttcagaacgaacgacaaaaaggaaatcgatatgcttttggaacaggatggcgtgctctttccgatagaagtgaagaagaccgcgtcgccaagcaagaaggacgcccgcaatctcaacgccatcgatccagtgacgttcgacgacgttcctgtagagctgcgggctttcaagcgcgaagtggggatggggtgcatcctctgcatgaccgaagatgccttccccatagtctcgcaggtgtgggcgtttcccgtgtgggcggtgtaaaggagtgccgatgaacgagttgtcaacgttcgtgctggagaacgacgcgctgtccgtgcgcgtttcgcccgtgggcgcggagctgcagagcgtcgtgtgcggcggcgtcgagcgcatg

SEQ ID NO: 9207 - DNA, 191 bp, Unknown
  gut microbiota DNA sequence
gcctgtacgccgcccacgagcagcagctgcgcgacgcgctgaccctgcagaagaacaaccgcaacaacaagcagttccacgagcgcaaagtggaggtgctcgccgagctgacgaagctgcgccagctgtgctgcgacccgcgccttctgtacgagaactacgccgggcacgcggcaaagctggacgccatc

SEQ ID NO: 9208 - DNA, 595 bp, Unknown
  gut microbiota DNA sequence
gtcgaagcccaccttgccgtggtaggcgcccatgccggagttgcccacgccgccgaagcccatgtggttgttggccaggtggatgacgacgtcgttgacggtggcgccgccgaacggcagctcgcggatgacgcgctgctgcacggccttgtcatcgctgaacacgtatgtggccagcggcttctcgaacgtgcgcacgatggcgaacgcctcgtccagcgtcttgtacgtgatgaccggcagcacggggccgaaaatctcctcgttcattaccgggtcgtccagcgtcacgccgcgcaggcacgtgggctcgatgcgcagcgtgtcggcatcgccgtgcccgccgaacgccaccgtggcatccgggttgcggtgctcgatcagccccatcacgcggtcgaagtggcgctgcgatatcatgtgcggccactcgtcgcacgcgaggatgtcctcgccgtaatactggtggaagcacgcgtccagctgccgaacgaagtcgtcagccacgcgctcgtgcacgaggaagtagtcgggcgcgacgcacgtctgcccgcagttgatgcccttgccccaggccacgcgctgcgctgcgcgc

SEQ ID NO: 9209 - DNA, 2053 bp, Unknown
  gut microbiota DNA sequence
gactagcctttaaccggcatggagaacacttcactaaaaactcagctcggaaccaatatcgcgaggctccgctcggaagctaacgtgtcgcaaacttcctttgccctcatggtgggcgttagccgcaagtacctcatcgatatcgaaagcgggaaggcgaaccccacggtcgacatgctcgaacgcatcgcgggaggcctcgacactaccgtcggtcggctcttcgacgggctgtgaacccctagcgttcgagatcgacggggttccagctaccgtcgatgtcgcacagccatgcctcgggttcgctcacggtgaagaacgtgagcgtttcgtcgcccggtccctcgtagctttcgccgagccccgtcatatgctcgtatcctgcgcgacgcacgtcctcgttcgcctcgtccttgaggacggccttgcctcgcatgataacccagccgctgcccggcttccaggcggtcagctcgaactttgggttggcttccagctcgcggtacacgtctttcgtggtggcggtgcagaaccagatgtgcccgtcctgcacggcggcgaagctgaaggggcgcacgtgcggctggtcgccctcgcacgttgccaggtaccaggccgggacgctggtcaggtagtcgacgatggtgttcgttccgttcatgggagttcctttcggttgggagatggggcggtttcgggtcgatcttaccaagggatgaaattggttgcgatcacgcaggccagcatcgcgacgatgacgagggtgccgttgcgatcgaggcgcgtgaacgttagcggatgcaggcgcgtgcggccgatgccgccgtgatagcagcgcgcgtccatggccgacgacagcgtttccgcatggcggaacgcgctggtgaacagcggcaccatgagcgatgccagcatgcgcaggcgtcccttcgagaaagtggcgccgcggctgatctgcgcgcggtacacggtttgcagctcgaaggtgaactggggaaggaagcgcaacgcgattcccatcatcatggacagctcgtgcgccggcacgccgatgcggcgaaaggggcgcagcaggtactcgaacgcgtcggttatgtcgagcgttgcggtggtcaaggtgagcaggctcatgcccagcaagagcagcagcaaacggcaggcgatgaaggcggcctgccacaggcccgcctcgctgatgcggatgatccaccactcgaacaacacggcgccgccctgcacgaagaacacgttgagcagcgcggtgaccaccacgatgaacgcgagcggcgcgatggacttgaacgccgagcgcaacggaatgcccgccagcttgaagaatccgaacacgaaagctgcgcataccgccagcccccaaaacgactgcgcgacgaacaccacggccatcagcgcgagcgccagcagcagcttcgcgcgcgcgtccatgcggtgcagcgggctcgtgcccggccagtagcgtccgatgacggcgatgtcaggcatgatgacgctccgaacgcccacctgcggggcgggcggttccgtccggagcggcttcgctcagaagctgcgcagccttcgcttcgccgctccgaacggaaccgcccttgccggcgtccgtctccgcttggggattgaaggcggctgcgaggtcggttgcgagggcttgcgtgttgtacagcttttggggcaggttcacgcctgcctcgcgcagttcgcaggccagcttttggggggcggggacgtccaggccgatggcgcgcagctcgtcgccgtgcgcgaacacctcggtcggcgagccgaacgcgaactgccggccctcgttcagcacgagcacgcggtcggacaggcgggcgaggtcgtccatgctgtgcgacaccatgaccacggtcagcccgcccgcatgcagctgggcgatgaggtcgaggaactcctcgcgcgccacggggtcgagcccggccactggctcgtccagcacgaggatgcgcggctccatggccagcacgcccgcgaacgccacgcggcgctgctggccgcccgacagctcgaaggggct

SEQ ID NO: 9210 - DNA, 384 bp, Unknown
  gut microbiota DNA sequence
cgccgagaaggcggccgacgggctcgaccgcctgcaacggctgctgccgttcctcgccgcggcgaacgcggcatcggtggcgtcggcgaacaacggggcttcgtcgagctacgtggcgctcgcgcttctcgtgcccgcttcggggaagaagatcgcggtggacggcgcggccgagctcgaagacgtggccgaggcggtgggcgacgaggccgacgaggtgcggcaggcggccgacgaggccgagcgcgccgccgagcgggccaacgaagcgaagcgccgtgcattcgagcacgactgcggcctcgatccgtcctattgcatgtacgagcgcgcctctgcattggcaggcatgagcggatcggagaacccgctgttcagaagcgt

SEQ ID NO: 9211 - DNA, 145 bp, Unknown
  gut microbiota DNA sequence
cgatgtcaacggcatgaaggagatcaacgatcgcggcggccatgctgaaggcgaccatctgttgcaagcatgcgctcagacgatgcagcgcgttctcggagaggttgcgcggctgtaccgtgtgggcggcgacgagttcgtggcc

SEQ ID NO: 9212 - DNA, 224 bp, Unknown
  gut microbiota DNA sequence
ctcgtgcgagcacgccgccgacacgatgaactccatcctgctgaagaacgtgtaaccgaaggaaagcgtgtcgaagggacggggggtttgacacgctttttcccgttttgcgaggcgcggtgtcgcgagcgtgtcagatcccccgtcccttcgacacgcgctggacacggtggcttggttttagcttcttggctcgaaggggtcgcgaggtttctcttcctcgc

SEQ ID NO: 9213 - DNA, 376 bp, Unknown
  gut microbiota DNA sequence
gagcaccggcatggtcttggcgaacacggcgttgaaggctcgatagccggtcatgacgtcggagaactcgaagccgtagatccatttgatgagcgtgcgcacgaggtcgttgccgaagccgtggaacgcgcggtcgttctcctcgccgtaggtgccgttggacaggcggtcgcccacgctcatgtcggcctcgtcggccatgagcggcgccaggagctccggcgcggcctcggcggggtacgtgtcgtcgccgtccaccatgacgtagtagtcggcgtcgatgtcgcgcagcatctggcgcaccacgttgcccttgccctggcggcgttcggcccgcaccacggcgccgtgctcggccgcgatggaagcggtgccg

SEQ ID NO: 9214 - DNA, 955 bp, Unknown
  gut microbiota DNA sequence
tccgcgtcccattcgaaggtgccccaggcttcccaggagtccgggtcgtccgcataggcgcggtcgacccgaatcgtctgcaatgcgggatgtccggtttcctcgtcgctgtggtacggatccaccggcagggctggcaggtacagcaaagccgacatgccgtgatcggggatgatgcggatgatctggccgaacggcttgtcgacgtggtcgatggcgcccgggcccccgcctacggagccgccgcccgccatcatgcgcgcgtcgccttcgcggacgtcggcgtgagccgcgacgcccggcagacccggcgacagcgccagcgcgatcatggtcgtgcacgccaatgctcgcacgaggcgttttctgctaccatgctccatgcaagctcctcgtcgtcctgaaaggcggttcatgccgcatcgccctgtgcatcgcttcgcggttcacgccgcggtcgcattcctgttggcgggatgcgtgttcgcgatcgcgtaccactatgataacaaatacctgttcgggccgccctacggctccgacggcgttatcgaggtgtccgatgacgatctcgaccgtctcgtcccgctcgtggacggttggatgctctccgtggacggggcgccgcggaccgaaaccttcatcggccagtactccaacttctcctatgctcccggcggcacgtcggctttcggctccgccgtgtacgagctgacgcttagctatgtcggcgcgcaacgagaacgcgccctcgtgctgctggttcccgaggtgtacggtgatttcacgttgtacgtaaacggggtcgttgctgcggccggcggagacggggcgcaggtcggcatcgtggcggaccgcgacacgcgtctgcgccttgaggtgcgcaacgacgagcactactacagcgggctggtctacccgcccgtgctgggcaccgcgcagcagatggcgaacg

SEQ ID NO: 9215 - DNA, 391 bp, Unknown
  gut microbiota DNA sequence
cgccggaaaagtcggtggatctcacgctcacgtcttccagcttccccttcgcgacggacgcgtaggcgaacgtggaatcgcgcacctccacgcgcgacagcaccgcctccagcaggtcggcgcccgtgaacttgcacgaagagaacgtgcagcgcgtgaagttcgcctgggagaacgtggaatttgagaaatcgcagttcgagaacgccacgtcggacgccatggcccgatcgaaatcgcagccgacgaacgagcacccttccacgcgggactcggtcagctcgacgagggagaagtcggccccctcggccgcgtccctgcgcacgagaacatgggacacgcgcaggtcgccgccgttgtcgcgctcgatccagccggcgaggtcgtccac

SEQ ID NO: 9216 - DNA, 223 bp, Unknown
  gut microbiota DNA sequence
gttctccacgcggcgggcgtaggtggcgtagatgtccaagaacgcctgcacccacgactcgaacagctcgcagccctccacccggtggcggctcgcgaactccttgaacgtttctgactgcgccaccgacgtggtgatctcgcggttctcgttcatgcccgacgagccgtcggcgttgaactcgcagaacttcacccggtagtcgtcctcgtccaggaacgtg

SEQ ID NO: 9217 - DNA, 198 bp, Unknown
  gut microbiota DNA sequence
cggcatccagatggacgaagccgtctttctgctgggcgagaacatggaagacgccgcgttcaaacgcgcgtgcgacgacgtatacaaagaactcatcgtcggcaagcccctggcgctcgctatggacgattcaggatgcttcccctcccacgtcgtcgacatggtgggcgcaggcgagcacgcgggccgcttagagaa

SEQ ID NO: 9218 - DNA, 198 bp, Unknown
  gut microbiota DNA sequence
gaaccgcggcaaggccggtttctcggacgaggagcgcggcaagttcaccgacttgctggaggtcgggttcgtcgactcgttccgccacctgcatcctgacgtgacgggcgcgtactcgtggtggagctaccgcttcaaagcgcgccagacgaacgcggggtggcgcatcgactacttcctggtcagcgacgagttggc

SEQ ID NO: 9219 - DNA, 270 bp, Unknown
  gut microbiota DNA sequence
cagcgcatcgggctgaaaatgacgaaaagacgtcgaatttggaaaccgccgcgtcctttcggacacactcggcacaatgtatgcaggaaaggcgactgcgcgaccaggcgtttcgcaaaaggaagccgaccggcgcccgcgaaagccggtgcgagatttccgaattcgatgctttttcgccatcaccggcaccgtcggcagcccgtacgccgcgtcgaggaacaggaagacgggttactgggttcttttaaccaggtagcatttatggat

SEQ ID NO: 9220 - DNA, 1040 bp, Unknown
  gut microbiota DNA sequence
cttcgcgttgctggcgctgacggcgtacagggtggcgccggcatcctcggccagcagggcggccgcctcgatggcgttgaggtcgtactcgctcaccacctggtgggccttggagtagtcgagggtgcggtcggccgcgacggcgatgtcctggtcgtcgggcaccactttcactgctacggcaatgttcatgcggattcctttcgttcgatgggtgcttgcttcgtgtctgcgcggcgcgtcacttcgcgtagcgcttgaggatctgtcgtccggcgatgtagctcatgatctccacggtgccgccggccagctggttgccgcgcaggtcggtccagatgcggccgacgcgggaggccgtggtgtagcccagcgccgcgaatatctccagcgccatgtcggccactttcgtgcagcccaccgtggcgtagcgcttgagcagggccgcctcggtgcgcaccgattctccctgatccagctgccacagcgtcttgtacagcatgttgcgcgagttctccaggatggtttccatctcggcaagcatgtcctggatcatggggttccacccgatgggcttgccgaaggcgtagcgctcgttggcgtaggccgccgcgtcgtccatgcaggcctgcgcaaggcccagggactgggccgccacgaggcagcgctcgatctcgaagttcttcatgagcagcagaaagccctcgccctccttgcccaggcgcatgtcctcggtgagcctgacctcgtcgaagaacacgtcgacgaacgggatgatctgctggccgatcttgtcgagcggggcggtggacaggccgggcgcgtcggtggggatgagccacagcgacatgctctcgttggcgtgcgccgggtgctcgtccttggacaccaccagcatgtagggcgtgttgccgccgttcgtgacccaggtcttctggccgttcatgatgtaggtgccgtcgtcttggcgcttcgtgtaggtgctcatggccttgttgtcggagcccgcgcccggctcggaaagcgcgagcgatgcgatg

SEQ ID NO: 9221 - DNA, 575 bp, Unknown
  gut microbiota DNA sequence
ccgcgctgcgcgccacgcgggcgctcgcgccgaacgcgaccaccacgatgtcggcgtcgtcggtcatgaacgcctcggcgcgctgctcgtcgcgctcgatggcggcgtagcgctcgtagcgctccacgttgaggttctccagggcctcggcggtgaggtacagcgagttcaccacgttatgggggcgctggtgcttgtggccgcatgcggcccagggcttctcgggcagcgagtcgacgggctcgggcatgaccacgggctccatcatctgccccagcatgccgtcggccaggatcatgacgggcgtgcggtacttgtcggccacgtcgaacgcgttgtacacgtagtcggccatctcctgcacggtggacggagcgtacaccaccacgcggaagtcgccgtggccgagcgcgcgcgtggcctgccagtagtcggcctgagacggctggatgccgccgaggcccgggccgccgcgctgcacgttgatgatgacgcccggcaggtcggcgccggccatgtaggagatgccctcgcccttgagcgagatgcccggcgacgaggacgacgtcatgacg

SEQ ID NO: 9222 - DNA, 176 bp, Unknown
  gut microbiota DNA sequence
accacgacttcgccagctccgccatctcgcgcagccccgtgccgcgcagatcctgcttgcacgcgcgccgggctccgcctttgcaggtgaagctcacgcccataccgcaatcggcctcgacgtaggaccagtgcgttcccagacaataatcgcgtacggcgatatcttccggaatg

SEQ ID NO: 9223 - DNA, 2519 bp, Unknown
  gut microbiota DNA sequence
gatggtgacgccggttatgaaagcgaagtcggtatcgggcagcacgtactcgcacgcggggtcgggcgtgtcgagctcctgcgagcagttgcgttcgagcacggtgaggttcgcgtactcggcgatgcggtcgacgtgcgggaagtgcccgaccaccgtgacgttcttgcgctcggacgcttcgatacgcgggcggtacagctcgaaagcgtccatcttgcggacggtgccgtcgggcagttcgatgggttcgtcgtaggttgctcccaacgggtcgagcagctccttgcgcgcgtagtaggcgttgagcgccgccactcccagcgtggcttcctcgaagcaccacgacttcgccagctccgccatctcgcgcagccccgtgccgcgcagatcctgcttgcacgcgcgccgggatccgcctttgcaggtgaagctcacgcccatgccgcaatcggcctcgacgtaggaccagtgcgttcccagacaataatcgcgtacggcgatatcttccggaatgccctcgatcaggcggttgtagagcttccacggcgttgcgtcgtcgcgcgtgtcggggcggcggacggcttcgttctcggagcgtttcatggcagccttctctcctcgaggcggcgtgttccgtcgcgccgccattcttcaatatgcggtagagtataatatacgttcaagaataaacaaccgggaaggggctggcgctgcgatgctgttcttgttgacgggcgacgtgcaaatcggcaagacgcgctggcttgagcgccttgccgccgagctgtcgggtgacggcgtgcaggttgcgggcgtgctggcacctggcgtgtggcgcgtgcgggagccgcacgaggttccgggcgaacgggggctggctggcgagggtcgcttcgagaagctcggcatcgacaacgtgctgctgcccggcggcgagcgcgtgccgttcgcgcggcggcgagacctggcgctggccgagggatcgttcgatccgacaagccagagcgcctccgcccagctggcctgggagatcgcggacgaggctatcgcgcgggtgaacgcgcacttcgatcgcatcgcggccgagctggctgcggttcccgcgggagcgccggctttgccgggagaagcgggctcccggggctacgcgcccctccccgtcgatccggcggcgggaatgtttcacgtgaaacattcgttcgcgcaaacatatgtttcacgtgaaacatctggagcggaggcgggcgagaccccggccgatccaagtacgggaggttcgcgcatcgtcgttccggcggacgaacccgacgcggagggctccgttaccgtcggtgcggagggcggtttgctcgtggtcgacgagctggggcggctcgaactcatgcgcgacggcgggctcgtttctgcggtggcgcttctggagcgcgggccctcggcgcggttcccccatgcgctcgttgtggtgcgtgattggctgtgcccgagggcggaggagcgcttcgccggcgcctgggatgggtcgcgcatgctttcgccgggcgacgacgcgcgcggtctcgtgcgggcttcgttcggcctttccggctgagatccgtgctcgttgtcgttcgaaaaacacgcttcgtcctgcgattccgtgttttcgggcgacaatgcgccgctcgcttgttggcgttcggctactgtgcgtccggtgcgttcgaccatgcggccaattcgacccttgctttccttaatgagaatgattatcattaaaatagaagaaaacgagaagagggaaaggtgtccgcatgatcgatcagaccgcgttcttcagcttgagctacgggctctacatcgtcggcgcgacggacggcgaacgtcgcgccgcctgcgtcgctaacacgttccagcaggtcacgtcgtcgccgttgcaagtaagcgtggcgctgaacaaggagaacgccaccacggacgtcattctcgactccggccgcttcaccgtgtcgtgcctggcgcaggacgccacgatggagctcatcggcacgttcggcttccgttgcagcaccgacctggacaagttcgcctcttgcgagacgggcgtcgacgcggcgggcgtgccgttcgtggccgagcagtgcgtggcgcgcttctcggtgggcgttgtgcaggcggtgaacctgggcacgcacatcctctacatcggcgaggtggaggaagccgagaagctgtgtgcgggcgatccgatgacgtacgcctactaccacctggtcaagggcggcaagacgccgccgaaggcatcgagctacctgcccgacgcgcccgatgcggcgccggcagccgcggcagcggccggcgagggcgacgcggaggctccgaagcccaagtacgcctggcgctgcaaggtgtgcggccacatcgaatacggcgacgagctgcccgatgacttcacctgccccgtgtgcagcgtgggtcccgacatgttcgagcgcatcgagctgcaaggcgcgcgaacggcataaaagggcggtataaag

SEQ ID NO: 9224 - DNA, 4001 bp, Unknown
  gut microbiota DNA sequence
ttcgccaggttgcggggctggtccacgtcgcagccgcgctcgacggcgatggcgcgcgcgaacagctgcagcggcacgctggccgtgatggcgctgaacgcgtcgcgcaccttcgggatgtagatgacatggtcggcatggtgtcgaatgtcttcatccccctcggtggcgatggccaccaccatggcgccgcgcgccttcgcctcctgcaggttcgacaccagcttgtcgtacacggggctcttcgtggccaccgcgatgaccgggaagccctcgtcgatgagcgcgatggggccgtgcttcatctcgccggccggataggcctcggcgtgcaggtagctgatctccttgagcttgagcgcgccctcgtagctgatggcggcgcccatgccgcggcccacgaacagcgcgctcgacgcgtccttgcacgcgcgcgccgcctcattgatggacgaggaatcggccaggatgcgctccacctgctcggccgtgtcggccagctcgtggaacagcaggcgcacctggttcgtcttgagcttgcccttcacctgggcaagcagcatggcgagcagcgtgagcgacaccacctggcccaggaacgacttggtggaggccaccgcgatctccttgttggccttcgtgtagatgacgccgtcgctctcgcgcgccacgggcgagcccaccacgttcgtgatgccgaacaccttcgcgccctttacgcgcgcgtcgcggatggcggccagcgtgtcggccgtctcgcccgactgcgacacggccaccaccagggtggacggcgtgatgatggggttacggtagcggaattcgctggccacctccacttccgtggggatgcgcgcccaaccctcgatgaggttcttcgcgatgaggcccgcatgatacgacgtgccgcaggcgatgacgtacacgcggtcgataaggttgagctcctccagcgtgaggtccagctcgtcgatggacagcgcgccgttcaccaggcgccccgccagcgtgtcgcggatcacgcgcggctgctcgtggatctccttcaacatgaagtcggggtagccgcccttctcggccacatcgagatcccagtcgacgtgcgtcacctcgggctcgtacgcctcgccgcgcacgttgtagaacgtgacggcattcggcgtgagcttcgccatatcgccgtcggcgagcaccaccacgtcgcgcgtgtcgtcgatcatggcgatgatatcggaggccacgtgcgcgccgtcctcggccagccccaccacgagcggcgagtccttgcgcgcggccacgagggtgccgggctcctggtcgctgatagccgcaatggcataggcgccgatcaggcggtcggcagcctcgcgcacggcctgcaagaggtcgttgctttcgcgcaggttctcctccacgaggtgcgcgatgacctcggtgtcggtctggctcgtgaacgtatggccgcggccttccagctcttcgcgcagctcggcgaagttctcgatgatgccgttatgcacgacggctacgctgccgtcgcaggaggtatgcggatgcgcgttcgcctcgctggggcggccatgcgtggcccagcgcgtgtggccgatgccgcaggtgccggtcagctcgaggggctcgacgagctgcgcgaggccgctcaccttccccttgcagtgcacgacttccagcttgccgtcctgctcgacggcgatgccggcagagtcatagccgcggtattcgagtcgcgacagaccttcgatcaggatgtccttgacggggcgcgttccggtgtatccgacgattccgcacatgattagctcctttgtgctcgggttcgccgatagtgtagcgcaccgattccgcatgcgcgaatgcatgtcggccgaagtcgcgcatccgctcaataaacgcatctttctcgtcaacgacggaatcggcggcgcatgttcgacaagccggcctccgcgtccttcgaccccttggccagtttcgcaaggacgagcaggagattgagcgggtacatcagaacgaggattttccaaacaagccccgtcccaaccgtgcagaccagcccgaacgtcgtcgatgatacgatcaaagccgaaagcgccgccatagcctccgaacccggcgacgcggccgatttcgatcggaaacgagccgtcgcataccagaacaggcacgcgagcatgccggcgcccacgaacgtgcgcccagccgtcgacaccgtttccatgcgagacgaatccgtcagacacgccgcgcacagcagcccgaacgccccagcgacgatcgttgccgtctccatgcgcccgctggccgccatccgctcgcgatcgacaggcagagccgccaggaagtaagcgttcagcagtgcgcaaacgaaagggtaagccgccagggacgccaagatccatgtagcgaagaacaggtcgaaagaccactcggcaagccagcttccctggatggcgcacaggggcacggcggccaagaagctcgccgccaccgagaaggacacgaccccttcgtcgaccatgcgaaaaaacagtgagagacgagccgtgattcctccttcattcaagaatgacagcctggaatggtatcagtatttttatcgtttgatgataagaagccggcacttccggcgaacggaacccttactctcccccgagatccaaatcaatctcgtacacgcgctcgggggcggtccgcctcaagcccgccttgacgcgggcctcccccgttttacgacgctcttcgactagacgatcgaactcctcatcggtgacgatcttcaggatatcgcccggctggcaatccagctcgagacagatttccatgagggtgtccatcctgatgccgcgcatcttcgcctggcgtatcctggacacgttcacggtcgtgtgcccggtggcgcgcacgaggtccttgctgcttttgcccttctcgagcagcaccgcttccaattcgactatcaggtgcttcgccatattcaagcccctacaggtaatcatccgaatcggcctgcagcaaagccccgtacttccaaacggaagagagcgagaagcaaacgacagccccaacgacggatttgacgtcgagatggatcgttggatatcgcctaacttgatcggaaacaagaccgatgtcggcatttccaacgtgaatcatttcaataaagtccggcgaaatgaaaagattcagggcaaacgacacgacgaacatccaagcgatgattttgatgtgcctagcatgcgaaaaagtgaaaggggatcgccctcgagaaacatctttggcaacgcctctcatgaccaaaagcatgacgccgtaaacgacgctcataagcatagatgatataaattggaacactacatacggatcaggcgctgtcgctgtggaaatatagcttaagacctcaaggacgataagcaccgctgatgaagcgcacaacgcaacgaacagaactaagaacagtacgctcaacctcgaaccgagcgcccgcatcttcgaaagcgagtcttcaattctacgcattggcttcatcacgcaaccgcaccaactctctacatagcaggctttttcacaggcaaagactgcattccgatatcgaagcaaataaaacctatccctatgctatggcaaatacccaacgtagacccttcgctgtagaacaacatattcatttctcctttcaaatgttgactattccgatccatattcacattctacgatacgaatcggcatgaagtacagggcaacaaaaaaattcggcatcgcgaacgatgccgaattccgaaccgcttacgctctcgccacgcctaccccaacatccctggggaggcgttggcgtgtcggacgaaatcgacgatacgcgcgatgaaaccgtctttgcctccgatcgcctgtgcccctgcgcgctggtgagacggcgcgcccagcagcgggctctcgtcgccgatgtagtacagcgtggtggtcagcaccatgccgatcagcgccac

SEQ ID NO: 9225 - DNA, 4258 bp, Unknown
  gut microbiota DNA sequence
gccttgttctcgaaaatgctcgtggcgaacagctccaccatgccggtaagcgcctcgggcgcggtgggagcctccgcagcgatgcgctcgaagccctcgatgagcccgccgatcccctcttccaggatgctctcggccatgacggccttgcttttgaagtgataatacgccacgcccttcgatacgccggccgcatcgactatctcgtcgaccgtggccgccgagtaccccttctcgccgatcaccgccaacgccgcttcgagcagctgcttgcgcgtcgcgcacgctttctcggttcgcttcgttcccatcatcgcatcacccccgcggcccggcgtccgtcgccgggccgttcgtctgtcattccccagtgtagcaggtcggaaactagccgagctgcagcaccggatgcaagtcctccatacgcaccgtgcgcttgcgatacgccacaagacacgtcagcgcgaagcacgcagccccgattgcgaacaacacgaagcagtcgaagcccacggtgccgtaatccaatcccgtcatgatctggcgcatgccctgcaccacgtacgtcatgggcatgtacgggttgataacctggaagaagtcgggcgtcgtctggatggggaacgtgcccgcgcaagccgtcagctgcagcataagcaggatgatggcgacgaacttaccggggaacccgaacgccgccatgagcatctgcatgatggccgcgaacacgagagccgtgaggtagcccatagcgtagaacgcgggaacgttgtcgatttgcagctgcaggccgaattgaagcaccaccatgagcagcgtggcctggatgagcgagaagaacgccaccggcaggtagttcgagaacgccaccgtgaccggattcgcgcccgacatgatgaggcggctgttgagcggcttgaacacgaaccctgccacaagaccgcctacccacagacccaacgccatgaagtacggggcgaatccggttccgtagttcttcacggtggtgtagtactcgttcgcaagctcgacgggatcgctcatcacctcggacttgccgtcgatgttcgtcgtctgctcggcggcggtcttcgcgccgtctgcgagggcggtggacaactcgccggagccgtccactgcgtcggtcagacccgaagcgagcgtaccgctgccctcctccaactgcacggcgccggaagcgatctgcgcagaaccgtccttggcgctttgcgtgccggaaaccagctgacccgcaccgttcttggctgcttggacgccatcgacaagctgcgccgctccgtcgtcgagctggttcgcacccgacaccgccgaggacgcgccgtcgttcacctgcgaggcgccggacgccaccttcgaggagccggctacaagcgaggacatgttggcgttcacctcgttggcgccggcgtcgagctgcagcacggcggcgcgcagcgaaggagcgctgtcgaccagcggcgacaccgtgccaaggagagagtcggcgcccttttgaaccttcgccgcgccgtccttcgttttcgcgacgccgtccttgagcagggagacaccgtcgtccacttgagcgtccatcaaagcgagggcacctttgaggtcgcgggcggagccttgcaagccctcgttgatcttcttggcctgctcgatgtacgccgccgcgttcttcgggtcggccgcagcggcatcgagcagcttggcctgcacgttcaacgcgccgtacagcgaagcctgcggatcgtcgtcggactcggatccgacactaccggaaatcgcggcggtgccggccttgaccttcgcgtcgagcgcatccagtcccgccgacaggttgttgagaccgccgttgacggttgtctgcgacatgtcgtcgctcgcgccgaagcccgcgtccagatcggcgacgccttgattgaacgcggccacttcgtcgtcccccggcagcgaggccgtggcctttgccagctcgcttgcgccggcggcgaccttgctggtgccgtcggactgcagcctgccggcgccgtctgcgacgccgctcgcgccggaggcgacctggccggcaccgtccttcagctggttcgcacccgctacgagggattgcgttccgtctttcagcgcgaacgtgccgccggacaaggtgcccaagccgccgtcgagcgacgatgcgccggagacgaggctgcccaggccggcgtccagcgtcagcgcgccgtccttgagcgtgccgagattcgacgtgatggcaacgcttccgtcatgtgcggtgatcaggccgttcttcaaatcgcccgcaccgtcggcggccttctggatgtccttgcccgaatcggccacgcgcccgagcacggtcgtccagtactcggcggccaccgtgtcgctcacccgcgtgcgcacttccttccacaccgtctcgccgatctgggacgccaacatgttctcgctctggttgtagtcgatcttcaactgggccttctcgggtgcggagccgtcgaccgaggcgatgctctcggagaagtcggccggaatcgtgcacgtcatgaagtactcgccgtcctcgaggcccttccgcgcctcgtcggccgacacgaagtgccagcccagaccgtcgtcggtatccttgagctgctgcaccacatcgtcgccgaggttgcgctgctcggcggcgatcaccgcgcccctgtcctcgttcaccacggccacgggcaccgtgttcaggcgcgcgtacggatcctggaacgccgccagatacagcgcgccgtacagaagcggcatgatggcgatggcggcgatgaccacccacatgatcttcgatgccgtgatgttcttccattcgaggccggcgaacctgagtcccttgaacgccatgagctactcaccatccttcgacagatacaccgtcgcgtcggccatggcggccagatcgcgctccaccactcccacgacgacggcgacgttgcgcgtgcgcgccgcatccagcagcagatcgacgagagcctccgactgcgacatggtcagctggctctccacgtcgtccaccaccacggcatcgggttcgcccacaaacgcaagcgcgatacccagctgtgcgagcttctgcgatgtgagatctttcacgcgcacgttcgccacgtcgcccagctgccactgccgcaggtaatccgtaaccgcctcgcggcgcggcttacgaccgtacagctcgaactcggctcccaacgcatatgccgccgtcaagctgtcctggaggtcgttcaacccgctgaacaaccccaggcccacgtgccgctccgccttcgagcgctggcgcggcagctcgaattcgcccacgttcaacgttccctccgtctgcttcatgcggcccgccagcgtgagcagaagcgccgtctttccgctgccgttgcgcccgcgcacggcaaccagctcccctttgtgcacgtcaacgtccacttcgcggtacgcgtatcctgcgtacgtcttcaaccccaacccgcgtgcgctgatgtacggtgcgccggcgaatgcggctccctcgcgcacgaacgtgcccgattccggacgcatctgaagcgcgtccgcccccttcgacggcggcttcgctccatccacccacggctcgatggtagccggcttctcctgcatgcccatcacgtccttcgcgtcgttcgtcagccttcattttttgactgactagtcagtttttcaaacggagtatagcaccgtcgcggacaggtgcaaggtctcgcaccgcaaatgcgcaaatgtccagggctcgcgcaaggtcgaccttccgcagcgcgccatgacgccgaaaacgtccccgcatggagcgaacaaggcggtttggcaatcatatcgaaaaggtaggatacagagagaagctgccccatctggtaaaacgtcaagcaaactgttcccacgcccgcagacgggcgcgatgggatgtttccgaaattaccaaaccgagccgtttttacctacagctctcgatttcgccgtccccctcccgacaggtgcgttcgcagcgctcccgcaatcgatcctcgctaacgcttcgcgtaaagtattctggcatcgccaagccttctcctcgttctcctttagtggttccgtcgcaaagccgtcacgatgccgttatctcgggtatacttccagcgaacgaaccgcgcgcggatgcgcgcaatttcgcgcagaaacggagctgccatgaaagcgaagatgatccatcgctgcatccacgtcctcgacctgg

SEQ ID NO: 9226 - DNA, 2013 bp, Unknown
  gut microbiota DNA sequence
ttacgacaacggcggacgcgacacgcacctggccttcgaggtggacgacatggacgccgcgcgcgccttgcacgaggagatgggctgcgtgtgcttcgtgaacgagcgcatgggcatctacttcatcgaggatcccgacggctgctggctggaaatcctcccggcagatcgcgcggagtagcctcccgcacccttctcgcaacatcgaggcatccagcctccccattccccacaattctcatgacaacgggcggcatccgcgcaaggcgggtgccgcccgcacgtttgaaacgcgttggagtcttcggcaacgcacgggtaaaccgcgttggaaacggttgcacgaaacgtggaaaccgcgctggaaacgcgtggcagttgcgctggattcgaaggtgctccgcgctggacgcacgccatcaaaacgtaagaccaggtcgttatcatggaagcacggtaaattgcagcggcgccgccatcggcgagacagggaacggccatggctcggcgccgctgcaaaccgtacgaaacgcgacgggcggaaagcatccaactcggccgcccgtcgcatgaaacccttacgcaccgcacgagcttgctaaattataaatagtattgacaataaaagggatcggggataggatggtcaagcgcagagaggtcgtcaggtttttccggcagaacggcttcaagaacgaaggggcacaaatcacgacaagttcaggcatcccgacggcagaagaaccgttatcgagcgacatagcgagatctcaaaccagcaatttgaagtcatgaaaaaacaggccggactcaaatagcccaccccctccgaaggagacgagcatgaagcacgtgtacgagtttgaagtgttcctcgatgagggccgctacaccgtctggcccttcgatttcgagtgcggcggcacgtcgggcgccacgtttcgcgaagcgtgcgagatggcggtcgattggctgaaaaccgtcgttgaggattacgcgatgcacgacgaggcaactcccgagcccaccttcgacaacgagccgcgctacggcggacggatcatcaccgtcgccatcgacgccgggctggaaaccatcccccgcatgacggctgccgaagccgcgcgcgccttgggcgtgtccccctcgcgcgtcagccacatgatccgcgacggcctcctcgagtcgttcaagtacgggcacaacacctgggtgacgggctacagcgtggaggcccgcctacgcgagcgccctcccgcaggccgtccgaagcgcaagcccgccgccagcgcggaagaccggccgcaggcgctcgaagcctagccggcccgtccctcgcaccccacccccgaaaccgaggagggagccgcaccgcggctccctcctccactctcaaaccctcgacggatcatgtcgcaagcgcgctagttccccgcagcgcgcgcagcctggtaggcttccaccagcttcttcgtcacgtcggccggtgccggctcgtagccttccagctcgatggagtacgaccccgagccgcgcgtgatggcccgcaggtccttcgtgtacgtgaccacctcggcgtagggtacgcgcaccatgatgaccgtctcgcccgcgtcgttcgagtcggtgcccacgatacggccgcggcgcgtggagatgtcgcccatcaccgcgccggcgtactcctctcccaccgtcacgtcgaggttcgccatgggctccagcaaaatggggtcggccttctcgcacgcggcacggaagccgatgcgcgcggctgtcttgaacgccatctcgttggagtcgacggagtggtacgagccgtcgtacaccgcacacttgatgtcttccataggatatccggccaagaaaccctcgcgcatggcatcctgcacgcccttgtcgatggccggcaggtagccgcggggaatcttgccgcccacgatctcgtcgacgaactcgtagcccgctcccggattcggctcgatgcgcagccagcaatcgccgaactgcccc

SEQ ID NO: 9227 - DNA, 502 bp, Unknown
  gut microbiota DNA sequence
acgcatggcatcctgcacgcccttgtcgatggccggcaggtagccgcggggaatcttgccgcccactatctcgtcgacgaactcgtagcccgctcccggattcggctcgatgcgcagccagcaatcgccgaactgccccgcgccgcccgtctgcttcttgtgacgaccctgcgcctcggccgtcttgcggatggtctcacgatacggaatgcgcacggggatgagcttcgcctccacgcccgtctgctccttgagccgggcgatcagcgtctcgatctgcgcctcgcccatggccgtgatcaccgtctggtgcgtctcttcgctacggttgatgatcagcgtggggtcgttctcggccgcgcgagccaggaacgttcccagcttgtcctcgtccttcttgttcgccgcctcgatggccaccgggtactgggggacgggcagcggcaaggggtcgatggccacgtcgcccgacttcgacatcgtgtcgccggcacgcgtatcg

SEQ ID NO: 9228 - DNA, 3493 bp, Unknown
  gut microbiota DNA sequence
aaacgttcccagcttgtcctcgtccttcttgttcgccgcctcgatggccaccgggtactgagggacgggcagcggcaaggggtcgatggccacgtcgcccgacttcgacatcgtgtcgccggcacgcgtatcggtgagcttcggcaccacgatgatgtcgccggccttcgcgctcttcacgtcggtggcctccttgcccatcatcacgtagaggtggcccagccggtccttcttgcctgtgcgcgcgttgatcagctccatgcccggttccagcacgcccgagatgaccttgaggaagctcaagcggcctacgaacgggtcggacaccgtcttgaagatgaacgcggcgggctcgcccgtctcgtcgacgaacgtctcctcgccgttggccagacggaagcgcccgtgatggcgaggatgcgggaagtaggtggcgatgtcctccatgacgccctggatgccctgctcgatgatcgtggagcccacgaacacgggaatgaacagctcctgcgcgatggccttgtccaacagctgctcgagctcgtcttgggtgagctgctcctcgccgtccaggtacttcatcatgagatcgtcgtcggcctcggccacgaggtcgcacagcttgtcgcgcgcggcttgggcggcatcggcgtactcgggcggaatctcctcgatgcgctccttctcgctgccggcatcgaaatagcgcgccttcatgcgaatgatgtcgatgacgccctcgaagtccttgtcgacgccgataggaatggtcaccggtcccaaacgcgaaccgaagcgcgcatgcagcagcgccatggccgtgtcgaagtcggcgttctcgcggtcgatatggttgatgaacacggcgcgcgacagacgcatgtcctccgcctcgcgccacagcttggtggtcatgacctgcgggcctgccacggcgtccaccacgaacaacgccatctcggccgcttgcatggtggccagcgtgtcgccgatgaagtcggggtggccggacgtatcaagcaggttgatcttgtagtccttgtacggaatgggggcaatggaggtgccgatggtgaatttgcgccggatctcctcatcgtcgtagtcgaggtaggatttcccgtcgtgcgtcgtgcccatgcggggcgtacggccggagacgtgcagcatcgcttcggcgagcgatgtcttgccggcgccgtcttggcccaccagcacaatgtttcgcacgtgttcggtagcaggagctgccatgttgaccaccaactttcctgttgcgtggcccacgccgttgtcgtttctgccaaggcgcgaaccacagtcgagcctaacctacgaacttcaaacgcgatcttgaaaccttgacccatagtgtatcgcaaaacagccgctttcggcgtccacaacgacggaattaggcgggctcggatcacgctcccgatgcccctcgcatccatctttgaagaagccgcgagcaacacgttaccgaacggtgacgaactcgtagccgcgggcgcgccgcacgacatgcggttcgcgcagcccgtataatcgaagcagacacgcggcacgaaaccgcaccccaccgtaagcgaggagaccatgagcgacccaagccccatcatcgacgtcaaccccgtcgcaagcaccagcgacgccgcgaaaagcgcaagcccgtcgggcagcgacacgttccgcgcgccatcgtacgggaaggacgccgcgcaggccgccgttaacgccactatcatcgacgaagggcgcgtctcgaagaagaagcccaaccgcatcggcggcgccgtgcagacggccatcggcggcgccatcatgttggtgggcgtgcccatgctcatcctgcccggtcccggcttgctggccatcggcggcggcgccgtcatagcgggcaacggcatcaagaaggtgctggggaagtaaaccggccgcagcagaaacgaagcgggcccatcatcgcgatgggcccgcttcttcatttcggaacagcttagaacgagagcgtctgcgccgcgtctggctcttcccgatactcaccgaacgcagagcggtaactgtagttcgtgagcccgcgcagctcatcatcgtctgcggcgtagtacgacaccatctggacgaactcgccggtcatatagtcgtgcttgcgatacatgatgcccgaatggtagccggttcccgtctcgcccgtctcgggatccgtccatgtgctctccaagagcgtcacatcgtcttcggaaatgagctccatgtacggtcccatagcttgccatccgtagggcttgagcgatatgctcaccgttccatcggtcacgtcccagccggtcagctcgtagccgccgaactcgctcgtctccaatgtggtgccgattcgagagacgtccacatgttgtacgttttcctcattcctcgctttacgctcctcgaccgtcatcgagtcccagtcgagcgcgttcaacatcggcgtgaacgtgacgctatgcgcttcgggcgagagattggagaactcgataatctgcgaaccctccggattgacgcccgaaccatcgccagcttcgaccggagtcaaaacgttgccctggtcatcggttaccttaagcaaatgaggactcagcacgttctcgggcgggccgtaggaagaaccgtattcgccttgctctcccgtccactcgttgtcgttgcgcacgaccatcacggtgcccagctcggatgccgtgaaacgctggatgcccatcgtcttgtcgccgtcgctcgtattgaacacgaggtcgtgcgcgcccagctcgcgcggactggccaccgtgctcaggtcgaggccgacatcgaacgtgaagggctcgtctccttcttcgaactgcttccacatcgcatagccttccagcgcgatgtccacctggtcgggaagcgtcgcttccggcacgatgcgctccatgatcttcaccttgccgtcttcttggtacgcatcgagcacgtagacggaatctttgccgatcgcctcgccgttgctcgaaagactgtacgagaagcgcggagcaagccgctgcaagcgcgcccattcgttttcctgggagccctcgtagttcgactgctcggtcaggtcgaagccgccctccttctccaacgtgaagaacaggttgacgatgttgcgatcgcacgacaccgaatcgagcgtcacctgcacgccgtcgacttcaacggtatcgcccacctcggcgttcaggctggaaaccccgggctgcaagctgttgtatatgggcaggttgttaccgcccccgaaaaatccgacatcgcccggctgcatctgcaccaggcgcgatgcggcgaaggcgacaccgctcaacagcacgacgagcacggccgcaaccgccaccatcgcaccgcggcgcgccacgcggacgcccttgcgcttgccgtgcgcaggctcggcagaccgccgcttgaccggctgccgacgctgcggagcgcccgcgcccgacggcgtggg

SEQ ID NO: 9229 - DNA, 1122 bp, Unknown
  gut microbiota DNA sequence
cttgccgcgcagcagcacgaggccggccatcagcgtcatgcccaaagccaggccggcgcccaagaacatcagcggcagcgccacgctatcccacgcaggacgggccgcgatcaggtacgacgaccctgccacgaacggcagcaccaaacccacgatgccgcccagcacgccgaacaccttcgacacgccaggatagtccttcttcgccagcaccaggtacaccaacgcgatgatgcccatgatggcgacgacgaacagctccttcgacagcccggatcccaggttgcccagcagatgcgtcgcgcgctccgggtgccccatgtgcagcaccgacacgcagccgcccacggccaggcagatgagagcgatcagcgcgcccgagaaccgcacttcgcggaacttgccgcgcagctcgcccacggccaggaacacgaacgagcccgaggtgacacccaacagcacgctgaaaatcagaagtggccactggatttccatggttactcatctcccttccaggcgcacttgtccatggcgtagtccacgcccggatggttccccacgtccttcagcttgtacgtcttcttggcggcgcgcagcttcgacacatcggactcgggatcgtccaggtcgccgaacttgcgagcctggcccgggcagtgcttcacgcacgccggcttctcgcccttgtcgatgagatgcgcgcacatcgtgcacttttcgataacgcccttgtccttgctggtgtcgtacgcgcgcacgccgtaggggcaggccatgacgcagtactggcagccgatgcacctgctgtgatccaccagcaccacgccgtcgtcgcgcttgtagctggcaccggtggggcacacgctgacgcattccgggttgtcgcaatgctggcacgacacgggcaggtagtacatctccaggtcgggatagattcccgaagggcccaccgtcagcaccttgttgtagaacgtgcccagccccacattgttctcctgcttgcacacgacggcgcaggagtggcagccgatgcagctgtccagatctatatcgataatgttgcgggtcatgttacttcgcaccccccttcgtcacctgcgtgacgccgttctgctggtcgtc

SEQ ID NO: 9230 - DNA, 694 bp, Unknown
  gut microbiota DNA sequence
gttcccgaagagcccaccgtcagcaccttgttgtagaacgtgcccagccccacgttgttctcctgcttgcacacgacggcgcaggagtggcagccgatgcagctgtccaggtcgatgtcgataatgttgcgggtcatgttacttcgcaccccccttcgtcacctgcgtgacgccgttctgctggtcgtcggcggccagttggtcggcggtcaacggcaggaatatcttgaggtcttccgagttcatgcagatgttcttcggcgcgccgtcgtcggccttgtacaccttgcacaggccgccgtagttgtcggtgcccaccgcgggatcgtacgggccgttgttctcgaacagcacgttgcagttgctgtcgaacgcgccgtgcaggtcgtcggtggcttcgcgctcggggaaccaccagtcgtgctcgacgtggatcatgcccggcttgatggcctcggtgaggttcgcgcgctgcttgatgcggtcgacgtacgtctcgatgtacacccagtcgtcctgctcgatgccgtgctcggcggcggtggcggggttgatgtccatcgtcgggaacatgtgcacctcgcgcatccacgggctgttgcggtactcggtgtggaagaatgcgtggctgcggccgcccgtgatcagcgtgtacgggtactcgtccagcagatcggggcgcgagatcttcgtg

SEQ ID NO: 9231 - DNA, 698 bp, Unknown
  gut microbiota DNA sequence
cggcggggttgatgtccatcgtcgggaacatgtgcacctcgcgcatccacggactgttgcggtactcggtgtggaagaacgcgtggctgcggccgcccgtgatcagcgtgtacgggtactcgtccagcagatcggggcgcgagatcttcgtgatgggcggctcgatgtacatgggcagagcgccgtttccgtacagcagcaggtcttcgctccacagctccatcttgccgttgtcggactgcggatgcggcgggatcaccttgccgtccggcgtctgcgcgccggggaagcggtagaccgagcccattttgttgccgcggtacatggtgttgaagccggggcggaagtcgctcgtcttgcgcatgaagcccgtctcgtacttcggcgcgttcttcacggtggccatctccacgccggtcacgctgatgcgctcgcggaactcctcgaagttcgcgcagctcagattgggcggaagcgtctcagggcccttcaccatgtagtcgaagaactcgtacttgtccttccagtacatgtccacgcccatgtattcagcgaactcgaagcagatgtccatgtcgtcgcggcactcgcccagcggctcatggaacggctggcggatgaggtacgtgtggctggtcggatagccgtggccggagtgcgcccactcgacgcggtccacttcgttgggatgcgcggcc

SEQ ID NO: 9232 - DNA, 1192 bp, Unknown
  gut microbiota DNA sequence
ttgcgcgccggggaagcggtagaccgagcccatcttgttgccgcggtacatggtgttgaagccggggcggaagtcgctcgtcttgcgcatgaagcccgtctcgtacttcggcgcgttcttcacggtggccatctccacaccggtcacgctgatgcgctcgcggaactcctcgaagctcgcgcagctcagatcgggcggaagcgtctcggggcccttcaccatgtagtcgaagaactcgtacttgtccttccagtacatatccacatccatgtacttcgcgaactcgaagcagatgtccatgtcgtcgcggcactcgcccagcggctcgtggaacggctggcggatgaggtaggtgtggctggtcggatagccgtggccggagtgcgcccactcgacgcggtccacttcgttgggatgcgcggccggcaggatgatgtcggccagctcgcccgacggcgtcatgtacaggtccacgttcacgaagaagtccaggttcttgaagccttcgacgatctcgtggccgccctcgatggagaggatgggctcggacgtctgctgccagtacccgtagatctggaacggatcgcccttcgccatggccttcgtcgtggccgcgccgaagccgccctgctggccgtagatgacctggccgccggagttctgcttcgtggtcttcagctcgccggtggcgtcgtcggccacgaggatgtcctggtagccggtgttctggcacacggacagcttcttgatgttcatggccgtttccttgcggcgctgccccatgcggcccttctggttcggcacgacgtcgaacatgaaggagtcgtagccggtggcgggctcgcggccgatgttctggccgcccttcgagtcgaagttgccggccagcgccatcatgatggtgaacgcctgcgagatgccggacgtgttgatggagaactccaccttctggccgcgcgtgaagcacgcgtgcgggctggcgtcgatgtaggcgtcgatggcttccttgatcttgtcctcgggaagctcgcagaactcggcggcgcgctggatggtccacggggtgacgtgctccaccaggatgtcccagctggtgcggtaggtcttgccgttgatctcatggctgccggacagcgcgggcttcgcgtcggccacgatgttgccctcggcgtcgagccactggaaggccttc

SEQ ID NO: 9233 - DNA, 1075 bp, Unknown
  gut microbiota DNA sequence
accctcgatggagaggatgggctcggacgtctgctgccagtaaccgtagatctggaacggatcgcccttcgccatggccttcgtcgtggccgcgccgaagccgccctgttggccgtagatgacctggccgccggagttctgcttcgtggtcttcaactcgccggtggcgtcgtcggccacgaggatgtcctggtagccggtgttctggcacacggaaagcttcttgatgttcatggccgtttccttgcggcgctgccccatgcggcccttctggttcggcacgacgtcgaacatgaaggagtcgtagccggtggcgggctcgcggccgatgttctggccgcccctcgtgtcgaagttgccggccagcgccatcatgatggtgaacgcctgcgagatgccggacgtgttaatggagaactccaccttctggccgcgcgtgaagcacgcgtgcgggctggcgtcgatataggcgtcgatggcttccttgatcttgtcctcgggaagctcgcagaactcggcggcgcgctgaatggtccacggggtgacgtgctccaccagaatgtcccagctggtgcggtacgtcttgccgttgatctcgtggctgccggacagcgcgggcttcgcgtcggccacgatgttgccctcggcgtcgagccactggaaggccttcgggccgcccacgcccttcgcgttctgccagtcgccggaccagaagatcagctggtcgctgttctcgtcccacgcggcgtacagctcctcgttgccgtcctccttgaggtacgactcgcgcagctggtagcccgtgccgttgccgtcggcgtccttctcgtcgatgaagaacggggcgttcgtgtacatgcgcgcgaattcggttgcgcacttgtcagagtggacgatctcgttgatgaaagccagcaccagcgccatgtcggagccggggcgaatgggcagccagatgtctgccttggaagccgtgcaggtgaagcgggggtcgacgcagatgaccttcgcgccgcgctcctgcgcgcgcttgacggtgagccagtcgtagtagccgcggctgcgctcctggcgg

SEQ ID NO: 9234 - DNA, 25180 bp, Unknown
  gut microbiota DNA sequence
ggagtggacaatctcgttgatgaaggccagcaccaacgccatgtcggagccggggcggatgggcagccagatgtctgccttggaagccgtgcaggtgaagcgggggtcgacgcagataaccttcgcgccgcgctcctgcgcgcgcttgacggtgagccagtcgtagtagccgcggctgcgctcctggcggcaccagatgaggatgcagtcggtgttgttgccgtcccagccggtgtactgcgtctcgtcgccgtacaaacgctggctggagaagtacgagcccacccagcacaggttgcccacgccgaacgtggccgtggagcccagctcaagccacagcttgttgatggcctggaactgcagcatgtcgcggcccgtgccgtactggtgcgcgatggtgtgccaaccgcgctcctcgccgatcttggtgaagcggtcgcgcgcttcctcgtaggcctcttcccacgtgatgcgcttccactggccggagcccttctcgcccacgcgcttctgcgggtagcgcacgcgcagcgggttgtacagctcctgcgggatggcgaagcagcgcccgcacagcgtgccctcgctgaacaggtcggggttgccctcgatcttcacgaggcgcccgtccttgacgtgcccgaacaacgcgcagcggccgtagcactggcggcacgcgctcgggatgatcttcacgtcatcggacgaggtgctggtggccgctgcctcgtcggccgcggcggtggtcgccgacgcgccgagcagcagcgtcgaagcggtcgcgacggccgaagccttcacgaagcctcggcggctcatctttagtgacatctctcctccttttgcctcactctgcatggaggggtcggagatgcggaggggtgcgcgcgtcgaagaatcccccttcaaagcgccccggactgcaagttccccgttctcgttccccttttacttgcagtgctaattatattacctgatattattagtgcaacgactttaagctatctttataaagaatagtcgcgaccacgagagttatacgtggcgaacaggtaaaaacgtacgcatgtttcacgtgaaacattgaatatgatcctcagttcagagctgctctacgtgacggcaagcacagcggccctctcacctgggaaggtgcctaagctccgaaaacggcggcaccgcgagggctcgtttcgcggctccagatgatcattttcggctgtttcctgccacgctcgaaggcattcgctgcgccgaaccggcatcagcggatcctgctcgacgcctccgaacatcgaacgtcaaagttcttgtgcgctaaaggggcaactgcacgcaaggaagcaaaaggaagctgcgccggacaaatgtttcacgtgaaacattcgggcccttcgctgtttctagtggtttgacagggcgaacttgctagggagcccaccttatggagctgcaagcggtaccatgggacacgcagacggcgctacggaatcggagcagacatgaacacccaagcggcaatgctcgcggctcttttcgagaagtccttgaacctcggccccgaatggaaggtcgtcgatgcggagttcagggaggtcgcagggggcaaagacgagctgcacgtcttcgtggagcgagcgacgggctcggccatgttctgcaccgcgtgcgggggcatgcacggcgtctacgacacccgcgagcgcgagtggcgccacctcgacatctggcagtacaggacgatcgtccactgcaaggtccccagggtcgggtgcccgatccacggcgtcgtcaccgtgcgcgttccctgggaggccgacgacgccaagcacttcacggccctgttcgccgcccaggtcgtcgtcatggcgctctcggggctgacggtgagcgccataggagagcttttaggtgaaacggacacgaggctttggcgggcgataagggcatgcgtggcgcgagcatgcgcgcatgcggactactcggacgtgcgcgcggtgggcgtcgacgagaccgccaaaaagcgagggcacgactacctttccgcattcgtcgacttggacgcacgccgcgtcgtgtcggtgcaagagggacgcgacgcgggaaccgttgcagggttcgcggacgacttggccgcacatggaggggacgcagaggccgtggaggccgttacctgcgacctatccccttcgttcgcgagcggcatcgccgtccacatgccgcaggccgcccgcatagccgaccgcttccatgtgatccagctgttcaccaaggcggtcgataaggtgcgcgccgccgaagcgcgggagtccgagggcaaacgagatctcctgaagcgaacccgctggctctggcttaaaaacgaagccaatctgaaagcctcccagctatcgcgcaagcgcgaactcgcaaaagagaaccttaagaccggccgcgcgtgcgccatgaaagaagccatgcagcgcatctacgagtgcacctcgcgagccgaggcggctgaagcccttgatgcgctgacaagctggatggcgcactccaacctcgcgcccatgaagccggttgcgaagacgatcgccaagaaccgcgaggagatcctcgcctacttcgacttcaggaggaccaactcgatcctggagggcctgaactccgtcatccagtcggtcaagcgggcggcgaggggctaccgcaacttcgagaacttcaaggcgatgatatttctccacctggggaagctgtcgctcgggatccccgagaggtatggtacccactagaaacagcgaaggaccaacattcggactcccgggcctagatacaaacgcaaggagaaaccgatccgaacgttggtccacccgcaaagaagaaagccgggacgcgttaaacaaacgtcgcccaaggaaagacggatgcgaaacggagccgcctcggcagaggccccgcgcgtcccgccgcacgcgccgcgcaagtcggcggcgattatgcccgcacgcgacgcctagggagggagaggtcgtcgcgcacgggctccaacacagtttgctgcgcgagttttacagcttggccaaatcgcggccaagcacgtacgggagcgtacagcagcaggcgcccaggttctggccgggcaatccaaagttgtacgtgccagcgaagaaatcaccgatcatggtgcctacgcagtacaggccttcgatgggagtatcgtcatcctcgcaaatctgcaagttcgcatccgttcgcaaaccgcccatgaccgtgaggaaggtaacgcccgtggttttcgcaccgtagaacggaggcgtgctgatagggaacaggatactgggattcacctggtactcttcgtcgtaaccctgttccgcataggtattgtagcgctcgatggaagcaagggcctcttttttgtcgatgccctcaagctggtcgagaagctcctctagcgtgtccgctttgaagtaggtgcccttctccacgtttgcatcccacatggccaccatttgctcgggagtaagcggcttctgcggcgtgacgttgttcaccgagcaaccaagcgtctcccattcttcctgcgtctgagcgtacgcagtatcccagatgccgaacccggtggtttgaggctgcgtcagcagcgagcgagcgccgaacgcaaagttcgtgttctcgttctggaagcgcttgccgttgatgttgaggttgatgccccagaagttatcgatgacgcagtggctgggcccgggaacccctccgttgacagcgcagggattcgggaacaccttctgccaaccggcaccgacccacaatcccattttatggccgtctcccggcatgaggccggagtagttcataccggcatcgaaatctaccgcatcctcgccgaacgtgagctgatctttcagcgcgttgtaaatatccggcgcgtatttggccatcatgtcctcgtcttttgagaagtcgccagtggccaacaccacggccttcgtagcctcgtacttggcatacgtgccgtcggcgcgcttcgcgataacggcgctcacacgaccggtgttatcgtcctcgcggatcagctgcacaccgcgggtctgaaagtggatctgctgccccagatcctgcgtaagcgtgtcggcgtacgcctgagcgcacagcggcgcaccctggaacacgcccaacggattctcgtcattccagaagttgtgcaccgacgccggcgcggccagcgtaccatcaggatcggcgtacggaggctcgagattgaccttcaggcccttggcggtcatcttgtcgatcatccagtccatggattcgccgctgtattggagccaacgcgaccatttcatcttatccatgctgtagaaaccggcaagctgctcgatcttcacatgctccaaggcatccttcggcgtgtagtcgatacccatttccttctggtacttcgtgccgatggcctggttcgatccgccacgcgaaatagccttggtgcccgcatcgatcaatataacgctcagcccgccttcggccgccgaaacggcgcagcacgtgcccgccatgcctgcgccgaccacgacgacgtctgcattgaacgtttcagcaatatcggcgtcggcgataggctccggcgggatttcgaagctccatttctgggtagccgactgcgcagtcagcgctccgtccgaagatgcgccaccgttcgccccttcgcttttcggcgccgcaggcgagcaagcggccagcgtccccatcgcccccagcgcgccgatcgcacccgcgcccttcaaaaagtcacgacgattcaattccatggttccctccttgatccgattgaaacaactgcctgaatctagcacgccgcgctcgccgaaacgctcacccgcagcgagcgtttcgcatcccggcgttcacatggatcgggtgaattcttggaaaatgagcaggtcgacctctcttcgacgatcgaatcagcatgtcccgaacgaacttatcgggtacaatgcccgcaggaggggaatacatgcagaaaaccatcgcgaatatcttgctcgcggccacgggtttcgcttgtttcctcgcgctcaattcgttttccctctggggtttcgctctcttgcctgagacggcgctcggcgaaaacgctcagctgctttggagcgcgcctctctcgctgagcaacatgctgacgttcttcgtgttcgtcataggggcatactgcgctccgacgctgttcaatcgcagcccgctgcccgctgccgccgcgctgctgaccgccgctgtcacgctgatgggcctgtccacgctcacccaaaatcccgcagttctcatctcggccagcacgtgcatgggcatcggcacaacatgctgcttcttctgctgggcacgtgctttgttcgcggacggctccgatttggcaaagatcgagctagtactgggatccgtcctgtcggcggttccctatctcgcctttttcacgctagaaccatcggccatagcagtgactatcgccgtgctcgccgcatgtaatgttgcggcgctgttctcccaccaaagacttgccaatcgcgaaaaccgttcccatgttcctcagcgcaccgtcccattcggcacactgctggccaccttctggaaaccgctgctgtgcatcgccatgattggactggcggccccggccatcgtcgtcatctcgcacgactctaccgcgagcatgacattcgtacagcaatcgcttatggtgcattccgagaatatcatcgccgcgctcgttctgggcatcgcgtggttaggagcaaggcgagaaacgacccctaccaaaacgttctcggtgctgtttcccatcatagcgacggcgctgctgctgttccttgtgctggaaccgccgctgcgcatcatcgtcccatacgtcagcgggatcgcattcgtcgtgttctcgatgatagtgatgattgatagcatcgaagtgagctcgaagcaaaatttgggattaaccagcgtgtacggcctgttcgcgggtctgttttactgcgcgaactggctgggcaacttcgccatggaagccgtccgcgaacaagggctgctgcaggaggcaacggttacgatagcggtcgttgcgctgctgtacgggtgctccatcgttatgttcttcgtcacacgggcgccgcgagaagcctcttccagcaatgccgacaagacttgcgcgccgcaggaggcaattgcgaccgaaactcccgtcgaagtttcgactccgatagacctcatcgatgagaactgccggagaattgccgaaacgcatggcttgtccaagcggcaggcagaggtgttcgcgcttcttgctcacggttacgacatccccactatcgccaagaagctgtacgtttctgaaaacaccgtgcgcacccacgcgaagaaaatctacgccacccttgaagttcacagcaagcaggagatcatcgagctatccaacgcatcttacgatgcttagccgttcgcaacaaaaccacgtgcgtagcgtaacggtcagaggcctgttgtcgaattcggcagcagtcgagcaggactttgggctatagggatcgcccgatttgagccaatgcacacgatccggccgtttctgcacaaaaagccgcgacgtgcgacgcctggaagcctcgaaatgagctttccaaccgtcctgtcgacgaagccttccatactcctccgatcgctacaatatcgatcaggcgttttccaaagcaaccaaaactgcgcgaaatgcggcaaccgacaaggtgtcgcacgtcgcgtctttttgtgcagaaacggctctgcggcgtgcgagattgcttgcgcgcaaccatcgccgtcgatcgcaggcgtcaatgacggcgtcaacgacatgcagacgcgagcagcaccagcagaggcagcgcgagtgcggtcttagataccggcggcgtggtttttggacgcgcgagacgcaaagaagttgacgggttccggtcaattgtgattaattgagcaggtactttatagtccctatcgccgttcagcgtggccagcgcagcgtgcggaccgcccgcacgcccctccccaccttcgcgcggcatgccagaagcaggtcaagcatgatcaaccagcataacagcctcatcggattcctcgtgtacgacgcgcagcgcgccatcgccaagtcgctggaaaccgcgctcaagccctacgagatcacgccgggccaatggaacctcatcaaccagctggacagcgcgggcgaactctcgcagaagcaactggcggaacgcacgcgcaaggagcaggccaccatcacccgctacctcgacacgctcgagcgcaagggtctcgtggtgcgcaaccagcacaagtccgaccgccgcgcgcacgctatctcggtgacggacaaggcgcacgagctggtcatggccgcgcagccggttaccgtcgacgcggcggaccgcctgatcgagggtatcgaccaggcggatctcgacacgttcgtcgcggtgctggcgaagctcaaagagaacgccgacaactactccaacaacggctagcgacgacccgcacgccgccgcgccaccaaaagcgccgtggcgagcgcgcctatcgcgactgcgcccagcgcgcccagaacggcgagcggaacagcgtcgccggtgcgggcgatcgacgatgcagaggacgtcttgcccggggcattcggagtcgacggttgcgaggtcgatggggtgcccggcgcggcagggtcgacgggtttcgccgggtcggtcgggtcggtgggatcgttgggatccaccgggtcaaccgggtcgggcggcaccggagcgttctccacagtgagttcgacctgctcgggctggcccacttccactccgaactcaaccggcgtctcatccaacacgtagccctcgggggcggccgtctctacgaagcggtagcttcccaccggcaaaccatgcacctcgatgattccctcgtcgttcgtggcgagcgcgtcgaagccgtcgaccacggcccacgtcccgtcggacagacgctgctccaacttgaacaccgctccggcaagcaccgtcgtcgcatcgtcggcatccaccttcgtgagcagcgcgccgcccagcacaggggtcttcacgttcgtagccgtcacggccaccgcaaggccgggcgcgtcctcggccagcgtgaactccaccggcaccgtctccagctcgtaaccctcgggagccgaaagctccacgaagcggtacgcgcccatcggcagatcggttacctcgatcagaccgtcggcgtccgtggtcaggcgctgggaacccggcacgggctcccagcttccgtcggccgtctgcgtctccagcttgaacacggcgcccgggagcaccgtcgtcggcgaatcggcatccaccttcgtcagcacgaccttgcccagcggcgcgggcggctccttggcgttcgcagccgtgagattcacgacgatgggcgccggcgcggcggcgtcgatggcgaactcgcggggcgtgtcgtccagcacgtagccttcgggagccgcggtttccacgaagcggtagctgcccaccgccaagtcggtcacctcgatcaggccgccggcgtcggtgacaagcgcatcgtggcccggcacgatctcccaggaatcgtcggcgaggcgctgctccagcttgaacgtcgcgcccggcagcacggcatcgggagcctcggcgtcaaccttcttcagcaccgccttcccgaacaccgggctcttggtgttcatggccgtcacggccacctccaacccgggcgcgtcctcggccagcgcgaactccaccggcaccgtctccagctcgtaaccctcgggagccgaaagctccacgaagcggtacgcgcccatcgcgagacgttccacctcgatcaagccgctgccatcggtgacaagcgactcgtatcccggcacttcgacccacgacccgtccgccgcctgctcttccagcttgaacacggcgccgggcagcaccgtacccggcgcgtccgcgtccaccttcgtcagcacgaccttgcccagcacgggggccctcctgttctcggccgtaacgttcgcggtatggttcagcgtagtcgacgtgatggcgaattccaccgactcgctcgtcatctcatacccgacgggcggcaccatctccacgaaacggtactggcccaacagcaaccccgtcaccgtgatcagcccgcttccatccgtagtcagctgctcggaacccgcaaccgtcgcccaggtgttgtcaggctgcatcttctccaacctgaacacggcgcccggcagcgtggcgtccggattgcccgcgtccaccttcttcagaacggccttgccgtccttcacctccacgccgcccgagatcacggtgaaatgcgcgcttccgggcgccgcttccgacccgctgtcgccataggtgagcgtggcgttgttctcgtactgcccggtttcggacgcgtcgctgcgcagctctacgatgaacgacgtgaagtcgcccttgttcggccccgaggcgctgaagtacttcatgatgatggctttctgagcaggcgtggcgcctttttcttccagcagccaggaaagtcccgcctcgccctggccgtccaggatgtttccgatattgagcgggctcgacccattgcccgtgggcacgttgccgaacccgatgtacaccacgcggttctcccacacgccgatggtgggcacggctgccatgcgcacgctgctcgcgaactcgtcctgcgtcatgccgtcggccgccgacttgtcggtcagcgcgaacaggtcggtgatgggataggccgcgtactgctcggtctgcgcctcgcccgcgtcggtggtggccaccacgggcatgtacaccgtcacgccgcccgacgtgatggcctgcccgccctgcaagtcgtcggtcagcaacaggttgcgctgctgcggcgacgggtcggaaccgcccacggcatagttcgcgtacgcgtccacgatgttgtccaggttcacgccgatgctccacacgatctggttctggccggctacctgcgagccgtacttcatcagcggcgtatcgggcagcgggcccgtcgtaggcggttcgacgccgatagacggaagcgcttggccgttaaccgtgaacacgatatcgttgccttggcccgtcacgtagccctcaagcgagaagaagccattgtgcagcgaggggaactgcgccccatcgtcggaaagcgtggtcacgatagtgatgtcctgaccggggatcatgctgccgttcgcatcgcggttgccgttgaccacgtacgagccgatcaccttctgggtcgtgggatcgacgaggttcaccgggccgaaatcgctggccaggaagtgatcatccccgttgacggtgaacgtgaacgtgtcgcccgcatgcacgtccgtcatatcgggaatgctccagtcgatatagatgcgcacgtacgcgccgctggtcagcgtggtgccggcgggaatgtccaaccagctgtcgcccgatttcttctgcagcttgacgccgtcgacggacaccttgtcggtcacgtccatcgccgcgcgcggcgtaggcgcgtcgtcggacggatcgggctgggcttcctcggcgaacgccggcgagcggaacgccagaagacagagggcgaccagccctatcagaacgaagaacgcgcgcaagcgacccgcgcgcgaaaccggacaggtaggaacagttggctggggagccatagaagacctcctcgtgtgaaaatgttgcaatagcagcaacagtaaggagaccgtcgccgtccgcagctgaggcatgcgaacggtgttccgctcgtagcggcatcgacaccgtcccgcaacaatccctttagcacgaaaaagtcaaataacgggttaccaacggatgcattccttgttacaatcagctgcacaatttcatagcgtcaccccgttgatacgtcctggatcttgcgagacagggcgcggaaggggcctctggagaatcccgatcgtcggatcgggtgccgaaggggcaaggcgcatcgccgcaagcgcgatgccgctgaaactctcaggcaaaaggacagagcaaagctacctagcttgtcgcgcgagcatgatcctatgctttccttcgcatcctccagaacagccacgtcgtacacgggtttcgcagaagttgcccgaacgaagttggttgaaggaggatcgtggtggaaggcttttttagtatgatcaacgatgggctcgtcgctatagacgacttcatctggggcgtgccgcttatggtgctgatcttgttcggcggcattttgctcaccgtgcgcctgcggggcgtgcagttccggcagctgccgcgcgcgctgcgctatatgatcaagaacgaaaccggcggcgaaggcgaagtcaccagcttcggcgcgctgtgcacggccctgtcagccaccatcggcaccggcaacatcgtcggcgtggccacggccatcgtcgccggcggccccggcgcgatgttctggatgtggctggcagcgctgttcggcatggcgacgaaattctccgaaggcctgcttgccgtgaagtaccgcagcgtcgacaagaagaccggccacgtgctgggcggcccgttctactacatcgagcgcggcatgggcatgaagtggcgctggctggcgaagctgttcgcgttcttcggcatgtgcgtgggcctgttcggcatcggaacgttcacgcaggtcaactctatctccagcgccatcaccgggttcttcgaccccgagaagaacgccacggtgagcatccttggcatggactactccatcttcaccgtcatcggctccatcgtgctggccgtgctggtgggccttgtggtcatcggcggcttgaagcgcatcgcgaaggtgtccgagcgcgtgatccccgcgatggtggttctgtacgtgggtctctcggtgctgctcatcgtcacgaacctcgacaagatccccggcgcgttcgtcaccatcttcgaaagcgcgttcggcctgcaggcggctgcgggcggcatgctgggcgccatcatcatcgccatgcagaagggcatcgcgcgcggcatcttctcgaacgaggccggcctgggctccgcgcccatcgccgctgccgccgctcagacgaaggagccggtgcgccagggtctcgtgtccatgaccggcacgttccttgacaccatcgtggtgtgctcgatgaccggcctggcgctggtcatgacgggcgcgtaccagatccccggactcgaaggcgcggccgtcaccaccgccgcgttccaggcaggactacccttcatccccggcgaagtggtatcattcgtgctgatggcatgtctggtgctgttcggcttcaccactatcctgggctgggactactacggcgagcgctgccttgagtacttcagcaacggctcgatgaaagccgtgaagacgtaccgctggctgtacatcgccgccgtgttcatcggcccctacatgaccgtggccgccgtgtggaccatcgccgacatcttcaacggcctgatggcgctgccgaacatgatcgccctcatcgcgctgtccggcgtggtggtgaaggagacgaaggactacttcgcccgcctggccgctgccggcaacgaagacgagatggcgccgcacctgcccggcgacaactgggacatcccgcccatcgacccgctggacgaccgcctgggcgcggccaactaacctactccgcgcgtcaagcgcgcaacagcagagaacggctcctcggcaaaccctcgccgaggagccgttcttgcatgcgcaaccggttccgcccctatcctgcttgccgttcttcgtcctcccaagcggacgaagaagaccggcgacccttgcgcacaggcttctccacatcgttgagcagttcgaacagctcgcttttgctgtggatgttgaacttgcggtaaatatggttgatgtgcgccttcaccgtgccctgcgacacgtacagaacctcttcgatctcggccaccgtgtcaccctgggcgataagctgcagcacctcttcctcccgcgggctgagattgtacgcgcgcgaaaggtcggacacgcgaatggccatccgcccctcagccgatgcgctgcccatcgggtcgtccttcagcaccacgccccatttcgccgacagcccgcgctcggtgaagaagatcacgacgaacgtcagcaccacggcaaccgccacgccgccgtacaggatagacgtggcttcttctcccaaatgcgccgacgcaccggcgaacgcgagccaccctaccagctcgaccacgtagcggatgccgcgctcgatgccgttgatccacaccgcgttcacgccgaaccggtacgtgatgttgctcatgacgatcatgatgtacatggacagcatggtgtagcccgcatcgtagcacagcgccatgatttgcgcgttcgacccgaaggtgggcataacgaacaggaatccgacgatgaacagcggaaaagccagctggtagatggtgtcgaagttgaaccagcgcgatgcagacagcacgccgaagaacacgagcgccgtgacgaacatcgcgcccagcacgttgcccggcaccagcagctgcgtcggcagggccccgaagccgcccgcgaacgtgcataccgccatcagcaggataggcttccacgggatggtcttcgggtcgccttctttcatggcaggaggcagatcacgctccggcagacgcgtcatgctcgaacgcacgcacgccaggcacacgatgggcaacacgatggagaagaacgcgagatacggcaccgacatgcccatgaacagccacttcaccacttcgcccacgaagatggccatggcgtggtacagcgccacccgcatggggttgagcgagccatagaactcggcccacatgaggatgagcgaccccaggccaccgcccgccgcaagcagccccgcaaccttcaacgccggggacggcaccgcgaagcatgccaacacgatgagggccgatccgcccaccatgcacgcgcccgtggccagcaccgctttgcggttcgcccatagcggcgtcacacggcgcgccgcgaaggccaacgccaaggagacgataccgatcgccccttcgaacaaaaagtaatcgaacaccgatatggttggaaacgcatcgtagcgaaagaacgttgcaagccaagcgcggtagaaccccacgccgaaaaacacgaagggaatagccgccacccgaagcagcacggctttccatcgatcgacgaacccttgttgcgccttctcggtcacgcttctcccctcaatcgccctcccataatacccaagaaagtccagcttgcaagagggttataccgcgggttatgcatttaaccccgacggacaattgtcgctcgaccgcagaacgatagtctgggaacagcgcttgatcagggagtaagcgcctgggatacccgacgccggtgcgcgacgtcggcaacgtaagggaggaagcatcatggaacgtttttctcgtaggcagttcatcaccggcggcgccgtggccgctttgggcggcacgctcgcattggcgggatgcgcgcccagcggctcgtcgaatgcaaaaggctcgaacggcgcaggatcgggcagctccgccggcatcggatcgggcatgggcaagcacgggcagttcgacgtggaggtcatggtcaccgacggcaacttggatcgcatcaccgtcctcaactcgcgcgagacgccgggcatgggcgacgtggccatggaggagctgacgcagctcatcgtggacaaccagacgctgaacgtggacaccgtgtcgggagccacgctttccagcatggcattcatcggcgccgtaagcgacgcgctcgaccaggccggccagaagtcgagcgattggaggaagcgcgacaaggtcacgcccgcgcagaccgagcttcccgcatcggccgatgtcgtagtggtgggcggcggcggtgccggcttcgcggcggccatcacggcggcgaacgcaggcaagagcgtcgtgctgctggagaagatgggcgtgttcggcggcgacaccgcgctgtcaggcggcgagatggccgcgccgggcaactggatccaggtgcaggaaggcatcgccgacagccccgacgcgctggcgaaggacatgctggaaggcggcgacaacgcaggcgatcctgccctcgtgcagatcatcgccgaaggcgcgctggacagctcgcagtggctcaccttcgaaggcggcatctcgtggaagcacgacctcatgcagttcggcggccacaacacgaagcgctccatcatccccatcacgcacagcggcagcgagatgaccacgaagctgacgaagcgcgccggagagatcgacacgttgacgctggcaaagaactcccccgccgtcgaattggtgaaaagcggcgacgccatcaccggcgtgaaggtgaagaacacggtgaccggcaaggagtccaccatcgcgtgcaaggccgtagtgctggcaagcggcggcttcggctcgaacatcgacatgcgcgtgaagtacaacccggccatggacgactccatcctgtccaccgactcggtgggagccacgggcgacggcatcaccatgggcgaggctgcgggcgcgaacctcatcgacatgcagtacatccagacgtaccccgtgtgcgaccccgaaaccggttcgctcttgtacgtgggagacgtgcgcctcgaaagccgtgccatcatggtgaacaaggaaggcgaccgcttcgtcgaggagctggaccgtcgcgacgtgctgtccaacgccatcgtcgagcagaccgacggcaaggcgtacatgctgttcaaccaggcgaacgccgacgagaccggtttgctggtcacgcacgaggacgagtacgagaaccttgaggcgcgcaaggtcatcgtaaagggcgacacgcttgaagccgtgtgcgagcccttcggcgtggacgccgccgaactggcgaagaccgtggagaagtggaaccagtactgcaaagacggcaacgaccccgacttcaacttccgcggcgacttcaacgccatcgaagacggcccctactacctgatggcctacaagccggccgtgcactacaccatgggcggtctgcatatcaacaccgacgcgcaggtcctcgacgacgccgacgcccccattcccggcctgtacgccgccggcgaggtggccggccacaagatgggcacgaaccgcctgggctcctgctcgatgtccgacatctacacgttcggacgaatcgccggtaagaacgccgcagcgttctcggcatagcgtaccaacccctgcgaccttgcgcatcgcgctcgggtccttccctccctggccgcgccctctctccgggcgcggcctttttcaggtacaatatcctcaacgaaatcgcgtcgagttcgcaggaacacggaaggggccagcatggaccagcatctcgttttcgccatcagcagggagtatggaagcggcggccgcgagatcggcgagcgccttgccagcgagctgggcatcgcgtactacgataagctcctgctcaagcgcatcgcggaggagagcggcctcagcggcgacgtggtggaagacttcgacgaaaagcccatgcggccgctgctgctgaaccccaacagcttcttctgcggcaccgacatcgagcacccggtggcctcgcgtatatacaaaaccgaggtggacatcctcaggtccatcgccaacgaggggccgtgcgtcatcgtcgggcgctgcgccgactacgtattggaaggccacccgggtctggtcagcctgttcgtcagcgcgcccatggaagcgcgcgtcgcgcgcgtcatgcggcgcaacaacctgtccgagagcgacgcacgcagccgcatcgcacgcgtggacaagaaccgcgccagctactatcgctacttcaccgacgagaactgggggcaggcgcgaaactacgacttgtgcatcaactccggcaacttggacgcgctgggagcggtctctgtgatcaaaacgttcgtggaagcgcggcagagctagcgcaccagagcgcgtcccgaatcgctgcatccgcagagcacagcgcagaagcggcgtggagcacaagctgcaacgacgaaagcgaccccgtcaccggggccgcttctttacgctgcttgctcgagcgaggccaggatgcgggccaattcttcgggcgagccgaagggacgctcttccttcgtctccacgatgaacacctctcccgtccacgttttctgctggatctgcggcttcgccgctccggcagacgcctgctcagagtctacgaccgtatcggaaccctgcttctcctcggcctcgaactgcttcgtgcgtacgaaatacttcacgacgaagcgatccttatcgggaaaatccgcacgcgagaaatcgtacttcaagctctgcaggattcccgcgatcacctcggacaccggctgagagccttcgatagtcgccaagccctgctcgctgttgaacgtggcacagtcgcccacgtacacggtgcgaacccgctgacgacgcgtgcgctccatcttcacgatgacggcgatggccaccacgatgaccagccaccacacgatggacaaaaccagatcgagcggctcgtccacccggttgagccccaggaagtaccagagccacaggaagaacgccgaggccaaggccagcaggacgaatactatcacgttgcttttcttcatgatgaaacccctattcgcccaatccggcagccaacgtcgcacccgcaggagcgcccttcggcgctatcggcgccgaagcgtcgtcgccgatcgagggagcgccgggagcggggtcgccgcccccggtcaatccgtcttcgtacttcttcagcttgcgcgagaacaacccgcgacgcagcgccacgcaagctccgtacaaggccgtcacgatgatgccgaggatgatgtaccaatgcacccagcaggacgcatggtcatggctcgcaagcggcgtatcgttgtcgccgatctcggtttcgcgaggctcagccagcggcgtctcgttgtcgccgatgaccgcctcggccgcaccctgcagcgcatcgacgatcggcgtgacgacgggcgctatcgggctgtccggcggaacggtgcccggcgtgggcagcggcgtcggagtcggcgaggtcggaggtgtcggcggggtcggcggcgtcacgggagcagctgtgatggtgaaggtgccgttgagcacggcgaccctgtagttcccgttctgcgtgtagagcgccgtcagggcgccaacatacacgcctgcggcttcctcgccaccaggacgcacgtagttgatatcgcccagatccccctcggccacaaggccttcgaccgtgccgctgaaggcaggatcgtcagcgccggcaaccttggaagcatcggcaacagcgatggtcacgggagcagggttgatgacaacagtggcacttacgggcgcgctttcctcataaccatcatgcgtcgcctttacatacaccgtatatgtaccggcatttgtgaactcgggattggcatccgaccacgtggaaccgtcgacagagtatagcaacgcggagccgtcgacgctggcctcggcgacaaccgagacaggctgcccgtcgtaggtcttggtcaaacctgtcgcgtcaatggtaacgacgtttccaccggcaggcacgatagagaagttgcccggctcgacggtgtaggtgtagttgccgttcaggttgccgaccgtcgcagtcagcacatcgctgtaattgccaacctcttcatcgatgttcgtacgactgtaagctatgtcgcccagcaaatcatcgccaaacaggccctcgaccgctcccgtaaagcccggatcggcctcgccgtaagccttcgaagaatcgttcaccctgataacggcaggtgcaggggtgatgttatacgcacgctccaccgtacccatgtagttgccgatgcccgtgatggtaacggtcacaacgccaacgttcctgacgtcctggctgtaggaaaccgtgtaatcggtacccgtaacaagcttatggttgttcctatcgaacaccgaagggatccacctctgttcttgtccgttgtactgcacgtcgtacggattgttgatctggatgcccgtatagctcggatcatccggatcgatggaggcggaagtaacggtcagcttgccaaccgtatagacaacgttgtagttagcggcaataaacccttcgccaggttcgacaacaatggtgttatcgatcggaccaccgatatcggtgatagaacctgttgcccgaacgctcgcctcagtaccgacgaaaccgtctccgcccactgtcacatcgggaagttccagtgccgttccgtcgtaaatcttggtggcgcttccagacgcgagcgtaacttcgcgcggcaggatctcgagctcgccgtcctcggtgtggaccgcgaactcgctggtcacgtcgttgccggcggggtctttgaccttgaagtcgccggagacgttgttggtgtagacgcccgcggcgacctcggccgggtcctgggtctcgtagccggagaccgcgtactcgacgtcgtcgatgacgaagcggtcggtcacgacgcccttggcggacttctcggtgccgtcgtagacgttgccggtcgaggagttggccttgagggtcacctcgtacttggcgtcgcggttggtcaccttgaggctgccgtcggcggtggcgacgtcgtagttgttggccacgtcgacgtcgccgtccttgacggccacggactcgaccgtggcgggcgaggcgcccggggcggtctggctgccggagagcgccacgtcggcctcgtggccctcgaccaggccctcgccgccgatgtcgtagccggtgtcggcggcggtcagcggcttgccgtcgtactgcttctcgccgcccttggcggtcacggtgacggggcgcttggcgatctcgagcgtgccgatagtctcctcatcaatgaagtaattcgactctttagccgagccactccaatcgatttgatatgcattatcggaagttccgacatcggtacgacttccgataacaataagggtggcggtctcatcattgaccaagcccgaaagctcagcgccttttgtagcaatcagcggagcgccatcgtagagcttagaatcatcgggcgtaacaatcgaaatcggggctttttctacaatcaaagtaggctcgctagcttcaaccacttcgaattgatttgtaacgtcggagccagacgatttctcaaaaatgcgcatcccagaatagtctatggtgcccttatacgtccccacgtcggtgccctgtgcaagcgcttgtacgccagaaaccgtatagctacccatgtcaagtccggaaacagtaaacccagtatagctctgtttcgttccactgtaggttttcttcgtttcatcgccgagaagcttgatggggatgacgccctgccattgcgcgacaagcgtaacgtcgcgatccggcataatcatgccggaaacaccagcagaataaacgtctcctgtatctttatctttccatcccgtaaagacatacccatctcgcgagggattcgaaatgaaggagacacgggcgcctacttgctgaacggccgttttgtcctggatagtaccatccgaaaaagcgccaccgttggcttggtacgtcaatgtcttcgtgttggcgatataacgcgcatagaacgaggctgacgatgacggggaaacgctgtcaggagctttagtggtatagctttgatcgagataccagccgtcgaagacatagctggctccattatggttgacacgagaattgtacgtatacccatcggtctcaaaagagggggcatccgtattaactgtgctattgagcccgaacgcaacatttttgtcatgagaggtggagttggtgaccacacttccatcaggtttttgcgtgaggtatgtcacgccgatggtcgtatccttattgatgctcaacgcaccgtcggtatgcatcgacttgccataatcaaaggtgttataccggtaatcgaccgacgaacccgcaacgctcagcgtagtccagtctatggtatacgtccaatcaggagagtaatctgcgtaagctgccctgataccatttcggatggcctcgtcggaaggagtggagacgatataatcagcaatgctgaaatttgacccgtcataccagcggtcgccactattaaacccatcgggaacgatcatggttccttcaccggcatacatatagtccttggcaaccgtgctggtgttcgaacgcccctcaagaacgaaatagaaataggcttgagaagtgaatacagcgtagtacgacacatcttcggttacggcaggcagctcgccctcagtcaaataatttttcgagttgggagctgtggcccaaccaacaaactgcttgtactgccaatcgcctgcacgattaggagtccctccatagctgggcacctccccgtctcgcaccttcgtgcttttggaaacatcgccattgacgtaccacgataccgtgtgcttgacgaccgacggaacgacgtgcactttggcggtgtcggtatacgttcgattgcccaccttgtagctataggtaatcgtggcaacacccggactcacaccgacgatgtctgcgcgattctcctttgagaaagcgactttcgccaccgatgcgtcagagctagtccaagagtatcctttcgagttccacttccgctctccaagagccttaatcgtttcccctacctctattgaagaagaatccaacttgatgcctgtactggcataattgcttcccgtggccacataaatagtaaagtgatccacgtcgaagctttggacggcggggtcggcttggcgggcgccgatggtctcgacttgagacgcatcgtcggacacgcggtacacgcccacctcttcgccctcgacgttcgcgtcgaagaagcagacgttcagagcgccattgggctggatctcgttgccgtctttgtcgagcagcgtcacatcaatggcgatcgcatcctcgagcaccttgccctggctctccactctctcggccacggcgtccacaacgtcctgacgctcgatccgcgtcgcctgcacggtcgcaccttcgggcagcacgccttcggcggcggttaccttcaccagcacgttgccggcttgggcatagccctcgaacgccgggttgctcacgtcggcttcgacctcgacgacgtcttcgtcggcaacgggggcttcaggctcatcggtctcgggctcttccgatttcggctcctcgggttcgcccttttcgtccgcctcgcccggctcgatcttggtatcgctggtgataggcgtggtttcaacttcgggctcatcggagacaaccgcagcggcgacaacggacacgaccaaggtgctgtcgacatactcggccgcgatgctagacacgccgtcctgggtggtgacgggcacgtcggcgttcgcggcgttcttcgcggtgatggctcccagctcgaagccggtgtcggcgcttgctgtaaacctcagctctttgtgcagttcggtggtcagcatcgtgccggagagcagctgatccttcacggacacgaacgcgttctgagtttcgaacgttaccacggcttcgtcgaccgtcgtcgaaacaagaggctgggaaggcgtcgtcttggacgcatcggcatccttggccgcagcgctctcgccatgctgcacggcctcgccgaccgcttccttgtcggactcgccgaccacctgatcggtgggagcggactcggttttcgaaccgtccttctgaccttcgttgcctgcgaacgccaggatgttcgtcatcgacatgaccaacaccacagacatgaggacggcaaggaacttgccttcgaacgtgtttttaagatctagcattttctccaacatacctatcacccagactttcgccagctacggaaggatcggctgttcgtcgcgaaccgcttcgcagtcccgatccaagcacgtagacgcactgcgcttgtcgatgagctcatacgttgtcgaatatgctgaaaactcgtctatcttatggtaggtgacagacccgacataccacgttctgtaatacagaacaagggtatagcctataacccaatctatattctaccacgttgcgaccccaaatgctctagtagtggcctcattaaaacaccaattgggcaacgcgttaaccaaacccgcattctatctggccgtttaagaaacgagcatctgcatctaacgtagcgggaatcgctttttcgtgccaaaatcaacagtatccggtatgtgcgcaaggaggggtataatgccctccgagacaatgaatcgtagagagggcgcatgcacctgctcggcatcacagccgctggacggaaacaacgcgacggagcttgcacgccgcaacatcggcgcgcccgcacgctgcgtgcgatcgtccgcagcgcgtgcgcagctgttctggcgacgacgctcgtcgctctgggaggatgtagcgaaaacgacgcagtcggcaaaaccacgaacccctcaggcggccagagccagacgagcggcccggcctacgagcggccggagcttgcgctctccccgttcgaccaagcggcggccggcggcgaaaacggcgtgagcatcgacgcttcgaacctggcgaaaggttacgtggccgtctcggcaactgcatcaacccggctcaaatttcaaatttcgtttgaaggttcggaaacgcagtattatttcgatctgcccagcgacggcacgcccatctcgtgccctctcgttcaaggcagcggcgcgtacacgttcaccgtctgggaaaacactaccggacaacggtattcggagctgtactcgctcgccgaccagcctgtgacgctggctgacgaattccaaccgttcatccgaccgagcgtctactgcgagtacgacgcatccagcaaaagcacgcagctggcgaacgacctgtccgccgacgcccagaacgagggcgacgtggtgcgcgggatctacgactggatcgttgaaaatatcgcatacgacgaggacaaagccgctcggcttgccgatgcgacgggctaccttcccaaccccgattcgtgcatcgccgacggcgcgggcatctgcttcgactacgcatcgttggcggccgccatgctgcgcagccaagggatcccctgcaagataatcaccgggtacgtatcgcccgataatatataccacgcttggaacatggtgtatattgacggcacatgggtcgatgcccatatcgatatcaagcagaacacgtggacgcgtatcgatacgacgttcgcggccggaagcgggtcgagctacgtgggagacggaatcgcgtacaccgacctctacacgtactgattatgacgatacacgtagcagcacgagacaaaaggagcgcgtaggacatggccacgaagatgcttgagagcagcgctgtttccgccttctgcgaaagcgtcgccgtcatgcactccgccggcatccagatggacgaagccgtctttctgctgggcgagaacatggaagacgccgcgttcaaacgcgcgtgtgacgacgtatacaaagaactcatcgtcggcaagcccctggcgctcgctatgggcgattcaggatgcttcccctcccacgtcgtcgacatggtgggcgcaggcgagcacgcgggccgcttagagaacgtgctgtggagcttggcgagatactacgacgaggaagatcgcctgtacgccaagataaagaacgcgatcgcctacccggctgcgctgctgtgcgtcatgtcggcaatcctgctgttcaccgtcatcgtgattctacccgtgttcgtggatgtgtaccatggcctcaccggcaacttgacggccggctccttcggatacgtgaacgcttccatcatcataggctggatcgctctgggcgttacgctgctgtgcaccgtgctcgtagtgctgggcgtgctggccggccgctcggcggcagggcgccagcgcttgctgcgcctgttcgaaaaggcgcccctcacgcgcggacctatgcgccagatggccgttagtcggttcaccgcggcgctcgccacgttcgtagctgccggcgtggacacc

SEQ ID NO: 9235 - DNA, 331 bp, Unknown
  gut microbiota DNA sequence
attgctgcacctgttcgaaaaggcgcccctcacgcgcgggcctatgcgccagatggccgttagtcggttcaccgcggcgctcgccacgttcgtagctgccggcgtggacaccgataccgctatggagaaggccgtggccatggtggaccatgggaacttgaaatcccagctggaagcggtgcggatgcagatgacggatcccgcccaggccaagagcctcgcgcaagccatcttcgacaacaacgtcttcgagcccatctacgcccgcatgctggtcgtgggcacgcgctctggcagcttggaaaccgtgctggcaagcctgtctgacacg

SEQ ID NO: 9236 - DNA, 436 bp, Unknown
  gut microbiota DNA sequence
tcccaggccaagagcctcgcgcaagccatcttcgacaacaacgtcttcgagcccatttacgcccgcatgctggtcgtgggcacgcgctctggcagcttggaaaccgtgctggcaagcctgtctgacacgttcttcgacgactctatcgtgcgcctcgacggtcttatcgacagcgtcgagcccacgctggccgcgttcctcaccgtgggcgtgggggctacgctcatcgcggtcatgctcccgctcatcggcatcatgggatcgatcggctagtcccatgtaccacgagctgaccaaacaggaaatcaggaggcgcacccgcaagcgcatggccggattgctcgccatcgtgctggtcgtcttactcgtctggctttcctcgaacgccatcggagcatcgctgcgcgagcaaggcgagctgtcggtgcgcaacgcc

SEQ ID NO: 9237 - DNA, 455 bp, Unknown
  gut microbiota DNA sequence
taagcgcatggccggattgctcgccatcgtgctggtcgtcatgctcgtctggctttcctcgaacgccatcggagcatcgctgcgcgagcaaggcgagctgtcggtgcgcaacgccatcttgaacagcgcgaagcagtgctgcgccatcgagggggcatacccctcgtcgctcgcctatctcgaggagaactacgggttggtcgtgaatcgctccgactacgcgatcacatacgaggtgttcgccgacaacgtcatgccgaacgtcgtggtgttggcgaaatgaggggcgatatggtgcaaacgctgatccaggcgacagggtccaaccgcagctccgaagcccgcgatggaaaggcgggcggacgggcgttcatcacgctgctgttcgccgtcatcgcgctgttcctgctgctggcgcttctggtgggcacgagcgcctaccgcgcagcgaacga

SEQ ID NO: 9238 - DNA, 181 bp, Unknown
  gut microbiota DNA sequence
cacagcgaactcgtcgtcgttcaccaggtagtagtcccattctttgatgcggcgcttcggcgccttgatacggtcgcgatcgtacgcgcgcagaagcgacgtggcccatccgcattcggcgagcttgccgtcgaggtggtgcagcgggccttcggtcaaacgcgtttcggacatggttttc

SEQ ID NO: 9239 - DNA, 377 bp, Unknown
  gut microbiota DNA sequence
gggcggcttcgggcgcaaaaaagcgcccggggcggagtggccgtcccgggcgctcgctgcgcttcgcttgctcgcttgcccgcgttcgcgcttacgccttcaccgccccgtacttcgagcggttcagcaccagcacagccgcgatcatcagcacggcgcccacgacgagcgcgatccacgggttgcccgtgaagccggcgatgatgtagcccaccagacacacggccgccaccaccgaagcgtacggcagctgcgtagccacatggcgcaggtggttgcactgcgcgcccgccgacgacagaatggtggtatccgaaataggcgacacatggtcgccgtacaccgcaccgcccagcgtggcgccgatggccacgagg

SEQ ID NO: 9240 - DNA, 2324 bp, Unknown
  gut microbiota DNA sequence
ggccacatggcgcaggtggttgcattgcgcgcccgccgacgacaggatagtggtatccgaaataggcgacacatggtcgccgtacaccgcaccgcccagcgtggcgccgatggccacgaggaacagcggatcttgcgccgggaacacgccgatcacgatgggcaggatcagcgcgatggttccccacgacgtgcccatggcgaagccgatgaacgccgccaccacgaagatgaccaccggcagcagagccagccccacgccgatgctgttcaggaagccgctgacgaactcgcccgtacccagcaggtagcggcacgtgccgcctaggctccatgccagcacgaggatcatgatggcgcccaccatggagcgcacgccctcggccacgccgtccatgtaccccgacagcgtcatcagcttgcgcggcaggaacatggccgccgtcaccaccagcgccacgcacacgccgatgcacaggccgaacaccggattctcgcccacagccgtggcgaagtcgacgccctggaagaagccgcccgcgtacagcatgcccagaatcgagaagatgatgagcacgatgatgggaatgatcaggtcgaacacgcgtcccttgtccgagatggccatgcccttgaactcttcgacggccaccttcgcagcctcgtccagctcgtcttcctcggctacgatggtatccagcttcgccggcagcgcgtcggccgcgttcggatcggaaatgcccaccgtcgacatcgactcgagagcgctgtccttcgacggaatgcgatgctgctggtcggccggcttctgcacctcggcctcggcaacgcgcatggggccgaagtccttcttggtggcgcacatgaagaagacgaacacgatggtgagcagcgcgtagaagttgtacgggatggactggacgaacgtggtgaaaccgccttcgcccaggtagccgcctacggccacggcccacgacgacaccggcgcgatgatgcagataggcgccgcggtggagtcgatgatccatgccagcttctcgtggctgatgttgaatcgatcggtgacggggcgcatgaccgcgcccaccgtgaggcagttgaagtagtcgtccacgaagatgatgatgcccagcaccgcggtgagaatctgcgccatcttcgcgttcttgatgtgcgtagacacccactcggcgtacgcgcgcgatccgccggcggccgcgatgaccaccacgagcgcgcccaataacgcaaggaacagcagcagcgccccgttgccggctatctgctcggccatcatctgcggcaccatggtgaacgaatccaccagcggctcgacgcccacgccgttgagcgagaactggtagatcaccatgcccacgaacacgccgatggccagcgaggaatacacctccttcgtgatcagcgccaaacccagcgcaagaatcggcggtatgattgaccatacccccgtgctgatgaggtcgaatccttccatatgatccccttcgtcgtgctattcgccgaacggcatgcacgtggttccgccttcaccctcgccgcgcttctcccaacgcgatgcttgaggacgcaggccgaatcgccgccgctcggcaccagtttcctaagtatacaaggacaagcgcgcccgagggggcgaaaacgccgatgttttcgatcgacgaagcacgcgagcacgaacgcaaggagccgcgcgtgtcgggcgcgggtgcgagcgcgaacgcgagccgcgcgacgtcgggcgcaagtgcaagcgcgaatgcgaggagccacgcgtgtcagacgcaggtgcgagcgcgacgcgttaggccgtgcgacgtcgggcgcgggcgcgaagcgcgttacagctggaacagcgcgatggcggcgaaagggagccagaacacgaagatgaccacgaacggccagcggtgggcgttgctgacggccacgtattcgcggatgaacgcggtgggccagaagtagcgcgcggtcctgctgcccacgccgtcggcggccagcccgatcttgtgcgcgtactcggccgtgcggaacacgtggtaatcgctggtcaccactgcggcgcggtacgcgcccgcgcccgaccgcgcgtccatgatggctttggagttgcgcaggttctccatcgtggtggtggagcggtcctcctcgatgacggcatcggcgggcacgccgcgctcctcgacgaggtacgtgcgcatggcctcggcttccgacacctcctcgtcggcgccctggccgcccgacgcgatgatgacggcgcggcggtggtcggcctcccatagctcgacggccttgtccaggcgc

SEQ ID NO: 9241 - DNA, 985 bp, Unknown
  gut microbiota DNA sequence
ctccgataccgcctcgtcggctccttggccgcccgacgcgatgatgacggcgcggcggtggtcggcctcccatagctcgacggccttgtccaggcgcgcggccagcaggggcgtgggcttcgtgcccgacaggccggcgccgtgcacgacgatgtaatcgtaatcgcggcgcttaggcagacggcggtacaaccacgaatacagcagcagggccgcgaacgtgaacgccacgtacgagccctccatcagcaccagcagcgccaacgccagcacgatgggcggcgcctggacgaacagcagcaccgggccgcccacgcacgccatcacgacgcaaagcgccagtaggcccggcagcagatgcgacagcgacaggccttcgcgcttcaccaccacgaacgtgttcgccagcaggaacaccaccagcgccaccgtgccgaacggaatggccgccaagccgatgagcaccagccacggcagctcgaactggatggacagcccgtatagcgcgagcaggcacagcagcaggaagtacagcgcgttgcgaaactgccgcggctccttgcggtagttcttgacgaacagaaacccgaacaccaacgcgggaaagtatatgagagcaagctggaagatcatgcgcgcgctttcacgaaagccgatactggctgacagtataccgcggaacgcaagccaccgcccccttcgctcccgcgaggcgcgagaacgcagggacggaacgagcgcagagtactcaggggctggaagttccgagtcgcgagtcgaataggaatcctccctaacccccaacagcacacaagccatcgcgcggcgcgctgatgcgagccgtagacggagcgcggtgccaccacccaagacgaacgggtgtttcatgtgaaacacccgttcgaaccggccggttcgacgcatcgccctcggcagcgttgcgcaccgagttatccgcgcagtcgaaggctcccccggatggcga

SEQ ID NO: 9242 - DNA, 665 bp, Unknown
  gut microbiota DNA sequence
gacgatgcagagcgccagcaggcccggcagcagatgcgacagcgacaggccttcgcgcttcaccacgacgaacgtgttcgccagcaggaacaccaccagcgccaccgtgccgaacgggatggccgccaagccgatgagcaccagccacggcagatcgaactggatggacaacccgtacagcgcgaacaggcacagcagcaggaagtacagcgcgttgcggaactgccgcggttccttgcggtagttcttggcgaacagaaacccgaacaccagcgcgggaaagtatatgagaacaagctggaagatcatgcgcgcgctttcacgagagccgatactggctgacagtataccgcggaacgcgagccgccgcccccttcgctcccgcggggcgcgagaacgcagggacggaacgagcgcagagtactcaggggctggaagttccgagtcgcgagtcgaacgagaatcctccctaacccccccccaacagcacacaagccatcgcgcggcgcgctgatgcgagccgtagacggcgcgcggtgccaccacccaagacgaacgggtgtttcacgtgaaacacccgggcgaaccggccagttcgacgcatcgccctcggcagcgttgcgcaccgagttatccgcgcagtcgaaggctcccccggatggcga

SEQ ID NO: 9243 - DNA, 214 bp, Unknown
  gut microbiota DNA sequence
catttgaaactcgtactcgaagtcggtgattgcgcgcaggcccttgatgaccacggtggcgtcgagcttcgcagcaaggtcgacgagcagctcgtcgaacggctcgacgcggacgttaggcagatggctcgtcgcccgacgcaccagctcggcacgttcttcgagggagaacaggggcttcttcttcggcgaggccgccacggcgacgacgacc

SEQ ID NO: 9244 - DNA, 451 bp, Unknown
  gut microbiota DNA sequence
gtacctgcacgtcacgcagcgctgcaacctcgcatgtgcgggctgctactcgctggacgagcatcgcaaccgtctggccgacgcgcctttggccgacatgaagcgcgcggtggaagggcttgccgccgccggattgtcgcagctgatcatctcgggcggcgagccgttattgcgcgaggatcttcccgacatcgtggagcatgcgaagcgcgcctgcggcatcgcgtcggtcaccgtgctgtcgaacggcacgcgcatgaccgaggaagcgcttgagcggctggcgccgaacgtcgattgcgtgtcggtgtcgttcgacggctgttcggctgctgcgccggcgtacatcaggagcgagcagcgcttcgacgagctggtggaagccgtgcgcatggtgcagcgtgcgggcatcccggcgcacatcattcccacggtgcatgcgaagaacgtg

SEQ ID NO: 9245 - DNA, 178 bp, Unknown
  gut microbiota DNA sequence
gcgcggccccacgaggtcgagacccgcctgcgtgcgccacaggtggaagcactccaggcccacggccagcacgcgcttgccgtacttcagcgcgtcggtgggaacaggcgtgaacgtgtcggggtccacgaggcagatgaggtcgggcacggtggccttgatctggccgtccaccacg

SEQ ID NO: 9246 - DNA, 192 bp, Unknown
  gut microbiota DNA sequence
ggggggtgaagtcgtaacaaggtagccgtaccggaaggtgcggctggatcacctcctttctagggagacacgatacgtgtccggaggggtcgagcgagagctcccccgcctggaaacaacaacaatctctttcgggtcccgtcgcgagggtccgcctggcctcttcgcccgctgtctcagcatccggcttcc

SEQ ID NO: 9247 - DNA, 261 bp, Unknown
  gut microbiota DNA sequence
ttttcgccatccggggcgcgacgggctgcacggaagaccgtcagacggaacagcgcgacccttgataaggagtctcttcgggcgcaatgcgccaaacaggcggtcgtgaccagcgcttcgcgcgatacgctcgcgtagcaagccggtgcttcatgcgagacataggcggcaaacagcttccgagatgcgagcttcgctccaagaacacgtctcgttcgctgaagcgtgttcttggagcgaagcgccctctgccgtcccgca

SEQ ID NO: 9248 - DNA, 566 bp, Unknown
  gut microbiota DNA sequence
cctcttcgggcgcaatgtgccaaacgggcggtcgtgaccagcgcttcgcgcgatacgctcgcgaagcaagccggtgcttcatgcgagacatcggcggcaaacggcttccgagatgcaagcttcgctccaagaacacgtctcgttcgctgaagcgtgttcttggagcgaagcgccctctgccgtcccgcagactttgagacgacagaggtttcgaagcttcggctcagaactactccgcttccagctcctgctcgtattcgcggtcgatggctccctcgacgtgcggcgggtcgacctcgaactcaacgcgcttcgtgaacaagctgaccaccggcacgatgatcagcgacagcaccatcgcgatggcgccgcagttgatgggcgacgcgatgaatgccgtgcccacgaacccggcgatcatgttgcccgtggtcagacccacgcccacgatgaagctggcccacacagccggacgcgacacgcgacgcgagtacagcccccagaagaagggccccaagaacgaaccggccagcgcgccccacgagatgctcatcagctgtgcgatg

SEQ ID NO: 9249 - DNA, 924 bp, Unknown
  gut microbiota DNA sequence
tgtgaacaagctgaccaccggcacgatgatcagcgacagcaccatcgcaatggcgccgcagttgatgggcgacgcgatgaacgccgtgcccacgaacccggcgatcatgttgcccgtagtcagacccacgcccacgatgaagctggcccacacagccggacgcgacacgcgacgcgagtagagcccccagaagaagggccccaagaacgaaccggccagcgcgccccacgagatgctcatcagctgtgcgatgaacgtgatggacgagttgtactgcaccagcgcgatcaccgccgagatcacgatgaacaccacgatcagcacgcgcatgtacaccagctgttttttctcgctcatgttcttcaccacgttgtctttcagcagatcgagcgtcagcgtggacgacgacgtcagcaccagcgatgacagcgtggacatggacgcgctcagcaccagcacgatcacgatgccgatgagcaggtcgggcagcgtggacagcatggtgggcatgatagagtcgtacaccggcgtgcctgcggcggtcatctccacctgatcgccgtacaggcggccgaacccgcccaggaagtagctgccgccggccaccaccatcgcgaacacggtggagatgatggctccctgcttgatggccgggccgcttttgatggcatagaacttctgcaccatctgcggcaggccccacgtgcccaggctggtcagcacgatgacgccgatgaggtcgggcaggttcggaccgaagaagctgacgaagggccctgccatctgggaatcctcggcagggatgagcgacagcgtggcgatggcctcggtgaagccgccgttattcaccaacaccgccacgatgacggcaacgatgcccagcagcatgacgatgccctggatgaagtcgttcatcaccgtggc

SEQ ID NO: 9250 - DNA, 3666 bp, Unknown
  gut microbiota DNA sequence
tcccaggaagtagctgccgccggccactaccatggcgaacaccgtggagatgatggcgccctgcttgatggcgggaccgcttttgatggcgtagaacttctgcaccatctggggcagaccccacgtgcccaggctggtcagcacgatgacgccgatgagatcgggcaggttcggcccgaagaagctgacgaacggcccggccatctcgctgccctcggcgggaataagcgacagcgtggtgagggcctcggtgaagccgccgttgttcaccagcaccgccacgatgacggcaacgatgcccagcagcatgacgatgccctggatgaagtcgttcatcaccgtggccatgtagccgcccagcaccacgtacacgcaggtgataaccgccataccgatgacgcacacctcgtagggcaggccgaacgccatgccgaacaggcgcgacaggccgttgtacacgctggccgtgtacgggatgaggaacacgaagatgatggccgcggccgcgatgcgcaaacccttcgactggaaccgcgcgccgaagaactcgggcatcgtggacgcgcccaggcggtgcgtcatctcgcgcgtgcgcgggcccagcacccaccaggccagcaagcttcccaggatggcgttgccgatgccgatccacgtggcggccacgccgtatttccaaccgaactgaccggcgtagcccacgaagatgacggcggagaagtagctggtgccgaacgcgaacgcgctcaaccacggccccacgttgcggccgcccaggatgaacccgtcgacgcttccggtgtgtcgtcggcagtagatgccgacgcccaccgccacgccgacgaaaataagcaccatgcatatcttttcgatcatgagtcttcctatcgattcatgcgcgccgcccgtcggcgggcgctcttccccaagaaagcgagccccgttttgcttcgtgttccgcgaccggatgtttcacgtgaaacatttgttcctttgtcgcactgcaatgcgatgaattgtttcacgtggaacatcgcgtcgggaagggcccgcgcggtggcgcacatgactttgccggaacgcaacacccgtcggcacgacgccgacgaagcaccacgggcaaacccatgtgctagagatatcgataggaataataggaaacggcacggtaggcggttcgaccggccaggggcgcgtcagaggcgtcggccgcacgatgggcgacagcaccgacctcgtcgattgcgctggtcgtcgcggcgacatcggacgcgtggggcgaagccggctgcacagcgaataccgttgcaagcgagtccgcgggacgcggagcgagggagcggcacacagccgcgacggcgagctgaagctgccagcgctgttcgacggcggtatgtcccttcgcggaatgcatgcgcatactctaccatagtggagcatgggatgtgacggaaaagaagaccgggcgtaggaagcgtcgaggtgggaggttcgtcctcgcgcctcgcgttcgcgcgagacccatcgcaatacgaaccacatggactctaattcacaagggattgctttgtttttacgcttctccggaccatacccaccgccacgcaaagcaaagaaagcgagcatgcgatgttatggttcaaatatgatttatagcgtaatattcttattaaaacgcgattaacagttctacgatacatcgctcaagataggcctcaggcagatcggaaggctcccttatgataacgcgacgcaataacacaaccttgttctacgcgacaacatttgaagcctatccggacaacgccaaatttgaaatttggcccgtcatcgtagatgtctttcaaaactggatagtcgagaaagaacgacggcagagaggcaaccgtacaccgtctccagccagacagatagacttcgatatctccaccgctttgaagtggaatcagggtatgagattgagcgcctattcagcattgacacttcgtggtgcaatggctagctcgctcgaaacatggggatcccgcaaaggcacaacatcaacaaaaatatcgagcagtgtcattcttggagaaatacggaagtcattagagccgtgggtctcaaatccttccgacgatttcatgccgctaagatccgtccgcctctcgaaaagcttcgcacaggggacgatggatatcgacgctccttcttcctcgttgacaacaagaatcatggaaggggatcgcataccaaagcactgggctatggactacagcgagcaagactcggaaagctggtggcgcacctggcacacctgcgtcgggataacagaatcgagcgtaggcgtatacagcgtaaccgtgcaggtgtcttacagcatcgatccaacctatatgcgatccgatgttaaaacccctccgcgcaatgttcctatttgcatcagaaaactgctcgacaccgaggggatagcgtgcatatcgggcgaggatccccttgacggaaacgccctcttcattgacaagtgcttttacggacaaccttatactttcaatcagttttacaacgatctcacaaagccaatcagaaacgtgccgcttgtggccgtcacatcagacgacgacggcgcgtaccccgtcaatcctgatgaacttgccagaaaactgacgggcatcgccttcgtagtcgctttggacaagagcaacaaagaactagacaaggttcttgaaggaacctttttcgaccgcggttcacggaattacgcctaccgaccgcttcgtcattccattcaggtatatttcccaggtctcaatatggacgaccctcgtgatgcaaagcggcattatcgcttttcatccgaatggatctctcggttttcgggatctatatgcgagagtgtcgccagcgatgtcatcgctggttccgttcgcgcattttcccagtcagacaaagtcgtcgcgtgctgtcaagatattcagaacgcaatcgacaaagcaaggcgtgacgagctcgcaagcagatacagggaagggcaagggaaagaagagcgaaacgccgagcgaagcaagctgcaagctcaatacagcaaggcattagatgaacttgcccgcactcaacgcgagaagaatgcgagcatcgaagaaatcgctcagatgagccaactcctcgatgagtctatggtgacgatcgagcaaaaggaccaagaaatcgacgatatgagcgaatacacgtcgttgctagaaaaagacattgattccaaagagaagaaaattgcgtcccttaaacaagagcttgatagtgtttgggatatcgctcatgaaagcgagcaattgcagtggcgcgtgaaatctttgacagagcagctccaacggaaggaacccacctcaaacgatgcatatcccttggaaaaaatggtgagccttccttcttctgttgcagatgcacttcaacttgccaccgaagccttcccgaaaaaaatcatcgctcttccggaagctgtgcgatccgcccaggcacatgcttcgggaagcgcaaatgaaacctggcagatcctattgggccttgcaacagttctacaccccctctgcttttcggataatcctgaaaaagatgggtcgatcaccgacacatacaagagaatgacggggtacgacctttcgctaagagagtctaaagcgaccaacgacg

SEQ ID NO: 9251 - DNA, 2630 bp, Unknown
  gut microbiota DNA sequence
gtcgaggaaaacgcttttgtttctccctgcgcccgcgagttgcggtaccataccgtgcggcttcgcaggggatgcgcgacgaagccgcgaccaggcagggaaggaaccaggtgcgatctatgatgcaggacgaaatccaaacgctcaggccggatgcgctgtcgccggctgaaatcgcggagaaggccgagaaggtcggcgaggcgaaggcggccatgccgaaggcgaagtgcttcgcgtccgcgatgctggccggggccttcatcgcgttcggggcgctgtacttctgcgtgtttttgggcgacccctccatgccgttcgcggtgcagcgcgttgtgggcgggctttgcttctgcctcgggctggtgctcgtgctgtgctgcggcgcggagctgttcaccggcaacgtgcttctggtatgcgcgaaggcgtcgggccgcatcggttggaagcccctgctgggcaactggctgctcgtgtggctgggcaacctcgccggcgcgctcgtcgcgctcgcgctcgtccatttcgcgaacgtcgccgccatgaacgggggcgcggtgggcgaggccttcgtcagcgtggccgcgggcaaggtagcgcccgattggacgacgctgttcttcaagggcgtcatgtgcaacatcctcgtgtgcctggccgtgtggatcgggttctcggcgcgcaccgtcgccgacaaggtgctcggcatcctgctgcccatctcggcgttcgtcgcctgcgggttcgagcactgcgtggcgaacatgttcttccttcccatggggctgctgctcaactcgatgggagtgggcgcggcggacgcggtgacgctggtcggcatcgcgacgaacctgtcggcggccacgctcggcaacatcgtcggcggcgtcgccgtcggcatggcgtactggttcgtgtaccggaagaaggacgcgaaccggtagggatttccccgccggcctttcgccgataagccgcttcgcgattgcggcgggcggctgcgatacggtatcattaccgcgtcgcttcgcattggcacgattctgcgcgggtgccatttctgcatgcaaggcgacgctccatcatcgcgcacctcatcgcgtcccgcatgcgcatgcgcgcgtccggcggcgcggcaccgccatttctgcaacgacaaccgaataacatcgcaagcttgctatcgactggtatcgaagggggccttcatggctgactatcaggcaatgtggaaagacttgggcatggatctggagacgcacgaccagctgtgcgccgtgctgccgatggcgttcggcgacacgtacctcacgcaggagaaccgccctgagaacatggcgttctacgacttcgtggtgtcggagatccacggcgtgcgccccgcggagctcatcgagctgcaaaagcagggcggcaaggtgttcggcacgttctgcgtgttcgtgcccgacgaggtggtcgtcgcctgcggcggcgccgtcacggggctgtgcggcggctcgcagttctgggtgcccgaaggcgagaaggtgctgcccagcggcatctgcccgctgatcaaggcgtcgctgggcgcgcatttcggccggacctgcccctatttcagcgtggccgatatgtacgtgggcgagaccacgtgcgacggcaagaagaaggcctacgagatcctgggcgccgacaagaagacctacgtcatggacgtgccgcagatgaagcgcgagaaggacgtcgcggcttggaaggacgagatcgcgctgttcgccaaagaggtggaggccgagacgggcaacgagctgacggccgagaacctggcggccgccatccgcaccatcaacgagaagcggcgcgcgctggcgcgcgtgttcgaggcgcgcaaggccgacccggtgcccatcagcggcaaggacgccctgctcatgatgcagatcgcgttcttcgacgacccggtgcgctgcgccgagacggcaaacaagctggccgacgagctggaagcgcgcatcgagcgcggcgagggcgtggttccagccggcacgaagcgcatcctgatcacgggaacgccgctggccatcccgaactggaagctgcaccatatcgtcgagacgagcggcgccgtggtggtgtgcgaagagatgtgcacgggcacgcgctacttcgagaacgaggtggacgagggcgagggcacgctcgacggcatgttccaggcgctttccgagcgctacatgaagaacaactgcgcgtgcttcacgccgaacccaggccgcatcgaggacgtggtgcgcatggcgaaggagtaccaggtcgacggcgtgatcgacgcgaacctcaagttctgcacactctacgacgtggagaaggcgccgctggcggacgcgcttgccgaggagggcatcccgtgcctgggcctggagaccgactacgccgacaacgacgccgaacagctgcgcacgcgcatcggcgcgttcatcgagatgctggacgcgtaaggccatgcaacaagacgctgccgataccgtgaacgagggcgcacgccccgaggattgctatatcctgttctcgagccataccgacggctggcgtctgtacgagctggcgcgcgacgcgggggccaaggcgaggatctcgcccac

SEQ ID NO: 9252 - DNA, 202 bp, Unknown
  gut microbiota DNA sequence
cgtcgcgaacgccacgggttgctcgtccatctggggcggtccggccgctacgtcgccgtatacggtgaacgcagagggtcgcgggcctgcgtggtcgaactccctgttcgaggacaatgccgagcacggtctgggcatgttgctgggtcacgaggcggtgcgtgaccgcctggtcggcaagttggaagccatggcagctaac

SEQ ID NO: 9253 - DNA, 210 bp, Unknown
  gut microbiota DNA sequence
agcgacagcccacttccggaagcacagcgtgtgcaatgcgcagcaagccgttaccggacggccatcccgcctacatgggcttgaggtccctcaaggcggtcgagtatccatgcgaggcagctggcgcggccggcatcctggcaccgaagtacggcggagatcaggttgcccgcgcatgattcggagatgttcttcggctgagttctgcta

SEQ ID NO: 9254 - DNA, 323 bp, Unknown
  gut microbiota DNA sequence
agcgcataggcgaacaccaattgcacgggaacgaccccgatgatgtcgaggagagcatcgggcatacgagagtctcgccgtcctacagcttggattgcacgcgcgagaagacagcttcgcgcacgaacttgcggcgcttctggctcacgggcacaacctggttcgacgagagcaccacgctgtccgctttgagttccttgacgtgatccatgtttaccaggaagctcttatggcattggatgaacgaagcaggcagctcggcagcgaggtcggacaacgacgcgtacgcttcgatctcctcggctcccgcatggatgcgtact

SEQ ID NO: 9255 - DNA, 1183 bp, Unknown
  gut microbiota DNA sequence
ctaccgattatagcgcttcggcagggtcgccggtcgcatcgccgtggcgtttcggtttcaagatacggacggtcgtgttttcacgcgagccttcagcagctgctccatgcttcggtacgcgggcgattttgctccttgagcgtgatgaggcaaagagggattgccttcgcatcttcgcttgcgaggggaaccatccggctgcggggaagcgtctcgccaagcggggcgatgttcaccatgaagcacaccgcgtgcttgacgtagaactggcgcggcgcgtcaaacgcgagcggttcgacaatcggcgatttcagcccgtcttcgcggtacatgaccaagatggattcgttgaaatggtcgaacgtgcgcgaagatatcacgcggtagggctccagctgttcgagggatacggcgttttggcgggccagagggtgattcgcagccatgcagattcctgcgggaactgttcccatggggaagcaatcgaagccggggcggtcgagcggccctatggtgatgagcgcatcgcatgaccccgcgcgaagggcgtcaaggccggcttctcctgttccgatggatgtttcggttcgggcgttcaggtgcttgtcgaagaacgcagccatattagcgcgggctttcgcgttgttgcagaacgccggtgcgacgaggaacagccggagtttgacgggtttttcgtcacaggactcgcttatcagctccaactctcgaaacgacgaatcgacttcggcggccttttccaggaacgcctcgccgaggggcgtgagttcgatgccttgatggctgcgatcgaacaagttctctccgaattcgaattcgaggtctgccatcgacttcgacactgcctgcacggaaatgccgtgctcgcgagcggccgaggacaggctgccgcgattcgcgacgctgacgaagtacttgatctgtttgatgttcaatgaagcgttcctcttccgatgccaagctcggtgcttggtcttagcgtaccatgcatcggaatgcgcacccgagtgcacggctctcgagttggaaaaaacgctgccgttaccggatattcaaaaactggtaagaaatattcaaaaagtgcttgaccgaacttagtgattcgacgtatagtgatcaggcactttttttgggcccgtagctcagttggttagagcgcacgcct

SEQ ID NO: 9256 - DNA, 2687 bp, Unknown
  gut microbiota DNA sequence
gtggagttgtgctcgaggaagatcatatggccgctctgctcgccgcccaggacgaagccgccctcgcgcatggcctccagcacgtaacggtcgccaaccttcgtctggacgagctcgatgcccgcatcgcgcagagcatgcgagagcccgaggttgcacatgacggtggacacggcggtgccgccggcaagcagcccgcgcttgtgcaggtcgatagcgcacacggcctccaccacgtcgccgtcgatctcgttgccgttcgcgtccacaagcatgacgcggtcggcgtcgccgtcgtgcgcaatgcccacatcggcgcccgtctcggccacgagcgcgcgcaacggctcgagatgggtggagccgcactgcacgttgatgtcggtgccgtcgaagtcctcgttgatcgaaaccacctcggcgcccagacggcgcagcgcctcggcgctggtcatgcaggatgcgccatggcctgcgtcgagcgccaccttgaggcccgcgaagtcgatgccctcgccggccaccgtggacaccgcgtgcgcgatgtacagctcgcaggcgtcgtccaccggcagcgccacgcccacctcgtcgccgttcggcagctcgtccgccgatgggccgcccgccgccagataagcctcgatctcgtcctcaaccgcatccggcagcttgaagccctggccgtcgaacagcttgatgccgttgtactcgggcgggttgtgcgacgccgagatgacgatgccgccgtcgcagtgcagctcgcgcaccagaagcgcgatggcgggcgtcgggatgatgccggccaggagcgccgtgccgcccatcgacatgatgccggacgccacggccgactccagcatgtcgccggacaggcgcgtgtccttgccgatgaggatggtcttgccctggaaggccacggcggcctgacccagcttgaaggccgtctcgcacgtcagctccttgttcgcgacgccgcgaaccccatccgttccaaataaacgtgccatgctctttcctttccagcaggttcaacaaagtaagcggggctttcgaggcggcggataaccgccggaaggtctacttcccccgtttcacatggtcttcatgcaagcggacgccgccctcggggcgttccgcgtcggtcatgcggttgttcagctcggcggcgaactcgtcgagaccgatgccgtagcgctcgagcaccacgagcaggtggtacaccacatcggccgcctcgtagcgcagatgatcgatggccgcgtcgtactcgggcggcagatcgacggccagctcgtcggtctcgtcgacagcgccgcttgccgcgatcgatgccgccagcgacgagcacgcccacgactccacgtccttcgccgcaagcgccgtctcgcccgcctcctccatgaccttcttcagcaccccgtcgggagagccggtgagcagacgataggtgtagctctcctcccccgcctcgcgccgggctgcgatagtggcggcaagcgcctcgaacgtcgccccgatctgcgacgaaggcggcatttcgccggaagggatataggttttctgagacatgatgctcctcctactaaagagaaccgcacaggtagaacccttttccagcgagtcccggtccgaccgcctctcgcaggtcgcagccgtacccgctggcgccgcacgggatccttcgactccggcagctgcgccgcctccgctcaggatgacaagagactcgcgaaggagggtgcggcgcgttgcccaccaagcgagttccgcacgagccgaaacgtccagcggacgtttcgtgcgagcaggactgtctgagcgactgggcattgcgccgcatcctccgccacaagagccgcaagcaaagggggcgcgccaagcgcgcccccgcaggtcgaacttattcttccacgtcgtcgtcggcgttggaagcttcctcggactccttggtggtcaggccgaagccgagcgaccctaccgagcccagcagagcgtcgagctcttccaggttgcgctggtaggagcgcggcggcagagcctcgcccagcatgtcctcgccctcggtgttgaaggtcgggggctcgtcgccgccgatgaggatggtgtcatcgggcgagaacaccatgtccagcagctgcgacatgtcgtcgctcgtagccgcgaggtcgtcctcgatcacgtgcgtcagatcgtgggcctcgaggccttccttcagctcctcgatggccttcacgccgatgccctcgatgcgcagcaggtcctcctcggtgtggcccacgaggtcggccaccgtctcgatgcccgcctcggagaacttgttggcccagcgctgcgacacgcccaggtcgtcgtagatgtacaggcgcgcgtcctcgtcggacagctgcgggccgcgatggcccagcgaaagcccgctgtagtagctaccgtagttcgtgcccatgttgaggtagccgtcgccgtcgagcgaccaatcctgcggctggggcagcagctcctcgatatcgcgcagagcctccggcgcgaagtcgggcagcgtctcgcccaccaccggcgaaaccggacgacccttgtaggtgaggcccacttcgcggtaacgcgacagacccgtacccgccgggatcggcttgccgatgatgacgttctccttgaggccggccaagtggtcgatcttgccctcgatc

SEQ ID NO: 9257 - DNA, 2966 bp, Unknown
  gut microbiota DNA sequence
aagcctccggcgcgaagtcgggcagcgtctcgcccaccaccggcgcaaccggacgacccttgtaggtgaggcccacttcgcggtaacgcgacagacccgtgcccgccgggatcggcttgccgatgatgacgttctccttgaggccggccaagtggtcgatcttgccctcgatcgcggcgtcggtgagcaccttcgtcgtctcctggaacgaggcggccgacaggaacgaatccgtggccagcgacgccttcgtgatgcccagcagcagcggctggcccacgggcggctccttgccttcggcgatgagcgcgttggcggcatcctcgaactcgaagcggttcacctggcgacccggcaggaagtcggactcgccggcgtccatgacggccaccttgcgcagcatctggcgcgcgatgacctcgatgtgcttgtcgttgatgtccacgccctgggacacgtacacgccctggacctggctgacgatgtagcgcagcgtcgtattgggatcggtgaggcgcagcaggtcgtgcgggttcaccgagcccttggtgagctgctggcccaccttcacttcgcagccgtccgtcacgccgggcagcatctgggcgcgcgccgacacgacgtactcgcggaagttgccctgctggtcgtggatcgtgatggtcttggactgcttgtcgcccgagatctgcagcgtgccggagatctccgcgaggacggcgaggcccttgggcttgcgcgcctcgaacagctcctggacacgaggcagaccgtgggtgatgtcctcgccggcgacgccgccggtgtggaacgtgcgcatggtcagctgggtgccgggctcgccgatggactgggcggcgatgatgcccaccgccgtgccgatgttcaccggacgcgacgtggcgagatcccaaccgtagcacttctggcacacgccgtgctcggcatggcaggtcatgaccgtgcggatgacgagcgtctcgacgcccgccgcgtccatggccttgagctggtccatatgggtgatgtactcgcccgcggccagcagcacctcgccgtcgacgcccgccacgtcgttgagcaggcagcggccgatgaggttctcgtcgacgtcgcccttctcgttgtgcagcgggtacggcacgccgtcggcggtgccgcagtcgatctcgcggatgatgacgtcctgggccacgtccaccagacggcgggtcaggtagcccgagtcggcggtacgcagcgcggtgtcggccagacccttacgggcgccgtgcgtggagatgaagtactccagaacggacaggccctcgcggaagttcgccttgatcgggcggtcgatgatctcgcccttcgggtcggacatgaggcctcgcataccggccagctggcggatctgcttgatgttgcctcgagcgccggagaacgccatcatgtagatggggttgaacttgtcgaagttctcggccatggcctcgccgacttcttcgttcgcggcgttccagatgtcgacgacctgcttgtggcgctcgtcggggctcatgaggcccatctcgtagtcctcgtcgatggccgcgaccttctcgtcggcggcagccaggatctcggccttgttcggcggcacggtggcgtcgtacaccgaaacggtgacgccggcacgcgtggcgtagtggaagcccgcgtccttgaggccgtcgagaatcgccggcacgctggacagctcgtagcggttgcacacgtcctcgacgaggcggctgatctccttcttgttcatctcgtagttgaggtacgggtagtcctcgggcagcacgttgttgaacgtgatgcggccgatggtggtctcgatgcgctcgcccgccttgtgctcctcgaacacgccgaaggccgtggccacctgcgtgtccttggtcagacgcacccagatcttggcctgcaggtcaagctcggcgcgcgcgtcgtaggcgttcatggcgtcgtcgaagtcgatgaacgagcggccctcgccctcgaagccgtcgcgggcggccgtgaggtagtacaggccgatgatcatgtcctgggtgggcacggtcagcggacgaccgtgggccggcgacttgatgttgttggcggacagcatgagcacgcgggcctcggcctgcgcctcggcgcccagcggcacgtgcacggccatctggtcgccgtcgaagtcggcgttgaaggcggtgcagaccagcgggtgcagcttgatggccttgccctcgaccagcaccggctcgaaggcctggatgcccagacggtgcagggtaggtgcgcggttcagcagcacgggatgctcggtgatgacctcttccagcacgtcccacacgtagctggcgccgcggtcgacggcgcgcttggcggccttgatgttggcggcgtactccagctccaccaggcgcttcatgacgaagggcttgaacagctccagcgccatctgcgacggcaggccgcactggtgcagcttgagctgcgggccgacaacgatgaccgaacggccggagtagtcgacgcgcttgcccagcaggttctggcggaagcggccctgcttgcccttgagcatgtcggacagcgacttcagcgggcggttgcccgggcccgtgacaggacggccgcggcggccgttgtcgaacaggctgtcgacggcctcctgcagcatgcgcttctcgttgttgacgatgatctcaggcgcgccgaggtccagcaggcgcttgaggcggttgttgcggttgatgacgcgacggtacaggtcgttcaggtccgacgtcgcgaagcggccgccgtccagctgcaccatggggcgcaggtcgggcgggatcaccgggatgacatcgagaatcatgtccgtcggcttgttctcggacttgaggaacgcgtcgaccaccttgaggcgcttgatggccttggcgcgcttctggcccttgccgttggcgatgacgtcgcgcagctcg

SEQ ID NO: 9258 - DNA, 2854 bp, Unknown
  gut microbiota DNA sequence
gtcgagaatcatgtccgtcggcttgttctcggacttgaggaacgcgtcaaccaccttgaggcgcttgatggccttggcgcgcttctggcccttgccgttggcgatgacgtcgcgcagctcgtcggccgtcgcggccaggtccatggcgtccagcaggtcgcgcacggattcggcgcccatgccgcccgtgaagtagtcgcggtagttgaggcgcatctcgcgatagagggcctcgtccggcaccagctgcttcggctcgatcttcatgaaggcgtcgaaagcgtcctggcgcagcgccttgcgctcgttgaactcctcgtagatgtcggcgatctcctcgtcgacctcctcggccgtcatgcgctcgtcctcgtccacgtcgtcaacgaagtcgtcgtcctcgggcacgtagtccacggacagcttgcgcgtggcctccacgaggcggtcgcgctcggcgtccagctcctcgaggtcggcggccagctcgtcgcgcagctcgtcggcgtcctcctcgcgggcctctttatccaccgaggtgatgatggaggatgcgaagtacagcaccttctccagctctttcggtgcgatgtccaagaggtagcccagacgcgagggcgagcccttgaagtaccatatgtggctgaccggggcggccagctcgatgtggcccatgcgctcgcggcgaaccttgctgcgcgtcacctcgacgccgcagcgctcgcagacgatgcccttgaagcgcacgcgcttgtacttgccgcaggcgcactcccagtccttcgtcgggccgaagatcttctcgcagaacaggccgtccttctcgggcttgagggtacggtagttgatcgtctcgggcttcttcacctcgccgcgcgaccagctgcgcacgtcctcggcgttggcgagcgagatgcgcagggcgtcgaaattgctcacgtcgaattccgtcgtcatttatcgctcctctccctcaccgatcaggtcgttcgtatcgttgttgctatcgcccatcagctctcccagctcggcggcaatgctgtcgagcgcattggccgcgtcgtcttcttcggtcttgcgcgcgtcggccgcgatggcctcgtacagcgcgcgatcgccgtcttcctggccgtcgatgtcctgggtcacgtcgatcgtgcgatgatcgtggccctccagctcgacgttcaggcacagcgacttcatttccttcacgagaaccttgaagctctcgggcacctcgggggcggggatgttctcgcccttgacgatggcttcgtaggacttcacgcggccggcggtgtcgtcggacttcaccgtgaggatctcctgcagcacgttcgatgcgccgtacgcgtacagcgcccacacttccatctcgccgaaacgctggccgccgaactgcgccttgccgcccagcggctgctgggtgatcaagctgtaggggccggtcgaacgcgcgtggatcttgtcgtccaccatgtggccgagcttcaggatgtagctctggcccacggtgatgggctcgcggaacttctcgcccgtgcggccgtcgtacagccacgtcttgcccgtgcgggacagctgcggcacgaactcgtcgcgcgccaggtcgccgtacgtggcatggttcttgttgatgaggttgcggttcgccttctcgatggcatcggagatctccttctccgtggcgccgtcgaacaccggcgtggccacgtgcatcgggccctccaccacggcgtcggtttcctcagcgtcgtcccagccccacttcgcagcccagccgaggtggttctccagcagctggcccacgttcattcgggaaggaacgcccagggggttgaggatgacgtcgatgggggtgccgtcggcgaggtagggcatgtcctccaccggcagcacgcgggagatgacgcccttgttgccgtggcggccggacagcttgtcgccctgctgcaccttgcgcttctgggccacgtagatgcgcacgagctcgttgacgcccggagccagctcgtcgccggcgtcgcggctgaagcggctcatgccgatgacgcggccgccggagccgtggggcaccttgagggacgtgtcgcgcacctcgcgggccttctcgccgaagatggcgcgcagcaggcgctcctcggccgtgagctccgtctcgcccttcggcgtgaccttgcccaccagcacgtcgcccgggaacacctcggcgcccacgcggatgatgccgtcggcatcgaggtcgctgatcatgtcgtcggagatgttcgggatctcgcgggtgatctcctcgggacccagcttcgtgtcgcgcgcgtcgacctcgtactcggagatgtggatggacgtgagcaggtcttcggcaaccacgcgctcggacacgatgatggcgtcctcgtagttgtagccttcccacggcatgtaggccaccatgaggttctggccgagcgcgagctcgccgccgtcgcagctggggccgtcggccagcacgtcgcccgcctgcacctcgtcgcccttgcggacgatggggcggtggttgatgcagcccgactggttggagcgctggaacttcggcacgaggtactcgtcgtactcgccgtcgttgttcagcacgatgatggtctggccgtccacgtagtcgacgacgcccgggttctgggcgaccaggatctcgccggagtcgaccgcgatgcggtgctcgatgccggtgcccaccagcggcgcgtcggggcgcagcagcggcacggcctggcgctgcatgttcgagcccatgagggcacggttcgcgtcgtcgtgctcgaggaacgggatgagggaggtggccaccgaaaccatctggcgcggggacacg

SEQ ID NO: 9259 - DNA, 807 bp, Unknown
  gut microbiota DNA sequence
aacggcctggcgctgcatgttcgagcccatgagggcgcggttcgcgtcgtcgtgctcgaggaacgggatgagggaggtggccaccgaaaccatctggcgcggggacacgtccatgtagttcaccagctcgggcgccacctcgtcgggctcgccgaacacgccggcggcgtccttcgtacggcagagcacgcggacggcctcgtggaacacgccctggtcgtcgaacgtgccgaacttgcgcgtctcggggtcgaacaggtcgttggcctgcgcgatggtgtagttctcctcctcgtcggccgtgaggtagtccacctcgtcggtgaccttgccgtcgacgacgcggcggtacggcgtctcgatgaagccgtaggggttgatgcgggcgtaggtggccagcgagccgatgaggccgatgttcgggccttcaggcgtctcgatggggcacatgcggccgtagtgggacgtgtggacgtcgcgcacctcgaagccggcgcgctcgcgggacaggccgcccggtcccagagccgacagacggcgcttgtgcgtgatgccggcggcggggttcgtctggtccatgaactgggacagctgcgaggagccgaagaactccttgatggccgccacgatggggcggatgttcacgaggctctgcggcgtgatctcgtcgggctcctgcatgctcatgcgctcgcgcacgacgcgctccatgcgggacaggccgatacggaactggttctggatcagctcgcccaccgtgcggatgcggcggttgccgaagtggtcgatgtcgtcggtctgcacgcc

SEQ ID NO: 9260 - DNA, 3001 bp, Unknown
  gut microbiota DNA sequence
gggttgaagaacagaccctccagcagcgtgcgggcggaatcgatggtgggcggctcgccggggcggaagcgcttgtacagctcgatcagcgactcttccttcgtggtggccgggtcgcggtcgagcgtgcgcagcaccatctcgtcgttgccgaggagctcgatgatctcctcgcgcgtctcggcgaggccgagggcgcggacgagcagcgtagcgggctgcttgcgcttgcggtcgatgcgcacggacaggatgtcgcgcttgtcggtttcgaactccagccacgcgccgcggctggggatgaccttcgcgttgaacagcgtcttgtcggacgccttatcgcgctcggaggcgaagtacacgcccggggagcgcaccagctgggagacgacgacgcgctccgtgccgttgatgatgaacgtgccgcgcggcgtcatgagcgggaagtcgcccatgaagacgtcctgctccttgatctcgccggtctcgcggttgatgaagcggatttccacgaacagcggcgcctgataggagacgtccttctccttgcactcgtccacggtgtacttcggctcgccgaactcgtggcggccgaactccacgcacatgtccttggtgttgttctcgatcgggctgatatcctggaacgcttgcgccaggccctcgcccttgaaaaactcaaagctgtccgtctggatagcgatgaggttggggacgtccatgacgtccggaatcttcgcaaagctgcgccgatccctgtaaaggctggtctgatcagtcgtttttccttgagccacgaggcttttcctccttcatgtgcacccgcatttctgcgaaaaagtcgcaattgcctaagatatgtcgaaagtcaaggcgagtcaagaaaaatttttacgaactgtggaaattctttgttgatttgcccttttatctgggagaatgcaagtatggtttcaggccgatcccgacatcgggacggcatcttcggtcgattcgaggctccgccgacgctatgcgagctggatagctttgccggttcaagaccccttcgacgaattccgagctggaaagccccgcaaaaaagtcgctgacttggcgaaacgatgatcttcatcatcaggctcacctccctgctgaagtttgttttgtttgtcagggagctgtggaaacgggctatcgggacttggctccgcccgcaatcgcatgcgagacttaagtttcaacgcgcccgcgggcgcgcaaacacactacgaacgcacttgaaacgcagcatacttgcagaactaggaggtcctcatgggacaatccactacgccgaaggcgctcgccttgggtgtttcgctctccctcgcgtgcggcctgctgccgggcgcggcctttgcggacgaagccccagaagacgatgcgtccgccaacgccgccgattccgctagaggaacggccggcggcgccgactccgccccttcgggcgcggccgccaagcccgatggctacgataaagccgacttctactccgacaaccccgtcgcgccaatcgcacggacgctggccgtcccgctggcagccaacacgcagctgcgcagcctctcgaacgagatgaagtacttcgcccgattcgagagcaaccagaactatgaccaggggctctcatggggcgatggctaccatgcaatgggctactatcaattcgacaaccgatactcgctcaaaagctttatttcctattgctacaatttcgacccggtcaagtaccggatgttctcctgggttcccagcgcgaacatttcgggagacctgtacgacggaaacgcggatcggctgaccgacatcggccagcaattgaacgaatcctggcatgcggcatacgccgccgaccccgcggagttctcggcactgcaggacaccttcgcatacgacaactactacgtccccgctgaaacgtacctcgcaagccgcggcatcgacatctcgaatcgcgccgacagcgtcaaaggcctttgctggggcctggcgaacctgttcggcacgtcgggatggcacaaattcgtgggcggttggtccgacggctacgtgaacggaacatattacaacagctataactaccccggcgccgggctgacgaacgacatgaccgacgaacagttcgtcaccacgctgtgcgattacgtgatagcgcacgtggccgagttctaccacggccagccgcagtaccacgaaggctggacgaacaggtacaaacaggaaaaggagctgtgcctgagcctgcttcccgagaaacccaccgtgcctcctgtcgaggaagagccccctgcggcggattcccctgcggttccgccggtcgggaacacccctcccgaggaaggcagcggagatgcgccttcgagcgagacgaaaccgcccgagagcgtcctgccgcccgaggtgaacccgccggcagcgcccgaagggaacccgccgagcgctccgaacgaacccgccccgcccgcgaacgacggcgccggacaggccgatcccgacgaaaccccgaagccggacggagacagcgcggctccaactccgcctgcatcgccgtcgaaccccgagaacacgacgcctcccgctggatccgaaacgacgccgcccgaggaaacaaagcctccggagagcacgacgccgcccgaaagcccggaaacgacgccgggatcaggtctgcaagagccgacgaaagaagtggcgaacagcagcaagccctcccttgaagagccaaccgcccctgcgcaggagcccgtcaacctgcccaaggccgacggagacgagaagaacggcaacgaaacagccgcaaaaacctcgaagctcagccagacgggcgacggcaccacgaacgcgccgctcggcgtggcgcttggagcagccggcatcgccgcgatcgcaggcgccgcgctcgccacacgacgcatcctcaaatagctcccctcgttcctgctacagtcgagcgccccggccgaaaccggggcgctcgact

SEQ ID NO: 9261 - DNA, 312 bp, Unknown
  gut microbiota DNA sequence
ggccaccttcggcaccgcggtgaggatgaccagcatgtcggccttgaagtcggccgccagcttggcgctggagcggtctttgtcgatgacggccggcacgccgcgatacccgccgtcctcctcgacgacgggcacgccgccgcctcctgtggacaccacgaggtagccgtcgtccacgagatccttgatggcatcgaactccacgatgcgcaccggcgcgggagaagccaccacctggcgccagccgcggccggcgtcctccttgaacgtggcgcccgtctcgttcgcaagacgcacggcctcgtcttcagt

SEQ ID NO: 9262 - DNA, 2504 bp, Unknown
  gut microbiota DNA sequence
ctcgacgacaagccgccgtctatcgaccgtgcgattttctcaaaagaggttgcgagcatgcttgcgctcttcgccaggttgccgcattgacgtacaataggctgaaagcggaaagccgcgcgtatccgccggtaacatgaaagggctcatcatgcgaattatggctttggatattggggagacgcgcgtgggggttgcggtgagcgatccgggggaacgggtggcttctccggtggccgtgctgcccgcctcggaagtgctgaactgcgcgaagccgttccagcgagcgcttgaggattgggagccggagctgctgctgtgcggacttccctacaccatggcgggcgcggaggggcctcaggccgcgcgcattcggaaagcggcgaaaaccatatccgacgcctgcggcatcccttacgaattcgctgatgagcggttaagttcgcaggaagccaaacggagtttgcgtgaaaagggcatgaccgagaaggccatgcgcggcaaaatagatatgatagccgcaagtttgtttttgcaggcgtggcttgacgcgcgccgtgaggcttgatggaagaagaggatcagttccatgccccagcacaggaagcaagtcacctattctcagcgtccgaaccatgcagctcgctcggctcatgcccggggcgagcgccagttccgtacgtacgataccagctatatccgcccgaagaaaagcaaggctcctgctatagtcgccgccgttttggccgttctcgtcgtcggaggtttggcgtggggcgcgctcaccctgttcaacagctgttccgcgcaatcggtcgagcttctggccgagggtcaggaggccacgatcacggtggccgaaggtgctggtgccaaggtcgtcggagagcagcttgcggaagcccgtctggtttccaatgcgggagacttcacgaagcgcgtcaacgagatgggcgttgattcccagctcaagcccggtacctacacattcgcgggcggtatgtcgctcgacgccatcatcaaccagctgacggccggtccggtggcgaacgcgctcaccatccccgaaggaagcacgctcgaggccgttgcccagagcgtggcaaccttcaccgagaatcgcatcacggcggacgcgttcacggccgctgcgtcggatgccagctcatacgcggccgactacgacttcctggccgacgcgggcacgaacagcctggaaggcttcctgttcccgaaaacgtacgagatcggcgacgatgccacggccgagtcggtagtgcgcatgatgctcgaccagttcaagaccgagacgtcggggctcgattggtcctacccgcaaagccagggcctcaccatctacgatgccgtgaagctggcttccatcgttgagcgcgagtcgtcgggcgacgagcagatccgcgcccaggtggcctcggtgttctacaaccgcctgaacaacttcggcgatccgaactacggcttcctgcaaagcgatgcgaccacggcttacgagctgggtcacgaccccacccccgaggatatcaagaatccaacaccgttcaacacctacacgaacacgggtctgcctcccacgcccatctgctcgccgggtctcgattgcctgcaagccgtgtgcaaccctgcgcagacgaactacttcttcttctacttcgcgcctgatgaaagcggtacgatgcagtactacttcagcgaaacgtacgaagagcatcagcagacgttctcctaggccgttagcgacaacgccatggcttttctcgaacccgaccgctactttgcgcgcatctcgcgcatcgatatcgaccgcgacctgctggcgctgggctttcgcaacgtgctgctggacgtggacaacaccatcctcacgcgtgacacccacgaagtgccgcgtgacgtggggttctggctggcgaaggcgcgcgacgcgggcattacgttctgccttgtgtccaacaactggcacgaaggggtgtaccagctggcgaaccgtctttcgctgcccatcgtggcgaaggccgtcaagccgttgccgcccgcgttcctcatggctttgcgcaagctgggagcgaagcgttccgagacggtggtcatcggcgatcagctggtcaccgacgtcatgggcgcgcattttctgggcatgaaggcgtatctgctggctccgctggtggagcaggatctgccccatacgctgctgctgcgcaacttcgagcgcgtcgtcatgggcgagcgtaagccggagggcgccgcatcgacgtcgcagaacgccgtcccctgcgaggatgaggaacccgacgcgcagggcgtctgatgtgaacgagcgagcgaaaggatcgttatgaccgacacgcaagccgaacggccggccgagagcctgtacctcttgggacatcccattgcgcactcttcgtcgcccgcgatgtacaacgccgtgtacgagcgcttaggattgccgtggcgctacggtttggctgattgcgcgaccgagg

SEQ ID NO: 9263 - DNA, 5565 bp, Unknown
  gut microbiota DNA sequence
tcgaacggccggccgagagcctgtacctcttgggacatcccattgcgcactcttcgtcgcccacgatgtacaacgccgtgtacgagcgcttaggattgccgtggcgctacggtttggctgattgcgcgaccgaggaagaggcgcgctcgttcgtggaggcgcgcggcttcctgtccatcaacatcaccacgccgtataagccgctcgcgttcgaggccgccacggcgaaggctgccacggcgaagctcgcccagggcgcgaacgtgctggtgaagaagggtgacgcgctcatcggcttcaacaccgacggccagggctgcgtagcgtacttggagcgcacgggcttttgcttcgcaggcaagcgcgtggccgtgtgcggcacgggccccacggcgctgtccatcctgcacgcatgcgccatcgccggggcggacgtggccatgctggtcgggcgcgacaaggagcgctcccgcaaggtgctcgaaggctacgtcgagcggttcggcctgttggcaaatgccacggtggacctgccggcagcgcaggcgcaccatcgcagcttccgcacggcttacgagcgcaccacgttcaagttcggcagctacaccacgtccacgaaggcgctggccgccgccgatctcgtggtgaacgcgacgccgctcggcatgaacgagggcgacggctcgccgttcgacgtcgagcttctgagcacgggccagaccgtgttcgacgcggtatacggccacggcgagacggcgctcgtgcgcgccgcgcgcgaagcgggatgcacggtgcacgacggcgccgggatgctggtagcgcaggcagtggccaccgtgcacgccgtgtgcgacctcgccgaggtcgacgtcgccctgtctgacgacgagctgttcgccttgatggcggaagcggcagggttcgacctgtagacttccgtcatcctgaacggaaccgactggttgcttcgtcatcctgagcggagcgcgtagcgcggagtcgaaggatcccgtgcggcgccagctgaaagcgtctcggttggcaccgtgcgggatccttcgcgtccccgcttcgcggagcctccctgtgctcgctcaggatgacgagtgcgtgagccatagggatggggttgatgactcattcgatgcggatgcggcgtgcgacctgctttttgctagccttgcctgaacggtagggtacaatacgatgcgaaccattcgtatcagcgcggaaagcgacagactatgcgatacctaacagcaggcgagagccacggtccgtgcctgacggccatcgtcgaaggcgtgcccgcgggcttgaagatctccgaatcgcagatcaacaccgacctttctcgtcgtcagtccggttacgggcgcggcggccgccaacgcatcgagcgcgacacggttgaggtcgtctccggcgtgcgcttcggccgcacgctgggaacccctatcgcgctcgtggtgcgcaaccgggactgggagaactggaccgatcgcatggccgcgttcggcgacgctccatccgatctcgcccgcgaggtcacgccgcgccccggccacgccgacctcgtgggggcgctcaaaaccgacacgtccgactgccgcaacatcctcgagcgcgcaagcgcccgcgagacagctgcgcgcgtggcggcggccggcatcgcgcgcgagttcttggccgacctgggcgtggaggtgttctcgtacgtcacgtccatcggaagcgcgtccttcaaagaggacgacgcgctcatgaacgctcccgactacaagccgctggctatcgagacgagcgaggtgcgctgtcccgacgagcgggcgacggaggccatgaaggccgagatcgaccgcgcgaaagacgcgggcgagagcctgggcggcacgttccgcgtcgtggtgacggggctcgtgccgggcgtgggcggctacgctacggcgggcgatcgtctgacctcgcgtttgggagcggcgctgttctccatccccgccatcaagggcgtcgagttcggtctgggcttcgaagcggctcgccgcgtgggctccgaggtgcacgaccccatcgcgctggacaagcaggtcggcttcgtgcgcacgtcgaacaatgcgggcggcctcgaaggcggcatgaccacgggcatgcccctcatcgtgagtgcggccatgaagcccattcccacgctcatgacgccgctcgagacggtgaacctcgacacgttggaagtcgaagaggcgtcgaaggagcgcagcgacacgtgcgccgtgcccgcctgcgccgtggtggccgagagcgaggtggcgttcgtgctggccgaggcgtacctcgagaagttcgggcgcgataacatggccgacatcaaggcggccgtgaaagcgtaccgccagcggctcaggacgatggcgcgatgaggcacgaggcttcgagacgacctcgcgtggtgggggagcttgcgcgccccgtgttcttcgtgggattcatgggcgcggggaagacgtcggtcgcgcgacggctggcgcgcacctgcggcgtggcctcggtggacatggacacgtacctcgagcgccgcgagggcaagcgcgtgaaggagatcttcgcgcaggcgggcgaggacggcttccgcgccatcgagacggacgtgctgcgcgagctggccggcaaggagccgctgctcgtgtcgtgcggcggcggcgtggtgaagcgcgatgagaaccgcgccatcctgcgcgatgcggggttcgtcgtgtacctgaaggtcacggccgacgaggcgaagtcgcgcatcagcgacacctccacgcgccctttgttccaggacctcgatgccgcgcgcaagacgtccgaggagcgcctgcccctgtacgccgaggtggccgacctcaccatcgacaccgccggcaagaacgtggctaccatcgcgcgcgaagtgcagagcgcgctcgagaaggagggcatcctgtgcctgcaacgaaagtgatcgtcaacatccccggcgaagaagcctacgacgtgcgcatcggcggcggcgtgctggcgaatctgggcgcgcatctgcgcaagctgccggcgttcgccgagtcggaccgcgcgctcgtcgtcaccgacgagaacgttgcgccgctgtaccgcgccgacgcgaaggaagcgctcgcgcaagccgggttccgcgtgagcgacatcgccgtgccggcgggcgaaggctcgaagtctgtcgaggtggcgggagagatatgggaggccatggccagccttgcgctcggccgcgactgcgtggtggtggcgctcggcggcggcgtggtgggcgacctcgccgggttcgttgccgcaacctatatgcgcggcgtgccggtggtgcaggttcccacgacgctgctatctatggtggactcgtcggtgggcggcaaaaccggcgtcaacctggcggccggcaagaacctcgtgggcgcgttcaaacagccggcgtacgtgtgcgccgacacggccacgctggccacgcttgatgagcgcgagtgggcctgcggttgcgcggagatagcgaagtccgcggtcatcgactcggacgacttcttcttctggctggttgacgcggcgggcgcgctggcggcgcgcgatgaggtggtagtagaggaggccatcgcgcgctcggtggtgttcaaggccgacgtggtggccgccgacaagtccgagagcaagggcgtgcgcgagtgcctgaactacggccacacgttgggacatgcggtcgaatcgctggcggggtacggcgcgttctcgcacggcgcggccgtggccgagggcatgcgcttcgccgcgcgcatggccgtgtcgctggtggacgcgccgctcgatttggtcgagacgcaggacagcctgctcgaccagctgggcctgcccgccctcgactggtcggccgagccggaggccatgctggaggccatgaagcgcgacaagaaggcccgtcgcggccaggtgcgcttcgtgctgccccgcgacgtgggttcctggcagctcgccgatgtcgacgacgccaccatcctcgaccacctgaacgcttgggctcgctcgaaggcataggggaggaagccgattatgaagaagattctggtgttgaacgggccgaacctcaatttgctgggagtccgcgagcccgacgtgtacggcacggtgacgcttgccgacatcgagcgcgaggtgacggaatacgcggccgagcggggtgcgagcgtcgactgcttccaaagcaaccatgagggcgcgctcatcgacaagttgcacgaggcgcgcggcgcgtacgacggcatcgtctacaatcccggtgcgcacacgcactactcgtacgcgctgcgcgacgccgtgtcgtccatcgacgtgcccacggtggaggtgcatctatccgatatttccgcgcgcgaggagttccgccgcatctcggtcatcgcgccggtatgcgtggcgcagatcaagggcaagggcaaagagggctacaaggaggccgtcgatgtgctgctcgcccgatagcgccgcgctcgctgcggctgccgggcctcgcctcgatcgtctccgcgccgcctgcgccgatgcgggcatgggcgcgttcttcgtgcgcgacacctcgaacatcgcctggctcaccgcgttcgacggcgtgttcgacgacgaggacgcgcacgcgctgctggttacgccgagcgatgccgtgctgcacaccgactcgcgctacagcgaggcagcgcgcgcggcggctgcccgcgaaggtgcggtcgcggtcgacgacgcacgggtcacccacgcgaagttcgtcgccgaaaccttcgccgcccgccatgccgaccggccgtcggtcgaggccgaagccatcgcgctcggcatcgaggactccatgtcgctcgccggctttcgcgccctcgaagccgccttcgcggaggttcccgagcgtccgaaactgcgagaaacgtctgacttcatcgtgaacctgcgcgccgtgaaagacgtgcaggagatcgcgcgcatgaaggcggcccaggccgtcaccgacgccgcgttcgcgcacatcgtggggtacatgcgtcccggcatgaccgagcgcgaggtgcagatcgagctggaggacttcatgcgtcgccacggcgccgagggccttgcgttcccgtccatcgtagccgcgggcgcgaacggcgcgagtccccatgccattcctggccagacggtgctcgaggcgggtcaatgcgtcgtgctcgatttcggcgcacgggcgcacgggtactgctcggacatgacgcgcacggtgttcttgggccagccatcccagaagatgcgcgatgcctacgcggccatccgcagcgcgaacgagcaggtggaagccgcgctcaagccgggcgtgacgggcaaggccatgcacgagctggccgagcgcgcgctcgcggacgcgggtttcgccgacaagatgggccacagcttgggccacggcgtgggcatcgacatccacgagcagcccgcgctgtcgccgcgcaacgagcagcccctcgtgccgggcaacgtggtgacggtcgagccgggcatcta

SEQ ID NO: 9264 - DNA, 261 bp, Unknown
  gut microbiota DNA sequence
gtcccagaagatgcgcgatgcctacgcggccatccgcagcgcgaacgagcaggtggaagccgtgctcaagccgggcgtgacgggcaaggccatgcacgagctggccgagcgcgcgctcgcggacgcgggttttgccggcaagatgggccacagcttgggccacggcgtgggcatcgacatccacgagcggcccgcgctgtcgccgcgcaacgagcagcccctcgtgccgggcaacgtggtgacggtcgagccgggcatcta

SEQ ID NO: 9265 - DNA, 585 bp, Unknown
  gut microbiota DNA sequence
ccgcctcccaggaacacgagcacgcagagcacgggatacgggaacgtcgaccaggggccgcgcgggcggcgcaactgggcgtcgtaggactcgggggcttgcgaggcttgcggggcgtaaggcgcttgcggctgcgcgggttgcacaggctgctggggcatgggggccgcgccgtagtagggctgctgcacgggctggggctgcggttggggctgcgccggcggggcctggtgcgcctgttcggccgtcgcgcgagcctgcgccgcggccacggccgcctgcgccgcgcggacggcggcctcgttggcgcggacggcggcctcctgcgcctgcgcctcggcggtggcgtgcttgtccttttcctcaaacgccacgtcgtccaccacgtcctcgtcgatgcgcagcaggtcgtcgagggacacgccgtacagcttcgcgagcgcgatgagattccccgtatcgggcgacgactcggcgcgctcccacttcgacaccgcctgccgcgacaggccaagccgttcggccagctcctcctggctgtatccttgctcgcgtcgcatggctgctaagcgctgggcaatctcg

SEQ ID NO: 9266 - DNA, 309 bp, Unknown
  gut microbiota DNA sequence
cgtcggttcgtccatgacgatgaggcgaggcgacgagagcaggctacgcgcgatcatgagcttgcgcacctcccccgggctcagctgctcgccgtccaacacgcgctccggaggcgattccagccgcgctgcgatggagagcacgcggccccgctcggccgtcgggagcgcccgcaactcgacgagcaacgcgcggacctcgtcgtcgggaacctcctgcggaaagtacgccaccccctcctccaacgtcacccggcgaagcaaggcatggagcaaggtggacttccccgccccgtttttgccgacgag

SEQ ID NO: 9267 - DNA, 5564 bp, Unknown
  gut microbiota DNA sequence
cgattcgcgcatgcagcggatgaactccacccagccgcagtcgtattcggtgaagtcgcggatgccgttgggtagccgggtgacgtgggggacgagcccgatgcgctcgtagtagcgaatggtgtcgaccgtgattccgtagcgtttcgcgacttcggcgatttgcatagcgcgcctcctagcaggtcgtggggaagtccgtttatcctgctatcaacataccgcgctgctcaaccgatggccaatgcctacattgaaaggttcaccatgcttgggaggcatgaagaacctcaagcaacccttgagatggccggcggccgtgcgtcgcctaaaccccgcaccccatgaggcgtgcgcggttgacttcgtgcaggcgcttctcgatggcgcccggcgcatcgactcctgcggcagtcaccacgcccacgaggcgtgcctgctcgaagcagtcgacccagccttgcagtcccttcgtcgccccgtcgaacgcatgggcgtcctcgtcggccgccgtggccagcaggtacacgtcgcgaaacgcaggatcggcagcgtaggccgggttgctgcggtcgagcagggtcttcatctgaccagccatctcgaagaagtagatgggcgtggcgaacgcgatggcgtcggccgccacgatgcgctccacgatggcggccgcatcgtcgttcagcgggcatgcggcgccggcttggcaagccaggcatccgcggcagaactcgatgcgcttgccgcgcaggctgaccgtctccacgtcgtgacctgcctcgcgcgccccttcggcgaacgcgagcgcgagggcgtgcgagttgctggtcgggcgcaggctggccgataccactaggacgttctttcccatggggtttcctctcgtcgtatgcgatgcgtcgatcgtcttgtcgcgttccagtgtgccccttggagcaggctccaagtcaaatggaggtttcgtggcgacgcgaggaggggcgggagagaagaatctttcgccgcgtccgcgcaggccgctgccggacttcgggaaacgccgatacggttgcgtgcggtctacgagatgcccgcatcgtcgcccacatgcctcgcgcatacgcgttccatggcgtcgaggaacgcctgcgtctgcttgttgggcatggaggaccgccagacgaggccctggtgagcctcgaagcgcggggcgaaggggacgaagcgaaggtcgccgtcttcgctcgtgtcgaacaggccctcgtaggtgagcatgcatcccatgccctgacgcacgagataacggccgttcgagggcaagttgaacgtagcgacgacatccatccggtcgagcgcgtcgcccgcccagtcgcgcagcgttcccgcaagcgcctggcgcgagacgatgatgccttgtcctgccaggtcggagggcgcgatgccttcgagccgccccacggcgctgtcgcgcagcgcaagcgcgccccatacgtcggtcaccggcaggcgcatggcgttcatctttgcatgctcgcgcatctcgcattccagcatcacgtcgtagaacccgcgcaccagcccgtccttcagctccgcagtggttccgctgtggatggcgaaatcgacggcggggtaggtgcgccgcacctcgtccatggcctgcgcgatgagcgccatggcctgggattcgcccgccccgatatggacggtgccgccgatcgaccgctcggagggcagcatgtcctcctcggccttgtgcgccagctccacgatggactccgcgtagcggcagaggatggagccctggtcggtcagttcgatgcccttggggccgcgcgtgtacagctcgcgcccgaactccttctcgagcgacgacagctggcgcgagagcgtcggctgggtgatgtgcagggctttcgccgcgttcgagatgttgccttcgcgcgcgacggccaggaagtactccagggtcctcagttccacgacgtcctcctttcgctcgtttccaagctatgcaaaaccggtatgaagaacaattcattataggcatttttcatagcgtcccaccggttttagtatcggcagcagagagaagccgtgcaactcaaggagaaaggggagcatatgtccctgctcgacaaaagcctgaagcgacgtgatttcctgaaggggacggcggcggccgctgcggcgacggcggcgttcgggctgtccggctgctcgacgggctctgcgcaggccgccgggtccgacggcgcgcacgtcgtggcatccgacgccagcatcctggccgacgcgggcgagtggatgcccatccactgccaccagaactgcaatcagatgtgcctgaacatgggctatgtggtggacggcgtggtcgtccgccagaagaccgacgacgcgcgcgaggacagcttcgactgcccgcagcagcgcggctgcctgcgcgggcggtccctgcgccagcaggtgtacaacgccgaccgcatcaagtaccccatgaagcgcaagagctggcagccgggcggcgccgagaacgcccacggcgagctgcgcggcaaggacgagtgggagcgcatcagctgggaagaggcgctcgactacatcgcggacgagctgaagcgcgtctacgccgaatacggccaggacgccgtcatctgcaacggctggcgctgggcgcccggctcggccatgttccccgtcatcggcggcgcggtatacgacaccgagaccgagtcgttcggctgctgggcattccagaccgaggcgctgggcctgtactcctggggcgaccaccccgatatcatgatgggccccgacaagtacgacctgccgaacgccgacaccatcgtgttgtacggctgcaatcccgcctgggctcagcactccagcatgtactggctgaacaacgcaaaggagtccggcaccgggttcgtgtacgtgggccccagctacaacgtgaccgccgcgcagctgggcgcgcgctggatccgcgtgcggccgggcaccgacacggcgttcttgctggccgtgatctacgagatgatccgtctggacggggagcgcggcgacatcatcgattgggacttcgtgaacgagcgcacggtgggcttcacgcccgagaccatgcccgaggatgcgacgaccgacgagaactaccgcgactacatcctgggcgcctacgacggcacgccgaaaaccccggagtgggcgagcgagatctgcggcacgccggtcgaggacatcacgtggtacgcggagctcgccgccaaggacaacaaggtgatcttcttccacagctacgcggcctcccgctacctgggcgccgagaacctgccgcaggcgttcatgaccgtgtcggcgctgggcggccattacggcaagtcgggccacggctcggccgccatctacacgtgggacgccggcgactcgggctaccgcctcatccagcacgcgggcggcgagtacgcctacatcgacaacttggtaggctcgccgggcgctaccggtccgaaccgctgcatcgaaggcaactcgtggtggagctcgctggccgaggggaagtacttgtccacgtccgagggcccctacgacctggggtcgggcgacgatccgaccaagctgcgcgcgaacacgcccacctaccatgcggcgcgcgagatgccggtgaacccgcgcctcatgttcgccacgtgcagcaacttcatgcagacgcgcggcaacctgcccaccgccatcgaggtgatgcgcgccgccgacacctgcatctcgctggagatcaagtactcactgaccgcctcgttcgccgacatcatcctgccggtggccacccactgggagggcaacgacgacgagagctggggcgagctctgctggccgagccccttcggcgacggcaacgggcagaagcagcgcaaggacgcgcttctggcttggcgcccgttggtgaagccgatgtacgaggcgcgcgaggagaagcgcatctgccgcgacatcgtcgagcgcatgggcttcgacgcggacgacgcctatcccaagagcaactacgaccagtggctgggctacttcctggggatgcgcgagctgtccgaagacctctcccgttgggagccggtgatcacctggacggccgatgacaaccggaagcaccatgcgaactacccggaacagcagggcaagatctcgttcgaccagttcatggccgacggctcgtacgtggtgcgccgttcgcccgacgacaggcgcaactacatcggctaccgcgacgacaagctgcgcatcggtgagaacggcgaggtagtcgtggccgacaccgcgtggccgcgcccgtcgcgctcgggcaagctggagatatactgccagttcaaagccgacaacgtgaaccgcacgggactcaatcccgagcccatcaagccctacgcgaactacttcgtgcccaatcgcggctaccaggacacgttcgccgactgggacgccaaggtgaagggcgcctatcctctgcaggcgtacacgccgcattacatgcgccgcgcgcacacctgctacgacaacatgacgtggacgcaggaggcgttcaggaacccggtgttcatgaacgcgcaggacgccgaggagcgcggcataaaggcgggcgacacagtggtgtgctacaacgacttcggccgcatgctgcgcatcgcccagccgctgcaggggatgatgccgggcaccgtcggcatcccgcacggcgtgcgctcgctgttcgacgagagcgaccccgacagcatcgtcgaccgcggcgggtcggagcagatgctgtccgacgggcagcagtcgaactacttcccccaggtggacgggtacaacagcctgctcatcgagatcgagaagtacgacggcgaggcgctggtggaagactgcgaccgcggcccgttcctggctgccggcatcgacgccgaaggaacgcccgcctacgtcgccgaaggcatgtacgaaggcaaggaggcttaaaccatgagcttgggattctacgttgacgtgcagcgctgcatcggctgccgaacctgccaggtggcgtgcaaggaccgccacaacctgcaagcggcgggccctcgcacccggcgcgtgggaagcttcgaatgcgggacgtacccggaggtgggcatgttccatctgacggtgtcgtgcaaccactgcgacgatccggcctgcgttgcggggtgtcccaccggcgccatgttcaagtccgacgacggcacggttcagcatatcgacgaccgctgcgtcgtatgccgcaactgcatgatcacgtgcccctacggcgcgccgcagttcgacgaggacgagaacatgatcgtgaaatgcgacgcctgcaaggcgctgcgcgaggacggccgcaacccggtgtgtgcagacgcgtgccccatgcgcgccatcgagttcggcgacgtggacgagctgcgagcgaagcacggcgacgccgtgagcgagctgccggtgctgccgtcggcggcgaccacgcggccgaacctgctgctgcacgcgtcgcccgaggcgcagcgcagcgacttcaacgaggtcgtgctgtgagcgcgccgaccgacccg

SEQ ID NO: 9268 - DNA, 224 bp, Unknown
  gut microbiota DNA sequence
tgtacccggaggtgggcatgttccatctgacggtgtcgtgcaaccactgcgacgatccggcctgcgtggcggggtgtcccaccggcgccatgttcaagtccgacgacggcacggtgcagcatgtcgacgactgctgcgtcgtgtgccgcaattgcatgatcacgtgcccctacggcgcgccgcagttcgacgaggacgagaacatgatcgtgaaatgcgacgcc

SEQ ID NO: 9269 - DNA, 260 bp, Unknown
  gut microbiota DNA sequence
cccgtccggattcctcgcgctcggatggcttcccttcgtcgtcatcggcggcaggatcgagctcgtgcgacctcttctcgtccgaagaagccgaaccagcagcccccttcgcggccttttcctccttcgccgcttccgccgccttctcggctgccgtctgcggcacggcggtaccctcgtacacgatggcggtatagccgtccatactgccgaacgtgtcgtcgatgttcgacgcggcaacattccaggaatgcccggcg

SEQ ID NO: 9270 - DNA, 190 bp, Unknown
  gut microbiota DNA sequence
tctcacggccaccgacatgtccgagcttgccagcgtgcccgccggaaccacgcttctgcgcgtcgacgccgctggcatccgcgagcgcctgctcaaagacgcctgggtggacgacgtatcggtgaaccgcgtgttcccgaacaccctggagctggccgtcaccgagcgcaccatcacggcggtggtggac

SEQ ID NO: 9271 - DNA, 3528 bp, Unknown
  gut microbiota DNA sequence
gaaaacgacggcggcccgtccgaagacgggccgccgctgccggttcgcttcgcgcgctagcgacgatgctcctgcttatcgttgagcaggcggttcagcgcgttgaggtaggccttcgtggacgagacgatgatgtcgttgtccgcgccgcgacccgtgtacacgccgccgtcgggcgcggtcacgcggatggtcacctcgcccagcgcgtcgatgccgcgcgtgacggactgcaccgagaactcggtcagctcgttgtccacctgcacgatcttgttcacggccttgtacaccgcgtcgatcggacccgtgccgtactcgcaggcagtgaccacctggtcggccgcgttgcgcagcgtgaccgtggccgtcggggtcagcgggaagcccgtgctcacctgcacgccctcaagcgcgtagagggcgctctcgttgcggtcgcgctcgttcacgaggctctcgaggtcctcgtcgtacacttccttcttcttgtcggccaggttgaggaacgcctcgtacacctggtcgagcgcctcgccctccagctcgtagcccagctcctccagacggtgcttcaaggccgcatgccccgagcgcgccgtgagcacgatctggctcgtgcccgcgcccacgtcggccgggtcgatgatctcgtaggtgtcgcgcttcttcagcacgccgtcctgatggatgccggaggagtgcgcgaaggcgttcgcgcccacgatggccttgttggcctgcacgttcatgccggtgatggacgacacgaggcggctcgccttaatgaactcgcgcgtgttgatctcggtgcaggcgtccagctcgtcgccgtgcatcttgatgcccatgaccacttcttccatggccgtattgcccgcgcgctcgcccaagccgttgatagtgcattccacttgggttgcaccgttcttcacgccagccagcgacagcgcggtggccatgccgaggtcgttgtggcagtgcaccgacaccgtggccttctcgatgccgtccacgtggtccatgaggtacttgatgcgcgcgccgaactcctcgggcagcgagtagcccgtggtgtcggggatgttcaccaccgtggcgccggccttgatgacggcttcgatgacgcgcacgaggaagtcgtagtcggagcggcccgcgtcctcggcgtagaactgcacgtcctcgacgaagttgcgggcgtacttcacgcacttgaccgcacgctcgacgcactcgtcctcggtaatgcgcagcttgtcgcgcaggtggctcgggctcacgccgatgccggtatggatgcgcggacgcttggcgtacttgagcgcgtcggccgcggcgtcgatgtccttctccaccgcgcgcgtgaggccgcacaccgttgcctggtcgcctgcgagctccgcgatgcggcggacggactcgaagtcgccggggctcgagatggggaagcccgcctcgatgacgtccacgttgagccggagaagttgacgcgccacgaccagcttctcctcggtgttcatggaggcgcccggcgactgctcgccgtcgcgaagcgtcgtatcgaagatgttgatcttgcgcgtcatatgcgtgttccttccttctcggctcgatatagtttgactatcatagcaaatatcccaagcgctcttctcggaattcgccccgaacgcaccaacaaaagcgggaaaacgacgggaagacgcctgacccgaaaaaggctcggcaagcgcggggatcgcttgccgagccgtgatgccgcagcgtgctcggagaggaggtcgcgcacgctagcaggagggtgagctcgctttcgcgtcggccacgccgtgggcagccgcgtcggcgtcgatgaggtcggtcggcttcgccttcatgatgaagcgctcgacgaggatgaggaaggccagcgcgcccagcgcgatgacgccgagaagcaccgcatactccacccaggagggcgcgtaccagctggtcgccgcccacacgtccatgccggaggtagcggccgacgtgccgtcgatgagacccgggccgccgaaggtgttcggcgtgatgaacgagctgaacagcagccacacgcgcttgcagaacacgcccaccaccacgcacgccgaggagaacacgatgaggccggtcttctggcggttcttcgcgaacacgaggatggtgaacgggatgagcacgcccacgatgatctcgatccagaagtacggggccgtggcgccgaagaacatctgggacagcacgtgccagccgccctcggaaccgggatagcccgtggtcagaagctcgcaacccaccatgtagccgtcgacggcgatgcaggtggccagaaggcccgccagcatgcccatgagcttcttcgacgtctcccagatgccgcggcggttcatccacgccagcgcgatgagcagaagcgccaggccggaatccatggccgaggccacgaacaaggggcccatgatggccgaatgccagccctcgcgggcgatctgcaggccgaatatccacgccgtcaccgtgtgcacgaggatggcgatgggcagggcgaaacgcgacacgatggcgatcttggacttgtcggctctcttcgaggtcatgaagtacaggtagaccaggttgatgaccaggtagcacgagatgacgcagatgtcccagaacagaggcgagatgaagttcggggaaatgatcaggttgaagatgcgcgccacgccgccgaggtcgaggatgaccagcaggcccgcgcagcagatgcacaccgtggacacgcacacggccggcagcgccaccttcttgaactcggtgacgtggaagatcgatgccgatgaggccacgatcaaaccgccggcggacaagccgacgaagaacatgaacgcggcgatgtacaggccccaggaggtgccgttgttcatgccggtcacgcccaaaccgaacatggtctggtagatccaggcggccgcccccgcggcggcgatcacggccagaaccaccatgaccggacgggagattcgcttcgtttccatctgggcccccttacgcgttgtagtaacggagctgcgggcgggtgccgaactcctcgagcagctgataggcatggttctcgcgcacgaccttcgagatctcggactcgggatcgtccaagtcgccgtacacgcgggcgcggcccgggcacacgcgcacgcacatggggatgtcgccgcggtcggtgcgctccttgcacagcgtgcacttctccgccacgcccttcgggcgcaccggcacgtccttatcgccgtagttccagttgggatcgcgctcgggctcgctccagttgaacacgcgggcgttgtaggggcaagcggccatgcagatgcggcagccgatgcacttgtcgtagtggatttccacgcgacccatatcgtctttgtacgtggcgcccacggggcacaccttcagacaggcggggttttcgcagtgctggcacgccacggggatgtaggtgcggctgaggtcggggtacgtcccctgcgcgccgtcggcggt

SEQ ID NO: 9272 - DNA, 752 bp, Unknown
  gut microbiota DNA sequence
gctctgcatcatggcatccaggctttctcccagctccggatcgtacatgctgacgatcacgccgatgtacatagccagcaccgccgcgatgatgaggctgacgaacaggttcgcgcgcagctctttggcgaacaacgtcctattcatgagagcctcctttctccacctggttcgtcgtgccgtacaggtgcatgaacagctcttccagcgtttgctcgcgcgcggcgagatcgacgatgtcgtaggcggccaagtcctttacgaacgcgtcggggttgccggccacagctgcctccacgctggccgcgccctgtttccgcgcgtcgggatgcgcctgcgcgaagcggtcgcgcgcggcctcgtcggcgaacgtcaccgcgaacacgcgcttgcggctcttccgcacgtcgtccatgcgctcgacggcggccatcctgcccgcgcggatgaatgcgacgcggtcgcacgtgcgctccacttcgtcgaacaggtgcgacgaaagcaggatggtggcgccgcggcgcttctcctcaagcacgaggtcgatgaagcggctttgcatgagggggtcgaggccgctggtgggttcgtccagcaggacgatgtcgggcgaggtcatgaatgcgcacaccaggcccaccttctgcttcgtgcccttcgacatcttgcggatgcgccgtgcggggtccagctcgaagtactcgaccagctggttcatgcgcgtgcggtcgcgcagcttcttcatgcgcgcc

SEQ ID NO: 9273 - DNA, 196 bp, Unknown
  gut microbiota DNA sequence
ttggtatcaagcatcaaatccatagcgatccttcaaacgcgcttcccgcagctcttcgtcggacatcgtcaaaggacgcttcgtgtgcacctgatcgaacgcctcgatgcgacggcgcaactcatccctatcgggcttctcgctcttctcgaaaggaaggccgtcgtgtttcacggtgtattcgaacaggcgcctg

SEQ ID NO: 9274 - DNA, 236 bp, Unknown
  gut microbiota DNA sequence
gatcacctcgtcgtacaccgcggtgtccagcgtgtcgggcacgaagcccgcgccgatgccctggatcttgtgcgcgcccgcgcgcccctcggacagcaccggcgacgcggccggctctacggccacaacctgcacgtcggggttcatgcgcttgaggtacgcgcccgcgccgctcaccgtgccgcccgtgcccacgcccgccacgaagatgtccacgtcgccgcccgtagcctccc

SEQ ID NO: 9275 - DNA, 374 bp, Unknown
  gut microbiota DNA sequence
tcgggaagcgtcatctcgacggggttctcgcaatcgccgtcgatggagatgacccagttctcgtagatggacttatcctgcttggaatcgtcggtcaaccactggctgggctcgtctttcacggtcttgaagatgcggttttcagccggcgtgaccgtggtctgatcgtaggagaccgaagccttcagctcgtcggccttcacgtcggtgatgcccttgtacaggtcgtacttgacctcgtcccagcgatcgaacacgccggtgtcggggttgatgtagtggcacgactggcagttgccgtcgtcgtcatcgacgaacatggtgctgttcatgtgcagcgtgtggatggcgtcggccagcttgtgccccgagta

SEQ ID NO: 9276 - DNA, 411 bp, Unknown
  gut microbiota DNA sequence
cccgactatagccgcatgcagcgcatgatggaggaaagctgcgccaccatcgcgtgggtggagcagctgggcatcacgttcgagaagtcgtttaccaaggagatggtgggcaccgacacggtgaagcccgacgtcagcgccgaccccgcgacggaagcgggcgtccaggtggcgaacgcgttcgcggccgaattcgagcgcttgggcgtgcggacgatgctgtccgccgaggcgaaagagctgatcatggacggcgatgccgtggtgggcgtgaaggtcgaggggcctgacggcgtccaagagctgcgtgcgaaggccgtggtgctggccaccggcggtttcggcggcagcgcggagtactgcgaccagctggtgcccgccatcaacgagatgggcttccagtacctgggc

SEQ ID NO: 9277 - DNA, 1691 bp, Unknown
  gut microbiota DNA sequence
acttaggagacgccgctcgaagcccgcgctactcccccgctgcgggccttcccgcggtcgccgcacccccggtttcaggcgcgaaaccctcgctgaaggcgctggggatgaccagcgtgccgcccgactgctcgacgctttcgcaggccagatgcatcgtgcgcagcttcatggcgccctgatcgccggcgtacacttcggaggcgtccttcagcatctcggagatgtccttctcggcctcggccagcaccatgcgggcgttcttcttgcgctcggccacggcctccatggccatggcctcctgcagctccttcggaacgacgatgtcgcgcacctccacgtcgatgatgtcgataccccaggggctgagcttctcctcgatggcgtccttcagctcggcgtccagctgatcgcgtcgcatggccacctcggccacggtggcgcgcccgatggccttgcgcatggccgtctgggccacccaggccacggcggccgagtagtcctccacctccacgcacgccttcttggcgctgaacaccatccagaacagcacggcgtccacgttgatgggtacgaggtcgctcgtgagcgtctcctcggcgccgaagtacgtggttgccacgcgctgatcgatacgcagcgtgtagaactcgatgatgggccaggtgaacacgaggccggggcctgccacgcggttgaacttgccgaagcgcagcaccaccgccttctcccactccagcacgatgtgcaccgacgaggacgccagccacccgacgatggccgcacttacgagggcgacgaggccgatctccgcgaacgccgcctgcgccgccgccagcacgatgccgaacgccagcacgaacaccaccacggcgaacacgacggctccgttgcgcgaggcgcggctgcggttggtcaccgagcggatgccgtcgggggcgccgcggccgtcggaatacgcgggcatggcgcccgtcgagaaccccgtcggcccgacgcccgcttccgcgcctgctcgcttgtcgcgtttcatcgttcgatctcccttcgcgttcgggcgcggcctttagcctgcgtcccgcttggttttcgcttcgttcaagctgagcgcgaactgctgctcgatgtcctccagcgacatgcccagctcgaagcagcgcttgaggtactcgctcgtgacgatctcggccgtggacgagatgctgacgcccggcttgtcggacacatcgaggacaaacgcgccctggcggcgtttggactggatgtagccgtcctgctcgaggctcatgtacaccttgctcaccgtgttgtagttcacctcgacgtccgcggcgaggccgcgcacggtgggcagctgatcgcccggcttgtagtaccccgaggtgatgaggtagatgaaccggttcttcagctgcagccagatggggatgctgctcttctcgtttatctcgaatagggccacgtgtccgttctttctattccaatcgaagttcgagcccggtcggctcgccttcgaacgtttgctccgccgccgcgccttccagcgcgagctcgcgatgcgaccccgcctcggccagggcggtgcgcatgctgaacccgcccaccagcacgagcacggtcgccacggccagccccgttcggcacgcctcggagaaggagccgcgcgctgacagcacgccttccaccgccag

SEQ ID NO: 9278 - DNA, 176 bp, Unknown
  gut microbiota DNA sequence
gacgtttgctccgccgccgcgccttccagcgcgagctcgcgatgcgatcccgcctcggccagggcggtgcgcatgctgaacccgcccaccagcacgagcacggccgccacggccagccccgttcggcacgcctcggagaaggagccgcgcgctgacagcacgccttccaccgccag

SEQ ID NO: 9279 - DNA, 211 bp, Unknown
  gut microbiota DNA sequence
atccatagaggacacccccttccgtttatctagaattcggaaatggatgtaaagagggtgctatcctccccgtctggcgagttcgtgcctcctattatagcgagctcgtcttacgtgcagatggcgtgcatctagcgcggatctttctcgatctgctgcgaatctcacgcatttcccacgtgggttccatgccgtttgcccctgtttccaa

SEQ ID NO: 9280 - DNA, 235 bp, Unknown
  gut microbiota DNA sequence
cgtttccacacgctccgacatggttcgcacgttctcggcgcttcggtacgcatgtttcacgtgaaacatcggttcgttttgtttcgggtgaaagcattttcgcgcggtgttgtgcgcaaagtacggctaggcacggtgggcgcgttggtctattctgggatgaatacaatcgtgaagagggaaggggcggcatgctgaggatttccgatacgcgcatcgacgggttcatcgcgga

SEQ ID NO: 9281 - DNA, 145 bp, Unknown
  gut microbiota DNA sequence
gcgccacggcaggggtcgggccgaacctgttcttggcgaaagtggcgctcgacatcacggcgaagcacgcccaggactgcatcggctttctcgaccaggccgagttcgagcgcactatccagacccaccggcccatcaccgatat

SEQ ID NO: 9282 - DNA, 1454 bp, Unknown
  gut microbiota DNA sequence
ccagcacgaagtggcccgtctcggcggcggtcagcgccgtttggatggtgtcgaggtcgcgcatctcgccgacgaggatgatgtcggggtcctcgcgcaacacggcgcgcagggcgttgctgtagctttcggtgtcctggccgatctcgcgctgcgagatgacggactggtcgggcgtgtacacgtactcgattgggtcttccatggtgatgatgttctcggcgcgcgtgtggttgatgctgtcgatgagcgccgccagcgtggtggacttgccgctgccggtttcgcccgtcaccaccacgatgccgcgctggatgcgcgggaagtccatgaccgcagacggcaagcccaacgtctccagcgcggggatgcgatcggacagcaggcgcaaagccgcactcacatggccttgctggcggaacaggttgatgcgcacgcgcacgcccccgatggtctcggcgcgatccagctcgccgatgcgctggatgcggtcgaagccgtctccggccaaacggcgggccagctgctcgcaatcgtcatgcgacagcggcgcgtcgccgtcaacgcccgcgttctcaaggcatccggccaggcggaacttcacgggcagaccgcacaccaggtgcacgtcggaagcgcctacctggcgcgccatgtctatgatgtgctcaacgttcatgcgtggtccttctctttcggtttgctgccatcgccgcgcttttggcatccgccgtcctcttccttactccagcgcggtgatggttttgcgggcttcctcgacggtggtcacgccggtcagcaccagctcgcggcagctgtcctccatcgtcttgaacgagcccgtgcgctcgatggcgtccttcagctcctcgcgcgtggcgccgcccgtgatgcgactgcgcagctcgcggtcgatcaccaggatctcgaacacgcccgtgcgcccgcggtagcccgtgccgaagcacatggggcacccggctccgcggtagaacctcacgccgggatcgtatcgcaggccgatagcctcaaactcctcggggctgggccgatactcctcgcggcaatgggggcacaccttgcgcacgaggcgctgcgagatgacgccgcgcacgccgctggcgatgaggtacggctccacgccgatgtcgatgagacggtcgatggtggacgccgcgtcgtaggtgtgcacggtggacagcaccaggtggccggtgatggcggcgcgcatggcgatctcggccgtctcgccgtcgcgaatctcgcccaccgccacgatgtcggggtcctggcgcaggatggcgcgcaggccgctggcgaaggtcatgcccgttttctcgttgatctgcacctggttcacgccgtcgatgttgtattccacagggtcttccagcgtgacgaggttcaccgaatcggtgttcagctggcggatcatcgtgtacatggtggagctt

SEQ ID NO: 9283 - DNA, 259 bp, Unknown
  gut microbiota DNA sequence
gttcggataatcctcccactcgcccgtctgctggttcttgcggcggtcgttgaccgccacgccgaagcccagtacgggaagcccgctcgcggtggagcgaagctcgggatcgcgagtaaggtttccgctgatgataactcggttgatgctcatgtgtgtctacctcttctcatgccggacgctgggcggtgcccaggtccccgctcgtctcctagtcgcggtccgtgcgcttgacgatcatgtggcgctccacagcgtc

SEQ ID NO: 9284 - DNA, 196 bp, Unknown
  gut microbiota DNA sequence
gacggacctcgtcgaggccggcaagccctacaccttctcgttcaccgtcacggtgaagcccgagatcgagatctccagctacgagcccgtcgagatcgagctgcccgccgaaggcacgaccgacgccgagatcgacgagcagatcgacgccctgcgcgagcactactactcgttcgaggacgcttccgccgccacg

SEQ ID NO: 9285 - DNA, 2419 bp, Unknown
  gut microbiota DNA sequence
ctagcccgtattgttaccagagaggtgaatgcatgcgcttgccgttccagcgaaaaaaccagcccgccgcagcccgcgacagcccgaaaccgcttcgatccgacgcgttcttgctcgaagccatggacgcgtggggcgatgtcgtgtatcgcgtcgcgctggcgcagaccggctcgcccagcgacgccgacgacgtgttccaggacgtgttcatgcgcctgctggaacacgacaccgcgttcgaaagcgacgagcacctgaaagcctggctgctgcgcgtcacggtgaaccgctgccgcgacttggcgcgcctgacctggaaccgccgcacggaaggcttcacgcgggagcatgccgacatccccgcccccgacgcgttcgacgccgacatctgggaggtcgtgggcgcgttgccgcccgacctgcgcatcccggtgcacctgttctacgtcgagggctacgccaccgaagagatcgcgcgcatcacgggatgccgacccagcaccgtgcgaacccgcctccaccgcgcccgcgagcagttgcggaacatgctggaagacgaccgcggccaacgcgagtcgagccttgcaagctgccgcgaccccctatgccgaaaggagccgaaccgtgaccgatccccgcaaccccggcccacgcccaaccgtggatgagtaccgcaccatgatgcgaggaacgcacgtcccggaccagctgagacaagcgaccctgagcgaagcgggcaggcgccggggccgcagcgctaaaaccgtgcggacacccgtccgaacaggcgcgtcggtcaggcgacgctcggcgctcgggttcgccgtcgctgcctgcctcgtgctggtcgcgggaatcggcgcaacggctttcgcgatcaacggccccggcgggttcggaccggggaaaaccgtagagctggagtcccaagacttcacgggaggcggcggctacagcggtccctggtacaacccagccgacgacacgttctggagctacgaatgggctggatacaagtatcatttccctgtgcggtgcgtcgggaacaacatcgaatccgtcacctacgaaatcgaaggcgagcgcagctacttcgagatcatcgataacaccgtcaccgccgagcagcacgacaacggcaagcacgtgttcaattacaccaagtccgttacgttcgactacgaccatcaggagtcgatcgacgaccagcgtatcgtagaaatctacatcggcttcccccttcccgaagaggggaaggaagcgtacgaattggcccttgccggcaaaaactcgctcgaagcgagcaggcagctgaataccgccatcgaaaaaggcgcggcccgggaaatctcgacctcccgattgaagctcaccgccacgttcgccgacggctccatgcaaacgaaaacgtaccgcatcgctccggtgcccgatttcgacgaacgatacgaggcctattccgatgcccgtgccgcatttcagagcatcgagcctccttcaagcgacgcctcccagcaggagatcgacgattacctcggcaagatgcctcaaatgcccaagctttacaacatcaccgagctcaacgaagggtgaacgccgcgttggaacccgcgcgccgcagtatctttttataaccaatatagtcatggacaaaaagtgccgattttctttatcctctatgaagataaggcaaagcggtgcgcttctcaccaggcatgatgggaattgcctgatgctcgatccctctcttttaggtcaaaaaactacagaatactatagctttttgtccatgatgaattgacttatattattttgctgcgacccaaacgctcgcattaccagtcgcatgctagcattgaggaagcggtcgccccacccgcaggaaagactcgcgaaacaaaccgcgtcgacacggtgcgcagcaaagcacccgcaagctttgccatccccatactgcacctccccgcatgcaaaagggccggatccttcgatccggcccggaagttgctgggcgcttgctgctggtatgctgatgccgcgttcgcgaatgtggtgacgggtacgccctggtttcaaaccgaccgaagccggcggttaggcggtcacctgcgctttcatcgcattgacgtgctggaacacggcggcggcgcccgggatcacgtccacggagccgtcggcggccacggacagcagcgtgggcgcctgcatgatgcggtagcgctgcgccagctccacgttctcttcggccagcagctcctcgtagacgatgccggcggcatccatttcagctgcggcgaatttgcagttcgggcacgtccgcgtggcaatgaggtagaggcctgcgggaagcgtgctgtggtcgggcgcagaggctttctcgatgcccggaaccgtcacgtgcgagcccgcctgcccg

SEQ ID NO: 9286 - DNA, 732 bp, Unknown
  gut microbiota DNA sequence
tacacctcggtctcctcgtggcagcacgggcactcgtacacctcgccggcaatgtagccgtggttcttgcataccgaatacgtgggtgacatggtgtaatacggcagcttgtagttctcggcgatcttgcgcaccagcgtggcggccgccttccagtcgggcagcttctcgcccaagaaggcatggaacacggtgccggacgtgtacagcgtctgcagctcgtcctgcacgtccaacgcgctgaagatgtcgtcggtgaagcccaccggcagatgcgacgagttcgtgtagtacggcttgccctgctcgttggccgtgatgatgtcggggaactgctccttgtcgtgcttggcgaagcggtacgtggtgctctcggccggcgtggcctcgaggttgtacaggtcaccgtactgctcctggtagtcggccagacgggcgcgcatgtggttgagcacgtccttcgtgaacgcctgcgccggctcctgcgtcatgtcagcgcgcagccattgcgcgttcaggcacgcctcgttcatgcccaccaggccgatcgtggagaagtggttctcgaacgtgcccaggtagcgcttggtgtacgggtacaagcccgcatccagcaggcgcgtgaccacttcgcgcttcgtgtgcagcgagcgcgcggaaacgtccatgagatggtcgagtcgacggtagaagtcggcttcgtcggcggacagataggccaggcgcggcatg

SEQ ID NO: 9287 - DNA, 3396 bp, Unknown
  gut microbiota DNA sequence
cgtgtacgggtacaggcccgcatccagcaggcgcgtgaccacttcgcgcttcgtgtgcagcgagcgcgcggagacgtccatgagatggtcgagtcgacggtagaagtcggcttcgtcggcggacagataggccaggcgcggcatgttgatggtgaccacgccgatggagcccgtggactcgccgctgccgaagaaaccgcccgacttcttgcgcagctcgcgcaggtcgaggcgcaggcggcagcacatggagcgcacgtcggacggttccatgtcggagttgatgtagttggagaagtacggagtgccgtacttcgaggtcatttcgaacagcagccggttgttctcggtttcgctccagtcgaagtcgcgcgtgatggagtaggtggggattgggtactggaagccgcgaccgttcgcatcgccttcgatcatgatctcgatgaaggccttgttcaccatatccatttcgaccttgcagtcgccgtaggtgaagtccatctccttgccgcccacgatggccggctgatcgcgcaggtcggccgggcacacccagtccagcgtgatgttgctgaacggcgcctgcgtgccccagcgcgaaggcgtgttcacgccgaacacgaacgactcgacgcactgcttcgtctcttcgtaggtcaggttgtcggccttcacgaacggcgcgagatacgtgtcgaagctggagaacgcctgggcgcccgcccattcgttctgcatgatgcccaggaagttcaccatctggttgcacaggctggacagatggctggccggcttcgacgtgatcttgcccggcacgccgccgagaccctcctggatgagctgcttgagcgaccagcccgcgcagtaacccgtcagcatggacaggtcgtgcaggtggatgtcggcgttgcggtgagccttcgccacctcgtcgtcgtagatctcgctaagccagtagttcgccgtgatggcgcccgagttcgacaggatcaggccgccgacggagtacgtgaccgtggagttctccttcacgcgccagtcttccaccttgacgtactggtccacgagatccttatagtccagcagcgtggcgttggcgttgcgcaccttctcgcgctgcttgcggtacagaatgtaggacttcgccacgtcggcgtacccggccgtggacagcacctcctccacgctgtcttgcacgtcctcgacgctgatgatgccgtttttgatgcgcggctcgaaatgggcggtcacgttgagggccagaaggtcgatcgtggagggatggtactgcttctccagcgcgtcgaacgccttggagatggcgcttgagattttggctatatcgaattccgcgatctttccgtcgcgcttctggacctcgtacatgcttgctccttttgctgtggattcgcttcgtttgcgcggcgactgccaaccgttccgcgcctcgcatgcggtttcaaacaccctagcagcgtccaccgggccagtcaatgattgtaatccatatgttgaatatgcctccacaatacacaactatatatggtagattttgccatctggggttttgcgcgagcgctcgatggagctcttcgaaaagcgacctgcgggtttagaacaaagcaccgcgcgggccgttttgcagatgcccgacgccgaagctttcggcgagcggcaacgcgtttgatcgcagggcgcagcgggattatgatagacccctgcgcaaccaactagaaggagcatccgccatgacccgcttccccctgcgccgagccgagcgcgcgatgccgcgcgacgaggcgctggccgtactcgacgccgccgagttcgccatcgtgtccaccgtggacgatgacggcatgccctacggcgtgccgctctccttcgtgcggcgaggcgatacgctgtacttccacgccacaaacgagggcgggcacaagacggtcgattttcgtcgcgacgatcgcgtgtgcgcgacagcggtgacgggcgtcgaagcgttcttcgaagacggcgatttctcgaccagcttccggtcggccataacattcggccgcgtccgcgaggtcgtcgaagcgaccgagttcaaacatgcgctggtggatctctgcatgaagtacgtgccggaggcaaagcgcagcatcgggaaagcgatggagaaggaagggccgcacacgtccgtgtgggccatcgacatcgaagagataagcggcaaagcgcatccgggaccacgtggcgatgcgagcggggacgggcgcacggatgccgcggacgacggcggatgcgccggcacggatgccggcaggcagacggacccggtcgcgggcgcggaaccagtcgccgccctcggcggcgaaggagcctgagccatgcgcatcgccggcttgcagaagctcacgctgctcgatttcccgggcaagaccgcggccacggtattcacgccgggctgcaacttccgttgcccgttctgccacaacgccgacttggtgacgggcgaggcggggcgcgatggcgcggccgcggacagcagcgccctatcgatcgacgagctcttcgcgttcctcggcaaacgccaggggctgctcgacggcgtgtgcatcacaggcggtgaaccgttgctgcagtccggtatcgatgagttctgcactcgcgtgcacgagctggggttcgccgtgaagctggacacgaacggcagcttccccggccgcttgcgcgcgcttgttgaggaaggccttgtggattatgtggccacggacgtgaagaacgcgccagagcgttacgccgaaaccgtcggcgtccccgcgttcgacctcgcgccggtgcaggagtctctcgacttcctgcgttcgggcgcggtcccctacgaggtgcgcaccaccgtggtgcgcgagctgcacaccgccgacgacctgcgcgcgctggctgcgtggatcgaaggcgtacaagcgtggcacctgcaaagcttcatcgacgcggacagcgtgctgggcggcgaaggtcgcttccacgcatgggaccccgacgacctgcgggcactgctgcccgagctgcaggccgtcgtgccgggcgctcagctgcgcggggtggactagagccgcgagggtccgcgccctcgcatgccgcaagcacgcgcctcttgcggatcccgaattccggccaatcgaggaacccgcggcacacgaaccgctcaacaccccgcgaaaccaggcagcgcataggaaacgggaaattccggcaggaatcgacgcgattctgtcatcgagaaagcccgcgcccttcggcctttccgcgtccggccccctaaccagacccgatacatccaggcaaaagctctgtctcggcataaagcaacgagttcagaaagagacggcagaatcccgtcgaaaactgccaaaa

SEQ ID NO: 9288 - DNA, 46261 bp, Unknown
  gut microbiota DNA sequence
gcacgcggaacgtaaccaaaccgatgacgaatgcgatggccgccgtgcccagcgccaccggcacgaggttgccgcgcagcgcgtcgaacaggccgccgtagatgagctgccccacgggttgcgcgcagttcgccagcgacatggtaagcgcgatcaccttccccaccaggtggccgggcgtctcgagctgcacgaacgagatggcttggatgctgaacatcgtggcgcacgccatggatgcgaacaggcccgctaccacgatgccgtacgccagcatcgcgtccatcggcacgcccagcaccacggcgatgggcagcaaccccaaggccgccaccagcaggaacagcggcgcgcggctgagacgcaaacgcccggcgaacacgcccaccgagacgccgcccgccaaaccgcccaacgccagcgcaccctcggcgaagcccatgtactggttcggcagacccaggatctgcgtgatcacaaccggcgcgccgatgaggatgaacgccgtcagcgtgacgttgatgcccgccaccaggaagatcaccttgaggatgaccgtgcgttcgtggcgcagaaacgcgaagctctcgacgatgtcgttcgccaccgtgcgcaccacgcccacgccgctgcgctcgatggcgtcgcgcgggatgcgcaccacggtgacgatgagcacggcagaaaccgcgaacgccgctcccgacacgaacaccaccggctcgatgccgaacaggccgaacagcaagccgcccagcaccgggcccacgaggcccgaaagcgcgctgatctggctgacgatggcggtggcgcgcacgatgccgtcgcgcgggacgatgaacggcaccgccgcctgcacggtgggctggtacacgctctgcgcggcgtacaggacgatgagcgcgcagatgcacaggccgacgaggtcgatgacgccgtcgagtgcgagaaacgccgcacacgtcgcagccagaaggatatcgagcgccgccatgatgcgccgcttgttcacgcggtcggccgcaacccctccgatgggcgtcagcacgatgtaggggatccacgcgcaagccgacaccgcgcccatgagcgccgccgagcccgtttggttcagcacgtacagcggcagggcgaagcgcagcacggcatcgccgaacaacgaagcaatctgcgcgaagatcaccgaaacgaacgatcggttgagcagggtgttcatgattgttcctttcttttacatacattcagtcggtatgtatattgggtaaaaaagaaggttgccaggcaaccagggttcgctaagacatcgcaagaggaaaccgcaagcacgcgccgtcatcccgagcggggcccttcgactcgccgcgctcgctcacaacgacagccgggaacatccgctcgctcgaccttcccttgcccgctttcgtgctgccggaatgtttcacgtgaaacattcgtacgtatttacgagctcatagcatcaagcctttcgtgaaattggctgcgatacccctcgaggatggtcgccagcccgcctacttccagggacaggccgcccagcgccttcacgatatcgaggtagtaatcgacgcgcgcacgcagctcctcggcggtggcggaacggaacatggggctgacccaaaggttcgccaacagcacgatgacctcgctgaactcgcgcggacgatcggtttggatgctgccgtcgcgcaccccctgctccacgatgggcaacacgaaatcgggtaccgtctcctggagcaccgcctggtactgcaggcccagcaaacgcgcgttcttcaccggatccacgtcgggggccgccttggcccacatgtccatctgcggcccggtgatggatgccgcgaacagcgcctgcagcttctcggcaccggtcatgcggccgtcgtcgcggatgcggcgaagctcgtcgaacagcgcttggttgtcgcggtcgagcgcagccgacaggatgtcttccttcgacttgaagtggtggtacaccgcccccttcgtcaagccgcccagcccatcgatgatgtcctgaatgctggtattgtcgtaccctttctcgaagaacaaggccaaggccacgtcgaggatgaggttcaccgtctcctcgggatgcttgttgcgggccatcggccttcctctccatcacgttacataccaacggtatgtatcctacgctcctccaatggagaaggcaagaaaaagtttgccgcacgtcctgggcagcatcatactggtgcgcatgcgtcaaagcgatcagagagaacaggagcatcgacccatgagcacctgccttgttgcacaatccggcgggcccaccgccgttatcaacgccagcctggccggcgtcatccgcgcgaaccagctgaacccgctctacgaccgcgtgctgggcggcatccacggcatcgagggcgtgctggccgaccagctgtacgacctcaccgacctttccgagcacgacctggagctgctgaggcagacgccctcgtcggcgctgggcacgtgccgctacaagctgaagcgcgacgacgaggccgatttccgccgcctcgccgacgtgatggacgcgcacgacatcgaaaccatgttctacatcggcggcaacgactccatggacaccgtggacgcgctggccgaatgggcggccgagaacgcgccgagcaagcgcttcatcggcattccgaaaaccgtggacaacgacctggtaccggtggaccactgccccggcttccccagcgcggcgaaggtggcctgccagatcacgcacgcgacgcgcctcgactacgacgcgtacacgcgccccgaggtgttcgtgctggaagtgatggggcgcgacgcgggctggctggcggcgagctgctgcatcaccggcgacgtcgatttgttggtgctgcccgaggtcgccttcgaccgcgacgcgtttctcgccgaagtgcgcgcgaagttcgaggcgaccggctcgtgctacatcgtagtgtccgagggtgcgcgctacgccgacggcacctacctgtccgccggcgatactgcgcacgacgggttcgcccacgccgtgctgggcggggcggcgcaaacggtcaagcaaatgattgtcgacacgggcatcgtgccgcgcggcgtggtgcaggatttgtcgcgcgcggcgcgctccagcaacttcgcgcagagcctcgtggacgtgaccgaggcctacgacctgggaatgagcgcccacatgcgcagcgccgaccccgccttcaccggccaggtggtgggcatccgccgcaacccggaggccgcagccgagggccgctacgaggccgagctgttcgccggtcccgcaagcgagttcgccaatttcgtcaaacgcttccccgccgagtggatcctgccgaactaccagggcattacgccggaagcggtcgcgtacttccggccgctcatcgaaggcgagccgaaactcgtcatgaagggcggcatccccgccaccatcgtgccgttcaacaagcgctgacgaagccggccctcggcgccgcccagccagcacgccgagggatcgactaacgcgtcgcgccctgctcccgattgccgttgtcgcccgaaacgtgcgttttttcgctcaaaagcgcacgtttcgggcgacaacggtttcgagttacctcccccctacacgtcccgtgtgcgcgtccagtggcgcaggtagagggcgccgatgagcgccggcatcacgggcgacgccgcctgggcgacgaagatgcccacgtagccgaagcccagcacgccgctcagcagaaacgccaggccgaagcgcacgacgaacgcgtcgatcagcgagttcgccaacacgagccgcggcgtgcccgcccccaatgcgaacgagtcgaagctgtacatggccgcgtagaacagcccgttcacgctgcacgtgatgcgaaggtacagcacggccgtatccatcgttaacggctcggtcaggccgtacgcgaccaccagcgccggcgccagcaactgcaccgcgatctgcacgcccacgatcacgctcacgttgaacgtggcgccgatgcgcgccacgtcgcgggcccggcgcagctcgcccgcgcctgcgttctgcgccgccgccgtggtgatggcctggccgatggcccagcacggcagtcccgcgatggtgctgatctgcaggccgacgccggcagcggcggccacgtcggtgccgtagcggttcagcaacccggtgaccagcgcgtacgacaggttcaccaccgccatctgcacggcagagggaacgcccacgcgcagcacctcgatcacgctcgctccaaccggcacgtcgccgctacgcgaaaacgcgccggccaggcgcccgccggggaaacgccgccgcaccacgacgagcgcgccgacggccgccacgctctgcgcgaccaccgtcgcccaggcggcgcccaccacgccgaggcccaccggtcccaccagcaccaggtcgagcgccacgttcaccagcgccgatacgcccaccagctgaagcggcgtgcgcgcgtcgccctgcgccttgaggaaggccgctgcggcgttcatgaggaacggccccgcgcagccgcagcacagcaccacggtgtagccgacggcgccttcgagcgatgccgcaggcacggcgttcgccgtgaaggctgggcgcgccaacgccacgcccagcacggcgatggccgccgaccccgccagggccaccgccaacgtggccgcgtacgcgcgccgctggccggccacgtcgcgcgcgcccacgaaccgcgcgacgaccacgccgtcgcccgccgtgaggccgatgacgaacgcgttcacgatataggcggcgttcgtcgcgttgctgatggacacgagccccaccggccccaccacctggccgaccaccaccatgtccacagcctggtacacgtactgcagcaggttcaccgccatgagcggcaacgcgaacgccagcaaccgcctgaacagcggcccttcggtaaaggaaagagaagcatctgacacgataggttcacctctgagaattcggaatgcggaaacgtaacgaagcgcccgagggcgcaaaaaaacgccgcagatgaatcatcacctgcggcgctgaacgagtccgtcatgccggcatcaaaggaaacgcgcgcccgggtttcgcgcggcgcgtctatcgatgccgatgaatatgcccctcggctccgtgcgatgcttcatcggcgatcatgcgcggagccgctactctgcaaagcttcatgtgtgccttctcgttgaggcggatacagcgtcgcccagcatactgcgcgatgccgaagcggtcaacccgccagaacctccgaagtttcgggcgacggcttccccacctcgtccagcacgtcctttccccaggcgcacatggcgttgaggacggggacgaagctgacgccgcgctgggtgagcgagtactcggttttgggcggcacctggtggtacagctcgcgatgcaccatgccgtcggcctccagctcgcgcagctgctgggtgagcatcttgggcgtggcctgcgacatgcggcgttgcagctcgccgaaacgcagcacgccggccttgctcaggtgccacaggatgagcaccttgtgcttgccgcccacgatgtcgatggttgcctcgaccgggcaatggtacgcgtcgggacaggttttcatgcgcagcctcttccgtccaatactttcttttcgggtagtatattccaaaaaagtatctacttgccccgcagaaaccgaagagtagtatggaggaagaacgaaccgtcgctcgcctcagagataggagcacccatgtcgtttctcgatctcgccaaaaagcgctgctcgacccgcgcctaccagcccgtccccgtcagccaggagcacatcgacgccatcgtcgaagcggcccgcgtcgcgccgaccgccgcgaaccgccaacctgtgcgcatcctccaggtgaccagcgaggaagggctcgccagcctggcgaaagccgcgaacgtgttcgacgcgccgctcgcattcgtcgtgtgcgccgacggcgagaaggcgtggaagcgtccgctcgacggcatgagcaccgtccatgtggacgcgtccatcctcaccgaccacatgatgctggccgccaccgacttgggcctgggaagcgtctggatctgccgcttcgaccctacggtcatccgagaggaattcgggctgccggaaactttggtcccggtgaacatcctggccgtcgggcatcccgccggcgagctgaagagccccgaccgccacgccaccgagcgcatcccgacaagcgagctggtaatccacgcgtaacgaagcgcctttcgaagagcgcaggccttctgcagcacggattttacgtcccacccaaaaggatgccattgcagagcgaacccatttgtgcagacaccgtctgcacaaattcaaaaccgtcctaccgcgcgccctccagcagggcgtgaagctcgcgctggacgctgcggtcgacgttcgtgccgatcaccttcgtggcgatctgcttgatggccgaccgagcgttgcccatggcgacgctcgttcccgccatgcgcaggatttcgtagtcgttcatagagtcgccgaacgccatcatctcgctcgcctggatgccgtgcgcgtccagcacctgctggatgcccgtcgccttgctcacgccgcgctgcatgacgtcgatccatttacggcccgacggcgcgaacacgaagtcgtcgtccagctcgcgcgtgaggatgtaggccatgtccatgacggcatcgtcgcaatacacggatgctttcaggatgctcgtctgcggcgagggcacgtcgaacacgcgcacggggttcggcaggttcttgtccacctctcgctcgaagcgcgcttcgtcgtccaacaagtagctgcgcgtctcgtcgaacagcgcaaggtgcatggtgtcgaacatatcaacgacacgggccaaccgcttcacggccgcatgcgagaacacctccaagtcgaccagctcgccggcgaccatcacctgcgcgccgttcgacgcgacgaagtccatgcagtcgaccaccggttcgaacagctcgtgcagcgtgtcgaagcgccgacccgacgatgctacgaactggatccccgcatcgcgcaaacgcataacgaggtcgtacgagccttccggcacgcactcgtttccgtcgaggaacgtgccgtccatatcgctggcgataagcttgatcatcagaaagccctccttgaaataaccgcgtgttccgatcattgtacgacgctcgcgtcaacctgcgtgaccctacacgactactttgcacgaacttgatacctgttttacaaaaccccagttcaaaatgcttcgcaccctgagcgtgcggagaaaatcccaaaacgcaacaccagattggtagagcgggcggctctgcaaccgcatgatggtaaacgcagaagcgcggccgctcagctccgcgcttcgggtatcatgcaatcgaccacgaagaagggaccgccatgagtttcgccgacaacctcgtgtacctgcgccagcattacggcatcacgcaggaagggcttgccgagcagttaagcgtgtcgcgccagaccgtcagcaaatggaaagccggcacgaactaccctgaaatggacaagctgctgcaattatgcgacctgtttcataccagcctcgacgacctcatgcgcggcagcgtgcatgtcgtcaaagaaaacgacaccgagcgctacgacgagcacatgaaccgcttcgacctgtccatcgcggccggcgtcgcctgcatcctggtcggcgtgggtctgaacgcgctgcttgaagccttcggctggccggataacctgcagaccgtcgccctgctttcctgcatcgtcatcggcgtggtaatcctggtcgtcggcagtctcaaccacagcgaattcaagcgtcgcaacccttccatcgagccgcggtactcctccgacacgctcgatcggttcgggcaacgctacccgacgctcatcgccgtcggcgtgggtctcatcctcatcgacgtcatcatgctaatcggcctcgtacccgacaacagtagctccatgatcaacggcgcatacgtggaggagctcgtcatgttccccttcatgctcatcctcgccatcgccattggcattctcatctgggcctgcatgcaaaagtcgaagtacgacctctccgagctcacctacatcgcgcatcgccgcaacctgggtgccgacatgccctctaccgccgtcgtcaagtcacccgagcagattcgcgccgaacgcgtgatgggcgtcatctgcggctgcatcatgctgctggccaccatcgtgttcctggtgtggggcttcgtgccgctgttcgaccagatcggcggctgggacggcatcgacaagttcgcgctcaaagacgccatccgccgcggcgcgggcggtttcgccatcagctggatcgccttcgtggtgggcggcatcctgtgcggcatcgtgtggatgatcggcagcgtggtgtcgaagacccaggaagactggatcgccgaagcgcgccaggaggacgcctgggtgaagtacgcgcagcaagatgatccctggtcccggggacccgaagaccccgcgtcgtcccaaacgccgaccccgtcgtccgccccgcgcgaagccaacgaccccgcgggacgcacgtggaagcactaggaaagtaccttttggacaccagcgtgtactctttgtgcctagcaccttccctctctctcgccctacgatttcgacccgtagggaaaaccgaatgcccgcacgtggcgggcgaaggaggggtacgcatgaaagattcgcgctacgacgatctgatcgaagcgaccacgaaacgaggtgccgcaaacagcgcgtccttgtttcgcaagagcgtcgtcgatcgacgcacgtttttgcagggagccgcgtttctcggcgcctgcggcggactgatgggattcggtctaaccggatgcacgccagcgaataccggcggcgcggccgcgcaagggtggaaagcaggcacttattctgccaatgtgaccggccataacgccccgttcaccgtcgacgtaacattctcggagaacgccattaccgccatcgacaccagcacgaaccaggagtcgctgggcgtcggcgcatcggctcttgaagatctgtcgaacaagatcatggaatatcagacgctgaacgtggattccgtcaccggcgccaccctatctagcatgagcctccagcaaggtgtgaaggattgcgccgagcaagcaaacgcagcgaaaaccctcgcaaaggctcccggcccggacgactccgtagaatcgtcctacaatgccgacgtatgcgttgtcggcggcggcggtgcgggcctcacagccgccatctctgccgtgcaagccggagccaacgttgtggttgtcgagaaatgcggcatcacgggcggatcgacgaacgtctccgaaggcgcgctcaacgcagtcgatccggaacgtcagcagaagcagggaatcgaagactctgtcgagcagttctacgaagtcacctatgaaggaggacacgaacagggcacgcccgaactcatacactacctgaccgacaacgcgctcgattcggttcattggctcgaatcgctcggtgtgaagttcaaggacgaaacgggatcggccaccggatcgctgggcgagcgaagccactatccagccacgccgtcgggaaacacctacatccgcgctttcgaagcgttcgcggcagaccacgctgaccaactcgtcgttttgcacgagactcaagcgaaagagctcatcctagaaaacggctccgtcgctggtctgacggccgtgcaccgcggaagccaagagatcaccgtgaacgcgaaatcgattgtcgtagccaccggcggattcggcgccaacgtcgaataccgacagcaagtcaacgacggcgtatgggccgacgtgaagctcgacgacaccatcggctgcacgaacatcaagccgtgcgcgcaaggggaaggcctcaagcttgccgagggagccggcgcggagctcatcgggctgtcggacatccagctgcatccgtgcggcacgcccggcaccggcctcatggaagacatccgcacctcaggacgcaaccgcatcttcgtcaacaagagcggggagagattcgtcaacgaaggcgccgaacgtgacaccctgtgcaaagccatcttcgcacagcctgaatcgacgtactggatcgttgtcaacaaggttcgctacccctcggagaccgagcccgacgcgaacggcgcgaccatcgagaacatgctggcgctcggccatatcgtgaaaggcgaaaccgttgaagacttggcagagcagacgcagatggacgccacgaagctgcaagcatccatcgacggttacaaccaggtcgttgccggcgcaaccgaggatcctttcggcttcaaagcaaacaataccgccgaccggcagttgaccgagggaccgtggtatgcatgccgcaaggtaccgacggttcatcacaccatgggcggcatccgcatcaacgtcaacacggaggccgtgagcgcggatggcgaagtcgttcccggtctttacgcttgcggcgaatgcaccggcggcattcacggaagcaaccgtttgggcggtaacgccattgccgactgcatcacgttcggacgccaagccggtacgcaggcggcacagcacgcgacaagctaagcctacccctccccgacgcaccttccttacgccctggccgtatattccttctgcggtcagggcgatcttttgctgatattattctcgcgcgtcggcaactttgtcgagcagctcttgcttggaatgcaccccgactttacggtacaccgtcctcgtataattccggatggtgttttccgagtaattaagcgtttgagcgatgaaggatcgacttcgaccttgggaaataagcgacacgatatccctctcgacgtcgctcaagccgtacaaccctgcgaatgccgcaacaggatcgacgaccccgacctcggcggccccttcggacgcttcgtttcgcatagtcccaagctcgaagccgattgggtaatcgcccatgaaacgcggcctcataatgagcgtcgcttcgaccagcaccacgatcgccatcacgatgagcagccacaaactatgatcgagcgtcgggcctaccgcgtacacaataatgcgtccaacggccatgcacagaagcgaaccgccgtaaaccaccgcgtataccaacgtcgtttgatagtggacgtggcggccgatgagacaaatgaagaacacgagggggatatagaagcacgtcaccgcattggtcagaagaaacgtgctggcttcttcggatccgctcgatccgctcatcaaaaagcatatgctggccatcatgagcgcattctgaaacagccagtatccggacaacttgaacgaacgtccccgcaccagcacgagccacacgacgaacgcgatcagcagcaccacgagcacctgatgaatcgaacgaaccgtttgcgacaattctcgatgacgtccatcggggtatccaagcgccatgcccagcagcagcgcgtacaggaagaacgcgatcagcgcatgcacggctcctgtacgaaacggatccgattcgtacagcgcatcgacccccggagccttccccatgccgtcttcccgacccgcccgcgtcgttttggcgcgctcgtcaaggcgcgtcatcgcctgccagtacgcgaacaccgacagggcgggaatgaacaggttgatcatgcccgaaacgacaggatccaaataccccatgacgagcgagagcgcgcatgaaagagccaagccgccggcagcgtagaagaatacttcgccaggacgaagccgttcgagaaagaaaatccagatgatctcgccgccgaccagacctattcctccgacgatgacgcgtagcgcctcgaatcgggtcgcgtcgaaaaagagatcgagcaagtaaagcaagctggaaaccgtcataagcacgaagccggaccatacgaacacaccgcgcgtcgcacgcgtgaaaccggccttgtacactagcaaaaccagcagcgcgatcaccaccacccgagcgacgttcgcacccaccgtcaccatgcccacgtcggcggaaaaatgcaggttgtagaagttgaactggtaccagagccggtagaagcctatgccgaaaaaagcaagaaccaaaccggataggaatgtcgatctgaacgcctcgaaagaaccagtatgaagataccggtcaaccgcccgggcgcgctcaccacttccgttttcctccccttgcttcatggcggaattgtaccatagccgattccgcacgcagcagaggcgatggagcccgaaagcaccgtgtccatcccaatcgcccgcttgcacgaagctcttcccacccataaacgaggcgctcacgcaagcagcgcaggaacccgtatcagtggccttgctgaaaaccattcatcgggcactgcttgccgacacgaggctctcgggaaacgcacgcctgcgctcggcgcactggccgatgccatggcaggtcggcctattttcactgcggcgagcatggctcgcgccatcggaagatcaatgccgacggcaaacacagtcatcgagcgatttgcagaagccggcatcgtcagacaaatcaacatcggcaagcgcaatcgggcgttcgaggcccaaggcatcatcgaggccttcatcggcttcgaacgcgcggccgcatcaccagccaacgacacgctcgtcagcaaacccgtccgtccggttccgttcaaagaggtacggtagctactcccccagcttctcggcggcttccatccattcttcctcaagggcatcgatctgctgttggagatcggaaatctgggcttggaagtcgccgagcgcggtgaagtcggtggggtcggcggcggccatgctcgcgcgcacgtcctcgatcttgccgttgagcgtttccaccttgcgctcgttggattgcatgagcttgcgcagggtacgctgctcgccgccggagaggcgggagctttcgggcgatgcttcggtcccagataagcccgaatcggcggcgtgcgcagggcgttgacgtgcgggactgccggccgccatggaagagggggaagcgtcggacaacctcaaatactcgtccaccccacccggcagatgacggatcttcccgttcaccagggcgaactggtggtcggtgacgcgctccatgaggtagcggtcgtgcgtgaccagaagcagcgtgcccggccaggcgtccaacaggtcctccaccacggccagcatgtcggtgtccaggtcgttgccgggctcgtcgaggatcagcacgttcggctcgtccagcaggatcaacatgagggccagacggcgcttctgcccgccggacaagtccttcaccggctcgttgaggtcggcgcgcttgaagcccagcttctccagcagctgggcgggcgtcatctccttgccgtccagcatcgtgcgacggctgtagcggccgatgacctggcgcacacggtcgtcgcccagttcggacagatcgtccagatgctgcgacagcacggcgaaacgcacggtcttgccgatcttcacctcgccggcgttcgggcgctgcagaccctggatcacgcgcagcagcgtggtcttgcccgtgccgttctcgccgacgatgccgtagcggtcgcccgggccgatgatccagtccacgtcgtcgaggatcgtcttgtcgtcgaagcgcacgctcacgtgctcgaggtcgaccacctgcttgcccaggcgcgccatggccatgcgcttgagctccagctcgtcgcgcaaaggcggcacgtcggcgatgagttcctgggcggcggccacgtggaacttcggcttcgtcgcacgcgcccgtgcgccgcgcgagagccacgccagctcgcggcgcagctcgttctggcgtttctgctcggctagcgcggccacgcgatcgcgctccacgcgctgcatgatgtaggccgagaatccgccctcgaacggctccacccgtttatcgtgcacctcccacatacgcaggcacacctcgtcgaggaaccaacggtcgtgcgtgaccaccaacagcgcgcccgcgccctttttccagcgggttttcagatggtccgccagccacgtgatagcgcgcacatccagatggttcgtgggctcgtccagcgccagcacgtcccagtcgccgatgagcagccgcacgaggtccactcgacggcgctgcccgcccgacagcgttcccacctgcgcgtcccaagggatatcgccggccaacccggcaatgatgtcgcggatgcgcgcgtcgccggcccactcgtattcaggcagatcgcccaccacggcttgccccaccgtggcagcgggatcgagcgagtcggcctgtcccagcacgcccacgcgcacggcgccgttgcgcagcacgcggccttcgtctggctccagcgtgcctgccaacaggttcagcagcgtcgacttgccgtcgccgttgcgcccgacgatgcccacccggtcgccctcgtcaacgcccagcgacacctcggagaacacctctttcgtggggaaatcgacccgcaccttttcgcatccaagcagaaacgccatcgcccgccatccttcttcacgtagttcggaaggccgattatagcgcatggcgggaaagcgagccgccgatccacgagaaggccgccctcatcttgcgcctcatgcccatacgaaacctcgtctcgaatcccgaccccaagcaggaagaccgactcgcaacgccccgccagctagcgattgcgttacaatggggtcaagccctgatcatcatgcaaaaggaggcgccgcgtggaactccttgaattctcgctgctcatgctggccgccgtgctgctctcatccgtcatcgaccagctggttcccaaagtgtcatcgcccctcatccagatagggctgggcctgctcatcgcgctggtcatgggcacgcagatcagcatcgccttcgatcccaacctgttcctagtgctgttcatagccccgcttctgtacgacgaggccaaaaacctcgacaagaaggcgctgtgggagaacaaacgcccggtgctgtcgctggccgtcgggctggtcatcgcctcggccctgatcatcgggttcgccgtcaactggctggttccatccatccccttggccgcggcgttcgccttgggcgccgcgctcggacccaccgacgcggtgtcggtcgcctcgctgtcgaagcaggtgaagatccccgcacgttcgcgcaatatcttggaaagcgaatccatcatcaacgacgcctcgggcatcgtgtcgttccaattcgccatagccgcagccgtcaccggtacattctcgctggtcggcgccacggcgaacttcttcttcgcattcctcggcggcgtactcgtgggcgtagcgttggggctcacgggcaacttcatcgtgcgccgcgtgcgctcgtggggcctcgagaacaccacgttccatgtgctgttcgaggtgttcgtgccgttcatcgtgtacctggtggccaacgcgctgggcaccagcggtatcatcgcagtcgtcgccgccggcattttgaacgtcgtatcgccgcgcgccatcggcccgtccgtctcgcgcatgaatatcgtgtccgccagcgtgtggcgcgtgctgacgttcgccctcaacggcatcgtattcgtgcttctgggtactcagctgccgcgcgccatgcagcgtacctgggaaaacgtcaccatcgataacgacgttctcatcggctacatcctgggcatcaccgtgctcatgctggccgcccgcttcctttgggtgcttatcatggaacgcgtccatcgccagcgcagaggccggatgacgttggacgagcttcgctcgacggccatcatgaccttggccggcccgaagggaaccatcacgcttgccgtggcgttcactattcctttctccatcccgcagcgcgagctgctgctgttcctagcatgcggcgtcatcgtggtcaccatgctgttggccacgtttgccgtgccgctgatcgcgccgaagaaagataccgacgacgaggattgcttcgacgaggagcaagccaatatcgagatactccgatcggtcatcgaagagctggcggcacgtcaaaccggcgagaaccgcgcggccacgcaagcggtcgtccacggctacaacgagcgcatagcccgcctgaagaacagaagcgaactgcccgacgagtccatggcgcccttgcgcctgaaagcgaaccggtgggaacgcgatttcacgctcgacctccttgaacgcgaggaagtggatcagctgatagggtaccggcacatcaagcgcctctcgcgcacggaaaatctgctgcgccatcatgccgaccgcgtgtcgctgcaaatcgcctacctgcgcgtgcgcacgctcgctcacgcaggatggcatcgtatcgtggaggcgctgcccggcgacgatctctccgagcgcgtgcaggccgagcgcgacctgcgcctccgcagcaacgagcacgtcatcgaaaagttgcaggcggagctcgcctctcccacttcggaagagcctaccgagaacctgagcaagctgctactggaataccaaagcctcgtgcaaaccattcacagcgccgcaagcccgtccatcaccgtgctgaccagcactgcgaacaaagccgtggacatccagcgccaaggactgcggcttgagctggaagccattcaggcgcgctacgaggagggggcgctgccccgctcctcgtacaaacggctgcgcgagaacgtgatgctcatgcaaatcgatctggaggacaacgtgtagaacaagacaaaaggacggagtcaatgtctcattttcagggggacttcgcctcggctgcccagcttgcgcatgcaacccgcgcacgtagcacgcgcctcgcctagaacagaagcatcaccgcgaccacgaaagcagccgtcaccacgaaaccgcctgcgacgatggcccacacagcagggcgcgcccagttcagcgtccaaccgacgccgaaacgctcgggcaggaacaggctggcatcgtcggggttgcagtagaacacgccgaacttccaataacggtcgtcgtccacatgcagccgatcggatgtctgcatgttcttgaacacgcgcgaacccgcctggccgtacacgaggctgatggccatggcgccgacgcacagcacgatagccgcgatcatgatgaagacggctgcctgacccaggtcgatcacgttcatgaacgacagcggcatggcgatcatggccaccgctatcaccacgcctcccgccaccagatagatgctctgcgcgcgggcgaacaggccgtaggccagcgccgacgtggccggcgcgccgggttcggcccacttcttcgaacgagcgatggtccagtgggagaacacgaaacacgcggccatgaacccctggatgagtaccggcatccacaggatgagcggggttttctcagcccaatcgttcacggtgccgtcgaagcccatatgcatgggaatcatgtcgggcatatgcacgtaacccaccgcgcccacggcgaaggtgatggccatgatgggcaggtacaacaggttccatttgagagagatggctcgcggcacgggctgctcgcccaccaccgcgacagactcctgcgcgtcagccgtccaaccgcgcttggctttgtatgcggacatcttggcgcggaacgccagcatgagcgcgtagccgcctgcggtcaccgccagcgacccgacgatcagcgcgcccagcacgccgcctgcgttgcccatggcggcgctcgcgaagccgatgaccgtgaacaccgccgtagccgacccgacgatggcggcgtagcggcgcttgagtcctacgacgtacggatcgtgctgctcggaggtgggaacggtgaccgtgaacacctcgccgcggcgcatgaggtacggggtgatggccatgaacgcgccgatgaccggcatgagcaatgccgtaacggccattatgacggtcgggtcgaacccttccactacagcgcaccccctttgaacgccggttcgcacgaggcggcgcgctcgatgttctcgccctgcgcgtcgcggctcgcttgcgcagttcgggcatcggatcgttcgcccgccccgtaggcgcgcgcggcctggcgctgcgcgcactccaggaactcgccccacgtgccgccgcgcgcccggtgcgccaacgccagctcgaacaggccgtcctccatcttcgccagctcgatttgggcgcggtcggcccgatcgtcctcgcacgggtcggcgatgtaggcgcccgatcggccgcgcatcagcacgtagccctcgtcgcgcagcacggcgtacgccttgttcaccgtgtgcaggttgatgcccaagtcgctagccagcgcgcgaacggatggcaacgccgtgccgggcaccagctcgcccgtggcgatggccgcgatgatctggctgcgtatctgcaggtacagcggttcttccgacttctgatcgatgcgaataaccatacgcacgccttctccctttcgtttcctcgtcgtattgtagcgcgcgcaaccgagaggcggcgatcgcgcaggcgattatcgtctcgcacattcgtcctccgcgccgccttgagcgactacgccctcagcccccgcttcaccgcgccgcggtacgccgcgacggagaccgcggccgccagaagcgccagcacgagcgacgcgcccacgcctagcaacgtcgtgacgcccatgccgaggacgcagaacaccatgccgatcatgatcacggcgaacaccggaacgccgcgcttcaccggctcgtacacgctggtccagtcgtacttcgggctgcgcgcgtcaagcgccagtcccagacatgccgccagcatgctggccgcaagcggcaccgcgaacagcgctgcgacagacagggcgtccagcggcagcgacaccgccatgagcacggccgacaccgcgaggcactgcacggcgatggccaagttgacggccaccttcgctcccagcaccgtcgccggcgacacgggagccgtcagcatgagccaacgcgccgagccctcgagcgaaaccgacgcggccgtcgtggacgagatagcgcagaagaacgcgagcgcccacggaagcagcgcgccgacgaacggcgcgtacgcgggcggcagcaaatcgagcgacagcatccccgtggcagagcccaccgccaccgcgacggctgcaaccagcaccagcacgtagcctatgcacgcgttcatgaagtagatgggcgtggcggccaaaagccgcagctccttcaccatgagcgcgcggaagggcgtggacgacttcgcacccgcgcccttatcgccgtcgaacgagaacgtcccgcgcggcctggacgacatgagcagcgagttcaccggcacgaataggcgcacgaccagcgcaaacactgccgccgcagccgcgatgttgaccgcagcgaaggcggcgaactgcacgaggtcgccctgcacgatgcctgcagtcgcccatgcggccggcgggaagatggccgcgagctgccccgtcagctgggcgccgagcgcactcaacgccgccaggtcgtcggattggccggacagcgcgaacgagccgaacaccgccgccagcgtggcggccagcgtcagcacgatgaccgcgacgttcgcgtgcttgaagcgcgaggacaccgcagcgatcagcaccgccagcacgacggccgcggccaggggcagaagcggcgccagcacgatggacagcgccatgcacgcgaccccgaccgccgacaccccggcagccgacgcgtacacggcgaaagccggcaccatcaccagcacgccgaacagcaggctcatggcgtacagcgatgcgatacgcgacaacaccaccgacgacgtgggcacgggaagcgacatcaccaggtcgtagtccttgaagccgaacagcacgccgttcgttttgaggaacgccgcaaccgcgccggcgatcgcgcccaccagcaccgcgaccaggggaacggcttcggccaagccgatttggacgagcccctgcgccacgcccgccgagtacgccgaagcgaacagcaccacggccgccacgaccagcgccgcaagcgccagcgtgcgcttcgccttcgcggggtcggcgtgcagcgtcttgttgatgccgaacagccctagcagctgtatcttcagcagcagaatgaacggtttcatggcaaaccccctacgcgttccggtcgatcatgtcgaggaacacgtcctccaggctctcgtcgcccaccacgtcggccgtcgggccgcatgcgcgcagcgtgccctgcttgatgatggccaccttgttgcacagcttctccaccacttccagcacgtggctggagaagaacacggccgagccgccatcggccagctcgcgcagcatctccttcacgtggaaggacgcctcggggtcgagaccgacgaacggctcgtccagcaccagcagtgtcggttggtgcacgagcgcgccgatgagcaccagcttctggcgcatgccgtgcgagtacgaggagatgaggtcgcccagcgccgaggtgaggctcagccggtccgcgtacgcccggatgcggcgttcacgcacgtcggcgggcacctcgaagatgtccgaaaggtagttgagatactggatgcccgtgaggaactcgtagatgtcggggttgtcgggcacgtaggcggtcatgcgcttgcaggccagcgcgtcggttttcaccgactgacctgcgatgcggatgtcgccctcgtcgaagcccgtcacgcccacgatagcgcggatgagcgtggttttgccggcgccgttgtggccgacgaatccgaaaatgtcgcccggcatgacgtcgagcgtcacatcgtccaccgcccgtttcgcgccgaacgccttcaccacatggttgaccgaaagcaccggagcggccttcttctgttctgccgtcatgcgcgtttccttccctatccgcgatccgttcgcggttgttgaccttcccgcggttgtttgttatatttatgctataacagatggaacaaagatgcaagagccgtgctggggatcggattcaggagagacaaggggcgctagcatgaagcggatttctattttcttggcgatcacgttcatattgacctgggcgtacgagttcggggtggtgtatccgatatcgtcgggagcgctcgtgggcgttcctccggtcgccgcgcagttcgccaccggcgccgccatgttcttccccgccctgggcgtgctcatcacgcgcctcgtcacgcgcgagggattcaagaacagcctcatcaagccgcgcgggttcaagaaatccctgccgtggttcgtcgtcgcctggttcggtcccgccctgctggccgccatcggcgcggcggtgtactttctggcgttcccgcaggatttcgaccccagcatgtcgaccatcgtcgccacgcaacagcaggccgcagcggcggcgggcgcgggcgacgtctccgccgaccaagtgcgcgccatgctgctggcccagctgcctttcgccgtgttcctgggccccgcgctcaacatcttcacgacgttcggcgaggagtggggctggcgcggctacctggtgccgaagacggctgcgcgcctgcgcatcgtgccgacgctgctggtcacgggcgtgatctggggtttgtggcacgcgccgctcaccatcatcgggcacaactacggcgtggggtatcccggctggccattcgccggcatcgctgccatgtgcgtgttctgcacggcgcttggaatcttcctcacctacgtcactgtgcgcacgggcagctgcttggcggcggctgtcggccacggtgcgatcaacgcgttcgtcagcgcgggtatcatgttctcgctcacgggcggcaaccccttcgtgggacccatgcccgtgggcatcgtcggcggcagcgcgttcatcgtggtcgcggccctcatgctgtgggatatgcaccgccgcgagaaagccggcaccctcgctatgccgcaggcgggcctgcccgacgacatgacgaaagccgacctcgcccgcacggcaagctagcatacgcgcctaccgcttgatcaccgggcagacgacggcgctgacggcgggcagcgccgcgcacaggtagagggcggacagcgccgaggccgatgcgtcgacgagcgcgcccgccaacccgtcaccccaagaaagcgaaccggaacccaaacccccttgctcagcatcgaacgggataacaagaacggatgtttcacgtgaaacatcccgccgcacttggtgcggtcgccgcgcaccaagaagaagtgagggcggggtcgagctcgcgctttgctcttcgaacgctacggccggcgccctcctcccctgcgcctgcgcgggatccgcggacgcaaagggcgtcggcgcagtacgcacccattcatctgcgcaagcacagcctcgcatcatttcgcgtcgcgaggctcgaaccgatttcaaggacccctctgcaactttttcgacttcgtggcaggcttcagggtcgaaaacgatcttccggatgatcgatcgactgcaaccaatcgagaagctcttggaaaacccctggtcggcgctttcggcggcttcctcaacctgccacgaagtcgaaaaagttgcagagaagctcgatttttctactcgagctgcacgagcgggaggctggcagaaggacccctgccatccgagtacgcttcacatgaaacaccccgccgtcgttgcaggcggcacgcggcgtaggagggacgccccgaaacggaacgcccctcctcaagatcgccgcgctatacggtgatcttgcccttgcccgtacgctcgacctcgcacaagccggatcggaagggagggaatccggtgatggggtcgaagtcgcgcgtggtcagcaagttgatatcggcctggtgccaaccgtggaagacgtccacgacaccgggcagcacgaggttcgtgatctcggctttcatcgtcacttcaccgaactggttgaacacgcgcacctgcgcgccgtccgtgatgccgcgcgcctcggcgtcgtcggggtgcaggcgcaccaccgggtcgggcatgaactggttgagccacggcagatcgcgcagcttcgagtgggtgtagtacggcacgcgcgagccgctgttcagcaccagcgagtagtccttcgcctcgtcgggcgtgctcaccgggctatgcaccggctcctcgtacaccggcagcccctcgaagccgtactgcttcagaatctcgctcaccagctcgatcttgcccgtcggcgtgttgaagccgggctggccgtccttgcgcaggccgccggtctcgtacttcttctcgtccttcgagccgcccggcacctcgtaaccctcgggatgctcccgcagcagctccagcgagatgtcgatgcccgcaccccggtacatatcgtcgagcgccgcctccacgctgccgccgtagcactcctcctcgaagcccagcgcgcagccgatctccaggatgatctgccaatcctcgcggcactggcccatcggcttcaccaccgggtcgcgatggaagatcttgcggccgaagatggctggcggggccatgcgctcgtagcacatggcggccggcagcagcatgtccaccaggtcgtgcgtccaaggacgcatatagtagtcgatggccacggtgaactccatgtccttaatggccctctggtactcaggcgtctgcggccacatcatggagttcacgcccagcagcacgccggcgcggatcttgccgtcggccaccagctcgggcaggtgcgcggtctggatcatcttgaaatagtgcgcccacaccgggaagtcatccttgtcgtagcggatatcctgcaggcccttctcggcgtacatgtcctcgagtcgaaacgccgcagtggacgccgagtaatcgaacggcagccccggccccatggccaggccgcccgccacgtccaaatcgcccgtcagcgcgatgatcgagtacaccgcgcgctggaagttgcccacgttggtggcgtggcacgcgccggccgagctggacaccagcgtcgcgggcgcgttctcgcagatgatgcgcacggcctcctcgagcttcgcagcgggaacccaggtgatctcctccacgcgctcgggcgtgaactcctgcacgtaaccggacagctcgtcgaagccgtgcgtccacttctccacgaagtccttgtcgtacagaccgtcgcgcagcatgacgtggatgaacccgagcgcaagcgcgccgtcggtgccggggcgcagctgcagatgcacgtcggccaagccggtcaccgtgggcgtgatgcgcgggtcgacgacgacgaacttgcagccgcgctccttctgcttcatcatgtcgccgaaacggtagggctgcgaccatgccgggttgagcgaccacaccaggcagctggccgtggcgtcggtaggatcggaacccatggtcagctggccggtcaccagctgcgagcagatccacgtggccgccgcgcaggtggagctttctgtgccgtacgtgggcgagccgaacagcgtggccaggcgctgcatagcgccgcgcggctccttcgggtcgccgcagtagaacagcaccgcttcgggaccgctctcttctttgatgcggttgagctcgctggcgatgcgcgcgtacgcgtcgtcccaggagatgggctcccattcgggcgcacccgtgcccttcgggttcgtgcgcaccatgggatacgtgatgcgatgcggatcgtacaactcctgcaagctggaaatgcccttcgcgcaaatggggtcggccgggtacttgtcgcgcgcctccacgcgcaccaccttgccgtccttcaccgacgcggcgatgccgcacttcggcacgtggttgcacatgtcgcaataggtgttcttcacctcgatgggcgcctcttccgcaacggccccttcgggatgcacgatctcgtacgccccaccggccagcgcggcacccgcaacggccgccgtccccttgaggaacgtgcggcgcgaaacattgatatactcgctcatagtatccccctaccttcccttcttcgacgaggccagcgcgttggacggcagcacgtcaagcggcatgccatcgaccgggcggtagtagaacgaagtctcgtccacgcgcagcaccgcctcgtcgccggcgatgaacttcgacaccgggctctccgggtcgtccaggtcgccgaagtagcgcgcgcgacccgggcagttcaccacgcatgccggctgcttgccctcggccagccgggcctcgcagaagatgcacttctcggccaccagctcgcgctgcacgccgtagaactcgtagggcgcgggcacgtcggcgccgaacatgttctcgctcgtgcggttgagcttgcgcgcgccgtacgggcacgccgccaggcacagcccgcacgcgatgcacttctcgtagtcgatgacggtgatgccgtcgtcgcgccgcacgctggctcccgtggggcaggcgtccacacacgcgggcttctcgcactgcacgcacgcgttcggcacgtacgcccgaccgctctcccctgcctgcgtgccccattcgtacacgtccaggttgttccacgacacccccggccgctggttgttctgcatctggcacgccaccacgcatgcgccgcatcctgcgcatcggcgcaggtcgatggccattccgtaccttgtcatcccctcgtcctttctccctggcgcggccgtttcggctcgcacatctcctggtgcgaactctacgcgggaccgagggcctcttccagaagcgcccgcaacaaccgatttccgtatttcgccctcccgcgcggctggcagcggcatcatcggtttctggcgtacgccaggtttaagcacgtcaaagggacgggcgacttgacacacctcaaccttgtcggtgacgagcggcatgtgtgtcaaatcgcccgtccctttgacacacgacacacgctcttcggcgttggcggcaaacccccacaagtgatagtattgtcctggggattcaccatgcagcgcggctggccgagccgcagggagagggaaccatggcaaccgagcaagagtatcgatccatcctgataccgaaccagccgttccgccggctgaagatcgccgactacatttcgcaggggaagaagaaaaagctcttcaagggcgagtacatccgcacgagcgccaagaccatcgacgacttgtactattactacatcgacgaaggccagatcgtggccacgttcgagcaggaatcgggcgaggtggcgccgctgtactggcgcaacgcgggcaacgccttctccgccgagtacaacgactacgcgtccatcggccgctacaaagcgcgcttcatcgccgcgcagaacaccgtgctgttcgcgttcacgcagcgccagctctacgagctgagccaggacgaccccgagctgttctacgagttcatcaacgtgtgccacatgtcgttcgcgcagatgggacaccgcatcagcaacacgggctaccaatcgtcgacgaagcgcatgatcatgtggctgcagaagctgtgcgccacgcaggaatgcgacgagcacggcgtgtacgacatcgagtgcaagctgacgctgcaacagctgtccgagctgctgtccatccacattaccacctgcacgaagatcgtggcggcgctggagaacgagggcgtcatcgagcgcacgcgcacgcgcatccgcatcttcgatgcccagcgcctcgcccaatacggcctcgaggacaccccgctggcgtactgatcgctcctatggcgcgaagtcgcgcttgcgatctgaaggagcgcgttccgcgccgattcgtgacggacgcggcgcgcgaacgacatggcgaaagacgctcaccttccccagccttatgcaaagcgagacaacgcatcatcgcccgtaaaacacggttttcgcacctgagacgtgtttttcgggcgatgatgggccgcgcacggctccgctcgctgcgatcgcgcatgtttcgcagctagcgtaccttcgccacgatgaagcccagggtggccacggccatgacggcggagaagccgaaggccagctggtaggccagcgcggggttcgcgagccccgccgcagacgcgcctgccaccgcgatgaggaacaccatgaccgacgtgcccagcgacgcgcacgcttggcgggccgagatgcagaacgacgagccgtcggccacgataggccgcggcagctgcgcgaggctccacgacgtgagcggccccaccagccccgacacgcccaccgcacgcacggcctggcacaacgtggtcacatacaacggcgtgtccgcatcgagaaacgacatgagcaccgcgccggtcgccagaaacgcgcccgacacgagcgcgacgggacgcacccccactttgtcggtgagcacgcccgccagcgggttcagcacgagcgcggccacggtgccgggcagcagcacaaccccggcttcgagcgcggtttcgccgcacagcccctccacgtacagcggcacgatcagcgtcacgcccatgaaggaggcgttcagcaggttctgcgcaatgaagcccgcgcgatactggcgcgatgagaagatatccatgctgatcagcgggtcgtccacccgcttctgccgccgcacgaacagcacgaggaacagcgcgcccagcacaagcggagcccagatgaacgggctttcgaacgagaagctgctcgcgttcgagaacgccagcagcagcccgccgaacccgagcgtcgactgcgcgagcgacaccacgtcgaggcgcgcgctcttgtcgggagccgccgagggtttgatggcgacggccgccgcagcggcaagcgccaacatgatgaccacgagcagcacgaagaagctgcgccatcccagcgagaagctcatcgccccgccgatggtgggaccgatgttcggcgcgaagcccatcgcgatgcctgccacgcccatggccgtggcctgacgaccgcgcgggaagcgcgtcatggcgatggtctgcatgaggggcatgagcatgcccgtggagatagcctggaacacgcggcccgccagcagcacgccgaagttgggagcgaacaggtcggccagcgcccccaccaggaagaacgcaagcgcgatgaacacgtgctggcgcaccgagaagcgtcgcgagaggaacgtggccaccggaacggtgatgcccagcaccagcatgtagctggtagtcagccattgtcccaagtccaccgtcaggccgaactgcagcatgatgtcgcccagcatggcgttgaccgcagtctgcgagaggttccccgacgccgacgccagcacgacgatggcgaacagcgcgtacacgcccatccgctcgctcttcactcgtttcatgcccgcatgtcgcctaccctccgtttcccaccagcgcattccagtatatcccaaatatgcgcgaacgcaggaggagcctctcgcgcttcgcgatgcaaaatcgctaaagcgcacgaggctcctccttggacgggtcgcttgaaagacatgcgtgcggccatcggatcatcttagcgaacaacccgaaagcaatcgactccggaaacgcctatcgctacgaacgagcgagtgcgcttctagccgatatcctcccgaacgcaccgcactcccccacgtttccacctccttggtacagatggccccaaatcgagccgaactcaccggcagaatacaatcccggaatagcctgcccgaacgggtcgagaatctcgcccttttcgttgcgaaccggaccgccatcggtattgagcagtgcagggacgcaaagcatcgcgtagtaaggaggctggttcaaaccggtgagcgtgtcagaaggacggtagaaagcgagatcctctcccttgtccacaaactcgttccattgcttgaccgttttcagcagctcgtcttcgggaacttcgataaccttggcaagctcctcgagagtgtccgctgaaaccgcccatccgtcaccgacgggatcggtcgaagtctcttccggacacgcacccgcgtcaagacccgcctgatcgaatacgaaccaacccttttccggcaagggaaggtgcgccatatctccaccgaactgcgtgatgccgtgtcggtagccgacgttgcgagttatgtcggtatcgggcagcgcatattttttgaaattgctgcatgcgtcgaagtcctggtagaaccttcgtccgttcacgccgacggtgatgccgtgctgcttcaccgtaaacgagtacaacgtcgaaacgaaccgggtgttctctatgttgcgcaaagagagccagtattgggcgcctccgtgcatatgccagaagtcggcacccgctttcatgcagatacgatgcccgtcgccagtgttcgccttgcctgcatacggatagcctttgacgcccgtatagtcgcgaagcatatccgggtcgctttcgaagccccccgtgcacatgatgacgcctcgcttcgcacggtacgatttgccgcccgccacaacgcccgtcacttcgcccgttgaggcatcgcgaacaagcgactccaaaggcgtggaagccttgtactctatcgtgtcgttgcgcttcttcatttcggaaaacaagaactcatggatatgatggggctgatcgccctccgttttgaagagaaggaagcccaccgtgttgtcgtcggggtactcggcgtattcgttcgtctcctcccccgatgggtcgggttcgtagatgttcagccactcttccttagcccccaaacccaaaatccagttcaggttttccttcgattcttccacgaacgccctgatggttgcttccggagtgctttcccctataaggtgtcccaagtagttcatcgggccgtcggtttcgtcgaaatacagctgccaacccgcgcagaacgggctgttcccgttcggaagcgagtccttttccacgacaagacaggaagccccgtcaccctcgtccgccaccgttatcgcagcagtaagccccgcaatgccggcacccgccactatgacgtcgtactctccgtcccatttctcattggaagaagccgaatcggcttccccgctggcgcaccccgcaagaccgaaagcggtagccccggccaaagccagacctgcccccttcaagaaattgcggcgcgttgtcttggttccctgctgattctcattcgtcatcgcgcattccccctccatatctcatccctttctgcatcgatcgctagcctgccgaagccagcgcctcgacagacggcaaggctcgcttccgcaacctgccgcttccacttttacccttcctcccgagcccgttcatccgacaaactgtccgaacgaggttgaaacgcatccccgaaccggatgattttcgtcccggacgcactatgcgaggcaatatcgctatctgcgcgcttaccgcgagaacctcgatgttctatagtggatcgaaccagaaactgcaccgtctcgaaccaggcacgaccaagaagagcggcacgcgttttcgcgcgctagcgtaaggcctgaatcggacgcgacgcgataaacggtcaacggttggtcgttcgaatgaaatcaggcttccaaatctctctggaatgcagaaaggcgcccatgaagaacgtcacgccctattcgctcgatgacgaagctgttcgttcggatgcagccgtctccgtcatatcttcgatcggattgactgccgtgatagtatgggccgacctcttggggcacggattcggattcgcaccgtcttcgtcgattattcaacagctgggaaatgcccgtcttttctttctcgtaggattcaccctctgcgccataggatccgtgcttttagcgagagctccacaaagaaaaacgcaggtgctgacaaaggcggctccgacagccgctttccttggaacaggactatacggcttcgcctacctgcaaacggcgctaccgtcggagatcatcgcgcttctgggactcgtctgctgcggcgccggatactacgcgacgactttgctcatatattgcgaactcgcaaaaacgaaacgcctcgtcatggcaataggagccttatcagcgagcttgattctcaaaacgatcgtcggctcggagttaagcacggctctgacctcgtcggcacaagtggtttttgcttcgattctgccttgggtctccttcgcgtgcctggaggcgctcaagcgcttcggcacatcacgctatctcgaagcataccgctctcgcccacttttgacgaaaaaaggtatgtacgacctcgtgtttctgctagtagccgtatcgttgatactggcggctctgagaggcaccagccatcttggactctggggaagcaaccatttgggatcgcccgtctcaactccggcaggctacctcacagtcgccctcgctttgactgcttgcgcatacctcaccctgcttcgcaacagcaataatcagatgcttgttcgataccagcctgcgttccttgtcctagccggaggctttctcatctacgttcttcagaatgagtacgttttcgcacggatcgcagatcccgtgttcgactggctctacctgaccgtagagttgttcgggcacctgctctcgggaaccatgatcatcaccgccatccgctcggcatcggcgccggcctggctgttccaaggaataagcgattcagctttcggcttagtcgctgtaccatggctgctcctcgttcaggaagctcatgtcgatatcagaatcctgatggccgtagccatcttcctcgtgatggtagccgccatacgtcccatgagcacgcgccccatggaaatcgagcgctcgctctctttgtcatcttgcgaaggcgcagcggagcttcaaggcgatcgttcgacaagcgcaagcgagccaacagagcgcaacgaaccctcgatagagcaacgcgtcagcgaaaccctgacgaaataccatctggaaatcgcgaagcggcacaatctttcctcccgcgaaagcgaggtattcccccttttggctcaaggcagaagccgtccttatatttgcgaggtattctgcttgtccgatggcaccgtcaaaacgcatatcacgcatatctaccgcaaattcgatgtccacaatcgacaagctttcatcgaccaagttcagaaagagatcgcggagctcgacatgcgcaatggacaccaaagcgcatagcgccaaaactcaaacgagcagcaggcacggacgccaaacgctgtccccgaattggcagccatgacaaaattagcttcggcgaactcgcgttgggatcttcacgacctggccttatgtcgtgcatccgccctggcattcagtccaacccgtccaaaatcgcctccaaaattgccacagcttgccatttggggacagccaacgaggacgtcctccgacgcaattacgccgctgctttggcgcgcgtcgacatccttgcccccattgcatgataatgccagttcagctatatttagtattgctaggctatagaggaagggagcgcacatggcggaaaacgataccgaccgaaacgaaccatgcgatcccgacatcgacgatacagccgctgcgcccgcctaccgcatgagccgcggacgcgttgcgctgctggcggtgctggccatcttgccggtcgtgttgaccgcgctcgcccaaccgtttctgccggatagcgttcccctgcactacggagcaagcggcccggatcgatggggatcgaaaggcgagctgttcgttgccgccggcatcatcaccgtcatcgcgttcgtcctcgtgacggtatacgccgtggtcgaacatcaacgagaaacggggcgggaggattggctcgtcgtcgacggtcccgtcaccagcatgtttcccgtcttctccatctgccttgcgatcattgattgcctcgacgccgcctacgtcttcgccgccttccagctgggaggcttctcgatgccagagaacatgggctcgctcatcggagggatcgtctgcctcgtcgtggcgctctccctactcacgccagccctgtacatgctgatcacgggcaagggcctctcgctcgtgaacttccatcccggaacgagcgacctcgagaaacgcaccggagccgacaaacagcaggcgcgcgccatcggcggtttgctgctattcctcaccgtcatcgtcctcgtggaattactcgtaacggtgaaatgaaaacgcacccgccactttcgacgggtgcgcgctagttgaacgcttgctgggtcttctccaaccctacctgcaccaaggacaacgccgcttgtgcgccgcggtcggtggcttgggcgaagtcgtcggccgcgtccttcttcggcttcgacagcacccagtccaccacgggcatgcgtcccggcgggcgcccgatgcccacgcgcacgcgatgccagtcgcgcgttcccagcttgtcgcagatagagcgcaggccgttgtgccccgcgtgcccgccgccgaacttcacgcgcacggtaccggggtcgatgtccagctcgtcatgcacgacgatcaggtgctcagcatccacgccgtacgcgttcatcagctgcttcaccggaccgcccgacgtgttcatgtagctttgcggcttggccagcaccaggtcgtgatcgcgatacacgcctttggtggtcagcgcgccgcattccgtcttccagtagcgcgcgcccacctcctcggcgatcaggtccacggcgtcgaacccggcgttgtgccgcgtatgctcgtactcctcgcccggatttcccaggccaacgatcaaaaacatcggaccctactcgaacagcgaggcaacggagccgttgttgtagacgttgctgatggtcttcgcgaacagcgggcccacggacagcaccttcaccttgccggtctggcgctccagcggcacgggcacagcgttcgtcaccaccacttcctcgatggacgagttcgcgatgcgctcgtacgccgggccgctgaacaggccgtgcgtcgcgcacgcgtacaccttctcggcgcccttcgccttgagcgtggtggcggcggcaaccagcgagccggccgtgtcgatcatgtcgtcgttcaggatgcacaccttgccgtgcacgttgccgatgagcgccgtgatctcggcctggttgtgcttcgggcggtccttgtgcatgatggcgatgtcgcagtccagcatggtggagaacttcttcgcggccttcgcgcggcccacgtcaggcgacacgacgcacagcttgtccttgtccaagcccatgctctggaagtagtcgacgaagatgggcatggcggtcatatggttcaccggcaagtcgaagaaaccctggatggcgtcctggtgcaggtcgatggtgatgacgttgtccacgcccgacgcggccatgagatcggccacgagcttggcggtgataggctcgcgcggggcggccttgcgatcctggcgcgcgtagccgtaatgggccaccaccgccgacaccgagcgggccgaggcgcgcttggcggcgtccaccatgatgagcaactccatgagcgcgtcattcacgtcgtagcccgcgccgctgcacaccgattggaccaggaacacgtccgcgccgcgcacgctttcctggtagcgcgcgtagatctcgccgttggcgaacttctcaagcttgacgttgccgagcgacacgttcagatccttcgcgatctcctcggcaagctcggggttgaccgaccccgagaacaaggccatgctcttctgcacttccgtcatgtgcgcgctccttcgcttcaccctcagggccgccgcaccgcgcagccgtcgccccctgtctcatcggcactattgtatccgcacgcgtcgcgcacgcacagggtgaacttcggcatcttcgcagattgaccgcaaggtctgacaagaggcaagcgcccaactccggacggagaacgctcagcgcacgatcttcccgtcctcgatgaggctttgcagctcctgcttggaatgcacgcccgccttcgcgtagacgttgcggatgtggcttttcgccgtgttgaacgagatgcccaactcgcctgcgatgtactcgatggtatagcccttccccagcaggaacagcacgtcgcgctcgcgcagcgacaggcccgcctgctcggccagcgcgttgcagcttttcgtccaggcgccctcgcgcggcgcgccgtcgccgtcgctggcgcccccagcgccctccggccccctgccgctagggaagaaatcgcccgtcccctggtcggtctgggcgttgcgggtcttcctgagcgccatgccgatggtgcgctcgttgaggatgaccatcgacaccaccagcagcacgaacaccatgcccatggcaagcgccaccatgttgctggggttctccaccagcacgggcgccagcgacgccccggcgaaccagcccacggtggtgcccgccgccgacgcgccgcggccccacccgaacacgcgcacgtacgacaggtcggtgcggttcgccacgttggccagcaggcaccacaccatgaggatgaacaggttgtacgcgatgctcacaagctcgccctggatgacgcccaggccgccgaacaacggcaccacgaggttgcccaaacacgtgaggatgatgatgggatagtacagctggctgatgtcgaactcgcgcaccagcagccccaccagcacgaacagcagcacggccgcgcacgccgtggcaaacacgatgatcacgccctggtccgtggccgccgacagcggctgctgcagcgccatgaaccccttgatcacgcccgcgatcaccgagaacaccgacaccgccaccacgaggcggatgaagtagccgcgcggaagctcgcgcacgggaacgacgtcctccgccggctcgctcggcgcgcgcaccgcggccatggtgaacaccaccgccagaagcggcaagctggccgccatcagcagccccaccggctggggcagcccgatgcagacgaagtacagcatgcccgcgaagatgaacgaccccgccgtgtacatgaaagcttggcgcgcgcccaccgtgctgtacaccgaacccaggcgcaaggcgacgaacgcggtgcccaccccggtgagcgagcaacccgccacgtacagcgcctcgccggcctgggcaggcgccgaccaggccaccaccagcgtggccagcgtcgccattcccgccagcaccgtcaccgacagccgcgactccacgatgcgcgccgtgaccttctggaacgccccggccacgatgagcacgaggcccagcgccgtcgtggaagccaggtacatcaccgacatggcgttgcccccgacggaagcccccgaccagccgaacagcacgtcgctgttgtagctgaggaaaatccacgcgtaataagctccgaagcccaggaacttcatgctgggccactgctcgtccaggtcctcgagcagccgcgtcgccgaaaaccgcgcgcgatcccgctcttcgccagccttcatctcacgcatcatgttcctcccctttacgcggcctcgcaacagcccgcgctccccgtaccgcaaaggcctattctaacacccgctcgtcctcccccgcttcgaccccgtcgccgtcctcgccgacgcgtttcggaagaaacggaaacgagatggcatgcatcgggcatgcgtcggcgcacgcacggcatttcgtgcactcgtgcatcggcgccgagccggatgcgtcgtgcaggtcgatgccctcgggacacacgtcggcgcactgatggcagggctcgcctttggacgagcgcaaacacgtcgcctcgttgctgacgggacgaaacgtcttgttcagccgcgacaccagcgacaacagcgcgcccagcgggcagaagcggctgcaccacttgcgcagcaccagcacctccagggcgagcatggccggaaacaccagcaacgacagggccacctcgttgaactggaacaagcgccacaccgcgatgagcgtggcgaacgtgaggcccaccgggcagatgagacagaacaccgggaacccgaacaccgccgtggacagcagcgcgccgcccagcacccagttgcgcgaatcggccgcgccgccgcgctgggcggcgggcacgtcgagcgcatcggacgcacgacgcttgcgcttcggctccttcaagccgaagatacgcctcagcagggggatcgggcagccccaggcgcagaacgcacggccgaacagcaccaccagcgcaataccgatggccagcgcgatgagcatcggcggcaccacggtcttgctggccagcgccgcctccgccgcgccgagcggacagatggccgcgatgtcgtagatgccccaggccgacggcgtgcccgtaccggtgtgcagggccagccccaggcacacgagcgcaatcaccgccaagacggacagcgtgcgcagcagtttggagttccgtttcatcacgcgctcatctcgctctcgtcctccaccaccgtcttccccagtcgcgcgtacgcgctgggactcaccaccacgatgccgcgccgcgtgccgcccgagaagctgcggtacacaagcgccgggcacacgtcctcgcacacgccgcagccgttgcatcggtcggcgtccaccacgggatggccgtctccatcaagcgcgatcgcctcgaacgggcaggccttctggcactcgacgcacccctggtagtaggccacgcagcggtccttctgcaccaccgccatgcccatcttgtcggcctccgggtcgaacgccccgatggctcccgtggggcatacgcgctggcagtcgccgcagaagtcgcagcttccccgatggaagttcagcttgggcgtgcgggcgcgtagaaagccgtcgccaacctccgccacgccgatcaccccggtgtggcacacgctgcggcagcggtcgcacttcacgcacgaggccagcagatgcagctcgtcctgcgcccccggcggccgcacgagcgcggtttcggacgcgccgtcggccgccttcaccgccccgccgaacgcggcgaatacggccgctgcgccgcagaaccctgcgaacgcccgtcgcgtgtacgcggccatggcttacgccgcctgggcgctctggccgatcatctggtcttccaactgcagaaagccctcggtgatgtcggcgacgccccgatagaacgcggtttgcgcgtacgcgcgcacgtcagcgcacaaacgcggcacccagttggccaggtgctcgtcgaagaacgcgcgttgcttcgcgcacagctcggcgtagcgcgcctcgtcgccagcatcgagcgccgcgcccgcgcgctcgatcagcttcgccatgaactggaactcgaacgacagatgatcctccggcgtggtgttgtcggccggcaggcccagctcctcgcccaggtagaacgccaccgcggaatcgcgcgcatcctgcatgagcaggtgctcctcgctcgtgtacaccgactcgtacggcggcgccatcagctgctcgtacatgcccgcgcacaagaacacgcgcgcgtagtccacggcaagctcctggcgcgtgcccgaatcgcgatggcgcaggtactccttcaccgtcgcgtatcccgcgcccacgtactcggcatccgtcggcaggtcctgcttcgtcagcgtccctatctgctcgtcggtcagttccagcttgtacatgcttgccaggaattcgtaaaagcccttgcgcgcggcgttcacctcggcaagctcttcgcgatcatgctgttccatggtgctctccttgcattccccgttggttaccggttccgttgtcgaccgatcgagccatacgcatgagggagggggggggttgcgtatggcttgatcgagcggcccggtcgggggccgtcctccgcacgcgcgcaggacggccccttccccgccggcatcgtctacaggacgatgccgaagtagttggccaccgcggtgcccaccatccacatgacggcgcggaacgcgatggatccgatgatgccgccggcgaacgcgacggtcgccatggtcacggccgacgcgggcttgctgcgcgccagccatccgcacacgaggggcgcgagaccgccgcacacgagtgcgacccagaagatggccgcggcatcgcccgtcgccgcgccggacgcgaagccgaaggccaaaccggacacgagcgccagaacgccgccgatcacggtttccaagccggccagcttcacggcctcggcgctctctttcttgcaggcgaccagcagcaggtacaggctcaagccgctcgccgcgccgaagcccagatagcccaacggcagcgtgatggtgttccacgtggtgcgcgcctccatcatgtaggagtagccgctggcgaagctgaacacgatgccgatgacggcggccagcacggcaaccgctttgcgggctccggccgacgcatcgcgcttcagcaggatcacgtacacggccaccgccgcgatgaacagaccgatgagcagcgcttccaggaagatgcccgccgtgggatggctcagcacggccatgatgcggtcggggtgcgacaggtgcgtgaccgacgcgatgccgcccacgacggccagcacgagcgccagaacggaagccaccaggttggtgcgctgcgtcaatccacgcagctcgtcaacggccacgccgaccgacacccatgtgccgcagctggcgatcgccgtgaacagaacgagggaccattggatgtccatgctactcagccccttccatccactcgccgtgcatgctggtcatgatgtacttcgtgcaggggttgttgcccacgttcggcagctcgtggatgtccgccgcatcgtacttcgccagctccttggacacgtcggagttcggatcgtccaagtcgccgtagaaacgggcgccggcgctgcagctcttcacgcacgcgggaagctcgccgttcgccgtcaggtggccgcacagcgtgcacttctccaccgtcttggacgccttgttccaatcgcgcacgccgtaggggcaggccatcatgcagtacttgcagccgatgcacttctcgcggtcgatgagcaccacgttgttgccatcgcggtagctggcgccggtggggcacacgtgcacgcacggggcatcggcgcactgctggcacatggtgggcagcgggtagcgcgtcatgttcgggtagtcgccgaagggcccgcgctgcagcatcttgttccaatgctcgcccagggcgatgtcgttctccatcttgcacgtgatctcgcaggaatagcagcccgtgcagcgatcgaggttcaccacgatgcagttatgcgccataatcgaacacctcctcggtaggatcgctcggctgcggcatccagggctcgaactgctcgggctcggtccacacgccttccggagcagcggcgtcaggcgtgaccttcacctggaagccgcgcagggtataggtgccgtactcggggttgtacggctcgtcgttcttggtcagcacgttgatgttcatcacgcggtaagcgcgctcggggtcggtgtccagcagctcgggcgcccagaagcgctcctggtagatgacgcccttggcgatggccgtggtaacgcgcgccttgccgtgcgtctcgccgcggcggctggcgatggtgcaccactggccgtcctccacgccgtaggtcgccgcgtcgtcgggatggatccacatctcgggcacggggtagatctcgcgcaggtagggtatgttgcgcagcgtgccgtggtggtacataggcagacggccctcggtcagcaccagcggatactcggtgtccgtgagcgggctttcggccggctccttgtagtagcacagcggctcgtagtccttcgaggccggctccagcaccaggttcttctcctcgaagcactgcgaccaggggaagcccgtgcggcccaggatggtgttggactcgcagtacacctcgcacttcttggaaggcgtgccgaagcccttctccttgcccgtggcctcgtcaaccgccttatagccgtagtacgtgcggtactcctcttcggtgcaccactcgaacacgcccttctcggccgcctcctcccagctcatcttcaagttgttcaggtgcagcttctgcttctcgtactcgttcttgtacatcgggatgccgttcgtgccctcggccgtgaaggcctcctgcgcatgcacgttgcccatctcggccatcttctgcacgatctgcgtccagatgaggccctcctccaccgtctcgaacaggtgggtgaccgcctggcggatgacgatggcgttcagctgcgggatgaccaggttggtttccagccactccgcggagggaagcagcatgtcggcacacagcacggagaacgccgtcgggtacatgaagatgtggcagacgaagtcgaggttcgggacgatctcgtcgaggcacgtggcgttgcccagcaccacgtgcttgttgccggagcgctcgaaccatgcgtggatctggtagggatcgccgtccttcatggccttgaacaccgcgggaatgaacgccatatcccagtccagcaggcccttgtgctcctgcacgcccaagcgcttgagcatcttctccttcttgaggaagcgcggcgtgttggggatctgatcgcgcgccgggcaggctttgaagctttgcagcatggcgccgggcttctgcacgttgcccatgaggtactcgaggttgagggcgccgagcgcgcactgctgcgactgctcgtattggtcgatgggcacgccctgcatgatgccggactggcccgtcgtgtagatctccagcgccttctcgatctggccctcgtcgagccagcagatctcggccgccttcgccagcgtgaactcctccacgctctccttgagcagctggccgcccgtggggtactgcttcccgtcgatctcgtacgtgccgaacagcggcggggtgacgccctcgttcatggggtactccagcacgacgggcttgccctgcgccggatcccagatgacgtaatcggcgtcggtgccttcgaggccgcattcggtgggcttgagggtcaggcgcgtctcggggttcacgaggtagggcatgttggtccagttcgtgcagaagtcctcgtcgtacttctcgttgtcgatgatccacttcgtccacgccatgagcagcgcggcgtcggtgccggggcggatgggcagccacacgtcggccttggcggcgtccatcgtcatgcgcgggtcgatgaccacggtcttcaagccctgctcgcgggcgcgcagctcggccagcgcgcggccgcccgtggcaaccgagctgttggccgggtcggtgccccacagcacgagggagtccaccggcgagtcggtgaagtagtagtcccaaccattggagtcgctgaaggacaggttgttcggcttgcccatgccgttcgacagctgcgaggcgcccatgcgtggcaggtagcactgcgcgcagccaggctcccacacgttgggcgtgttgatggcctcgccgaagcgcttcacgttgctgaagtgcgggttgccgccaccgccggtggacacggccacgcattccgagccgtacttctcgtcgatctcgatgagcttcgtggcgatctcggtgatggcctcgtcccaggtgatgcgctcccactggttctggccgcgctcgcccacgcggcgcatggggtacttgttgcggttgggatggtacagcgcctggatgccggccatgcccttcgcgcacaggccgccctggctcatagggctttcgggattgccctcgatcttgatgacgcgaccgttcttcacatgcgccagcacggcgcagcttgcgatgcaggcgcggcaggccgtcttcacgatcttcacgtcgccgcccgtatcggcatgcgccggatcgacgtgcacgaggtcgtcgctcacggcaacgcccagaccgcatgcggcgcccagcgccgccgccgacttcacgaaactgcgtcgcgtgatggtaggctgtgtcatgttccctccttcttctcgtcttcgcttgcttgtttgcttgctatctcagatgggagcgcccgttgcgcgggcggcgatcgggcagcgctttacccgaccagggccagcatctgccggccggcttccgtggctttccacgaaccgtcccatgtaagaccgcccacggtctccagcttggagatgaagtagctggggaatacctgcttcgggttgctcagcgcggggttgccctcaagcgcctgctcgatggcggccttcgtcgcgccgtcctcgcacagggcgagcacgatggcgtatgcctgggcgtagccggcaggttcgtcttgcagcatgcggccgaaccgcttcgtcggctcgaactgcgccagcgccgccctgcccgcctcggtggtccgcaccgtgtagtcgacgggctgatcctgcttgtcgtcgcccggctcgcacgccggctcgggaacctcctcggtttccacgcctccgcaatcgatcatgatgcgcagcagcgcgtgggcgttctgcgtgctgaggttcagctcgggacgctggccgatgagcgcctcggcctcgcgatagggcatgcgcgtctcgcagatggcaaggcacgcgcacagcgccagcgtgttcgcgcggttcgcctcgaggcgcttgacgacggcttcgaccgcgtcgtcgaagtttcgctcatcggcaacggcatcagcccggttcgcgtcggcgcgccgattggcagcgtcagcctgggtcgcgtcggcgcgctggtcgtcttgtttcatgatgtcccccgtttcgctcgtctgataacgccctgccgattcctcctctcggcttcgagcgacttcaccttacggcgcgacggacggacggaaaacgtccgtagttcgtgaaaacgtgcggcaagcaaggatatttatgggtgacgaacgccaccaataatggatgagtaagggtgttgatcaggtaaaacgtcttgaaagcgtacgaaacccctctttgctggcacacgatcagactttgttgctatacatttatatagttgctatactatatggcatagcattgtcgaagggaggtttgttatgtcgacggaaatggcgcagatgaacacgcgcatcagccgctcgctcaaggagcgcggcgatgcggcgctggagaaggccgggatgacgccgtcgcaagccgtccgcaagctgtgggacttcgccgcccgcaattcgcataacccgcagatcatacaaagcctgttcgacaccgaagacgaagcggagaaacgcgaagccgaggaagagcgcgcgcgaaggcgggccgtcgctctcaaaagcgcgaatatcgttgccgacgcgtacgaacgagctgggatcgagccttcggagtggacgaagaacgcgtcgtacgccgagatgcgcgagtacgccttgatggaacgcttgcgggagcgaggcctcgatggttagccaacggccctccctcctcatcgacacgaacgtctggctcgactatttcctccctgatcgtgcgggaggcaaagaggcgatcgacctcatcgtattcgctttcgagtacgaattccctcttctttaccccgctgccatcgtgaaagacgtgttttacgttgccgtctcgacgttcaagcgcatcgctcgcgcagagaagggatcgctcacccaaagcgacgcggtaacggcaaccgaaaccgcgtggggatgcgtgaacagcatgcgaaaacaggccaccgccgtgggcgcggacgaatcggacctctggacggcgtgcaacctccgcagcgtccacaacgacctcgaggacaacctggtggtggccgctgcgcaacgggcggacgcgacgtacctcgttaccaacgacgaggcgctcatcaagcacgcccccgtcgccgcgctcgccccggccgacgcgttggcgctgctgaaagcgacgttgtaggaaagcttcgccttcccgatcatgggcgacgcctagacttgtcatcctgagcgcaggctgtaggccggagtcgaaggatgacaagatgcttactcctgccgctcgcgcttcttcgcggcccacccggggatttcccgttgttccgggcgcgtcagagccagcgcgtcgggcgccacgtccttggtgatgcaggagcccgcgccgatgatcgcgcctgcgccgatgttcaccggcgccaccatcatggtgtcgctgccgatgaacgcgccgtcgccgatggtggtggcgtgcttcttcttgccgtcgtagttgcaggtgatggacccggcaccgacgttcacatcttcgccgatggtcgtatcgccgatgtaggacaggtgcggcaccttcgagcccttccccaccgtggacttcttgatctccacgtgggtgccggccttcgcgccctcgcacagatgcgccgccggacgcaggtacgcgcgcggaccgcatgtggcgccgtcgtcgatctgcgcttctacggccaccgtctcgtccacgacgcagccgcagcccaccgtcgtgtcggtcaggcgcgagtcggggccgatgacgctgtcctcgccgatgctggtggcgcccatgagcgtgacgttgggcagcagctccacgtcctgcgcgatggccacgtccggaccgatccataccagctcggggtcgatcatggtcacgccggccgccatatgcgcacggttgatgcgacgctgggccagcttcgtggcctcggccagctggatgcgcgagttcacgcccaggcactcggcagggtcgtcgcaggccaacgccaacacgggacggccggcgttgtgacagatctccagcacgtcggtgagatagaactcgccttgcgcgttatcgttgcccacctgctcgagcgcgtcgaacagcgcccgcgcatcgaagcagtagaacccggaattgcactcgcagatggccgcctcctcgggcgtggcgtccttctgctccacgatacgcgccaccgcgccctgctcgtcgcgcacgatgcgcccgtagccgaacgggtcgtccagctgcatcgtgagcaccaccacggccgcgtcgttctcctcgcgcacggccgcaaggcgcgcgatggtatcggccgtgatcagc

SEQ ID NO: 9289 - DNA, 381 bp, Unknown
  gut microbiota DNA sequence
ctggttcccgaggcggtcatccgcttcggccgttatccggtgtcgaagcgcgccaccgcgtttttggcgaacgcgggcgcgatcaatatcgtggtggatccgctcgagacgcgcgatttcaactgcgccaccggcgtgcacctgcgctgcacgccgctcgatttctcgcaaacgatgctggcggcgaagcagggcctcggcggcgaagatgccgctgacggccggcagcgcgctttcgcggcggcatggttggaggcgaacgccgcggcctccgcgcgcgtcgatgcggtggatgcggtggaggccggcttcgaaggcgcgttcgtgcgccgcgtggccgagcgcgccccggaggggtcgtgcctgttcgcggcgaactcc

SEQ ID NO: 9290 - DNA, 1010 bp, Unknown
  gut microbiota DNA sequence
atgagcgacgaggggctgttggagctgggcggcgcgcgcgaccgcatggtgcgctcgtccgacgacgaggcgtccggtgatccggcgcccgccgcggcctgcgcctccgacgcgcatgaagcgcaggatgcggaagggggcgtcgtccgtgggtaacgtgatccgcatcgtgcgcagcgacttcaagcggctgttctcgaacgcgatgagcgtgatcatcgtgatcgggctcgtggtgatgccgtcgatcttcgcgtggtacaacgtcatcgcgtgttggaacgtgttcgacaacacgggcaacctgacggtggcggtagcgaacgtcgacgacggctacgagagcgatctcgtgcctttgcgcgtgaacatcggcgagcgggtagtgtcggctctgcgagcaaacgaccagatcgactggacgttcaccaccgaggaggacgcggtggacggcgcgcggtcgggacgctactacgcggccgtggtcatccccgcggggttcagcaaggatatgctgacgttctactccgaggacgtgcagcacgcccgtatcgtctactacgccaacgagaagaagagcgctatcgcgccgaagatcaccgaccaaggtgccgattcggtatcgtaccaggtgaacgaggtgttcgcccagacgttgtcagaagtggcgctgggcatcgccgagtcgatgtccgcctacgccgacgaggcagacgtgggcgggcgcattgcgggcgtgtcggggaaagtgcgcgacatgggagcgcaagccgaacggatggcgtcggtgctggaactgtattcgtcgctggccggcgctgcgcagacgctcgcgagcgactcgggcaagctggtagtcgcagcgcaaaacggggtcgatggcctcggcgccgcatcgtctcagggctctacgtcggcctccgacctggtggcggccgtgaaagggtcggtcgacgaccttgcgggcgcactcgacggtgctgccgcgcgcttcgacgaggtgtctgcct

SEQ ID NO: 9291 - DNA, 296 bp, Unknown
  gut microbiota DNA sequence
ggctcgttgccttccgatgcccagcaggcgctcgatgccgtcatcgcgcgcatgagcgccgtcgtctcgctcatggagggcatgcgcgacaacctgggcgccgcagccgagaggctggaggctggaaacgccgacgtggaggctcagcgcgcggaggtcgaacggcttgcggctgaggcgcggcaggcctccgacgacctcgcagcctcgttcgacggcgggctcaagccgggcttgcagcagctcgcggacagcgcgggcgtgcttgcggctaacatgggagacggcctggacag

SEQ ID NO: 9292 - DNA, 5935 bp, Unknown
  gut microbiota DNA sequence
acgctcgccgacggcgtggacgaggcgctggtcgcgggcgacgcggacgcgctgcgcgcggtgctgggcgccgacgcgcagctcttgtcgaaggcgctcgcagcgccggtgggcatcgagcgcgaggctgtgttcccggctgagaacttcggttcggccatggccccgctgtacacgacgctcgccctgttcatcgggtcgcttttgatcctcgtggtggtgaagccgacggtttccgaccgcacccgcgaggagctgtccgacccgcagccgcgccagctgttcatggggcgcttcggcgtgctggcgttcttgtcgcttgcgcagaccacggtgatgggcttggggaacctgctgttcttgcaggtgcaggttgccgagcccgcgctgttcatgctgtgcttctggatagccggcctcgtgttcacgttcctgatatacgcgctggtggcggcgttcgcgaacctcggcaaggccgtggcggtgctgctgctgatcatccaggtgacggggtgcggcgggtcgttcccgctgcagcttttgccgccgttcgtgcaggccctgagcccctggcttcccgccacgcacgtggtgaacgccatgcgggcggccatgttcggcacctacggcgccgacttctggacggagatcgggttgctcctgctgttcctgatccctgcggcgctcatcggcctcgtgctgcgcaaacccctcgccaagttcatgacctggtatgtcgagcaggtagagtcgtccaagctcgtagggtagggcctgcggcttccttgtcaaggcccgcaggcacgcccccgggccttgccttcttgtggcataatcgtgctgagaaaagagaagggaatcccgcatggcacgaaccggtgctccgtcgacgacgcgtcgcacgctccactacttctggctggtcacccgtaagcacatcgggctgttcgccgcgctcatgaccgcgacgtttctgttcgtggcgctgctttcgtacggcaacccctacgtcatgagcctcgtggtggatcgcgtgagcgcgggctcggtggcgcccgacgaggtgttctcggtgttcggcccctacatcgccgcgctcatcctcatcaacgtggccggccaggcggccagcaaggtgcaggactacacgatgtaccggctggagatcgccgcgtcctacgacttggccaccatgtcgttcgacgcgctgtcgaaccagtcgatgtcgttccactcaaaccgcttcggcggcacgctggtcagccagacgacgaagttcatgagcgcctaccagctgctgctggaaaccatcacgttcccgtttctgccggtcatctgctcggtggtgttcacctgcgccatcctcgcgccgcgcgtgccggtgtacgtggccatcctcatggtgctgctggcggtgtacgcgggcgtgtcgtactacatgtacaagcgcatcctgcacctcaacgagcaggcggccagcgcgcagaaccagctgtcgggcgagctgtccgactcggtggcgaacatcctggcggtgaagacctacgggcgcgaggactacgagcgggggctgttcgaccaggcgaaccgcgaggtggtggcgcgcgactcgaagcgcatgtgggcgtcgctgacgcgcggcatcgtgacggcgtgcatcaccatcgccattatgagcgtggtggcggtgttcatcgcgggcggcaacgcgtggtacggcatcacgcccggcacgctcgtggtgatgttcacctgcacctacacggtgacgaatcagttcaacttcatcaacaatgggctgcagcgcttcaaccgcgcgttcggcgacgcgagcggcatgaccgtcatccttgacgagccgcgcctcgtggacgacaagcccggcgcgccggagctcgaggtgcgcgagggcgccatcgacttcgagggcatcgacttctggtacaccgacggcgacgcgtgcacgcacgtgttcgacgacttcgagctgcatatccccgcaggccagcgcgtgggcctcgtgggcacgagcggggcggggaagaccacgctcacgaagcttttgctgcgcttgtccgatatccaggaggggcgcatcctcatcgacggccagaacatcgccgagacgacgcagcagtcgctgcgccgccagatcgcctacgtgccgcaggaggcgctgctgttccatcgcaccatcgccgagaacatcgcctacgggcggcccgacgccacgatggagcagatccgcgaagcggcgcgccaggcgaacgcgctggagttcatcgagcggctgccgcagggcttcgacaccgtcacgggcgagcgcggcgtgaagctgtcgggcggccagcgtcagcgcatcgccatcgcgcgggcgcttctggccgactgcccggtgctcgtgctggacgaggccacgagcgcgctcgactccgaaagcgagcagctggtgcaagacgcgctggcaacgctcatgcgtgggcgcacgtccatcgtggtggcacaccgcctgtccaccgtggccagcctcgaccgcatcgtggtgctcgacggcggcaaggtggccgaggacggcccgcacgcccagctcatcgagcagggcggcgagtacgcgaacctctggagccgccagacgggggcgtatttggaagaggagtgacgctcggcgagggaggggagtccttgcgcgggaggctgtgcttcgcgcggtcaacccttcgtcaatgagcgccctacgcttcgcgcccgaacggccgatccgccgccgttgcgggctatcgttttcgggcaaatagacgaaaccgaagcgaaagggtttaccatgacctctctatgggcggagcgcaccccgaggcccgacggcatcgcgaaaacgctcgacggagacgtatccgtcgacgtgctggtcatcggcggcggcatggcgggcatgctgtgcgcctacctgctgggccgggccgggtgctcgtgcgcggtggcggaacaggggcgcgtcgggtcgggcgtcacgcagaacaccacggcgaaggtgaccgcgcagcacaacctcgtgtacgaccggctgatgagggaacacggcgtcgagaacgcgcggctgtactacgaggcgaaccaggccgccgtggcggggctgcggcagctgagcgacgccttcccctgcgatttcgaggagaagaccgcctacgtgtacgccgaggattcgacggagggcctggagcgcgagctcgccgcctacgagcagctgggcatcccgcatcatgtcctgccgagcgcgccggtgccgatcgcgaacaaaggggcgctggggatggagcgccaggcgcagttcaaccccctcaagctgctctacgggctggtgccgtcggtcgacgtgtacgagaacgccttcgtctcggaggtgtcgggaaccacggcgcgcacgcaagggggctccatcactgccgagcacatcgtgttcgcgacccattaccccctggtcaacatcccgggactctatttcatgaagctccaccaggagcgttcctacgcgcttgcgctcaaggacgcccccgctgtggacggcatgttcatcggcgagggcggcggcttctccttccgcacctacgaggatttccttctggtgggcggcgggggccatcgcacgggcaaggggccggggtcggaggaaggctaccgcgcgatccgcacgttcgcggacgcggcgtacccgggctgcgtcgagtgctgcgcgtgggcgacgcaggactgcatgagcctggacggcatgccctacatcggcgtgcaccggcgtgagaacccccgctggtacgtggcaaccgggttcagcaagtgggggatgaccgggtcgtacgtggcggcgaaggccatcgccgacctgatcgcgacgggcgagagccccgtcgaggacctgttcttcccgcagcgctccatgctgaacgtcgcgctgttctccaatttgggtacctcgacggcgaacctggtgaagccggggaagcggtgctcgcatatgggatgcagcctcgagcgcaacgacgtcgaggactcgtgggactgtccttgccacgggtcgcgcttcgacgcggacggcaacgtcctcgacgggcccgccacgaagccgatctcggtgtgaaagcggtagcggctcctccggctccgcgttggacgtgctatactaaacgaacaagtgtgctagttgaacggggaaggggtcggcgcgatggagcgcacgtacgtgtgcatagatctgaagagcttctacgccagcgtcgaatgcgtcgaccgcgggctggacccgctgacggcgaacctcgtcgtggccgatcccgaccgcacggagaagaccatctgcctggccatcacgccgtccatgaaggcgctcggcctgtccagccgttgccgcgtgttcgagatccccgagagcgtggactacgtcatggcgaagccgcgcatgcagcgctacatggaggcgtcggccgacatctactccatctacctgcgcttcgtgtcgcccgaggacgtccatccctattccatcgacgaatgcttcatcgatgcgacgccgtacctgtcgctgtaccggacgagcgcccgggagttcgccgtcatgctcatggaggcggtgctggccgagacgggcgtgcgcgccacggcaggggtcgggccgaacctgttcttggcgaaagtggcgctcgacatcacggcgaagcacgcccgggactgcatcggctttctcgaccaggccgagttcgagcgcactatccagacccaccggcccatcaccgatatctggaacatcggcccgggcatcgcgaggcgcctggcgaagtacgcggtgtacgacctgcgcggcgtatgcgagatgagcgaggccacgctgtaccgcgagttcggcgtgaacgcggagtacctgatcgaccacgcccacggcgtcgagccgtgcaccatcgccgacatccacgcctacgagcccagcgggcattccctgggcaacggccaggtgctgccgtgcgactactcgttcgaggaagcgcgcgacgtgctgcgcgagatggtggatcagctggtgctcgacctcgtggagaagcgcctcgttgcggaatccatctcgctgtacgtgggctacgcgcgggatcacgaggcgggcggggcgcgcgccgtggacgagcccggagcgtatttcgacggcggccatggacgacggcctgcgagcggcagacgaggcggctcccacaccggcggcacgcgccgacagcccgatcgcacgaacctctactcgaagctcatgccgcggttcctcgacctgttcgacgagaccgcgcgcaaagacgcgcccatccgccgcatcaacgtgggcgtcggcggggtgctccccgaggagttcgccacgatggacctgttctcggatgcggaagcggaggccgaggaacatcgcctgcagcaggccgtgctggccgtgaaggggcgcttcggcaagaacgcgcttctgcgcggcaccagcttgaaagagaaggccacggcgcgcgagcgcaacgagcagatcggagggcaccatgcctgagcgccgaccccgcgccgaccgcgcgcagcagttcatgccgttcgccgcgctcaaaggctactacgacctcatccgcgagcgcgagcgcgtggcagagccgaagcgcgagctgaccgacgagcaggcgctcgagctgtcgcgaaaactctcccagctgaaacggcgcgagatggcgtgcatcgtccactacgacggcgaagcgtacgtcaccgcgcgcggcctggtcagcgacatcgacctcgcggcccgcaccgtcaccgtcgtccgcacccgcatccccctcgacgacatcgcggacatccggacggacgcgtgacgcatcatcgcccgaaaaacacgctcgaaggccgttttgcgtgtttttcgggcgatgatgca

SEQ ID NO: 9293 - DNA, 193 bp, Unknown
  gut microbiota DNA sequence
cgtgatgaccggattgccttgcgggtcgcacggaaccgggttgccatgcggcgagttctcgggcgtcgcgggatacacgagcaccggcacgccgcgcagctgggacgcgccgcaaatccagcactgcgcgtacttgtccatcgtgcagttgatgttcaccagctcgaagccgtgcgaagcggtgtcgatctcg

SEQ ID NO: 9294 - DNA, 241 bp, Unknown
  gut microbiota DNA sequence
gcacgcggttgtctgcatggctcacgcccaggaagaagccatcgcccacgccccgagcctccaggtcgtcggcgatggcgttaacggctttcgcgaacgagcgcgccaccttcatcttctcgaggcgcgtaccgtcgtcggtctgcttcatgacgggaaacgccttcacgagatgagcgaacgtcgccgcgagcggcgtgaggcgcccgccgcggcgcaggtagtcgaaatcttcgggaat

SEQ ID NO: 9295 - DNA, 2284 bp, Unknown
  gut microbiota DNA sequence
gtaggtaaagtcggtacgtcgggttaaggagaaaaaggtgactgaagaagtcaagcgagtgtatgcgttcggcaaggacgcgcagggcaacaacgtaactgagggcaacaccaacatgaaggcgatcctcggcggcaagggcgcgaacctcgccgagatggccaacatcgggctgcccgtgcctcccggattcaccatcacgtgccagacctgcatggagtacgccaatgcgggcaacgcgtggcccgaaggcgcgctcggcaccatccaggagtatcgcgaggatctcgaagcccgcatgggcaagaagatcggcgatgcggaggacccgctgctcgtgtccgtgcgttccggcgcccccatgtccatgccgggcatgatggacaccgtcctcaacctcggcctgaacgatcagtccatcaacgggttgatcaagcagaccgataacccgcgcttcgcctgggattcctaccgtcgcttcatccagatgttctccaacgtggtcatgaacctcgacggcgacctgttcgagaacgccatcacggctatgaagcacgctcgcggcgcggcgtccgacaccgatctcaccgccgaggacctgcaggagctcgtggccgagttcaagcagatcttcgccgagaacgtggatgcagcggcgtatccgagcctcgtcgtggacggtgccgtgcagttcccgcaggatcccagcgtgcagctgcagctggccatcgaggccgtcttcggcagctggaacaacccgcgcgccacgctgtaccgcaagcagaacaagatcgccgacgatctgggcaccgccgtcaacgtgcagtccatggtgttcggcaacaagggcaacacctctgccacgggcgtcgcgttcacgcgcaaccccgcaaacggcgagaaggagttctacggcgactacctggtgaacgcccagggcgaggacgtcgtggccggcatccgcaacacctcgccgatcgccgacctcaagaacgtcgacggcctggaagaggccggtcgcgagctcgaagaggtgttcgtcaccctcgagaaccacttccgcgatatgtgcgacatcgagttcaccatcgagcagggcaagctgtggatgctgcagacccgcgtgggcaagcgcaccgccgccgccgcgctgcacatcgccatcgagatggagaaggagggcctcatctcgaaggaggaggccgtcatgcgcgtggatcccgagcagctcgaccagctgctgcacccgcagttcgacaagaacgcttcctacgacgttgtcgccaagggcctgaacgcgtcgccgggcgccgccgtgggcgaggccgtgttctccgccgccgacgcggtggccgtggccgaggcgggccgcaagtgcgtgctcgtgcgctgggagacgaaccccgacgacctcgccggcatgatcgccgccgagggcatcctcacctcgcacggcggcaagacgtcgcacgcggccgtcatcgcccgcggcatgggcgccccgtgcgtctgcggcgtggaggcgctgcgcatcgacgccgagaagaagcaggccagcgtcgtgggcaccgacatcgtcatcaaggaaggcgacatgatctccatcgacggcaccaccggctccgtggtgctgggcgcggtcgagctcgtgctgcccgagatgacgggcgacctcgacaccatcctcgagtgggccgacgagttccgcacgctgggcgtgcgcgccaacgccgacaaccccgaggacgccgagctgtcccgcggcttcggcgccgagggcatcggactgtgccgtaccgagcacatgttcctgggcgaccgcaagcagatcatccagaccttcatcctcaacgaggatccggccgtgcgcgagaaggcagtgggcgagctcttggccgctcagacgggcgacttcctgggcatgttccgcgccatggacgggctgccggtcatcgtgcgcctgctcgacccgccgctgcacgagttcctggagagcccccgcgcgctcgacgtggagatcgccaagctcgaggccacgggcggcgacaaggcgctcatcgccgagaagcgcatgctcatggagcagatcgacggcatgagcgaggcgaacccgatgctgggcctgcgcggctgccgcctgggcatcgtgtaccccatcctgccggtcatgcaggtgcgcgccatcgccaccgcctgcgccgagctgcagaaagagggcttgaacccgaagcccgagatcatgatcccgctcgtgtccgtggtggccgagctcgagaagctgcgc

SEQ ID NO: 9296 - DNA, 9005 bp, Unknown
  gut microbiota DNA sequence
accggtgatgcaggtgcgcgccatcgccaccgcctgcgcccagctgcagaaggagggcttgaacccgaagcccgagatcatgatcccgctcgtgtccgtggtggccgagctcgagaagctgcgcaaggtcgccgaggacactatcgccgaagtcgccgccgagcagggcgtcgagcttgacatccccgtgggcacgatgatcgagctgccgcgcgctgccgtcacggccgacgaaatcggcgcggttgccgacttcttcagcttcggcacgaacgacctgacccagacgacgtttggcttcagccgcgacgacgtggaggccgagttcgtcccgcagtacctggccgagcgcctgctgccctacaaccccttcgccaccatcgatccgggcgtggcgaagctcgtggagatgggcgtcgagctgggccacaagggcaaccccgacctcgtttgcggcgtgtgcggcgagcacggcggcgatcccgactccgtgaagaccttccacacgatcggcctcgactacgtcagctgctccccgtaccgcgtgccgctggcccgtctggccgccggccaggccgccctggccgagaagatgggcgacggccgcgacaagtagcctccgtccgaaacctcgcatgatcgaagggcccgcagcaccgcgctgcgggccctttcgcgttcggcgtcgagttgcgagtgcgacgggacgcgaaaccttcagtgagaggatgcgaaaagggctccatcttgttgacggagccctttttgaaagcttggacagcttgtttcaaactgtatgctgcaaaacaggtcgcgcgatgtgccggctctgttgggagcagctagaccgtctcaaggtacttggcaacgctcttgcccgcttcgcggcccagcacgatggccatgccgaggcttacgccgggcgtgggggtgatgtattccacgccgaaacgacgaccgcaatcgttgccggaaacgtacaggccgggaatcggctcgaagttggcatcgagggcgttctgctctgcgttggtgatgattccgccgcaggtgctcatgatctcgccaagtcccggattgcccgcgagcgcgtagaacggaccatccttgacggggaagagcacttccgcgtagcgaccgaaatcctcgtcgatgccgtattcgcagaacttgttgtacttctcgatttccgcgacgaacgtctcgacagcatcgccttcgagcccgagctgcttcgccaggccctccagcgtatcgtccgcgatgaattccggtgctgcgaacatcgctccagcctggttgtcctccttggaggattcgggctcgacccaggttcccttgaacttctgataagccttgtccatgcctgtttttagctcttcgatcgcggacgttgtcgggctgaacatgccgtgttgcggcacggtgtactggcggtactcggggaagttcgaatcgaacacgcaggagatgggctctcggggcagatacacgttcggcacgccgcgctgctcgacaacggggtagaactcgttcatgaagcgcttgccatcggagcggacccatacagcttgagggaagttgttcatagaagtgggtgcttggatgtgcttggcgttcatgccggggatgatgctctccaaatgagctcccgcccaatgagccatcttgatgccgtcgccttgatactgccaattcgaggcgtccccgacgaacctttcattgccgaaggcatctttccaagcttctccctcgatcatgttgttcttgatgtcgggcatcaggtcgttgagcatttcctcgttgtaggcgaagccgcccgtggccaccaccacggccttgcagctgaacttgaggtacgacccgtcggcccggttctcggcgatgacgccggacaccttgccattgtcctgcaggatctgcagtccccgcgtgttgaagaagaactccgctcctgcggctttcgccttttcgcggttgtatccctggatcttggtctgattacactcttccgcatatgcggatatgacgccggggtagaacttgatgggtccgatattgggcagcaggtgcggccatgtttcgcctgctgcgggggatccgctatggctcaaggtggcgatgtccgaatcggtcaggctgtcgtagtaccaatcgatgttatcgcccatgttctggcagtacctcatgatgagcccggggttgccctggttgccgatcatggtcatccaattctggtagtactcgaccgggtcgacatcatggtactggttgccttcggtgatcttgttgacaaggttcgagttgacgccacagctctcgttgcccgttgccatgtacgtttcttcgggttggaactcgagaagggcgacccggtaaccctgctcggacagctctcggcacgaggttacgcccgcgtacccatggcccaccacgaccgcatcgtaatcaccggcttcgcttgcttgcgcggagtaatcttgcggcgtccgccaagagattgcgccctccgtcgcgctgccgtcggatacgttcttctcatcggacttgtcgctgtccgtttttccgttcggcgagcacgccgccaagaaacccgctcctacggttcctacgccagcaagcgctgcgcctttgatgaaactacgcctatccatccctctctccgttcatctcaacagctaacacgaaagatgctgccggtcggtttgccttcaagccgggcagcaaggcaaagactacgcaaaccgcttctttttcggaatcgcgatattgagggaattgggaaaagagtccttgcaaagcgcctggaaagcatcgcggtttttggggaattacgcaaaacacgaggtgaaacgcttatggcgttcgccggttcgccggagcgaagctgcttgggcgacgagtctccggttttagaaatccgtcatcgaagacggctcgttctcgttttctataagctgcagaaggtcctcgcgcgagtggatgtccagctttttgtagatgctcttgatatgggagcggacggtggagtcggacaagaacatcttctttgcgacgtaggcgggggagtagccgcgccctaggaacaagagcacctctctctcgcgtttcgacaggccgcccttgtcggcaacccgattgcagcatgtttccaagtccgacagcaggttcggcttgttcgcctgctgcgaagggaggtacattgttttccacgagcgtatattgggcaccagaaccaacgagatgaagtacagggtggaaagcgcaagcaatactgcttcctcgttcccgctgatgcccgcaagatcgccgaaatgcaagccgatgatcgaaaccaagcaaaaagcggagatcgagctaccgaagatcagaggcaccgagaactcttgcgcgtgcgcgatcgcgcagaacgaggccagcgcaagcacccctatagcgccgaagaacacgtaaatgccgatcatgccgatgctgtgcaccgcatgacctgtggggaagctgctgagaaacaacaatatggcggcgaagatgggcaggtatatttggaacacgaacggcaaaagaggcttgtccgacttcctaagccataaaggcagaaccgagacgacggcgaggatcgtgccgatgctttcggcgtacatgttgccgaaaaccgcgatcttgcgtaccgccatcgtcaaggcgaacagcaaaaaacccacgaacggaccgagggcgaccgagaagaaggagtggaacacggtggaatcttggcttttcgcatcgcgttgcacgttcagcaggcgaacgaactcgccgtgcgtagagcggatcagcaggggcacgagtccgagaatgctgagcagaagaaagctcgcgaccccggtttcgggacccatgtaaacgaatcccgtattgatgagcgcgcagatggccagcaggacgctcaggcgaatgagggcttcccggaacgtgagggtggagaatacgcttccccaagcgatgcaaaggagcaaggtcgtcgttccgcagagcgttcctccgagcaaggagcacaattcgaccggaactccggggagaagaagggaagcgaagagcaggaaaagccccgtcaggtagagaagcgcgacgatcgtcattcgaagaggagttaggaatgttatccgacttggttctttcgcgcacagcgcgatgcacgcggctgccatgccggcgaccatggcgctcgccaacgtggagtggacgaaatacggcatggccaagtcgaagcctgccaagtcggggctgaatatcatgttcggggagtagagtggcaaggttgcgaaaaaggctacgaaacaaacttgttcgaatgcggatggctggctcatgtcgaatccttctcgcttgtacctatctgccaagtgcatggatcttcgcgctccggtcatgcggcaccgtctttttccggtagcgcttgggcggccgccgtttcgcccacgagccagatgcggtcatcggggaacaggcgcgtgttgcggctcggcttcatcttgagcagcttctcatgctcgtgtgcgacgacgaggcagccgaaggagcccttgaaatcgacggcgccgatggtcttgccggcgaagggcgagcccgcttccacggaaagcgacacgcatgcgagatccaacttgtcggggtgcgcggccgcgtactcgtcgaacgatgcgctgacggcatcggcctcgtcgatggagtcctccttgagcagggtttgcaggtaggcgtccacctcgttctcggtgccgaggaacgtcagcacgtcgccctcgcgtatgcccagcgggtcggccgggtcgttgatgcgccgcacaagctcctccttggtcagtcgcgcgagcgcttgcgatcccatgcgcacgccctcgcgctcgatggccatgagatccaggttgtgcgctatgccgaacaggaagtcgctcgaccgctcggcgcccaatcggcgcagcgtgcgcgacgcttcgacctccaccacgtacaggcgctcctccacccacccggcgcgttcctcctcgtcggattccgccaggcgctcggccaggatggactcgttgaggttgccgacgaagctcgtctccagcttgaggaaccacgaatgcagcgtgcgcgagcgcgcgagcaacagcgagcacgtcgccgccagaacgaacatccacaccgattggcgcgcgccggccgcatgcacgatgtaggccaccacgccgcaggacgccgcgccgcccgccagcatcaggacggccaacggcacatggtttcgacggctcttcatccacagcacgccgaactcgttctttcgtcccgtgtagaacaggttcgacaggaacagtcccgtcacgaagatgcccaccgcggcaagcaacgggttgagaacggcctccggcacgaaacccgacagcaaaggaagggccgtgttcatgagcacctccaccgatgcgatgccggccagcaccacgagccccagcttgagcgtccagcgtttgaggtagtccacccataagttcggttcgccgtcctcttcctgcgcgcgctccagatgctcatggcgcagtgcgaacaggctttcgggcaagacgcgcacgaggaggtggtagatgcgttcggaattcttcaccagaagaggcgaggcgagcgtcgtcgccaccgacacggtgacgatgacggggtagaggaagtcgggagtcacgcccgtcgccgatcctagcgcggcgatgatgaacgagaactcgccgatctgcgccaggctgagcccgctcatcaccgaggttttcagcgttgcccccgacaacagagcgcccaacccgcagaacagcgagcgtccgatgatggccaccaaggcgatgacgacgatggctcccaggttctccgtcacggccgcgggtgtgaccagcatgcccaccgatacgaagaacacggctccgaacagatccttgatgggcttgaacagcgcgtcgacgcgctttgcctgcacggtgccggccaggatggatccggcgaggaacgcgcccagcgccgaagagaacccgatggcgtcggccagaaccaccatccccaagcacagcgcgatggacgcgatgagcaggatctcgtcgttgagctcggaacgcaggcgcttgagggcgctcggcacgaggatgacgctgagcgcgaaccataccacgaggtacagcgccatgcgtccgatacgcacggccaccgcaccgccgtccaccgacgcgctgaccgccaccgtggacagcaccacgagcaggaacacgcctgcgatgtcctcgatgaccagcacgccgaacacgagctgggcgaaggccttggtgcgcaggcccagctcgccgaacgtcttcacgatgatgctggacgacgagatggccagcatgccgccgaggaacaggctggttgacggcgaccagccaagcagcgtgccgcaggcgaaccctgccgctatcatgagcgacatctccacgacggccgtgacgagcgccggacggcccacggtggtcagcttcaccacgctgaactgcagtcccaggccgaacatgaggaagatgacgccgatctgcgaccaggtggacacgtcggccgtctccacgatgttggggatccagccgatagcggggctcacgaggaatccggccaccacgtaccccagcacgagcggctgtttgaaacgccggcagacgatggtggccaccgccgccacggcgagcagcaaggcgaggtcgttgacgagctggggtatggactgcataggttcctcttcgcgcactgtacggtcgaaacctcattgtagcaagccgagacgcgtcggcggacgaaaaagaagcggcccttgcgggccgcttcccaaacatggatcggtttctggtttcttacgattccgccagctccgcgggggtggcgcggcgcgccatggccttgtcgtagtctttcgtgccggcgaacacctcgttcatgtacgggttcaccttgagcttcttggcgcggtacatgatgtaggcgaacgcggcgatgttggccagaagcgcgatgacggacacggccaggttcacgttcgggttgttcaccgactgcacgctgaacacgctgtagtcctggaacgccggcacgcactgggcgaacatgcaccagatggccagtgtgaacgcgcggttctggatccagccgcctttgttccagaagaacgccgccacggtgggggccagcagcagggccaggccgcagtaccaggagtgcgtgggcaggcagttgtaggtgtagcagaagttccacaggtcgtaggcgatgatgaacacccaggtcatgtccggccacagcatgtcctggcgcttcttggaaatgtagatgccgaaccagccggtcatgcaggcgatgttgatgatgcccgccacgccgttgaacacgttgtgccaaccgccgtacagcgtgacgccctcggaggacacccaggtggtgccccaggcgcggatggcgctctcgaagtcgctgaccacggcgatgaggatgttgatggccacgatgacgaacgggaagcacttgaaccagtgcgccttgccgatagcgccccacgagtacttgatggccatgaagccgatgcacccgatggtggccgcgtagagcttcgcgtagtggaaccagctgttcatgtgcacgtgcgtggggttgtcgagcgcccactgctggccgatgccggcgccgatggaaatggcgacgaagtacgccgtcaacgcgacgggcagcacgatgaagcagaacacgccgcccgccttcgtgcggcgcgccacttcgttgatgaggatcaacccgatgaacacgatggcccagccgagccattggtacagggcgttctccccgtagacttggaacaacatgacaccctccttcttcagggtacgcttcgcacaggccgccttccggcctgctgtttcttcagatgagattatcgataccgttgcatgcgggttcgcctgcgcaggttctatccgctttcgggtgcgccgttcgcgccgcggtccatgtgcagcgtttgggcgatgagatccttcagcacctcgtcgtcgacgtccggatgcgttcgcaggtagccgacgatgcccaagatgagcacgtagaacgtctcgtagacgtgctcgatgcgtatctcgtgcagcgcgccgtagtcgcgcaccgtggtgtccacgatgtacgtggccacgcggtcggccacgcggttcacgaagtcgatgtaaagcgccgcgttctcgtgcgaggccagcgagcggcggaacgcgtcgtgctcgaacacgccgaggcgcatgagctttacgacgctggaaagggcgctttcgatgtcgcccgggtgccgttgcgcgttccagtaatgagtggcctcgatgaagtcggccacgtagtcgtcgaggacggccgaggtgacggcctccttgtcagggaagtaatggtagaacagcgagcgcgccacgcccatgcggttggtgatgtcctgcacggaggttttcgagagcccctgctcctcgtacagctcgcgggccgcggccacgatgtcggctcgacgctcggccgatgccgcgttgcgcgccttctcgttcgaggttgccatgccgccctccttgccccgttcgcttgaacgatcctgcggttcgccgccatggcggcgtgtttcgttcgatcccctgatgagcgcagcatacgcccctggttgacggagcgtcaatagacagtttcagggattcgtcaacgaagagggggacgtaagcggcgaagcgcgcgcgtccgcgacggcaatgacgaaacgcgcgaagccgtcaaccgcggcttcctctttgcctgcgaggatgctagcatgcaggtcattaagttcatttgtgaaacgaaaaaagaacgcagatgaactaatgagggagcaagcggacgcagggccgcatctcggccgaggcggcgtcgggcgatccgatgccgagggcatcgcggagcagcggacgcgaaaccgagaaggaggggtcatg

SEQ ID NO: 9297 - DNA, 6130 bp, Unknown
  gut microbiota DNA sequence
cacgagcagccgagcttctgcaacgccgtttgccacgatccgatggacgcctacgtggacggctacttcagcgacgcgacgcttatggcgaacgcccacgagcgcgccgacgttacgtgtttgaagtgccacgaggcgaagttgtccgatcaggtcgccgaagggctgtcgtgggtgcgcggcgatttcgccactgacgagacggggcatctgactacccatggcgtgacggccgataagaagatgtgcgcatcggccggctgccatgattgggaagacgtgaaggccgccaccgaggattggggaggcgaggcgggggtgaacccgcatgcgtcgcatcagggcgaggccatcgattgcagcaactgccacggcgcgcatggatcgtcgtatatgtactgcaacgcgtgtcacgactacgcggttcccgacggctgggaaagcccccggtagggcatgcgaaaaggaggagcgatgatgaagaggacggcagcggccgtatgcggggccgcggtgctggcggcgggcatgacgggctgcggcgcgggattcgaaggctcggggtcgaaggacgcggccagcgccgagcagctggccatgcgcctggacgatccgtgggctcaggaggttcaggccgatcagggcgcgaaggccgaaggcgagctcgccgacggcgtgtacacgggcacgggcaaagggatggagggcctcgtgaccgtcaagctgctcgtgcaggacaaccgcatctcgtgtttggaaaccgcgcaggagggcgagagccagagccgcggaggctacgaggccatccgcgacggcaggttcgccgccatgatcgaggccgcgcaaggcgccggcatcgacgcgatcagcggcgccaccatcaccacggcgggcgtcaggcaggcggtggaggacgcgctctcgcaggcagaagccaccgccgcgaagcaggaacaggggggatcccgatgacgaagcaggttcacgggcagacgggcgcgcatgcgccgctgtctcgccgcgatttcttgacgagggcgggcttgacggtgggagccgccgcggccgcggcggcggtgccgggcgcggcctatgcggtgcaggagggcgtgatcggcgactgggcggctgatgggtcgaaggccgtcgacgtgcccgacagcgccgtcaccaacgcctcttggtcggacggcacgtatcgcgagcacaacggcgcggcgttcccggcggacgatgcaagccctatccctccgcgcgcggtgcccgcgacatgggattgcgagtgcgacatctgtgtggtgggcgcgggcggcggcggcttgaacgcggcggcgcgcgcggccgagcagggcgcgcggaccatctgcgtcgaggctatgggcctgcacggcggcaacgcccaggaggcgggcatgtgcgccatcctcggcggatcgaagctgcaggagtcgaagcgtttcgcgttcccgtcctaccccttcgacgcgcgcaagctggccgattgggccatcgacgagtaccattacgcgtgcgacccgctgctcatccaccgcatcgccgaggcgggcggcacgtgcatcgactggatggccgactgcggcgtccggtggcgcttgggcgaggtgccggtgtacgtggcgccgaagaactcgacgctcgaccaccatgtgctcaagatgaaggacgccaccgacgccatgttcagctttggtcagaagcacggcgtgcagtacctcttccaaagcccggcggaggcgctcgtgcaggacggcgacgggaggatcgtgggcgtggtggtgcgcgaggattacggcgcagagaagtacatccacgccgaacgcgccgtcatcctcacggcgggcggcttctgcaacaacaaagccctgttggagcgctacatccccacggcggccatgggctgcgcctcgagctacctcacggcgggcgagacgggcgagtgcttccgcatgggcttgggcgtgaacgccgacgtgtcgggcttcaacagctcggccagcttcgacggcggcgtcgattgggaggccgagggcggccagtgggcgcgcttcctctacgacggcatgacgcagctgtcgcgccagccgtggttcaccgtcgaccgctgcggcaaccgtcttcgctacatggacagccgcgtgggcgaggacggcgcgaacgccatctacgcgctgggcgatctggccaccatccagatgacgccgccggggcaccgctcctacatcgtcttcgacgcgcactacgaggatcatctggccggcttcgcgcaggagcattgccgcaagctgatcacgcccgacctcgagcagatcgacaaggtgcccgagcattatcgcgactggcaccacggcgtgcaggacgccatcgacgccgacgtgctgaagaagcgcgactcgctggaggagctggagcgcgacctggggttcgcccccggcgtgctggtagaggccgtggagaagtggaacgcgtgctgcgagcgcggcgaggacgacttcatgtatcccatgcctcccgagtggctgcacgccatcaaggacccgccgttctacggctgccgcatcggcggaaacctgtacggcacgaaggcaggcctcatgatcaacgacgagatgcaggtgatctcgaccaagggcaccgtgatccccggcctgtacgcgggctggcacacggccggcggcgcgtgcggcgagaacagctacatcggcgaccctatcctgggttcgctgttgggcgacgtgagcctggcgttctgcggcgggtacttgtgcggcacgtacgccgtcgccaacgagatgaagggaggggagtagcatgaaagagcagttgaaggacatggcgcggccgtatgcgatgctgttcctgatcgcgctcgcggtggcgatcgtggggcgcatcgggctggccgtgatggacttgaccggaacgctttcctacgactacatctcggcggccgacgtgcccatcctcgacgtcgtgtgctccatcctgaccgggtcggcgctcgtggcgttcatgtacgcagcatcgctggcgatggtcgtgtccacggtgggcgtcgcgctgcacggtctgctgttcgcgcgccgcagcgagggcgcgggcaggccggcgactgcgtttctgtggggctgggcgacggcgcttgcggccatcgtgtgcctgctgatcacggcgagcgggatactctctgccgtgcaggtggcgtccatgagctcgaagctgccctccctgccgatgctcgtgctggcgctcgtggggttcgcggcgtttctcggcacgcttctgggcgcagcgtccatgacggtgtgcgcttgcctcgcgcgggcgcgcgacgagaagcgcgcaggctggaacctggtgctcgcggctttcgtctgcggtctcgtggtcatggttctcaccgtgggcacgttctcggccgtcaactcggccagcatccagctgggcacggtgggagcatggttcgccgccgacgtggtcgtgaacctggccatcatgttcgggatgggcgcgctggtgaagaagggtcgcgcgtagcatggaatcccggtcgcgcttctcctttcggacagggggaagcgcggccttcttttaggaaatatcccagtgtccggcgcgtgggcttccgacgcgccggacgcgcccgctttccttgagcgaagctatggcgcgctccgtcgtgcgtcttgccaggccgacggcttccgcgatctcggagaccgtgatcgaagggttctcggccatgaggctcaggatgctattcctcagcccgtcctctcgacgctcttccgtgcagaaaggctccatcgcatcgcggatggccgagagcatgaaggctacgaaggcggtcgaggatccggtcgcgttcgattcgttcaatgcggcgtagtacgcgtcttggcgctcccggatcatgctttcgatcggcagccaggcgagcacggagcgccatcgagccagcagcagcgtgtgccagagccttccgatgcggccgtttccgtcggagaacgggtggatgaattcgaactcgtaatggaatacgcacgaagcgagaagcgggtggagcttcgtcgaacccagccattcgaacaggtcggccataacttcgggaacgtaggatgcgggggttccggcatggatcaatcgatccccgtcgtatactcctgcgtttttcgtccggaaggttcccgcgtccttgcgcaggccttccatcatgacgccgtgggcctcgaggaggtcgtccatgttgcgcggatcccagttgccgagcaagtcgtatgctcgtttggcattccggacctcccggatatcgtcgggcggaccgaagacgcgccggccgtcgatgatatcggtcacctgctccattgtgagcgtgttctgctcgatagccagagaagagtgtatggttttgatacgcagctcgcgatggaggacgggcgaggaggacagcgcggagtcgggtgcgagccgtcccaccatctcggcgatatccaaggcggttgcagtaatcttgtcggtggggtcgaagggcggttcgtacaccagaggcctcctctcgaatattttaccgccagtattttaccgccaatggcggtaaaaagaaagtgcgagcgtcttgctcgtcttttttccggtgcggagaaggtttttgcatgcggaagtctggcatcggcgatccatgcgcagacggcgtgcgcgtcagtcgatgggctggaggaggccgagcgcggctttgcgctcggcctccttgcgcgcttggacgtcggcgatgacgatgcgccaggtgcgcgcgagagcatggcgctgtcggcgatcgagcctgctccaaaggtgcttgcgcgcaagcaaggcgacggttcggacgatgatcctctgctgtcgttcgccctggggcatggcagcggcgaacacggccttgcggtcgcgggggctggccagcctcacggcccattcccgttcgacgagcctgtcgacagcccgcgcaacggcgaccggggtcatctgcagctgatcggctatgtcgccgatgcgaagcggctcgcccacctcgccgaggcgctgaagcacgcggcactcgctgagggatgctccgcacgcggattgcaaggcgctctccatcgcgcgtttcaccagctcgagcgacacgagcgcgcgcgaagcggcgaaacggctggcggcctcgccggacggtgccgcctcgatgctcgcgccggccgcgatggaggcttcgaggatggtgcggtgggcagcgtcttcggtggggaacagggcgtagaggcgctcgacgagcgcgtcgttggcctgcgccacatggcttgctccggcgtcggtgatgcccacggtgcgcacgcgcctatcgccgtcgccggcgcgccggcgcgtcgcgtacccggcggctgcgagcgcgttcacggcctgcgtcaccacgttcggcttgaggtcgagcgtctttccgaggctggactggtcgatgccgtccgggccagcggacagcagcttcaccagcacgcggtactgcgtcacgctgaggctgctggcctgcgccagcccgcttttgagcgcgcgatgggtgaggtcgaacgcgacgaagaacgtcgagtcgagagaaaggtcgcgctcggtttcgatcccgcccatgctcaaccccctccttttttcgcgcgctctgcagttcgttcatcggtgaaacgatattgtagcgcgagcatgagcggttcggggaaaacccatcagagcgccacttcgccgtcgccgaaggcaaagcagcgacgagggacgaacgcgcatgcgtccgagcagcaagcctttccttcgcatgcacgtttttgtcaagcatgtacgggcattccgacccgttttccttgtcaaaagcgtgcatgtaggcaatacgccgttcgtgcacggcggcgctctcgcgcgcgaggatgcccttttccggcgactgcgcgcttagcggcgcgcgcgccagcgtccgatggccttcgcgatttcggtctgcacgacggacagcagggcgaagcccaccacgagcgcccactgaccgaggtccatcgtcgtgccgccgaacgcgtcgatgaagggcggcaccagcagcacgaccagcatgagcgcg

SEQ ID NO: 9298 - DNA, 9965 bp, Unknown
  gut microbiota DNA sequence
ctcggtctgtacgacggacagcagggcgaagcccaccacgagcgcccactgcccgaggtccatcgtcgtgccgccgaacgcgtcgatgaagggcggcaccagcagcacgaccagcatgagcgcgatgctggccgccgcggcgagccccagctggcggttgcgggcgccctcgcggtcccagacggggtcggtggcggagcgctggttcagggagcgcagcacctgggagaatcccagcacgccgaacgccatcgtgcagcccagctcgtagctgcccgcgttctggccgatcacgaaggcgaccagcgcgagcgccgcgatgaacacgccctgaaagataacgcggcgcgctagcgggccgtccagcaggttgttcacgcgcatgggcggatgctccatgatgtggcggctggcgggctccacgcccagcgcgagcgcgggcagcgacgcggttgccaggttcacccacaggatcatgacggcggtgagcggcgcgttccagttcaaggccacggcggtgagcagcaccacgatctgagccacgttgtcggccacgaggaaggagaccaccttctggatgttgcggaacacccggcggccctcgcgcacggcgtagacgatggtggtgaagcggtcgtccatgaggatcatgtcggaggcgtccttcgccacgtcggtgcccgtgatgcccatggccacgccgatgtcggcggctttgagcgcgggcgcgtcgttcacgccgtcgcccgtcatggcgcacacctcgccggcatgctgcagcgcgcgcacgatgcgcagcttgtgcaggggcgacacgcgggcgaacaccgaggtgttgcgggccgcctcgtcgagcgccgcgtcgtccatctcgtcgagctcggcgcccgtgaccacgaggtcgccgggacggaagatgtccagctcgcggccgatggcgcgcgcggtggaggcgtggtcgcccgtgatcatgacggtgcggacgccggcggtgcggcaggtttccacggcctggcgcacgtcgggccgcggcgggtccatcatgccgacgaggccgatgagcacgagatcgcgttcgatgtcctcgacgtcgccgggcacgccgggcagggcgcgggtggcgaatgccagcacgcgcagcgcctcgtccgagagccgttgcgccacggccagcgcgcgggcgcgatcctcgtcggtcatcggccgcgggccgttctcgtccatgatgaaggcgcagcggggcagcagcgaatcgatcgcgcccttcacggcggccacgatctcgccgtcgcgctcgtgcacggtggacatgcgcttgcggtcggagtcgaaggggcgctcggccaggcgcgggtaggtcgagcgcagcgcggtcgggtcgatgccgttgtcgcgcgccagcaccagcagcgcgccctcggtggggtcgccgatgaacgcctgcgcccccggcgcgccctcctcggcggacgcgaacgcggcgtcgttgcacagcacggcggcgaacgcgaggtagccgaacaggtcggggtgctcctcgagcgcctcggcgggctcgagcgcctcgtcgcggtcgaggtcggggcccagcgacacgcgcacgacgctcatgcggttctcggtgagggtgcccgtcttgtccgtgcagatgacggtggcgccgcccagcgtctcgacggccggcaggcggcgcacgagcgcctcgtggcgggccatgcgctgcacgcccagcgccatggtgatggtggcggtggcgggcaggctctcggggatcaccgagatggccagcgacacggccagcagcagcaagggggcgaacgggcggccgtaggccaggccgacggccagcacggccagcgccgccgccacgcccacgatggtgaggatcttgccgaacgaggccagcttgcgcttgatgggcgtgtccagctcctcgtcgccttccagcatgccggcgatgtgcccgacctcggttcccatgcccgtggccaccacgatgcccgccccgcgtcccgcggtgacgatggcggtggcgaacgccatgttcgaccggtctcccagcggcgcgccgggcagaaccacggcggaggcgtccttctcgacgggcaccgactcgcctgtgagcgcggcttcctgcatgcgcagcccggccgcttcgaccagacgcaggtcggcgggcgccatgctgccgtcgcccagctgcacgaggtcgcccggcacgagatcgcgcgcgggcaccaccatctccacgccgtcgcggacgacgcgcgcctcgggcgcgctcatcgatcttagcgcttcgagcgaggattgcgccttgcgctcctgcacgatgccgatgaccgcgttcaccatcacgatggcgaagatgatgccggcttcggcccattcctgcagaagcgccgacagcacggccgccacgaggaggatgaggatcatggggtcggtcagctgctcgcgcgccatctgcgccagcgtgcgcggcggcttcgcgttcagctcgttggggcccgtctcggcgaggcggcgcgcggcctcgagctcgctcagcccttcgagcgaggagtcgagctcgaggaggacgtcggaaaggggctccgcctgccagggtcgggatgcgggcggtttgacgggtgcttgagtgttcggcatggagcttcctttgcgcggtcgttgcgacggtgttcgcttccacgatacccgtccgcggctcgcgtcgatcgaaccgtcacgagccggttgccaatcggacggtcgatcgttcggagggcattccccgtcccgtcggtcggcgcggcgcgacgtcctctcgccgcgctcgggcgctttccgttagaatggtggtctccgaaggaaaggaagccccgtgaccgcgaacctccgactcgaccgtctcccgcgcaccgtggagctggcgcgcgccgccgacggcgccgcgacgctcgcctacgtcgaccagcgcctgttgcccggcaagctcgcgatcgagcgaaccgcggattggggggcggtggtggacgcgatcaagacgctcgcggtgcgcggcgcgcccgccatcggcgtggcgggcgccgctgccgtggcgctttgggctcgggaggccgccggcggcgccacgggcgcgggcgaggtttccgcgtaccgcgccgcgctcgagcggacggccgaggagatcgcctgcgcgcgcccgaccgcggtgaacctgcgctgggcggtcgagcgcgtgctgggccgcgcgcgtgttgcgctcgacgggggcgcggctcctgcggccgtggccgacgccctgttcgcggaggcgaagcgcatggaggccgaggacgaagccgcgaaccgcgccatcggcgcgcacggagccgcgctgctgcggcagggcagccgcgtgctcacgcactgcaacgccggaagcctggcgacggcgttctacggcacggcgctcggcgtggtatacgccgcggccgagcagggcaagatcgagcgcgtgtacgccgacgagacgcgcccagtggggcagggcgcgcgcctcacgtcgtgggagctggcgcgcgcgggcgttccctgcacgctcgtctgcgacaacatggccgcaagcctcatggctaaaggagaggtggacgccgtgatcgtgggagccgaccgcatcgccgccaacggagacgcggcgaacaagatcggcacgtacggcgtggccgtgctcgcccgccatcacggcatcccgttctacgtggccgcgcccacctccaccatcgaccccgcgatcgcggacggctcgggcatccccatcgaagagcgcgatgcctccgaggtcctgcccgtcgcgatcgagggcgtcgacgtgtggaacccggccttcgacgtgacgccggccggcctcatcacgcgcatcgtcacggagcgcggcgcgttcgagccggataagttggtatactgatcctgcaggtcgccgacggacgggcgacggaaaaggagggccttatgcgcatcatccatcgcgaggaccaagagcagcgcgagcacgtggagctttcccgcgacgcggcgttcgccgacgagagcgacggccgcgaccgatccgccgagcccgacatcctgcgcaccgactaccagcgcgaccgcgataagatcctccacacgaagtccttccgccgcctgtcgcacaagacgcaggtgttcctggccgccgagggcgaccacttccgcacccgtctcacgcacacgctggaggtggcgcagatcgcccgcaccatcgcccgcgcgctggggctgaacgaggatctcgccgaggccatctcgctcggccacgacctggggcacacgcccttcgggcatacgggggaggaggcgctcgcgcgctgcctggcgcgccacaaggggatcgacccggcatcgcccgaggcggaggcgctctaccgccacaacgagcagagcctgcgcgtggtcgagcgcatcgagaacggcggcaagggactgaatctcacgtccgaggtgcgcgacggcatcctcaatcacaccggcgacctgcgcgccgagacgctggaggggcgcatcgtgggcacggccgaccgcatcgcgtacgtcaaccacgacatcgacgacgccatccgcgcgggcatcctgcgcgaggtcgacctgccggcgtcgacgcacgccatgctgggccccgaccattcgtcgcgcatcgagacgctcgtgctcgacatggtggagacgtcggccgccgtcgacgacatccgcatgagcgacgcggtgtggaacgccatgatggagctgcggtcgttcctgttcgagcgcgtgtacagcgcccctgccgtcaccgacgaggtggcgaaggcgacgcacctcgtggacgacctgttcgactactacgtggcgcacacgggcgaagttccgcaggagtaccgcgccatctccgagggcgacgacctgcgcgccgtcaccgacttcatcgccggcatgaccgaccgctacgccaagaacctctaccaaaggctgttcatccccaacgcgctgcattactaggttccctcggcctaaggacatttcttcgttgcgcaggtgcacaagaattgtataatcgtctaactatgctttccggggatcacatcaggcaatcgttttcggcggcgctgcccatcatgctgggctacgtcgccatcggcataccctgcggcatcctgagcgcttccatcggcatgaacgagctgcaggtgttcctgctgtcggccgtgttctactcgggcgcgggccagttcatgatcccgaacatgtggctggccggctcgccgctcgcgtccatcatcgccagcgtgtcgctggtgaacacacgccagatgctgtactcggcctcgttcgcgccgcgctgcgagcgtgtgaagaaacgcctcgcgtttctgttcgcggctacggtgaccgatgagagctacggtgtgaacacggcgaagttcgaggagggcggctggtcggttggccgcgccacgctcgtgaaccttttctcgcaaagctcgtgggcgctgtcgaacgtggccggcgtgctcgtgggcaacgccgtgggcatcccgctggccatagcctccttcgccatgacgtccatcttcatctgcctgcttgtcacgcaaaaggtgacgccggccaacgtggtggctgcggcgttcgccatcctgggcgtgtacacatgcaagaccatcgggctttcgggccccgccatactcgtgggcgcgctcgtgggcgtgatggcggcgctgctgttcacgtgggcgaaggagcgcggctgatggaaccgatgggctggggcgattacttcatcgtgctggggtgctgcgcaatcaccatgctggtctgccgcgtggtgccgctgttcgttctcaagggcaaggaactgccggaaggggtcgggcaggcgctcggcttcattccgccggccgcgttcgccgcgctcgtcgcgaacgaccttttgacgcccggcatgttcgacgcaggcctgtggccggcagccgcgcccctggtcgccgcgcttgcggtggcgctcgtcgcctggaagacgaaatcgcttctgtggtgcgccgtctcgggtgtggccgcgtacgcgctgctcatgctcctgtagaggccgtgcgcatcggaagaccgggccggaagcgcggcggaattcggcattatgcgtggagagcccaagtttttgcgcatgtgcccaggtttttccttgcagtaccgttccgttgacggtatactatccaatcgtgtctttactagacgacatgcaattaggtttcattgaatatataagaaggaacgggtcatggatatcattcgcgccatcgaacagcagcagatcaagcaggacgtccccgagttcaacgtcggcgacaacgtgaaggttcactaccgcatcaccgagggcaaccgcgagcgtatccaggtgttccagggcgatgtcatccgtcgccagggcgcttcgaatcgcgagacgttcaccgttcgcaagatcagcttctccatcggcgtggagcgcaccttccccgtgcactccccgaagatcgagcgcatcgaggtcgtgcgtcagggcgatgtgcgccgcgccaagctgtactacctgcgcaagaaggtgggcaaggccgcgaagatcaaggagaaggcgtaccgctaggccttctatacgcttcagatttgcaggaacccccgtcgtccttccggacggcgggggttccttttttacaggggcgggcgaggccgcgcagcgcctttctggtatcatggtcggtcgaagaagagcatgtcgagggggattcatggaaccgaccgtcgccgatatcaagcaacgcctgcacgaagccgacgagcgcgagttcgcggtgctcgagcgctcgctcgtggccgacgcgcgcaagggcgtgcgcgacgccgtggagcgggctcgggcgcgtctggcggccgaggcggcggaacggcagcgactggcatcgttgtacgcgttcgagcgcgcgctggctgcagggcgcggcgacggcgtgatcgtaggtctcgacgaggtggggcgcgggccgctcgccgggcctttggccgtgggcgcggtggtgctgcccgccgaaccgttcatcgagggtctcaacgactccaagcaggtgaagcccgaggtgcgcgagcgcatcgccgtgcaggtgaaggccgtggccgtggcctggacggtcgagtacgtggaggcgtccgacatcgacgcttgcggtatgacggcctcgctcgcgctggcgttccgacgcgcgatcagacgcatcgaggaagcgggcgtgcgccccgacgtggtgttgctcgacggcaacccgatgcgcctcgacgagcgcgaggtgaacgtggtgaagggcgacgggaaatgcgcctcgatcgccgccgcctccatcgtggcgaaggtggagcgcgacgcgctcatgtgccgctacgccgaggagtaccccgaatacggcttcgacgcctgcaagggctacgcgagcgcggcccatatcgaggccatcaagcgctacggtctcacgcccatccatcgcgcgacgttctgcacggccttcacgcaacctgctctgttctagcgcctccgcgtccttccacacgtttccaccgctgcgttttccacgcttgcgagccgttcggcgcgccttcgggtgcaagctggacggcttttccatctgcggtttctcttcggtgcggaatctgcgtcgaaagtgcatggacgatacgttcgatccgcgttggaaacggaggcaaggcgcgtgtcatccgcatggaaacggcgtgtctttccgggaaggtttcgcggtgcgtttcgctggatacgtgccatcgccgcgtaagacggcatccttatcatggaaccacagacgaaaggggcgtggtgccatgtatcaggatacggcggcaacgatcgaatggcaggacggtgagcaggcggcgtgcggaaagaaggccggcgcgggcgagcggcgaggagtaggctcgggggccaagcggcgtgcgaaacggggcgaacgggcgcaggatcgcgagaagacggcgggggggcgcaacgcggagctggggcgtagaggcgaggacgccgccgctcgctttctcgaccggcgcggctacgagatcgtcgagcgcaactggacgtgcgcggcgggtgaggccgacatcatcgcgcgcgacggcgacagcgtcgtgttcgtggaggtgaagaccaggtcgagctgcgactgcggcatgccggcggaagcggtggacgaggccaagcgcgaccgctacgagcgcatcgcggcgctgttcctgcaaggcttcgacgtggtggacgtgccggtgcgcttcgacatcgtgtccatcgtggcgatctcgcccgaccgcgcgatgatccgccaccacatcaacgcgttctcgggccgatgagcgtgcgggggcagtgcgtcgtgcggtccgcgacgctgcgcggcgtggaagccgttccggtcgacgtcgaggtggtcatggcgaacgggattcccggcttctccatcgtcggcttggccgacgcctccgtgcaggaatcgcgcgagcgggtgaaggcggcgctgcgctcgtgcggcttctcgctgccggccagcaaggtggtggtgaacctggcaccgggcgtcttgcgcaagacggggtcggggttcgacctgcccatcgcggcgggcatcctgtgcgcttcggggcagttagacccgcgtgcggtgcgcggccagctgttcgtgggcgagctgtcgctcgagggggcggtgcgcccggtggccgggctgctggcctacgcgctgtgcgcgcagcggttgggcgtcgacctcgtatgcgcgccggtcgaccagggtttcgtcgcgctcgacgggttggtgcgccgtgcggcgaagtcgctggcggggttcaggacgggcctgttcccggccgtggccggcgcggcgaagccgagcagtgcgcccgcgcttgacttccgggacatcgccggccacgacatggcgaagcgcgccttgcagatcgcggcggcgggcggccacggcgtgctgatgacgggaccgcccggttcgggcaagaccatgctcgcgtcgaggctgccgtccatcctgccgccgctgtcggaggccgaggccatcgagacggcggtggtgcactcggtcgccggcgaggaggtggaaccgatcctgggcggggtgcggccgtttcgcagcccgcaccactcggccacgttggcggggctggtcggcggcggctcgcccttgcgtcccggcgagatatcgctcgcgaacaacggcgtgctgttcctcgacgagctcgccgagttcagcccgtctgttctccagggcatccgccagccgctggagtcggggcgggtcaccctcacgcgcgccgacggcaacgtcgacttcccggcgcggttcatgctggtggcggccaccaacccgtgcccctgcggctactacggcgacgaggaggagccgtgcacgtgcacgcaccggcagatgcagctctaccgcaaccgcatcggcggacccatcatggaccgcatcgacgtgcatatcgcggtgcgcaggatcccgcccggcgaggtgctggccaccgggcacggcacgagctccgaggagctgcgccgcgatgtgctgcgcgcgcgggagttcgcgtcgtggcggcgcgcgcgaaacggggaggacgacaaggcgctcacgtcggaggcgcttgttcgggcctgcgcgctgacgacgcaggacgagggcttcctcgagggcgcggcgaaggcggggcgcctgagcggccgcgccatcatgcgcacgctcgcgctcgcgcgcacgatagccgacatggaggagagcgcccgcgtggagcgcagccatctgtgcgaggccatcggcttccgcctgcgcgagggggaatcgtgagcgcgctcgctggcgagcgcacggtgctcgcgcgcggcggagaaggcttcccttctgcgctggaaa

SEQ ID NO: 9299 - DNA, 514 bp, Unknown
  gut microbiota DNA sequence
gggcgcgcgcagggccacgccgtacgggcgcgggtgcgccaagcgcttcgcggccttggccgcccggcgcggcatcgtagtggtgtcgggcggggcgcgcggctgcgacgcggcggcgcatgcggccgcgctggaggagggcgggcgcacggtggcgtttctgggcggcgggtgcgaccggctgtaccccgccgagcacgaggggctgttccagcgcatcgtcgacgggggcggggcggtggtttccgagcacgtgtgggacgaggatcccaagccgtaccgtttccgcctgcgcaaccgcctcatcgccgggctcgcccgcgccacgctcatcgtggaggcgggactgccgtcgggaaccttctccacggccgacgaggcgctggcggcgaaccgcgacgtgcttgtggtgcccggcgccataacggccgtgtcctcgcgcggcgcgaaccgcctcatctaccagggcgcgacgcccgtcatcgatgacgagacgttcgaggatgcgctgttc

SEQ ID NO: 9300 - DNA, 1651 bp, Unknown
  gut microbiota DNA sequence
cgtggtgcccggcgccatcaccgctgcctcgtcgcgtggcgcgaaccgcctcatctaccagggcgcgacgcccgtcatcgatgacgagacgttcgaggatgcgctgttctcgctgttcggatgcctgaagcaggagaccgtcccttccgtcgagcgcaccggtgcgccgcgtgcggacgagccgtcgaacccggtggcggacgcgctgcgcgccgagccgctgagcatggagcagctctacgcgatcgccgcctcatcgtgcggcggggaggatgcgcgatcctggctcatggagcgcctcgtcgaagccgagctcgccggcgccgtcgcccgccaccccgacggccgctggggcccggcggtgagatgagagaggaggagcgcgatgacgacgttatccatgttctacggcatcgtgatcattatgtataatgaggcggacggcaggcaccatacgcctcatatccatgctcggttcgcggaattcgaatgctctatcgatttcgaaggcagggttttcgacggccgtttccctcctcgaaagctcgcgttgctccgagcatggatcgtgcttcatcaagaggagctggaggccgattggaagctcatgagcgaggggcttgccgcatttcggatcgatcctttgcgataggcggtggtagcatgtggtatccggtgctcgatgaagagcgcgggatggtgatgaacaaaagccaacccgatctggttgaggtcgttgccgaaggaggctgccttctgctgctggagtttgaaacgggcgagcttcgccggctcgacgtctcgtcgttcctcaaacgcggaggcgcgtatgaacggctgcgggacgacgagtatttgaagctcgttcggatcatcgacggcgggatggcgcttggatggccggacggccaggaagtgtatccggaggccctgttcgcgatgagcgagcgcgttcggtaagaaacgcgcgtagtttcgagggtttccggatgcgctggagcctgtgttttgctatcctagtcggcatgtctcaatcagtaaccatagtaggggccgggctcgctgggagcgaggcggccttgcagctcgccgatcgtggcgtgcgggtccgtttggtcgaaatgcgcccgaagacgcccacgctcgttcatgtcacgggatgctgcgccgaactcgtgtgctcgaactccctgaaaagcgagaagcccgacagcgcggccggcatgctgaagcgcgagttggccgagctgggatcgcagctgtacgcccaggccaagctgcatgccgtgcccgcaggcggtgcgctggccgtcgaccggacggcgttcgccgaggcggtgaccgcgctcgtggaggcgcatccgctcatcgatctcgtgcacgaggaggtcgtcgacctcgttcaagccgccgagggcgccgatgcgctcgtggtggccgcagggccgctcgcgtccgacgcgctggccgcgtcgctttcccggctcgccggcgaagagcacctggccttctacgacgccgccgcccctatcgtcatggccgattcgctcgactacgcgaagctgttccgccagagccgctacgaggacgccgccgccgatgcgggcgactacctgaacgcgccgttctcgcgcgaggagtacgacgcctt

SEQ ID NO: 9301 - DNA, 1848 bp, Unknown
  gut microbiota DNA sequence
agccggtggggctcaccgacccgcgcacggggcatcgcccatgggccgcgctgcagctgcgtgccgaggacgcgcacggttccagctacaacctcgtggggttccagacgaacctcaccttccctgagcagcgccgcgtgttccgcctcatccccgggctcgagaacgccgagttcgcgcgctacggcgtgatgcaccgcaacacgttcgtggacgcgccgcgcctgctggacgaaagcctgcgcctgcgctcgcctgaggcggagcgcctcggggttccggtgcaccttgccggtcagatcgcgggcaccgaagggtactgcgaggctatccgctcggggctccacgtcgccttcgccgtggccgctgagcttcgcggcgcgcaggcgcccgcgctcccgcgcgagacggcgttcggcgcgcttctggcttacgccaccgatcccgccgtcaaggactaccagcccatgcacgtgaacttcggcatcctgcccccgttcgagcagcgcatccgcaacaagcgcgaccgctacgccgcctacgccgagcgcggcgccgaggcgctcgcggcgtacaaggccgagctggccgcgcgcggcctttcatccgacgcagccgctcgcccggaggcatcctcatgactgcagacggtgcctcgtcgtccctgcgcgtcgaccctctcgactgcgatccgcgcatcgtcgagctgatcgacgcgttttgccacgccatgcgcgtggagcgcaacgcctcggtgcacacgttgcgcgcctaccgcatcgatcttatggacttcgcgcgttgggcgtgccgcgagcgcatcgacatcctcgctgccacgcatcgccagttgcgccgttacctgggcgagctcgaccgcgcacagtactcgcgcaccacggtgaaccgccgcctgtcggcgctgcgcagcttcttccgctggctcaacgtcaccggcatcgccgacgaggaccccgcgagcattctgcaggggcccaaacagccgaagagcctgccgcacgtcatccgggcgtcggacatggtgaagctgctgacggtgtacggcaagcgcgacgcggccgggcgcgagcgcgaacagtcgtccgtggatgcgcggaacctcgctctgctggaattcctgtacgcatgcggcgcccgcgtgtccgaggcgtccggtctgcttgcggccaacgtggatttcggaagcgggcaggtgaaggtgttcggcaaggggtcgaaggagcgcatcgtgccgttgcacgacatggccgtgtcgtccatgcgcgcctatgccacgtgggcccgcccgctgatcctgcgcgaccgcacctgcgactacttcttcgtgtccacgcgcggcaaccgcatgggcaccgacgccatccgcaagatgttcaaggacgcgctgcgccaggcaggtctggacgagtcgctctcgccgcacgatatgcgccataccttcgccaccgacctgctggacgggggcgccgacctgcgcagcgtccaggagatgctgggacatgccagcctgtccaccacgcagatctacacccatctttcccccggccgcctcaagcaggtgcacgctcgcacccacccccgaggatagagcaccgtgtcgaaccacccgtccctttgacacgctttccgtccccttgtgcgcgcttttccggttcccggccggttgcggagctgtgaccgcttcctgacggtcgccgcgcgccgcgcagccttcccgcctgttcctccacaatcgggtgcattcgtcgtgcatgttcgcgatgtgcgcgttgcgcaccgaccataaggaggtttccatgagcaagaagaagatgcgggcgttcgccg

SEQ ID NO: 9302 - DNA, 2959 bp, Unknown
  gut microbiota DNA sequence
acatgctcgcgatgtgcgcgttgcgcaccgaccataaggaggtttccatgagcaagaagaagatgcgggcgttcgccggcgcgatggccgtcgtgctcgctttcgtaccgtttttgagcggctgcgcggccaacgacgccgaggacaacccgcaggcccagcaagagctgaacgccgacgagcaatcgcgcaacgaggccgagggctccatcggcgagaccgtgcaatacggtcaggtcatggctatgaacggttctacggccacggttgtggtaggcaccctcgccaatgcgaacgacggcagcggctcgcaggctttcaacgcgggtcaggacgagataaccttcgacgagggagacgtttccatcgtcgatgaatcgggcgccgaactcgagggccgcaccctttccgccgacgacgtcatcgtcatgcgcggcacgggatcgggcaccgacttcaagcccacgaccatcgagatcctcgacgttgcaggcgcgggaacgaatgccgacgatgctcgcgttccccagggcgtcaagtagcgcgtcgacgccgcgccgcaggccgatatcgcgctatggagaacgtcggcgcgcccttgcccccgtcgagttcgagcctataatgttcagatgcccgcgcgcggcctccgcgtcgcgggcgttcggatacaaggcgcatcgaaggagcatgacatgcagctgctgaaggtttcgaccgacaaacttctgctcgtcgccggcatcgtgtggctcattgccggcgcgaacatcgtgaacatcggtctttcggctttcctggacgagaccgggtggctgttctgggtcttgataggggggaccctcctcatattcgtgctgttccatatcttcgtgttcaccaagatggttggcaagcatgcgagcaggatcaggggctacgaggaagacaaaacccacctgttcaagttcttcgataaaaagggctacatcatgatggccatcatgatgggcggcggtatcgccttgcgcgcatcgggcgtcgtgcccgagtggttcatcgcgttcttctatacggggttgggcgctgcgttggcggttgcgggcgtcagcttcatactgcgttacttcaaaagctcgaagcctgcgtgtccggcgatgcccggcacgtacaccaaacatcataaggaatagcttcggggcggcaacgaaacggttacgcctcgccgacggaagcgcttcgctgcgtaccatggggaggtatcgaagtcgagggatccgtcttatgcggacggtgtgaggagggcgaatggcacggatattcgtcgtggaagacgacgcgtcgttgcgcgaggagcttatgcgcctgctcgaactgcagggtcataccgcgctgaccggcaccgccttcgaccgcatcgtggacgatgttttggcggctgcgcccgactgcgtgatcctcgacctcaagcttcccggcacgggcggccatacggtctgccgcgatctcaggcgctcgagtcaagtgcccgtcatcatgctcacgtcgtccgacagcgagttcgacgaggttctgagcatgaacctcggcgccgatgactacgtcacgaagccttacaacccagccgtgcttcttgcgcgcatccaatcggttctgcgccgtacgcagcgtaccgagccgccgacgcgtatcgagcatcgaggcgtggtgctggacgtggcgcgcgggcgggtggagcacggcggacgttccgtcgacctgacgcgcaacgagctgaagatcctccacatgctcatggcgaatcacgacgccatcatctcgcgccaggagctgatggtggagctgtggcagtccgatgcgttcatcgacgacaacacgctgaccgtcaacatcaaccgtttgcgcaagagcctggcgagtatcggcgtgcccgacgacttcctcgtcacgcgccgcgggcagggatacgtggtgtgatgcgcgcgccccgacgactccgggggtgccgtgcgcgatgagcccggcagcctttctcagggatcgtgccctttccgtcgccgtcgccatcgtgtgcgcgatcgcgatcggctccgtggtcgccgtgctcggtgccggtccggacgcctcggtgctggcggcatgcatcgtgctggcatgcgcggccttcgccctgacggtggactacgcgcgtcgtcgcgcgttttaccgcgatctcgaacaggtggtgggagacctcgaccgcacctattacgcaacggcgctcatagaacctcccgacttcctggaaggacgcctggcttacgaggccctgcaggcgacggggaaggccgccgccgacgacgtggccgcgcacaagcagcaagccgaagcctaccgcgattacatagagctgtggatccacgagatcaagacgcctatcgccgcggcggcgctcatggcctcaggcttgcacggtccccaggccgcacggatcaagggcgagctcgaccgtatcgagggctacgtggagcaggcgttgtactatgcgcgctccacctcgctcgtccaggactatgccatccgcgagacgagcctcgccgaggccgtgcgggaggcgctgcggaagcatgcgcgcttcctcatcgagcgcggcgtggcgccgacggtggacgtggacgaagacgttcgcgtgttcgccgacgtgaagtggctcgctttcgtcatcggccagctcgtggcgaatgcggggaaatacggcgcgagcacgctgcgcttctcggtgcgggaggagggagcagggaccagcgacgcgcgcacggtgctcgaggtggccgacgacggctggggcgtgccggccggcgacgtgcctcgcgtgttcgagcgcgccttcaccggcgagaacggcaggcgtgcgggctcgtccacgggcatggggctgtacctcgtggccgagctgtgcgcgaagatgggtctcgccgtggcgctggcctcggaagagggg

SEQ ID NO: 9303 - DNA, 186 bp, Unknown
  gut microbiota DNA sequence
cagcgcctgcagccgctcgcggggaaggctccccgcctgggcgtcgcgcagcgcctgagcccgccacaggccgagcgacccctcggctcccgccgcgcgcggcgaaggctcccggagaggatgcgcctgcttgaacgcccgataggcgtcgagcgaatcccaccaccacgagcgagcgcggcgata
